United States Patent Application Publication US 2011/0296543 A1 - sequence listing, part 10

SEQ ID NO: 43112 - protein, 253 aa, Unknown
  Obtained from environmental sample
  DOMAIN (195)...(250): R3H domain
  misc_feature (1)..(253): Xaa is any amino acid
MEYEFEGRTEKEAIDNAAKELGLEKDDFDVEILETQKNGLFKKGFVRIRVHTGNTTFPRNESHGNAFSGNNFSSKNSDAEDTEARHRTGGSKAIFGEPVPQNEFEEKMSEFTTGIIERMGYPGKVTILFREKHKIGIKIDSEHSSILIGKKGKNLDALQLLLNIYAGRLGRDDMRVILDTENYRIRREESLVRLAYNVAEKVRESRDSVLLEPMNPFDRWLIHTTLNDINDVETKSEGDGLYKQVRVFYRGLK

SEQ ID NO: 43113 - DNA, 963 bp, Unknown
  Obtained from environmental sample
  misc_feature (1)..(963): n is a, c, g, or t
ttgcaggtattattcaaaaaaggagttagcctaagcgaagatgaaatttttgtcagtgatggggcaaaaagcgacctcggcaatattctggatattttttcttcaaaaaacaaagtgctgataccagaccctgtttatcccgtttatgcagacacgaatattatggcaggcagaaagctctcttatatgaacggaaatgcaaacaatgattttttgcctttgccggataaaaaaacaactgcggatattatatatttgtgttcgccaaataatcctactggagcggtttataacaaggaacaacttaaactatgggttaaatacgccttgaaaaataaagctgtgattctctttgacagtgcttatgaaatttttgtacaagatgctgccttgcccacaagcatttaccaaatagagggagcggaaaaatgcgccattgaattttgctctctttctaaaacagccggatttacaggcactaggtgcggctacacaattattccgcacaaactaatccgtgagcgtacggctttgaacaagctatggctacggaggcaaacaacaaaattcaacggagttccttatattgtgcaacgcggtgctgaggcagttttcaccgatgagggattagctgaggtcaagagcaatataagttattaccttcaaaacgcagaaataatagcgaacactcttaaatctcttggtatttggtttgttggcggcaggaattcgccatatatttggctcaaatgccccaaaggtttgtcgtcttgggagttttttgattttctgcttgaaaaagccagcgttgtaggcactccgggtgcaggctttggaaaaaaacgagagggatttttccgtttaactgcttttaaccataagagaatgttagcgaggcaatggagaggattaaacgctatctttccgattaaaaaaatttctatattttttcacgttagttga

SEQ ID NO: 43114 - protein, 320 aa, Unknown
  Obtained from environmental sample
  DOMAIN (2)...(307): Aminotransferase class I and II
  misc_feature (1)..(320): Xaa is any amino acid
MQVLFKKGVSLSEDEIFVSDGAKSDLGNILDIFSSKNKVLIPDPVYPVYADTNIMAGRKLSYMNGNANNDFLPLPDKKTTADIIYLCSPNNPTGAVYNKEQLKLWVKYALKNKAVILFDSAYEIFVQDAALPTSIYQIEGAEKCAIEFCSLSKTAGFTGTRCGYTIIPHKLIRERTALNKLWLRRQTTKFNGVPYIVQRGAEAVFTDEGLAEVKSNISYYLQNAEIIANTLKSLGIWFVGGRNSPYIWLKCPKGLSSWEFFDFLLEKASVVGTPGAGFGKKREGFFRLTAFNHKRMLARQWRGLNAIFPIKKISIFFHVS

SEQ ID NO: 43115 - DNA, 1107 bp, Unknown
  Obtained from environmental sample
  misc_feature (1)..(1107): n is a, c, g, or t
ttgaggaataatatgcaattagaaggtcaaacaagaataccgtccggctgtgccatatctggggttataaacaagtccagaaagcgcatgagcggtgaggctattataaaatccatttctgttatgcacgaccgctcaaatggtttgggtggcgggtttgcggcttatggaatttatccagaatacaaaaactattatgccctgcacatgttttacgattccattttcgcaaaaagggaatgcgaggaatttttggaaaggcattttgatattatcaatctttcaaagataccaactagaaaaattaaggaaattaccgatgagccgcttatttggcgttattttgtggcacccttgcacaccaaacttgagagcagccagttagatgaacgcgaatttaccagtaaatgcgtatttcgcataaataccaaaataaatggtgcctatgtgttttcaagtggcaaaaatatgggcgtgttcaaagcggttggctttccagaagatgtgggtcgtttttaccgcttagaagaatacgagggctggtgtttcacggcacacggacgttatccaaccaataccccaggctggtggggcggcgcgcatccatttaccttattggattattctgtggtgcacaatggcgaaatatcctcttacgatgcaaaccgcanggctattgaaatgtacggctacaaatgcactcttcaaaccgataccgaggtcatcacctatattattgattatctgcacagaaaacaaaaactttcttttgacgaaatctcttccgtaatcgccgcctcattttggcaaaccattgataaacagccggcaaaagaacgtgaagtacatgaatatttgcgcgtaatgttcagcccgtatcttataacaggtccgttttctatccttgtgggttttgacggcggacttatggcgttaaacgacagacttaaacttagaagcatggttgtcggcgagaaaggcgatattacatatatcgccagcgaagaagcggctatccgtattatcgaaccgaaccttgacactgtatgggctcccagaggcggtcagcctgttatcgtcaatttaaacgacagaggtaaagcgtaa

SEQ ID NO: 43116 - protein, 368 aa, Unknown
  Obtained from environmental sample
  DOMAIN (137)...(337): Glutamine amidotransferases class-II
  misc_feature (1)..(368): Xaa is any amino acid
MRNNMQLEGQTRIPSGCAISGVINKSRKRMSGEAIIKSISVMHDRSNGLGGGFAAYGIYPEYKNYYALHMFYDSIFAKRECEEFLERHFDIINLSKIPTRKIKEITDEPLIWRYFVAPLHTKLESSQLDEREFTSKCVFRINTKINGAYVFSSGKNMGVFKAVGFPEDVGRFYRLEEYEGWCFTAHGRYPTNTPGWWGGAHPFTLLDYSVVHNGEISSYDANRXAIEMYGYKCTLQTDTEVITYIIDYLHRKQKLSFDEISSVIAASFWQTIDKQPAKEREVHEYLRVMFSPYLITGPFSILVGFDGGLMALNDRLKLRSMVVGEKGDITYIASEEAAIRIIEPNLDTVWAPRGGQPVIVNLNDRGKA

SEQ ID NO: 43117 - DNA, 441 bp, Unknown
  Obtained from environmental sample
  misc_feature (1)..(441): n is a, c, g, or t
atggcaataaatttaatatacccagaatatgaaatggtcagaaattacgacaggtgtatctcctgccgcgcctgcgaacgtcagtgcgccaatgaagcgcatgagtttgtcgaaaccgaaaataaaatgatatgcgacgacgcaaaatgcgtaaattgccatcgctgtgtttcactctgccccacccgtgcgcttaaaattgtaaaaagcggcaacacatacaaacaaaacatgaactggaactgcaaaacaatcgatgaaatttacaaacaggcgaactcaggcggaatgctgctgtcaagtatgggtaatcccgaagattatcccgtttacttcgataaaatactcttaaacgcctcacaagttacaaacccgtccattgacccgttacgcgaaccaatggagacaagaatatccttgggtatgaaaccggcaaaataa

SEQ ID NO: 43118 - protein, 146 aa, Unknown
  Obtained from environmental sample
  DOMAIN (12)...(35): 4Fe-4S binding domain
  misc_feature (1)..(146): Xaa is any amino acid
MAINLIYPEYEMVRNYDRCISCRACERQCANEAHEFVETENKMICDDAKCVNCHRCVSLCPTRALKIVKSGNTYKQNMNWNCKTIDEIYKQANSGGMLLSSMGNPEDYPVYFDKILLNASQVTNPSIDPLREPMETRISLGMKPAK

SEQ ID NO: 43119 - DNA, 909 bp, Unknown
  Obtained from environmental sample
  misc_feature (1)..(909): n is a, c, g, or t
atgggatcagaattcggcacgagcttgaacgtaaacagagcaacccctatagctaccgattttaacatcaatggaacaggttcattttattatgacggtatttcaaagactgttatcgtaacgcctaaagaaggaaaatccaatggaaccataacggtttattacgaaggaaccggaagtacaacatatacaaaaagcataaccgctccctcggcagttggcacatacacagtaacttttaacgtggcagagacaataaattttgatgccgcaaacggactttccatagaattcttgacaatcaacccttttaccagcattaccgctttgcaaacgtatttaagcagtaaacccgccaacaccaaagaaaacccctatatagttgcgttgaatgtgaacgatatttcaggaattaatgatgctataaatatatcaaacaaatatatctaccttgatctttccagcagtacaataacagtaattccggagaatgcttttgattattgtagcaatcttaccagcgtagaaataccagacagcgttaccaccattggggattatgcttttaactattgtacaggccttaccagtgtaaacataccggacagcgttaccagtattgggaatagagcttttcaatattgcaccagtcttgcaagcgtagacatacccgacaacgttaacaacattggggaatatgcttttaccaattgcactagccttaccagcgtagacataccggatactgttaccactattagggattatgttttctgtggttgcaccagccttaccagcgtagaaataccagacagcgttatcagcattggtgattatgcttttgcatattgcagaagccttaccagtgtaaccatacctgacataaaggatattgcggaaaatacttag

SEQ ID NO: 43120 - protein, 302 aa, Unknown
  Obtained from environmental sample
  misc_feature (1)..(302): Xaa is any amino acid
MGSEFGTSLNVNRATPIATDFNINGTGSFYYDGISKTVIVTPKEGKSNGTITVYYEGTGSTTYTKSITAPSAVGTYTVTFNVAETINFDAANGLSIEFLTINPFTSITALQTYLSSKPANTKENPYIVALNVNDISGINDAINISNKYIYLDLSSSTITVIPENAFDYCSNLTSVEIPDSVTTIGDYAFNYCTGLTSVNIPDSVTSIGNRAFQYCTSLASVDIPDNVNNIGEYAFTNCTSLTSVDIPDTVTTIRDYVFCGCTSLTSVEIPDSVISIGDYAFAYCRSLTSVTIPDIKDIAENT

SEQ ID NO: 43121 - DNA, 1608 bp, Unknown
  Obtained from environmental sample
  misc_feature (1)..(1608): n is a, c, g, or t
gtgtttttggtaatttttgtttcatgtgatgtaaaagttccggttataacctctattgatccaaaatttggcagaatgggggagataattacccttactggaaataattttggcgactcacgcgaagaatcttatgttactatcgcgggtatctcgccgacaaactcatcatactatttatggcaggataatttaattattttaaaagttcccgaattaggcgaatcaggactggtctatgtgcgcgcaaaagggagaaagagcaatggcgtgcttttttccaactcagcctcagtaccaaggcctgttgacggtgaagaattgggacttgaaccaaagattacatccgttacgccgcaggttggcgctccaggaacactcataaccgttacgggaaataattttggcatatcgcgggaaaattcgtttgattccggcgcgggagttttcttttcatgggattatgaatcaggagcgtataatccctttgcggtaagagagccggaatttattgaggcttcagaaactgaaatgggttatgaatactggagcgcgcgcgaaatacgggtgcgtctgccggacggggcagtcagcggaaattttgagataaggacgcctcacggtaaatcgcgcagcgttttttttgacgtaaacggaaaaaacggcgtaaaaaccataaaagataaacgcagttacacgataacatactcggttgatatcaaggttatggaagcttcaaagccgaataccctgtatctgtggataccaaaacccgttatttccccttctcaaagaaatatcattcttgtttcacgtaacgttgaaccttttatggagaatcacaagggagtcagtctttataaattggacggtcttggagcggggacaaatcaatctgtcaacctttcttacagagttgaagttttcgccgtaggagcggaaataaagccttcttccgtcaagcaggaaacaacggtgctttccaagacacacactcaaagtacaagtttaattcccagcgataaccaaaaaataaaggcggtggttaattcaatcgtgggcagggaacaaaacccgtatttaaaagcaaaagccatatatgaatgggtaatttacaatatgcagatttcagaattggcattttactccgatcttattgacgcgttggaacgaaaacaagccgatccatacgcagccgccctgctttataccgcaatggcccgcgccgcaggagttccgtgtattcctgtcaccggcgttttaataaatcaaaatggaaagacagtccgacattattggactgaattctggatagatggttttggctggctgccggttgatcccgcaatgggcgcgggagcggtttcggattcttacattaataaagaaatcgattacttaaatttttatttcggcaataccgacagccagcggatcactttttccagaggcgaattgaatctttcgcaaatggaaagcagaggacggcttgtatcgcacacccagtcatattcattgcagaacatttgggaagaagcttcgggcggattggagtcgtattccagcctttggggtgatataataatacgcggcacttatgtgcaataa

SEQ ID NO: 43122 - protein, 535 aa, Unknown
  Obtained from environmental sample
  DOMAIN (391)...(449): Transglutaminase-like superfamily
  misc_feature (1)..(535): Xaa is any amino acid
MFLVIFVSCDVKVPVITSIDPKFGRMGEIITLTGNNFGDSREESYVTIAGISPTNSSYYLWQDNLIILKVPELGESGLVYVRAKGRKSNGVLFSNSASVPRPVDGEELGLEPKITSVTPQVGAPGTLITVTGNNFGISRENSFDSGAGVFFSWDYESGAYNPFAVREPEFIEASETEMGYEYWSAREIRVRLPDGAVSGNFEIRTPHGKSRSVFFDVNGKNGVKTIKDKRSYTITYSVDIKVMEASKPNTLYLWIPKPVISPSQRNIILVSRNVEPFMENHKGVSLYKLDGLGAGTNQSVNLSYRVEVFAVGAEIKPSSVKQETTVLSKTHTQSTSLIPSDNQKIKAVVNSIVGREQNPYLKAKAIYEWVIYNMQISELAFYSDLIDALERKQADPYAAALLYTAMARAAGVPCIPVTGVLINQNGKTVRHYWTEFWIDGFGWLPVDPAMGAGAVSDSYINKEIDYLNFYFGNTDSQRITFSRGELNLSQMESRGRLVSHTQSYSLQNIWEEASGGLESYSSLWGDIIIRGTYVQ

SEQ ID NO: 43123 - DNA, 1176 bp, Unknown
  Obtained from environmental sample
  misc_feature (1)..(1176): n is a, c, g, or t
gtgcctgtcatgatcggttccgcctacaagttcaaggggattcaatgtctgctggacggggtaacaaattaccttccgaatccagaagaagtaaagaattacgctctcgatcttgacaaaaacgaagaaaaaatagagctttccgccgatgaaaaaaatcctactgtcgctcttggttttaaactggaagacggtcagtacggacagttgacctatgtgcgtatttatcagggcaagctgaaaaaaggcgaagagttgacaaatacccgtgcacgcaaaaaattcaaggttggtcgccttgtacggatgcacgctgacagtatggaagacataaacgaaggctcccccggcgacatcgtggctcttttcggaattgactgcgcaagcggcgacactttctgcggcggaaaccttaactacgcgatgacatcaatgtttgtccctgcgcctgtcatttctctggctgttactccaaaagataaaaaaagcgcagaccaaatggcaaaggcattaaaccgctttaccaaggaagaccctacgtttcaaacctatgtcgatcaggaatcaaatcaaacgattatcaggggcatgggcgagcttcaccttgaagtatatatcgaaagaatgcgccgtgaatacaaatgcgaagttgacacaggtatgccgcaggttgcctatcgtgagacaatcacacagaaagcggaattcaattacacccacaaaaagcaaacaggcggcgccggacaatacggacgggttgcaggctacatggaaccttgggcggaaggcgattacgaatttgtggatatgataaagggcggcactattcccactgaatatgtgccaagctgcgacaagggttttaaagaggcaattaaaagaggcagtttgatcggcttcccgattgtaaacattcgctgcgttataaatgacggtcagagtcatcctgttgactcatcggatatcgcattccagtcggcggcaatcggcgctttccgtgaagcgtacagcaaggccaagcctgtcattcttgaaccggtaatgaaagtatcggtggaaggtccgaccgaattccagggaaacattttcggctccataaaccaaaggcgtggtataatttcatcgtctgttgaagacggacatttttcccgagtgggaagccgaagtccccgttag

SEQ ID NO: 43124 - protein, 391 aa, Unknown
  Obtained from environmental sample
  DOMAIN (342)...(391): Elongation factor G C-terminus
  misc_feature (1)..(391): Xaa is any amino acid
MPVMIGSAYKFKGIQCLLDGVTNYLPNPEEVKNYALDLDKNEEKIELSADEKNPTVALGFKLEDGQYGQLTYVRIYQGKLKKGEELTNTRARKKFKVGRLVRMHADSMEDINEGSPGDIVALFGIDCASGDTFCGGNLNYAMTSMFVPAPVISLAVTPKDKKSADQMAKALNRFTKEDPTFQTYVDQESNQTIIRGMGELHLEVYIERMRREYKCEVDTGMPQVAYRETITQKAEFNYTHKKQTGGAGQYGRVAGYMEPWAEGDYEFVDMIKGGTIPTEYVPSCDKGFKEAIKRGSLIGFPIVNIRCVINDGQSHPVDSSDIAFQSAAIGAFREAYSKAKPVILEPVMKVSVEGPTEFQGNIFGSINQRRGIISSSVEDGHFSRVGSRSPR

SEQ ID NO: 43125 - DNA, 906 bp, Unknown
  Obtained from environmental sample
  misc_feature (1)..(906): n is a, c, g, or t
atgtcatcaatcacagaaaacaaacaaggtatgaaggtactcataactggaagtattttacagttatttttaggaattatttatgtttggagcgtatttgtaaagcctgtcagcgatttttatacatgggatgccgccgcggtaaagcttacggcttcgtttatgttaagtttctttgttgtagggatattgattggcggtaaattgcaattaataacaggtacgcagaaaattgttctttcaggcgggttaatgcttgccgttggaatgtttgcgacggcgtttttaccgaaggaagcggcatggctcatgtatataacatacggtataatcggcggcttcggcgtaggcgcggggtacaatgccattatttcagcggcgcaaaaatggtttccacagaaccgaggtcttgcgacaggtatcagtgtctgcgcttttggtttttcaacggtggtatttgccccgttaattgagttgttgatagggcaattcggtcttagaaacacctttttacttcttgcggcagctttctttgttgtagtgctggcattattcagctttatccgcctgcctgacgaaaacgcccagaaaaatgcagccgcagccgctctgctgataaaaaagcaatacacggtaacagaagcaataaagacaaaggaattttatttcattactctttcgctgatgcttgcgacagcagcgtactttattctcaatccgtctttcaaatcttttgcaattgaacgaggacttggcagttcgattggaacagttattgtcatgatgacaggaattgccaatgcgcttggacggcttggcgctccggtgttatctgataaattgggacgtgaaaaagcggcaatgacaattatattgcgacagcggttgcgcctcgtgccgatctga

SEQ ID NO: 43126 - protein, 301 aa, Unknown
  Obtained from environmental sample
  DOMAIN (15)...(294): Major Facilitator Superfamily
  misc_feature (1)..(301): Xaa is any amino acid
MSSITENKQGMKVLITGSILQLFLGIIYVWSVFVKPVSDFYTWDAAAVKLTASFMLSFFVVGILIGGKLQLITGTQKIVLSGGLMLAVGMFATAFLPKEAAWLMYITYGIIGGFGVGAGYNAIISAAQKWFPQNRGLATGISVCAFGFSTVVFAPLIELLIGQFGLRNTFLLLAAAFFVVVLALFSFIRLPDENAQKNAAAAALLIKKQYTVTEAIKTKEFYFITLSLMLATAAYFILNPSFKSFAIERGLGSSIGTVIVMMTGIANALGRLGAPVLSDKLGREKAAMTIILRQRLRLVPI

SEQ ID NO: 43127 - DNA, 747 bp, Unknown
  Obtained from environmental sample
  misc_feature (1)..(747): n is a, c, g, or t
ttgtcaaatgacaaaacattcgaaggcttgattcgcaagccaaattacaagaaacgcatgatatacaggggaataatccttaggttctttgccttatctggacaaaatattgggttttaccgcccaagcatgagaaaatactgcaacaaagaattgcgcgaatggcagaatctttcgaaaagcagatcggacgaatatcggaaacgtttcagaaaatgcatagacctctgccaagctgtttttggtgaaaattctttcaggcggtttaatgctggaaaaacagaaatcaacccaaacggttcatgggtagcaacaagaattaatttggctctttttgatgttcaaatgtgtggctttgctatgtacgaacaaagccaattccagggccactatgacgaaatccgagaggcgatgctggatctaatgtgcaatgatcgcgaattcatcgacgctattgagctaaagactagtgggaccgtgcaaatgaaaatacggttcaaaaaatggcttgacacgcttgattccattgtctcaagcccgtcttcgcgcacttacaactatgcaataaagaaacagctttttgacgcggatccgacctgcggaatctgccacaaccaaattctggctattgaagacgccgaagttgatcacaaagacccgtatagcaaaggcggccctactacattagataacgcgcagatcgcgcacaggtactgcaacaggcacaagagcaacaacctggaataa

SEQ ID NO: 43128 - protein, 248 aa, Unknown
  Obtained from environmental sample
  DOMAIN (198)...(247): HNH endonuclease
  misc_feature (1)..(248): Xaa is any amino acid
MSNDKTFEGLIRKPNYKKRMIYRGIILRFFALSGQNIGFYRPSMRKYCNKELREWQNLSKSRSDEYRKRFRKCIDLCQAVFGENSFRRFNAGKTEINPNGSWVATRINLALFDVQMCGFAMYEQSQFQGHYDEIREAMLDLMCNDREFIDAIELKTSGTVQMKIRFKKWLDTLDSIVSSPSSRTYNYAIKKQLFDADPTCGICHNQILAIEDAEVDHKDPYSKGGPTTLDNAQIAHRYCNRHKSNNLE

SEQ ID NO: 43129 - DNA, 555 bp, Unknown
  Obtained from environmental sample
  misc_feature (1)..(555): n is a, c, g, or t
atgtaccagaccttccttgcccggaagtatttccacaaaagcgccgaaatccattatgcgcttaacagtgccttcgtagagtttgcctacctcaggatccaggactatgcccagtactgccgctttggcgtcttccgcgtctatggagctttttccaaatatggtaacggttccgtcgtcctcggtgttgatccttacgttatactgttcgcaaagcgctttgatattttttccgccgggaccaatcaaagcgccgattttatcggtgtcaatacgcagggttactatctttggggcgtattcgctgatctcatccaaaggcttgcttatcgttttgttcatgatggaaagtatatgcaagcgcccacgcttcgcctggtcaagcgcattccgcataatttcaggatttacgccggcgatcttaatatccatctgaaagccggtaatgccgtctaccgtaccggcgactttaaagtccatgtccccaaggtggtcttcctcgcccagaatgtcggaaagaatggcgtagcgggctcccggtacgtgcttcggtaa

SEQ ID NO: 43130 - protein, 184 aa, Unknown
  Obtained from environmental sample
  misc_feature (1)..(184): Xaa is any amino acid
MYQTFLARKYFHKSAEIHYALNSAFVEFAYLRIQDYAQYCRFGVFRVYGAFSKYGNGSVVLGVDPYVILFAKRFDIFSAGTNQSADFIGVNTQGYYLWGVFADLIQRLAYRFVHDGKYMQAPTLRLVKRIPHNFRIYAGDLNIHLKAGNAVYRTGDFKVHVPKVVFLAQNVGKNGVAGSRYVLR

SEQ ID NO: 43131 - DNA, 705 bp, Unknown
  Obtained from environmental sample
  misc_feature (1)..(705): n is a, c, g, or t
atggactttaaagtcgccggtacggtagacggcattaccggctttcagatggatattaagatcgccggcgtaaatcctgaaattatgcggaatgcgcttgaccaggcgaagcgtgggcgcttgcatatactttccatcatgaacaaaacgataagcaagcctttggatgagatcagcgaatacgccccaaagatagtaaccctgcgtattgacaccgataaaatcggcgctttgattggtcccggcggaaaaaatatcaaagcgctttgcgaacagtataacgtaaggatcaacaccgaggacgacggaaccgttaccatatttggaaaaagctccatagacgcggaagacgccaaagcggcagtactgggcatagtcctggatcctgaggtaggcaaactctacgaaggcactgttaagcgcataatggatttcggcgcttttgtggaaatacttccgggcaaggaaggtctggtacatatcagcaagctttcccgccagcgggtcgcgcaggtaaccgatgtggtcagagaaggtgaaaaaatcaaggtgaaactcatagaaatagacaaggcagggcgccttaatctttcgtacattgacgctatcgatccgggcttttctggtgaagggagccggggaccttccggaggaaattcttcaggcggaaggcccgataacaggcgggatttccgccgcaattag

SEQ ID NO: 43132 - protein, 234 aa, Unknown
  Obtained from environmental sample
  DOMAIN (65)...(122): KH domain
  misc_feature (1)..(234): Xaa is any amino acid
MDFKVAGTVDGITGFQMDIKIAGVNPEIMRNALDQAKRGRLHILSIMNKTISKPLDEISEYAPKIVTLRIDTDKIGALIGPGGKNIKALCEQYNVRINTEDDGTVTIFGKSSIDAEDAKAAVLGIVLDPEVGKLYEGTVKRIMDFGAFVEILPGKEGLVHISKLSRQRVAQVTDVVREGEKIKVKLIEIDKAGRLNLSYIDAIDPGFSGEGSRGPSGGNSSGGRPDNRRDFRRN

SEQ ID NO: 43133 - DNA, 471 bp, Unknown
  Obtained from environmental sample
  misc_feature (1)..(471): n is a, c, g, or t
atggcggagaatttgaaataccgtgcaattggcagtaaatgtggcgatgatgggagtttagtcgatgtcaacacacctacttgcaatacctatggcaggctttacaaatggttaacagcaaagggggatgtttgccctgctggctggcatttgccaagcgatgctgagtggaatgcattgatgacagcggttggtggtgaatcaacagcaggaaccaaattgaaagcggattctcctttgtgggagagcaatggcaaaggcacggacgatttcggtttttcggctctgcctagcggctacggcttggtggacagccgaaacaacagcttcatgggtgccggctcctggggccagtggtggtctgctgccctggagagctcttactggcagatggactacaacaaagcaaatgtacgcaggatcatcgaccgtcaggataaattttgttcagtgcgttgcgtcaaagactag

SEQ ID NO: 43134 - protein, 156 aa, Unknown
  Obtained from environmental sample
  misc_feature (1)..(156): Xaa is any amino acid
MAENLKYRAIGSKCGDDGSLVDVNTPTCNTYGRLYKWLTAKGDVCPAGWHLPSDAEWNALMTAVGGESTAGTKLKADSPLWESNGKGTDDFGFSALPSGYGLVDSRNNSFMGAGSWGQWWSAALESSYWQMDYNKANVRRIIDRQDKFCSVRCVKD

SEQ ID NO: 43135 - DNA, 747 bp, Unknown
  Obtained from environmental sample
  misc_feature (1)..(747): n is a, c, g, or t
ttgccaatggcttatgctgattctataaaaaaattctcggtaaaggcaagtgtttggaatagcagccaaaaaccgcttgtgcctgaatctggaaatgaacttagctttgatgtatctggcgataactatgttgcttcttttactcgtgaaaattaccgcccttcccaagcattgaatttcgcattgcccgcaccaaccaatattccgcaggttattatgcagtcggcgcaggggagccattatttctttgcatcggttgcaccgagaatgcaagcacaaaaaaagcaatgggataacgacttggcaattatctgggacgtttcgcttagcggctcgcagcgcaacttgcaacgtgaaatggaaatgttggatgttatttttgcagaaaagaaagatgcgaaagctagtctttactttttgaacaatacatttaaaaaagtcgcaaagggtaattggaaagaattgaaaagcattttagaaaaggcggtttatgacggtggcacagatttttcaaaaatcaatttgaaagagattgaaggaaatgagattttatttttctccgatggaatttcaactttgagcaacgccgattttatagaagatactaaggtaaaccgccctatgcattgcattgtttcttctccaaaatccgattacagcgcgatgaaattgattgctggcaaaacaaggggcaaatttataaatgtcaatgctttatctccagaaaaactaaaagacgaattgtaa

SEQ ID NO: 43136 - protein, 248 aa, Unknown
  Obtained from environmental sample
  misc_feature (1)..(248): Xaa is any amino acid
MPMAYADSIKKFSVKASVWNSSQKPLVPESGNELSFDVSGDNYVASFTRENYRPSQALNFALPAPTNIPQVIMQSAQGSHYFFASVAPRMQAQKKQWDNDLAIIWDVSLSGSQRNLQREMEMLDVIFAEKKDAKASLYFLNNTFKKVAKGNWKELKSILEKAVYDGGTDFSKINLKEIEGNEILFFSDGISTLSNADFIEDTKVNRPMHCIVSSPKSDYSAMKLIAGKTRGKFINVNALSPEKLKDEL

SEQ ID NO: 43137 - DNA, 942 bp, Unknown
  Obtained from environmental sample
  misc_feature (1)..(942): n is a, c, g, or t
atgcgcgttcagggaatggcatatacgcaattcctgatagggtatagtaccaaaattaacgacaaattaacgataggcgtgaatttgaaacctttattaggaaatgccgtgatagaaacgagatttaaggatttcgatatgacaacgggaatagatgaagtgaatataagaggaaaaggcgatatttatacatcgtcgccgtacaaaataataaagaagggagatattatagatgccgaaaacacccttgatgacatggaagcatcggatataataaaaaagtacgcaacattcagaaatatgggtattgcatttgatttgggagctacatacgaaattgatgaacggcttacagtatcggctgctcttaacaatttagggtttatcagatggagtgacgacgtgagtggaatttcctatccaggaggtagctatgctttcaaaggcgttgaattcaatagcgcaaaagacgacaaagagaaacttaaagatgttcttaaccattttggtgatagtatttctaatggactggaaggagaagtaaactacgaaaagttcacaacaagattagctccaatactgtacttaggcgcatcctacaaactgagcaaatcaatatcagcgggatttttgtcgcgcagtacgttttggcagaaaggattccggcaaagtttcaatctgtcggtatatgttcaaccatacagtttcgttgcgttcaatgcaggtcttacatatcaggtaaaaggcaatgtctatccgggcggcggtttgatgttcatgcttggacctttgccacttcagttttacgtcttatccgattatgcaccgttatatctttcatccctcacgtatgaaaagacaaatgaagacggaactaaagagacaggcgataaaataccggtgccatatcgtcagaaaacgctcacagtccgatttggatga

SEQ ID NO: 43138 - protein, 313 aa, Unknown
  Obtained from environmental sample
  misc_feature (1)..(313): Xaa is any amino acid
MRVQGMAYTQFLIGYSTKINDKLTIGVNLKPLLGNAVIETRFKDFDMTTGIDEVNIRGKGDIYTSSPYKIIKKGDIIDAENTLDDMEASDIIKKYATFRNMGIAFDLGATYEIDERLTVSAALNNLGFIRWSDDVSGISYPGGSYAFKGVEFNSAKDDKEKLKDVLNHFGDSISNGLEGEVNYEKFTTRLAPILYLGASYKLSKSISAGFLSRSTFWQKGFRQSFNLSVYVQPYSFVAFNAGLTYQVKGNVYPGGGLMFMLGPLPLQFYVLSDYAPLYLSSLTYEKTNEDGTKETGDKIPVPYRQKTLTVRFG

SEQ ID NO: 43139 - DNA, 417 bp, Unknown
  Obtained from environmental sample
  misc_feature (1)..(417): n is a, c, g, or t
atgaagcagttaatcacaaatgcaataattgtaaatgagggcaggcaacagaaaggcagcgttcttattgtagatggaaagattgaagaaatctttcatgatggagaattgccacaaagaatcatgtcagaatgtcaatcaataataaatgctcaaaaaaaatatcttcttcccggagtgattgattctcatgttcattttcgcgagcccgggttaacgcataaaggagatatctatagtgaatcgcgagcggctgtagccggcggcgtaacttcatacatggaaatgccaaacactgttccgcaaacaacatctcaggagcgtcttgacgaaaaatttgcattagccgcgcaaaaatcatttgcaaattactcgttttatattggcgccacaaatgataatattaaagaattgtga

SEQ ID NO: 43140 - protein, 138 aa, Unknown
  Obtained from environmental sample
  misc_feature (1)..(138): Xaa is any amino acid
MKQLITNAIIVNEGRQQKGSVLIVDGKIEEIFHDGELPQRIMSECQSIINAQKKYLLPGVIDSHVHFREPGLTHKGDIYSESRAAVAGGVTSYMEMPNTVPQTTSQERLDEKFALAAQKSFANYSFYIGATNDNIKEL

SEQ ID NO: 43141 - DNA, 432 bp, Unknown
  Obtained from environmental sample
  misc_feature (1)..(432): n is a, c, g, or t
atgcttataaacgatttctgggtattcaatcctaatgccggagacggtaatgaatggagacaactcagaaagatgaataatgcaaatccgaacgaagattatgacgatgattacggttcacttggacgctcgcatggcgtggcgttcatagcgccaaccgatggcggcgaactgagaggacatatagttggcggtgttgaaagttcaggcgctgcatgttgggaatatgaccataacaccgatttgtggatacagcggacaagtttctataacaacacatatcgtcaaaaccgtgaaggaatgatatcattttcatttcccgatttaggcaaagcgtttgtaggtttgggaagatctggagggacaaactgggatgatttgtgggagtttactccgttagttgacgataatgtttatgaagattatcaatag

SEQ ID NO: 43142 - protein, 143 aa, Unknown
  Obtained from environmental sample
  misc_feature (1)..(143): Xaa is any amino acid
MLINDFWVFNPNAGDGNEWRQLRKMNNANPNEDYDDDYGSLGRSHGVAFIAPTDGGELRGHIVGGVESSGAACWEYDHNTDLWIQRTSFYNNTYRQNREGMISFSFPDLGKAFVGLGRSGGTNWDDLWEFTPLVDDNVYEDYQ

SEQ ID NO: 43143 - DNA, 1419 bp, Unknown
  Obtained from environmental sample
  misc_feature (1)..(1419): n is a, c, g, or t
ttgagtgggaatagggaaagaaggaattttactttgattgaaaccatatcggccacagaccgtatagggaaagaacctattggccgcctgttacttaatttttccattccggcaataatcggaatgctggtaaacgctatttataatatagttgaccgtatctatatagggcagggcgtagacgcgctgggtatagccggcgtcggtctcgttatgccggtgatgatgattatacaatccgtctccatgcttgtaggcataggcgcgaattcgcttttttccatacgtttgggccagggccgatccgatgaagttgaaaaaataatgggaaacgcgttcactcttctcttccttcttcccggcatttgcatagttgtgtgttttgtttttatggaccctattctgcgcggcataatgaaggcgcaaggcgaaatatataaatacgctgaaagttacctgcgcgttattctttacggcgcgatattcgcggcaatgagtcccggccttacccattttatccgttccgacggacaccctaaaacttcaatgcttgttcagatagtaggcgcgcttaccaatatcatcctcgatccgattttcatttttgtgtttaaaatgggcgtcgcgggcgcggcatgggctacaatcatatcgcagtntgtgtcgttcatttntgttatgggatatttttcctcaaggtggacaaggctgcgattccgtttcaaacacatgaagttaaacgctaaaataacgggtactatccttgccattggttttgccccgtttattatgcagtttgcgttcagccttgtcggtgtcttgcagaatgccgtaattatgaaatacggcggggacgaggcgtttaccgcaatgacaattaccttcagcatgtttattgttatcattatgcctctgatgggaataggccagggcgcgcagccgattatcggttataattacggcgcgaaacaatacgaccgagtaaaaagatgctacaagctggcgcttctttcctgcaccgtaattctttgcgcaggctttcttctggcgcaactggcccccgggttttgcttttcgcttttcagtaaagataccggttctctgcgcaatcttggaatactgaccatacggattatcacctgtttggctcccgttatagggctgcagatgatgagcggtcagctttttcaagcgattgggaaacccgttcaggccgccgttttaagtctttcccgtcaaattctcttttttattccgatggttttatttttgcccgttttgtttgaaaacttcggttttcgtcccatttacggcgtctatttcactttcccgctggccgatttttgttccgcgtttatatcgggaatatttgtttacaggcagtttaagaagtgggaaaataactataatataagttag

SEQ ID NO: 43144 - protein, 472 aa, Unknown
  Obtained from environmental sample
  DOMAIN (260)...(423): MatE
  misc_feature (1)..(472): Xaa is any amino acid
MSGNRERRNFTLIETISATDRIGKEPIGRLLLNFSIPAIIGMLVNAIYNIVDRIYIGQGVDALGIAGVGLVMPVMMIIQSVSMLVGIGANSLFSIRLGQGRSDEVEKIMGNAFTLLFLLPGICIVVCFVFMDPILRGIMKAQGEIYKYAESYLRVILYGAIFAAMSPGLTHFIRSDGHPKTSMLVQIVGALTNIILDPIFIFVFKMGVAGAAWATIISQXVSFIXVMGYFSSRWTRLRFRFKHMKLNAKITGTILAIGFAPFIMQFAFSLVGVLQNAVIMKYGGDEAFTAMTITFSMFIVIIMPLMGIGQGAQPIIGYNYGAKQYDRVKRCYKLALLSCTVILCAGFLLAQLAPGFCFSLFSKDTGSLRNLGILTIRIITCLAPVIGLQMMSGQLFQAIGKPVQAAVLSLSRQILFFIPMVLFLPVLFENFGFRPIYGVYFTFPLADFCSAFISGIFVYRQFKKWENNYNIS

SEQ ID NO: 43145 - DNA, 924 bp, Unknown
  Obtained from environmental sample
  misc_feature (1)..(924): n is a, c, g, or t
ttgcttttgatttcgggcggcgtcgattctactgttgccggagcggcgttgttaaaaacattgaagagcgaacaagtgcatttgatgtatatggataccgggcttatgcggaagaatgagacggcggctgtacgcgcgaatctggaaaaacttggggctaaaaatttgcacataattatgtgcgaggaagaatttttaaccgcgcttaaaggcaaagcggagccggaagaaaagcgcaggataatcggcgatttgtttatcacgatacaggagagggaagtcgcacgcttgaaattgccggaaagttatttgcttgcgcagggaacgctgtacaccgatttaatcgagagcggaaaaggcgtaggcaagaaagcccatgtgataaaaagccaccacaatgtcgcaagcccgcttgtggacgcgaagcgcaaagcgggaaaaattatcgagccgctggatcgtttgtacaaagacgaagtgcgcaaattagggcgtattatcggtgttgacgaagaaattgtcaggcgccatccgtttccggggccgggtcttgcggtgcgcattcttggggaagtaacaagagaaaagtgcgatattctgcgcgaagcggacgctatttatatagaagaattgaaaacccgccgcggcccgtccggaaagagcctgtacgacgaaatatggcaggcattcgctatccttctgccgatacgctccgtaggcgtggcgggagatgttcgcaaatacggctgggttctcgcgttacgcgccattacaagcgcagacggcatgacggcggatgtctacccgtttgaaacccgcgatcttctggaaatatctacacgcattaccaactcggtaaaagagattggacgcgtaacttacgacatttcaagcaagccgccggctacgattgagtgggaatag

SEQ ID NO: 43146 - protein, 307 aa, Unknown
  Obtained from environmental sample
  DOMAIN (208)...(306): GMP synthase C terminal domain
  misc_feature (1)..(307): Xaa is any amino acid
MLLISGGVDSTVAGAALLKTLKSEQVHLMYMDTGLMRKNETAAVRANLEKLGAKNLHIIMCEEEFLTALKGKAEPEEKRRIIGDLFITIQEREVARLKLPESYLLAQGTLYTDLIESGKGVGKKAHVIKSHHNVASPLVDAKRKAGKIIEPLDRLYKDEVRKLGRIIGVDEEIVRRHPFPGPGLAVRILGEVTREKCDILREADAIYIEELKTRRGPSGKSLYDEIWQAFAILLPIRSVGVAGDVRKYGWVLALRAITSADGMTADVYPFETRDLLEISTRITNSVKEIGRVTYDISSKPPATIEWE

SEQ ID NO: 43147 - DNA, 321 bp, Unknown
  Obtained from environmental sample
  misc_feature (1)..(321): n is a, c, g, or t
ttgtttattgaaaatttaaacggcattaacagtatttatattaatgagcatattgtaaatcttttaatggaagtacgcggtaaattaccttctgacaaagagaaaatgcttgaaatcattgactattatttaggaatgccagaagacgacaaattaaattttgctgtcggcaggcgcatggggtattattatcgtttatctgatatgcaaaataaatctaaaaatacggcagtatcccaatacatggacaatctaaaagcaaaacattctatcgttgattttgacaaagtgtgcaatttttgcagggctaatgtgatatag

SEQ ID NO: 43148 - protein, 106 aa, Unknown
  Obtained from environmental sample
  misc_feature (1)..(106): Xaa is any amino acid
MFIENLNGINSIYINEHIVNLLMEVRGKLPSDKEKMLEIIDYYLGMPEDDKLNFAVGRRMGYYYRLSDMQNKSKNTAVSQYMDNLKAKHSIVDFDKVCNFCRANVI

SEQ ID NO: 43149 - DNA, 1614 bp, Unknown
  Obtained from environmental sample
  misc_feature (1)..(1614): n is a, c, g, or t
gtgagtgtaatggcttatgcgccttatggcgccggcggggtgataatccgggtggaagcggatatacgccggggtattccgggtattgatattacagggcttgcagaaggggcggttcgggaagcgcgggaaagggtaagagccgcgttcaggaattccgggtttgcttttccgctggacaggatactgatcaacctggcgccggcgggattacggaaagacggggccgcgctggatttgcccattgccctggcggtaatggcggcggcgggacttgcccctgttccgccggacctgttggtgatgggggaactggagctttcgggaaagatacgccctgtgagaggcgttctggccgcaatctcaggcggtcttgaagagggcattaccgaatttatcgtcccggctgaaaacaaaggggaagccgcaatattatacggagcgggcaataatcctgttatgcgattcaaggcagtgtcttccctgcgtgaagcggtggacgcgctttttttccgcgaagaaacaggcgtactgtccgttcccgaagaatcaaacatagataactgcgtttcagcggaatcaacagagacaacaaacgccgagacagcggactttgccgatgtgcggggccaagctatatataaacgggctttggaaatagccgccgccgggggtcacaacatgcttgttttcgggccgccgggcgccggcaagaccatgcttgcaaggcggttcccttccatcatggctccgctcagtcccgacgaggcggttgagtttacccgcctgcacagtctggcggggccgttcaaaaccggaacagtggacggcggctatatcgaccgtctcatcaccaatccgccgttccgcgccccgcatcactcggcaagcgccgaggggattctgggcggcggcagaacgccccgtcccggcgaaattactcttgcccattttggtgtgttgtttcttgatgaagcgccggaatttaaaatcaatgtattgcaggctttgcgggaaccgttggaagatcgcgtaatcagtatttcccgcgccgaggggccggtacatcttcccgcggaatttcagttactgttggcggcaaacgcctgtccctgcgggcggttgggaatgaggcatcacgaacaaggcgaatgtctttgttcgccgcaggaaatttaccgctactggcgtaaattcggcggggcgcttcttgaccgcattgagattcgcgccgccgttgttccgcccgccataagcgaaatcggcaaaccgcacagcgatgaatgttccgccgacatagcaaagcgggtacaggcggcagtcgccattcagcggcagcgtttcaaaggaacgggtatccgccgcaacgccctgatccccgccggcaaaatagaaaccttgtgccccatgaacgaacaggcgcgcggcgcgtttcaaaacgcccttgcccatctggggctttccggcagagcctaccacggcatattacggacagccagaaccattgccgatctggacggaaaagaaattattgacacggttcatattctggaagcggttcaacaccgccggtatggggaagacccttatgaaattgtaacggcggaggtttag

SEQ ID NO: 43150 - protein, 537 aa, Unknown
  Obtained from environmental sample
  DOMAIN (204)...(421): Magnesium chelatase, subunit ChlI
  misc_feature (1)..(537): Xaa is any amino acid
MSVMAYAPYGAGGVIIRVEADIRRGIPGIDITGLAEGAVREARERVRAAFRNSGFAFPLDRILINLAPAGLRKDGAALDLPIALAVMAAAGLAPVPPDLLVMGELELSGKIRPVRGVLAAISGGLEEGITEFIVPAENKGEAAILYGAGNNPVMRFKAVSSLREAVDALFFREETGVLSVPEESNIDNCVSAESTETTNAETADFADVRGQAIYKRALEIAAAGGHNMLVFGPPGAGKTMLARRFPSIMAPLSPDEAVEFTRLHSLAGPFKTGTVDGGYIDRLITNPPFRAPHHSASAEGILGGGRTPRPGEITLAHFGVLFLDEAPEFKINVLQALREPLEDRVISISRAEGPVHLPAEFQLLLAANACPCGRLGMRHHEQGECLCSPQEIYRYWRKFGGALLDRIEIRAAVVPPAISEIGKPHSDECSADIAKRVQAAVAIQRQRFKGTGIRRNALIPAGKIETLCPMNEQARGAFQNALAHLGLSGRAYHGILRTARTIADLDGKEIIDTVHILEAVQHRRYGEDPYEIVTAEV

SEQ ID NO: 43151 - DNA, 489 bp, Unknown
  Obtained from environmental sample
  misc_feature (1)..(489): n is a, c, g, or t
atgtaccggcccctcggcgcgggaaatactgattacgcgatcttccaacggttcccgcaaagcctgcaatacattgattttaaattccggcgcttcatcaagaaacaacacaccaaaatgggcaagagtaatttcgccgggacggggcgttctgccgccgcccagaatcccctcggcgcttgccgagtgatgcggggcgcggaacggcggattggtgatgagacggtcgatatagccgccgtccactgttccggttttgaacggccccgccagactgtgcaggcgggtaaactcaaccgcctcgtcgggactgagcggagccatgatggaagggaaccgccttgcaagcatggtcttgccggcgcccggcggcccgaaaacaagcatgttgtgacccccggcggcggctatttccaaagcccgtttatatatagcttggccccgcacatcggcaaagtccgctgtctcggcgtttgttgtctctgttga

SEQ ID NO: 43152 - protein, 162 aa, Unknown
  Obtained from environmental sample
  misc_feature (1)..(162): Xaa is any amino acid
MYRPLGAGNTDYAIFQRFPQSLQYIDFKFRRFIKKQHTKMGKSNFAGTGRSAAAQNPLGACRVMRGAERRIGDETVDIAAVHCSGFERPRQTVQAGKLNRLVGTERSHDGREPPCKHGLAGARRPENKHVVTPGGGYFQSPFIYSLAPHIGKVRCLGVCCLC

SEQ ID NO: 43153 - DNA, 534 bp, Unknown
  Obtained from environmental sample
  misc_feature (1)..(534): n is a, c, g, or t
atgtttgattcttcgggaacggacagtacgcctgtttcttcgcggaaaaaaagcgcgtccaccgcttcacgcagggaagacactgccttgaatcgcataacaggattattgcccgctccgtataatattgcggcttcccctttgttttcagccgggacgataaattcggtaatgccctcttcaagaccgcctgagattgcggccagaacgcctctcacagggcgtatctttcccgaaagctccagttcccccatcaccaacaggtccggcggaacaggggcaagtcccgccgccgccattaccgccagggcaatgggcaaatccagcgcggccccgtctttccgtaatcccgccggcgccaggttgatcagtatcctgtccagcggaaaagcaaacccggaattcctgaacgcggctcttaccctttcccgcgcttcccgaaccgccccttctgcaagccctgtaatatcaatacccggaataccccggcgtatatccgcttccacccggattatcaccccgccggcgccataa

SEQ ID NO: 43154 - protein, 177 aa, Unknown
  Obtained from environmental sample
  misc_feature (1)..(177): Xaa is any amino acid
MFDSSGTDSTPVSSRKKSASTASRREDTALNRITGLLPAPYNIAASPLFSAGTINSVMPSSRPPEIAARTPLTGRIFPESSSSPITNRSGGTGASPAAAITARAMGKSSAAPSFRNPAGARLISILSSGKANPEFLNAALTLSRASRTAPSASPVISIPGIPRRISASTRIITPPAP

SEQ ID NO: 43155 - DNA, 927 bp, Unknown
  Obtained from environmental sample
  misc_feature (1)..(927): n is a, c, g, or t
gtgcccaggattgtcaaagcggccaggatcattaaggacgagaagcttgccgccaaggtgacgcttttgggcaaagttgcggagatccagcaagtcgctgaaaaagaaggggtcagccttaacggaattgacattgtgtacccccccgctgcccccgaacagaacgatttcgcccatgaatactatcaactccgaaaacacaaggggatgaccgaagaacaggccaaaactgacattacagacgtccttcgctggggggccatgatggtacacatgggcaaagccgacgctatggttggcggcgtcataaacacgaccggcaacgtgctgagggccggtatttccattatcgggaccgcgcaagggctgaaaaacgcctcatcctgttttgttatgtcgggacttgatcccaaatggggcgtggacggcaccctgattttctctgattgcgcggtaatacccgccccgctgcccgaacaactcgctgatattgccgaaagcgccgccaattcctgccgtgaatttctggacgcggagcccgttgtggcgcttatgtcattctcgaccaaaggttcggccgatcatgaaaacgtcgccaaggtgcaggccgccgttaaaatcctgaaagaaaggaacgtaaaatttgtttttgacggcgaacttcaggccgacgccgctcttgtcccttctgttaccgatcaaaaagcgccgggcagcccggttaagggcaaggttaacaccctgattttcccggatctcggcgcgggcaacataggctacaagctggtacagcggctcggcaacgcccaggctttcgggcctttactccagggtttcgcgaagcccataagcgatctttcccgcggcgcatccgtaaaagacattgtgacaacttgcgcggtaacgctgtccagagcgaaatattaa

SEQ ID NO: 43156 - protein, 308 aa, Unknown
  Obtained from environmental sample
  DOMAIN (2)...(303): Phosphate acetyl/butaryl transferase
  misc_feature (1)..(308): Xaa is any amino acid
MPRIVKAARIIKDEKLAAKVTLLGKVAEIQQVAEKEGVSLNGIDIVYPPAAPEQNDFAHEYYQLRKHKGMTEEQAKTDITDVLRWGAMMVHMGKADAMVGGVINTTGNVLRAGISIIGTAQGLKNASSCFVMSGLDPKWGVDGTLIFSDCAVIPAPLPEQLADIAESAANSCREFLDAEPVVALMSFSTKGSADHENVAKVQAAVKILKERNVKFVFDGELQADAALVPSVTDQKAPGSPVKGKVNTLIFPDLGAGNIGYKLVQRLGNAQAFGPLLQGFAKPISDLSRGASVKDIVTTCAVTLSRAKY

SEQ ID NO: 43157 - DNA, 1719 bp, Unknown
  Obtained from environmental sample
  misc_feature (1)..(1719): n is a, c, g, or t
atggaaaactttttaaccgacaatgaagatattctgttccagctggaacatcttgatctggatcgcataattcatctgaaagaggaaaatttcagccaggcgaagctttacccccacgcccctaaagacgccgaggacgcgaaagattcgtaccgcatggtgctgaatataatcggcgggatcgcgggcgagtttatcgcgcccaacgcgcctgctgttgacgaaatcggccccaccctggcgaacaaccaggtaacccttcaccctgcgacccgaaaggcgctggacatgctggcgaaagccgacatgatgggtttcgtcattccccggaaatatggcggccttaacatgcccaacacgatcctcagcatcgcggcggagatagtctccagggcggacgcttcatttctcaatttcggtttgcagcaggacaacgccggaacgatcaacaaattcgcctcggaagatcaaaaagaaagatacctgccgaagctctgctccggcgagtgggattccgcgatggttcttaccgagccggacgcgggaagcgatcttcagtcggtgaaccttaaagccgtactgggcagcgacggtcaatggcggctgaacggtgtcaaacgttttatcaccaacggctgcggtactatcggtttggttcttgcccgcagcgaagaaaagggcaagggcgcgcgcgggctttcatttttcctttacaagcgcgacgataaaatgaccgtcaggcggattgaacataagctcggtattcacggttcaccaacatgtgaactgcaattcaacaacgcacctgcggagcttttcggcgagcgtcagagaggccttaccaagtacactctgtggctcatgaataacgcccgtctcggtgtggccgcccaggcagtaggcatcgcggaagcggcctatcgtgaagccgacctttacgccgcaaagcgcatccagttcggcgcgcccatacgcgatctaccagcggtttttgaaatgctcaccgagatgaagatcgccctggaagcgggacgcagccttctctacgaaaccgcccgcttcgttgacctgaaggaagcgcttgaggattattcggaaaagcacccggaagaaaaaggcgagatagtggaagataaaaagaaatacgcgaaatacgcagggttcttcaccccgctggttaaaggttacgccactgaaatggcaaacaaggttgcaaacgatgcgattcaaattcacggcggcacaggctacatgaaggagttcaacgcggaacgtcactacagggacgcgaggatcaccaacatctacgagggaactacccagcttcaggttgtggccgccatcgggccggtaacttcaggcgtagcccaggccgttttggacgaatacgacaaggcaaactacaatcacagcccagctttgctagagaaaatccgcgaagcccgcaagttttttgaagaggccctggaatacgcgaaaacctacgaaggccaccagcagtttctcacctaccattcccgccgccttgtggaaatggcaaccgatctcgtgattagctaccttctgcttcgggacggcaaccacagcgagcgcaagcaaaaagcggcggtggtcttcattgccaggatgccttcgcgactcaaagcaagccgtgatttcattatgagcgaggatggggctttgcttaggaattacgaagcggtgattgggaagacgtaa

SEQ ID NO: 43158 - protein, 572 aa, Unknown
  Obtained from environmental sample
  DOMAIN (48)...(169): Acyl-CoA dehydrogenase, N-terminal domain
  misc_feature (1)..(572): Xaa is any amino acid
MENFLTDNEDILFQLEHLDLDRIIHLKEENFSQAKLYPHAPKDAEDAKDSYRMVLNIIGGIAGEFIAPNAPAVDEIGPTLANNQVTLHPATRKALDMLAKADMMGFVIPRKYGGLNMPNTILSIAAEIVSRADASFLNFGLQQDNAGTINKFASEDQKERYLPKLCSGEWDSAMVLTEPDAGSDLQSVNLKAVLGSDGQWRLNGVKRFITNGCGTIGLVLARSEEKGKGARGLSFFLYKRDDKMTVRRIEHKLGIHGSPTCELQFNNAPAELFGERQRGLTKYTLWLMNNARLGVAAQAVGIAEAAYREADLYAAKRIQFGAPIRDLPAVFEMLTEMKIALEAGRSLLYETARFVDLKEALEDYSEKHPEEKGEIVEDKKKYAKYAGFFTPLVKGYATEMANKVANDAIQIHGGTGYMKEFNAERHYRDARITNIYEGTTQLQVVAAIGPVTSGVAQAVLDEYDKANYNHSPALLEKIREARKFFEEALEYAKTYEGHQQFLTYHSRRLVEMATDLVISYLLLRDGNHSERKQKAAVVFIARMPSRLKASRDFIMSEDGALLRNYEAVIGKT

SEQ ID NO: 43159 - DNA, 495 bp, Unknown
  Obtained from environmental sample
  misc_feature (1)..(495): n is a, c, g, or t
atgcgcatggcgcagcccaatccttcccgcaaggccgagaccgtgaatatctccgctaagctggaaccggaagatttccccagcgaaataattgagagggtcatggaagaaaagaccgtcaacctaaagggcgcacagatcatcgtatcaggcggcataggtgtaggaagcagggacaatttcgcgcttataagggagcttgcggaaacccttggcgcggaagtaggtgcctcccgcgcggcggtggacgcgggctttatcggcaaggagcaccaggtcgggcagacgggaaccaccgtcaggccgaagctctacatagcatgcggcatttccggtgcaattcagcaccgggctggcatggacaattccgcccgtatcatcgcgattaacagcgatcctgaagcgccgattttcagcattgcccattacggtatcgtgggagacctgaacgaggttatcccccggatgatcaaagcgtacaaggccagagtgtag

SEQ ID NO: 43160 - protein, 164 aa, Unknown
  Obtained from environmental sample
  DOMAIN (39)...(124): Electron transfer flavoprotein FAD-binding domain
  misc_feature (1)..(164): Xaa is any amino acid
MRMAQPNPSRKAETVNISAKLEPEDFPSEIIERVMEEKTVNLKGAQIIVSGGIGVGSRDNFALIRELAETLGAEVGASRAAVDAGFIGKEHQVGQTGTTVRPKLYIACGISGAIQHRAGMDNSARIIAINSDPEAPIFSIAHYGIVGDLNEVIPRMIKAYKARV

SEQ ID NO: 43161 - DNA, 678 bp, Unknown
  Obtained from environmental sample
  misc_feature (1)..(678): n is a, c, g, or t
gtgcgccatcgcggcggcgggcacaagcgcttcatccgtattattgattttaagcgcgacaagataaatattccggggatagtcgagacgattgagtacgatcccaaccgttcggcgtttatcgccttggtcaagtatgtggacggcgagcgccgttacattttggccaccgtcaacatgaaagtcggtcagaagatattggccggcgtcggggcggagatcgccgaggggaactgtatgcccttggcaaatatccctcttggcacccaggttcacaacattgagttgcgtgagaagaagggcggccagatcgcccgtagcgcgggcgcctacgcggagatcgtcgccaaagagaataaccttgttcagataaagttcccgtcaagcgaagtccgtaacgttcgcgagggttgcgtcgctaccatcggccgcgtaagcaatgccgatcatatagatgtctgtatcggttccgccggccgcaagcgccacatgggcatacgtcccacggtgcgcggcgtggccatgaaccccgtcgaccacccgatgggcggcggcgagggcaaaacctcaggcggcgggcatcccgtgtcgccgtggggccagaagtccaagggtctgaagacccgcgatcgcaaaaagccgtccggcaaatacatcgtaaggcggaggtcgaagtaa

SEQ ID NO: 43162 - protein, 225 aa, Unknown
  Obtained from environmental sample
  DOMAIN (1)...(68): Ribosomal Proteins L2, RNA binding domain
  misc_feature (1)..(225): Xaa is any amino acid
MRHRGGGHKRFIRIIDFKRDKINIPGIVETIEYDPNRSAFIALVKYVDGERRYILATVNMKVGQKILAGVGAEIAEGNCMPLANIPLGTQVHNIELREKKGGQIARSAGAYAEIVAKENNLVQIKFPSSEVRNVREGCVATIGRVSNADHIDVCIGSAGRKRHMGIRPTVRGVAMNPVDHPMGGGEGKTSGGGHPVSPWGQKSKGLKTRDRKKPSGKYIVRRRSK

SEQ ID NO: 43163 - DNA, 540 bp, Unknown
  Obtained from environmental sample
  misc_feature (1)..(540): n is a, c, g, or t
ttgcgtcgctaccatcggccgcgtaagcaatgccgatcatatagatgtctgtatcggttccgccggccgcaagcgccacatgggcatacgtcccacggtgcgcggcgtggccatgaaccccgtcgaccacccgatgggcggcggcgagggcaaaacctcaggcggcgggcatcccgtgtcgccgtggggccagaagtccaagggtctgaagacccgcgatcgcaaaaagccgtccggcaaatacatcgtaaggcggaggtcgaagtaaactatggcacgttccgtaaagaaggggccgtttgtagacggccatttggtgaagaaggtcgacgattcgaacaagaccggtcagaagaaggtcataaagacttggtcgcgccgttcggtgattctgccggagtttgtcggacagacgttttccgtgcacaacgggaacaagttccttcccgtgtacgtcaccgagaatatggtaggccaccgcttgggcgagtttgcgccgacgcgcaacttccgcgggcacagcggcgccaagacggataa

SEQ ID NO: 43164 - protein, 179 aa, Unknown
  Obtained from environmental sample
  misc_feature (1)..(179): Xaa is any amino acid
MRRYHRPRKQCRSYRCLYRFRRPQAPHGHTSHGARRGHEPRRPPDGRRRGQNLRRRASRVAVGPEVQGSEDPRSQKAVRQIHRKAEVEVNYGTFRKEGAVCRRPFGEEGRRFEQDRSEEGHKDLVAPFGDSAGVCRTDVFRAQREQVPSRVRHREYGRPPLGRVCADAQLPRAQRRQDG

SEQ ID NO: 43165 - DNA, 417 bp, Unknown
  Obtained from environmental sample
  misc_feature (1)..(417): n is a, c, g, or t
atgttatcgcctaaaaaggtaaagtggagaaagacgcagcgcggcaggatgggcggagtggcccagaggtgcaacgaggtgtctttcggggagttcgggttgcagtctacggagcctggatgggtcgacaaccgccagatagaggcggcgcgtatcgcgatgacccgtttcatcaagcgcggcggcaaggtgtggatccgtatcttccccgacaaacccattaccaagcaccccgccgagtcccgtatgggttcgggaaagggcgcgccggagggttgggtggccgtggtcaggcccggcacggttatgttcgagataggcgggatcaaggccgacatagcgaaggaggctatgaggcttgccgcgcagaagttgccggtgctcacgcgtttcattgaattggagaaacagatataa

SEQ ID NO: 43166 - protein, 138 aa, Unknown
  Obtained from environmental sample
  DOMAIN (2)...(137): Ribosomal L10
  misc_feature (1)..(138): Xaa is any amino acid
MLSPKKVKWRKTQRGRMGGVAQRCNEVSFGEFGLQSTEPGWVDNRQIEAARIAMTRFIKRGGKVWIRIFPDKPITKHPAESRMGSGKGAPEGWVAVVRPGTVMFEIGGIKADIAKEAMRLAAQKLPVLTRFIELEKQI

SEQ ID NO: 43167 - DNA, 576 bp, Unknown
  Obtained from environmental sample
  misc_feature (1)..(576): n is a, c, g, or t
atgaaacgcgtgagcaccggcaacttctgcgcggcaagcctcatagcctccttcgctatgtcggccttgatcccgcctatctcgaacataaccgtgccgggcctgaccacggccacccaaccctccggcgcgccctttcccgaacccatacgggactcggcggggtgcttggtaatgggtttgtcggggaagatacggatccacaccttgccgccgcgcttgatgaaacgggtcatcgcgatacgcgccgcctctatctggcggttgtcgacccatccaggctccgtagactgcaacccgaactccccgaaagacacctcgttgcacctctgggccactccgcccatcctgccgcgctgcgtctttctccactttacctttttaggcgataacattctttctcatccttattttaccgattatcgcggacattcggttccgcgtatgtttttttcaatatttttacaatcctacgtaaacggacggcagaccgccgcccttacgaaacctaaaatgcaaaatttaacccttgttcgccgcctcggcgttcgccttggccgcggccatcgcccttga

SEQ ID NO: 43168 - protein, 191 aa, Unknown
  Obtained from environmental sample
  SIGNAL (1)...(21)
  misc_feature (1)..(191): Xaa is any amino acid
MKRVSTGNFCAASLIASFAMSALIPPISNITVPGLTTATQPSGAPFPEPIRDSAGCLVMGLSGKIRIHTLPPRLMKRVIAIRAASIWRLSTHPGSVDCNPNSPKDTSLHLWATPPILPRCVFLHFTFLGDNILSHPYFTDYRGHSVPRMFFSIFLQSYVNGRQTAALTKPKMQNLTLVRRLGVRLGRGHRP

SEQ ID NO: 43169 - DNA, 912 bp, Unknown
  Obtained from environmental sample
  misc_feature (1)..(912): n is a, c, g, or t
gtgacggattctggcctgcggcgaactcaggacggcaggggcgtgtccgaaaagcgggtgcttgagggcaagaccggcgtgctcatcttcgagaagccgtcgttgcgcacacgcgtaaccttcgaaacggccatacacgaactgggcggacacgccatcatcctcccccaagaatccgtaggtatgggcaaacgcgaaagcgtggaggacgtggcgcgcaacctggaccgtatcgtgcaccttatagtgacgcgcacattcgcccacgatacgctgacacggatggcctcgtcttgctccattccggtaataaacgccctgaccgacctcgcccacccgtgccaggccttagctttcggacagacgctccaagaagtgcgtcctaacgaaaaactgaacgtggccttcgtcggcgacggcaacaacgtgtgctgctctataatggttctatgcgccaaactcggccaccgcttcacccacgtaggcccaaaaggctacgaaccgcgcgccgaactggtaaacaagtgcaaagaattatgcgcggactccggcggcggcatatccataaccgcaaacctaaaagaggccgtaaagaacgcagacgtattatacaccgacgtctggacaagcatgggccaagaggccgaagccgaaaaacgcaaacaagacttcggcgcctaccaagtcaacgcggaactgatggccaacgctccggccgacgccatagtatcgcactgtatgccggcgcaccgaggcgaagagatcacaagcgacgtgctggactccaagcctgcgtggcctacgcggaagcggagaacaggctgcacgtacaaaaagcggttattgtatatttgttttcgtaatacaagtatatgtttgcttaaaaactctggaccgccttcggcgagataa

SEQ ID NO: 43170 - protein, 303 aa, Unknown
  Obtained from environmental sample
  DOMAIN (6)...(126): Aspartate/ornithine carbamoyltransferase, carbamoyl-P binding domain
  misc_feature (1)..(303): Xaa is any amino acid
MTDSGLRRTQDGRGVSEKRVLEGKTGVLIFEKPSLRTRVTFETAIHELGGHAIILPQESVGMGKRESVEDVARNLDRIVHLIVTRTFAHDTLTRMASSCSIPVINALTDLAHPCQALAFGQTLQEVRPNEKLNVAFVGDGNNVCCSIMVLCAKLGHRFTHVGPKGYEPRAELVNKCKELCADSGGGISITANLKEAVKNADVLYTDVWTSMGQEAEAEKRKQDFGAYQVNAELMANAPADAIVSHCMPAHRGEEITSDVLDSKPAWPTRKRRTGCTYKKRLLYICFRNTSICLLKNSGPPSAR

SEQ ID NO: 43171 - DNA, 567 bp, Unknown
  Obtained from environmental sample
  misc_feature (1)..(567): n is a, c, g, or t
atggacaacatagtcttcaaggctatgctcacgtcggattctgaggcctcccgcgaggccctcagatttttactttccgcctgtaccaggcgcgaagtgtcaggcgtccgggttaaaaacagcgaactgctgccggcccatcttggcggcaaatcgccgcgcctggatgtgaacgtcactttcaacgacggggaggccgccgaccttgaaatgcaaataaaaaaaactgaggacgagctcagagacagggcggcattctataccgccatgctccaggcagcccagtcgcgcaaaggccacgcctataaagagataaagcgggtttaccaggtgttcttcctcaactgcattctgtacccgcgcagcgacaaactgccccggcggtatttctacatggaagaagaggagcatgaccggctcaccgagacaagcgaaatcattttttacgagatgccgaaactggaacggcggttacaagacatactggcaggaagggcggatatggaaaccttgtcagtggaagagactcgtgccgctcgtgccgctcgtgccgctcggccgatctga

SEQ ID NO: 43172 - protein, 188 aa, Unknown
  Obtained from environmental sample
  misc_feature (1)..(188): Xaa is any amino acid
MDNIVFKAMLTSDSEASREALRFLLSACTRREVSGVRVKNSELLPAHLGGKSPRLDVNVTFNDGEAADLEMQIKKTEDELRDRAAFYTAMLQAAQSRKGHAYKEIKRVYQVFFLNCILYPRSDKLPRRYFYMEEEEHDRLTETSEIIFYEMPKLERRLQDILAGRADMETLSVEETRAARAARAARPI

SEQ ID NO: 43173 - DNA, 594 bp, Unknown
  Obtained from environmental sample
  misc_feature (1)..(594): n is a, c, g, or t
gtggacgcgtatataaaagcggtaaaagcggcgattcctagagcgaaggagaagatagcgtttgaccggtttcatgtgagcaagcatataaacgaagcgttggacaaagtgaggaggcgggaacacggtgcattcatgaacagggcaggagagagtccgttaagtaaaagtcggttccaatggctgacaaactcaaaccggactgataaccgcagcgggaagcggaaagcgttcatgagtttgtcacggctgaatatggagacagcgagggcatggaggataaaggaggccgccagcagcctgtgggaatatgtgtatatgaatgtagcggaggcggcgtggaagaagctgctgtggtggataagccactgccggatacctgaaatgatccgggccggtaagactatacaaaactatttctggggaatactaaacgcaatacggcttaaggcgactaacggaatgctcgaagccaagaacaattccatccagaagattaaacgaatggcgtgtggatttagaaatccgcaaaggtttaaaaatgcaatcctctttcatttgggtaaattagacctttttccttccactacatag

SEQ ID NO: 43174 - protein, 197 aa, Unknown
  Obtained from environmental sample
  misc_feature (1)..(197): Xaa is any amino acid
MDAYIKAVKAAIPRAKEKIAFDRFHVSKHINEALDKVRRREHGAFMNRAGESPLSKSRFQWLTNSNRTDNRSGKRKAFMSLSRLNMETARAWRIKEAASSLWEYVYMNVAEAAWKKLLWWISHCRIPEMIRAGKTIQNYFWGILNAIRLKATNGMLEAKNNSIQKIKRMACGFRNPQRFKNAILFHLGKLDLFPSTT

SEQ ID NO: 43175 - DNA, 621 bp, Unknown
  Obtained from environmental sample
  misc_feature (1)..(621): n is a, c, g, or t
atgcccccatgggtgattacagctgtaacaatggacgatgcatccaggaaagtaacaatacggatagagcatgatcctgagaaaatactgacctgcccaatatgcgcacaaagcaccaagctgcatgaccatcgggtacgggtgttaaggtatttagacgcctgtcagtacgagacttttctcgaagtgcatgtgccgagaatacggtgcgaaaaagacggagtgcagcaaatacagattccgtttgcggaaaaacattcccggtttaccagccggtttgaaatggctgttctggtatggcttcaaagcagccccatatctgacgtggcggaaaacttcgacatgagctgggacgaagtggacgggatattgcaacgggcggtcaaacgagggcttgcccggaggaagcgggagaaagtagtcaacatggggatcgacgagacgtcatatcaaaagaggcacaaatatgtgaccataatccaggacaaagacagggattgcgtgatagacgagcttgacgaccggaaggcggaaactgtcgaaaaatggcttaaaacgcaggaaaagagcgatttaagcgaggcaaacagcatatccatggatatgtggacgcgtatataa

SEQ ID NO: 43176 - protein, 206 aa, Unknown
  Obtained from environmental sample
  DOMAIN (142)...(206): Transposase
  misc_feature (1)..(206): Xaa is any amino acid
MPPWVITAVTMDDASRKVTIRIEHDPEKILTCPICAQSTKLHDHRVRVLRYLDACQYETFLEVHVPRIRCEKDGVQQIQIPFAEKHSRFTSRFEMAVLVWLQSSPISDVAENFDMSWDEVDGILQRAVKRGLARRKREKVVNMGIDETSYQKRHKYVTIIQDKDRDCVIDELDDRKAETVEKWLKTQEKSDLSEANSISMDMWTRI

SEQ ID NO: 43177 - DNA, 1239 bp, Unknown
  Obtained from environmental sample
  misc_feature (1)..(1239): n is a, c, g, or t
atgaatttttccataatattcgcagttatccttctggtattggcggcggttattactttattagtctcaaacaacattgttaaacctattgtcgtcgtgaccgacacgttaaaggacatatctgagggcgagggcgacctgacgcggactgtcgctgtcacttcaaaagacgaggtaggccatcttgccatgtactttaacaagacgcttgaaaaaatcaaaaacctgattcttattattaaaagacaggcaggcgtgttatcggaaatcggcgcggatttgtccagcaacatgaccgaaacggcggcgacggtgaacgaaattacctccaatattcagagtatcaaaggcagagtcataaaccaaagcgccagcgttaccgaaacaaacgcgactatggaacaagttgtcacaaacatcaacaaactcaacggccatgttgaaaatcaggggcgtaatatttcacaggcgtcttccgccattgaggaaatggtagccaatatcaattcggttaccaaaacgcttgtcagcaactccgccaatgtaaacacattacaggaagcctccgaagtgngaaagactggattgcaggaagtgtcggcggacattcaggaaataacccgcgaatccgaaggattaatggaaattaacgcggtaatggaaaacatcgccagccagaccaatcttctttcaatgaacgccgcgattgaggcggcgcatgcgggagaagcgggtaaagggtttgccgttgtcgccgatgagatacgcaaactggccgaaagttccagcgagcagtccaagaccatcggcgatgttttgaaaaaaataaaaagttcgatggacaagataactaaatccaccgaaaacgtcctaacaaggttcgaggcgattgacacaggcgttaaaactgtggcggagcaggaagagataatccgtcaggcaatggaggagcagggcgaggggagtaagcagcttcttcagggaactggcaatttgaatgaaattaccaagaaagtaaaggccggttccggggaaatgcttaatggcagtaaagaagtgataaatgagagtgaaaatcttgaaaaagcaacccaggagataaccaacggcatgaacgaaatggctaccggcgcggagcaggtgaatatagcagtgaacaatgtcaacgagataagcaacaagaaccgcgagggcattgatactttgatacgggaagtttcacggtttaaggttaactaa

SEQ ID NO: 43178 - protein, 412 aa, Unknown
  Obtained from environmental sample
  SIGNAL (1)...(15)
  DOMAIN (148)...(370): Methyl-accepting chemotaxis protein (MCP) signaling domain
  misc_feature (1)..(412): Xaa is any amino acid
MNFSIIFAVILLVLAAVITLLVSNNIVKPIVVVTDTLKDISEGEGDLTRTVAVTSKDEVGHLAMYFNKTLEKIKNLILIIKRQAGVLSEIGADLSSNMTETAATVNEITSNIQSIKGRVINQSASVTETNATMEQVVTNINKLNGHVENQGRNISQASSAIEEMVANINSVTKTLVSNSANVNTLQEASEVXKTGLQEVSADIQEITRESEGLMEINAVMENIASQTNLLSMNAAIEAAHAGEAGKGFAVVADEIRKLAESSSEQSKTIGDVLKKIKSSMDKITKSTENVLTRFEAIDTGVKTVAEQEEIIRQAMEEQGEGSKQLLQGTGNLNEITKKVKAGSGEMLNGSKEVINESENLEKATQEITNGMNEMATGAEQVNIAVNNVNEISNKNREGIDTLIREVSRFKVN

SEQ ID NO: 43179 - DNA, 924 bp, Unknown
  Obtained from environmental sample
  misc_feature (1)..(924): n is a, c, g, or t
ttgaatcccgaacaggcggaaatcatcataggtttgtcaagtcaaaagggaatacgcaggataatcaaggcggactggaacggtggagaacttttttttaaaccgggtaaccgtaattttactcttagtttttcaggcaacaacggcatcaacgctttaagcccctttaatacaaatggagaaaatatattcgacattcaattcgcggtgcagggcggaaaagcgcttcgggcgcttcccatcggcgaaactacgcgtgtgcgcataaagactgattggccgtcgccgtcgtttcagggaggctttttaccggtaaattatactctgtccgaaagtggttttgacgccgaatgggaaataagttatttaagcagatcaattcctctttactggatatctaccgccagcggaaacaatgaaggtaataaagattggacagacgaatattttggcgtggattttttcaagccgcttgatcattacgcgctaaatacgcgcgcggtaaaatacgcggttttgtttttggtaattccgtttttaaccttgttttttctggaagtgttttcacaaaaatcaatacatcccgtacaatatttgctttctggtttcgcaaacgtaattttttatcttttactgctgtcaatttccgaacatctttctttttcagccgcttatctcctcgccgccgccgcgcttacctgcatgatgacgctgtatgcccgctcgttactcgaaacatggacccgcagcgcgtatatggggcttgtcatggcgcttttgtaccttattatgtaccttacgctcaatgtcgaggattgggctttgcttattggttcaatcgcggccttcttaataaccggcgttgtaatgttcctgactcgcagactggattggtccaacctgaatataaaaggggaaaaatga

SEQ ID NO: 43180 - protein, 307 aa, Unknown
  Obtained from environmental sample
  DOMAIN (1)...(306): Inner membrane protein CreD
  misc_feature (1)..(307): Xaa is any amino acid
MNPEQAEIIIGLSSQKGIRRIIKADWNGGELFFKPGNRNFTLSFSGNNGINALSPFNTNGENIFDIQFAVQGGKALRALPIGETTRVRIKTDWPSPSFQGGFLPVNYTLSESGFDAEWEISYLSRSIPLYWISTASGNNEGNKDWTDEYFGVDFFKPLDHYALNTRAVKYAVLFLVIPFLTLFFLEVFSQKSIHPVQYLLSGFANVIFYLLLLSISEHLSFSAAYLLAAAALTCMMTLYARSLLETWTRSAYMGLVMALLYLIMYLTLNVEDWALLIGSIAAFLITGVVMFLTRRLDWSNLNIKGEK

SEQ ID NO: 43181 - DNA, 507 bp, Unknown
  Obtained from environmental sample
  misc_feature (1)..(507): n is a, c, g, or t
ttggaaagcctgcgcagtaacatttctttggttttgcaggacacttttttatttaacggaactatcgaagaaaatatcgcgtttgcaagatcggacgcttcgattgaagagattaaatctgcggcgcagacagcgaggatacatgacgacataatgcaaatgcccgaagcttatcagacacagataggggaacgcggcgttaaattgtccggcggacaaaagcagcgtatagcgatagcgagggcggtactgtgcaattctccggtgcttattcttgacgaggcgaccgcgtctgtagacgtacacaccgaagagcagatacaacaggcgatcaacgaaattgccggaagccgcacaatcgtaaccatcgcgcacaggctttctaccattcgcaacgcggacgttatttatgtttttgaaaaagggcggattattcaatcgggaagccatgacgagttgattgggcaggaaggactttacagaaatttatgcagaacagggaaataa

SEQ ID NO: 43182 - protein, 168 aa, Unknown
  Obtained from environmental sample
  DOMAIN (1)...(142): ABC transporter
  misc_feature (1)..(168): Xaa is any amino acid
MESLRSNISLVLQDTFLFNGTIEENIAFARSDASIEEIKSAAQTARIHDDIMQMPEAYQTQIGERGVKLSGGQKQRIAIARAVLCNSPVLILDEATASVDVHTEEQIQQAINEIAGSRTIVTIAHRLSTIRNADVIYVFEKGRIIQSGSHDELIGQEGLYRNLCRTGK

SEQ ID NO: 43183 - DNA, 945 bp, Unknown
  Obtained from environmental sample
  misc_feature (1)..(945): n is a, c, g, or t
ttgcgcccaggcgattcggttgggacttccgtgtgggagattgccgtgcctgcggtgttcagcgtcccggctggtttttatccggttatatccgcggatctgctgccgggaaaagacgcggcctttgacgcgggaaagcttcattgtgagctgttgccggcgctgacgcgcctgagcgttcctgccggactcatttcgccgggagccatgcctctgaccttaaaaggagagcgcgtcgattccttccgccagacttacgcgaatatgccgcctttccccgagccaatacccgcggatcccgggctggttctttcatggcctgtggcaaactggcgcgacaaacgttatgaggttttccgctgggagaaattcccttccctgctgatttttgattttgccgattacgcggtgcaggacaggatgctgaaacgcctcgcgttttttgttgaaaaaaaaggtttccgcggaaggcttgcccctgacagcgagatcgctgaactccacgcctggaacgcccacgattatcgcgccgaagaccttgtccgtttttttcagaaagcgcgtgacctgcaattccctctgcttgccgaagaacgggagcttgagaggatactttttaacgcggatataatccgcggcgccgatggcggcaaaataacagccggagacggngggataatttctatttcaagagagtcaaatgattatctgcgatctctcttcatggcgcatgagggctttcacggcctgttctttattgacggggatttccgggatttcagcccgagacgctggaggcagcttcctcctcaggcaaagcggtttatagtctcgtatttcggctatcagccatacgacattgacgatgagtaccttcttgtcatgagttcatgggccatgttttacagcagccggtttcgcaggccggacattattttggagtga

SEQ ID NO: 43184 - protein, 314 aa, Unknown
  Obtained from environmental sample
  misc_feature (1)..(314): Xaa is any amino acid
MRPGDSVGTSVWEIAVPAVFSVPAGFYPVISADLLPGKDAAFDAGKLHCELLPALTRLSVPAGLISPGAMPLTLKGERVDSFRQTYANMPPFPEPIPADPGLVLSWPVANWRDKRYEVFRWEKFPSLLIFDFADYAVQDRMLKRLAFFVEKKGFRGRLAPDSEIAELHAWNAHDYRAEDLVRFFQKARDLQFPLLAEERELERILFNADIIRGADGGKITAGDGGIISISRESNDYLRSLFMAHEGFHGLFFIDGDFRDFSPRRWRQLPPQAKRFIVSYFGYQPYDIDDEYLLVMSSWAMFYSSRFRRPDIILE

SEQ ID NO: 43185 - DNA, 600 bp, Unknown
  Obtained from environmental sample
  misc_feature (1)..(600): n is a, c, g, or t
atgaattttattatgttcactgatgcccactgccatccctttgatctcgcggaatgtttagacgatgccgaggaagaacggcgcagtctcggtgtactctgcgcctcaagcgcggctgctttggaagaatttgaatactgtgagcggctttcaattcaggcaaaacaggataaagccccgcccttattgccgtgttttgccgtgcacccgcaaatggcattaatagttaaaaataccaccaatgttacgcgatattcattgcgggacagcttgtccgttctggatacgcttgcgcgacagggccgcctttgcgcggtgggggagaccggctttgacttatacaatgccgatttcaaagaaaccgagaaaacgcangacgaactgtttgcggtacatcttgagattgccctgcaatacggtctgccgctggtgatacattcgcgccgcgcgatgcacaagatatttaccagcgccccggccttaaaaaaatgcagggctgttgtgtttcattcatggtcaggcacacaaggggagggcgaaagcgctgctcaatcggggcataaacgcctttttttcattgggcgcggcgataacgcttaa

SEQ ID NO: 43186 - protein, 199 aa, Unknown
  Obtained from environmental sample
  DOMAIN (5)...(192): TatD related DNase
  misc_feature (1)..(199): Xaa is any amino acid
MNFIMFTDAHCHPFDLAECLDDAEEERRSLGVLCASSAAALEEFEYCERLSIQAKQDKAPPLLPCFAVHPQMALIVKNTTNVTRYSLRDSLSVLDTLARQGRLCAVGETGFDLYNADFKETEKTXDELFAVHLEIALQYGLPLVIHSRRAMHKIFTSAPALKKCRAVVFHSWSGTQGEGESAAQSGHKRLFFIGRGDNA

SEQ ID NO: 43187 - DNA, 357 bp, Unknown
  Obtained from environmental sample
  misc_feature (1)..(357): n is a, c, g, or t
ttgtgtttcattcatggtcaggcacacaaggggagggcgaaagcgctgctcaatcggggcataaacgcctttttttcattgggcgcggcgataacgcttaaccataaggaaatgatgcgttgctgcgcggctttcccggcggaacgcctgcttaccgagaccgacgccccgttccagcctccccgcggcagggagttctcccgttatgcggatataaagacagttcttagcgcgatggaagccctgcgcgccggcggcggcgccgttagcggcggcgccgtcaacggcggcgccgtcaacggcgggacgaaaatggaaaaaatcattgaaacaaatttccgcgccgcgttctgttaa

SEQ ID NO: 43188 - protein, 118 aa, Unknown
  Obtained from environmental sample
  misc_feature (1)..(118): Xaa is any amino acid
MCFIHGQAHKGRAKALLNRGINAFFSLGAAITLNHKEMMRCCAAFPAERLLTETDAPFQPPRGREFSRYADIKTVLSAMEALRAGGGAVSGGAVNGGAVNGGTKMEKIIETNFRAAFC

SEQ ID NO: 43189 - DNA, 438 bp, Unknown
  Obtained from environmental sample
  misc_feature (1)..(438): n is a, c, g, or t
gtgagcaaaaagcaggcggaaaaatcgaagtctgaggatattgccggcatttttgcgggacggcgcattctgctggttgaggacgtggaaattaaccgcgagattgtactggccctgcttgaaccgacaaaactggagatagactgcgccgagaacggggcgcaggcggtccgcatgttcggcgaggccccgcgcaagtacgaaatgattttcatggatatacaaatgcctgaaatggacggttatgaggcgacgcggaaaatcagatcgctggatgcacaggaggcaaaaaccataccgattgtagccatgacggctaacgtcttcagagaggatattgaaagatgcctcgacgccggcatgaacagccatgtgggcaaacctgttgattttgacgaagtcctgaaccgtcttcgcgcgtatttgcctgttaattga

SEQ ID NO: 43190 - protein, 145 aa, Unknown
  Obtained from environmental sample
  DOMAIN (21)...(139): Response regulator receiver domain
  misc_feature (1)..(145): Xaa is any amino acid
MSKKQAEKSKSEDIAGIFAGRRILLVEDVEINREIVLALLEPTKLEIDCAENGAQAVRMFGEAPRKYEMIFMDIQMPEMDGYEATRKIRSLDAQEAKTIPIVAMTANVFREDIERCLDAGMNSHVGKPVDFDEVLNRLRAYLPVN

SEQ ID NO: 43191 - DNA, 666 bp, Unknown
  Obtained from environmental sample
  misc_feature (1)..(666): n is a, c, g, or t
atgagtaaagaagtaccaattcacatttttcaaaatttaggaaattcacacgatattccacctattaaaattggttatacagtggaagatgaaactgaaaataatcctcctaaaaaagagtatgatgaagcttctggttttgatttacgatctatggaaaatgttatattaaagccgggagaaacaaaaattgctaaaacaggattacgaatagaaattccgtttcttgaaaaatctcatttccaattagaaggacagatacgtagtacttcaggaaatgctgcaaagcgtgatatatttgtattaaattctcctggtactattgatgctgattatagaggagaaattaaatgtatcttgcataatgcaggaaaaacaatgtggactatttctaaaggtgataagataggacaacttgttataactccggtatttcgaaatattgaatttgtaaaagaaactgaattatcagaaacttcacgaggagaaaatggtttaggaagtacggggactgttgcacaagaagctacagttaaagttgatgagagtagacttttagctaaatcaaatactgatcctatatatggatctaatgatacaccaatacctgatcctaataatcaagatcctaataaagttagtgttacaaggagaactgaaatataa

SEQ ID NO: 43192 - protein, 221 aa, Unknown
  Obtained from environmental sample
  DOMAIN (32)...(170): dUTPase
  misc_feature (1)..(221): Xaa is any amino acid
MSKEVPIHIFQNLGNSHDIPPIKIGYTVEDETENNPPKKEYDEASGFDLRSMENVILKPGETKIAKTGLRIEIPFLEKSHFQLEGQIRSTSGNAAKRDIFVLNSPGTIDADYRGEIKCILHNAGKTMWTISKGDKIGQLVITPVFRNIEFVKETELSETSRGENGLGSTGTVAQEATVKVDESRLLAKSNTDPIYGSNDTPIPDPNNQDPNKVSVTRRTEI

SEQ ID NO: 43193 - DNA, 882 bp, Unknown
  Obtained from environmental sample
  misc_feature (1)..(882): n is a, c, g, or t
atgcaaacagaaagtcaagatactaatcaagtgattcttaaaaatagacgtattggaatttgtcaaacaggtattattgatgcattcataaaacatggaagacgtgaagtaattcaatggtttaataaaggatatgcctatcttaaaaaacttgataatgaatattcaagtgaatggttatgtgttccaacaagtaaacgtatttgttcatgtaaaccagacggtagtatgtcgtgtttgacaggtgcatctccaggtatacattatcctcatgataaatattatattagacgagttcgtattgctgctaattcaaatatttgtccaatattaactcgtcatggatataaaagtactcaagagcgagaaaatttagtgtttgaatttcctgtagaatctagatattttgaaagagcaaaagctgatgcaagtatttgggaacaagtgaaaaatgcagttgatgttcaacgatattggtcagataatgcagtaagttgtacaataacttttaaagaagaagaagcaaaagaaataccacgggtacttcaagcatatgaagattcacttaaaggaatttcatttataaaactttcaacagatgtatatcctttaatgccgtatgaatctattactaaagagcaatatgatgaaatgtggaaaggtataactcctattgattatcatgaatttactattcatcaagatcctgttggagagaaattctgtagtaatgattcatgtgaatttactcctggccataaaacgtttggtagatctgataacgaaacagaagagatacgggaacgtagttattcttcggtaagagaaaatgatgagcgattctgtgatggtgataaatgtgagatacctcaacggtcttaa

SEQ ID NO: 43194 - protein, 293 aa, Unknown
  Obtained from environmental sample
  misc_feature (1)..(293): Xaa is any amino acid
MQTESQDTNQVILKNRRIGICQTGIIDAFIKHGRREVIQWFNKGYAYLKKLDNEYSSEWLCVPTSKRICSCKPDGSMSCLTGASPGIHYPHDKYYIRRVRIAANSNICPILTRHGYKSTQERENLVFEFPVESRYFERAKADASIWEQVKNAVDVQRYWSDNAVSCTITFKEEEAKEIPRVLQAYEDSLKGISFIKLSTDVYPLMPYESITKEQYDEMWKGITPIDYHEFTIHQDPVGEKFCSNDSCEFTPGHKTFGRSDNETEEIRERSYSSVRENDERFCDGDKCEIPQRS

SEQ ID NO: 43195 - DNA, 801 bp, Unknown
  Obtained from environmental sample
  misc_feature (1)..(801): n is a, c, g, or t
atgaaacctgtaaactttaagatagtattttccagtaccttaaaaaaatttcctccattctatcaatcaaagaatactttaatttttaacggtgactgtttggagatactgcactctatccctgaaaattcgatagatatgatttttgccgatccgccgtatatgctgtctaatgacggatttacttgccaaaacgggaaaatggttaatgtgaacaaagggaagtgggataaaagcaatggttttgaaaatgacacaatgtttcataatgagtggatttccgcttgcagacgtgttttgaaacctgaaggaacaatttggatttcggggacatatcacagcatttatcaatgcggttatcttctgcaaaaaaataattttcatattttaaatgacataacatggtttaaacctaacgcatcgcctaacttgagctgccgtttttttacagcgtcgcacgaaacgcttatttgggctcgcaaagataaaaaagcaaaacacacatttaattacgataaaatgaaaaacggaattttccccgaagataaattaaaaaatgaaaacacgcaaatgagatcagtttggtcaataccaactcccaaaagcaacgaaaaagaacacggaaaacatccgacgcaaaaaccgttagaccttctaaaacgcattgtacttgcatcgacaaacgaaaacgctgttgtactcgatccatttgcggaagcggaacgacaggagccgcctgcaaatgtttaccggacagattttttatcggtattgaaattgataaatcatattgcgatttag

SEQ ID NO: 43196 - protein, 266 aa, Unknown
  Obtained from environmental sample
  DOMAIN (45)...(265): DNA methylase
  misc_feature (1)..(266): Xaa is any amino acid
MKPVNFKIVFSSTLKKFPPFYQSKNTLIFNGDCLEILHSIPENSIDMIFADPPYMLSNDGFTCQNGKMVNVNKGKWDKSNGFENDTMFHNEWISACRRVLKPEGTIWISGTYHSIYQCGYLLQKNNFHILNDITWFKPNASPNLSCRFFTASHETLIWARKDKKAKHTFNYDKMKNGIFPEDKLKNENTQMRSVWSIPTPKSNEKEHGKHPTQKPLDLLKRIVLASTNENAVVLDPFAEAERQEPPANVYRTDFLSVLKLINHIAI

SEQ ID NO: 43197 - DNA, 984 bp, Unknown
  Obtained from environmental sample
  misc_feature (1)..(984): n is a, c, g, or t
ttgttcgcgacatttatgaaggtgcgttattgtcgctgtagacacaaacntcttcgctttttcataaaaaacggcattcaacctgattttgtccttgtagttgatcctcaattctggaacagccgtcatcttgaccgctgtgtccgcgaaaaagacaatttacaaaccgcgcttatagccgaatccgccgtttatccgcctgtattaaaactgctctttaaacataaatttctctgcggctccatgttcccgcttggaatgtttattgaaaaacgcgtcgattcaaagacaaggcttggggcggggggctctgtcgcttctacggcatgggatttcgcgcgctttttaggcgctcaggaaatttggatcgccggattggatctttcgtttccaggtttaaaaacacacttccggggcgcgcgttttgaggaaatttccaactcaagctccaatcgctttaaccccgccgaaaaatgggcagtgcgcgccctgcgcgacggcttccctttcaaagcgccttccgtctccggcgaacaggtaacaacagacagacgactttccctctacgccgcctggttcgaggctcaatttactcataacaaacaaatacaaaattattctatcttccacgaaggactggcaataaaaggactccagtcggcggacagccaaaaacttttagcactgccgaaacgccgggaagaaatcgaccgccgtattcagcggacattttccgaaatagaaaaagattttaacgcccccgaagaanaatacgccagagcggaacgttatgacaaagcggttaacgctctaacgcacggattggaaagtataaaaacagccgctgaagaaggagcggaaattgccaaggacagcgaatttaaggaaatagcggatttcttgtcggcatgtgtggagaaagagcggtataatgcgtatttaaaggaagtattaaaattgtatggagtaattttaaaacaatga

SEQ ID NO: 43198 - protein, 327 aa, Unknown
  Obtained from environmental sample
  misc_feature (1)..(327): Xaa is any amino acid
MFATFMKVRYCRCRHKXLRFFIKNGIQPDFVLVVDPQFWNSRHLDRCVREKDNLQTALIAESAVYPPVLKLLFKHKFLCGSMFPLGMFIEKRVDSKTRLGAGGSVASTAWDFARFLGAQEIWIAGLDLSFPGLKTHFRGARFEEISNSSSNRFNPAEKWAVRALRDGFPFKAPSVSGEQVTTDRRLSLYAAWFEAQFTHNKQIQNYSIFHEGLAIKGLQSADSQKLLALPKRREEIDRRIQRTFSEIEKDFNAPEEXYARAERYDKAVNALTHGLESIKTAAEEGAEIAKDSEFKEIADFLSACVEKERYNAYLKEVLKLYGVILKQ

SEQ ID NO: 43199 - DNA, 639 bp, Unknown
  Obtained from environmental sample
  misc_feature (1)..(639): n is a, c, g, or t
ttgcttcacaatctcggcgatctgggatttatgaaaaactttacatgggcgtttgtcctgcggaatatgggtaagagctgggcgcctacatggtttacaccctgggcgggcgtcacatttgactttcttcagattaaaggcaaagggggaaagcccgatccgctggtgttgaattttgccgccgatgtcggagtcccttccgtcttcgttcctgaaaaaatcaaccttattatcaagacgggaatcaccgttaccgttcttgaaaaatttaccctttccgtattatggcccggcgcggggggctacaatatgcgtgaggcaatcaaagaaaacagcggccatttccagtggctcccctctgtgggaatggggattaactttatattaccgtacagcggcaaaaggcagccgggcgaatatcgccttagcgaaagacgcccctccgacggggatataacatttgacgccgcgttcaagcctttgtattacgatgtttacgcgacaggcgcgggagttacatggtacgcgggttacaaagacgatctgccgccaaatattattgttaattatcccgaaacccagtatatttcacctaactatgacggaaaatccgacgctcttgtttttccgtcagaatag

SEQ ID NO: 43200 - protein, 212 aa, Unknown
  Obtained from environmental sample
  misc_feature (1)..(212): Xaa is any amino acid
MLHNLGDLGFMKNFTWAFVLRNMGKSWAPTWFTPWAGVTFDFLQIKGKGGKPDPLVLNFAADVGVPSVFVPEKINLIIKTGITVTVLEKFTLSVLWPGAGGYNMREAIKENSGHFQWLPSVGMGINFILPYSGKRQPGEYRLSERRPSDGDITFDAAFKPLYYDVYATGAGVTWYAGYKDDLPPNIIVNYPETQYISPNYDGKSDALVFPSE

SEQ ID NO: 43201 - DNA, 906 bp, Unknown
  Obtained from environmental sample
  misc_feature (1)..(906): n is a, c, g, or t
atgatggacgtgaaggatatttacgggcgttattatttggaaaaaaaaggagttgaggttccgtcaaatatgcgctgggacggcgtttttgacacaggcgagatcgggccggacggaaaatattttttctccatcagcgcagcggacgaaaacggcaatgtcggaaccagccccatctacgaggtaatagtgaagaacaaggcgccgcaggtcgctatagacaacataaaccttaatgatcgtctttttgatccttcagggggaaccaggacatccattaacatcgttccccgcggcactgaagaagataaatgggaaagcggcatttacgattccgaagacaggctggtacggacattcgcgcccaaaagcgggagtccgcagccgcaggtttgggacggtaaaaccgactcaggtcagcttgccccggacggcgcttatactttcaaaatagcggccaccgacagggcgcagaacacggggtctgccgttatgagtaatatcgttgtgggcacaaaaacagccgacgctatcctcaccatgtccacggacgcgatttcacccaaaacaacaagccagaccgccgagttggtacgctttaatgaccgccttaaccggacggacgccatagacacatggaaactggaaattaaaaatgacaaaggcgctattgtaaagatctatcagggaagcggaggaaggcccccggaaaacttcagttggaacggactgtccgacgatggttcgatccctgagggattggtttatcctgagtttaccgtanactatcgtgacggctttgtcgcaaacgccaaatccccgccgattttaatagacacaaccggcccccgtttttggatttatcgtcaagacccaatcaattcagtcctgataatgaccgcgtga

SEQ ID NO: 43202 - protein, 301 aa, Unknown
  Obtained from environmental sample
  misc_feature (1)..(301): Xaa is any amino acid
MMDVKDIYGRYYLEKKGVEVPSNMRWDGVFDTGEIGPDGKYFFSISAADENGNVGTSPIYEVIVKNKAPQVAIDNINLNDRLFDPSGGTRTSINIVPRGTEEDKWESGIYDSEDRLVRTFAPKSGSPQPQVWDGKTDSGQLAPDGAYTFKIAATDRAQNTGSAVMSNIVVGTKTADAILTMSTDAISPKTTSQTAELVRFNDRLNRTDAIDTWKLEIKNDKGAIVKIYQGSGGRPPENFSWNGLSDDGSIPEGLVYPEFTVXYRDGFVANAKSPPILIDTTGPRFWIYRQDPINSVLIMTA

SEQ ID NO: 43203 - DNA, 1050 bp, Unknown
  Obtained from environmental sample
  misc_feature (1)..(1050): n is a, c, g, or t
atgatggccgagaatataattcttggcgccggcatggttatcgatcccaaagcgttattcgacgaaataaaaatgctggaagaccgcggcatagacacaaaagggagaatttttatctcagaccgcgcgcatatcgttctgcccaaatatattcaaattgacaaagagcgcgatgcggcgcggaagaaaccaatcggcacgacaggccgcggcatcgggatcacttattcaatgaagagcgaaagagacggtatccgcgtagccgaccttaattggaaagaaaaaatggacgagcttgacaagagcgaccgcgattttcttgcgccgtataccgacaaactccttgaaatgtcggttgatctcagcacataccttatgcaccgtaaaaattcacaggtgctttttgagggagcgcaagggactctccttgatctcgaccttggaacttatccctatgtttccagcggaatgtcctgcgcggcgggcgcggcggtcggcggctgtatcgggccgcgctccatcgacaaaatacttggcgttttcaaagcttactcaacccgcgtcggaaacggaccgcttcccagcgaatttgatccgtcttctgaagacgaactttgccgctttgtccgcgacacaggccgcgaatacggcgtaacaaccggaaggccgcgccgctgcggctaccttgaccttgtttctctgcgctatgcctgctttaccaactcgattgacagccttgtgatgactcaccttgacgtatacgacacttttgaggaaatcaaggcgtgtatcgcctaccgaatcggcgacaaaatcgtggaaacttttccggcctcgattgaagaccttaaccgcgcgaaacccattctgcggactttttccggctggaaaaaatctctcgcaaacgcgcttacctatgaggaattccccgttgcggcgatggaatacataagctttatagaacgtttctgcgaggccccggttgatgttgtttctgtcggttacgaccgcaaagcgactataatccgcaaaagcccctgggttagataa

SEQ ID NO: 43204 - protein, 349 aa, Unknown
  Obtained from environmental sample
  DOMAIN (1)...(342): Adenylosuccinate synthetase
  misc_feature (1)..(349): Xaa is any amino acid
MMAENIILGAGMVIDPKALFDEIKMLEDRGIDTKGRIFISDRAHIVLPKYIQIDKERDAARKKPIGTTGRGIGITYSMKSERDGIRVADLNWKEKMDELDKSDRDFLAPYTDKLLEMSVDLSTYLMHRKNSQVLFEGAQGTLLDLDLGTYPYVSSGMSCAAGAAVGGCIGPRSIDKILGVFKAYSTRVGNGPLPSEFDPSSEDELCRFVRDTGREYGVTTGRPRRCGYLDLVSLRYACFTNSIDSLVMTHLDVYDTFEEIKACIAYRIGDKIVETFPASIEDLNRAKPILRTFSGWKKSLANALTYEEFPVAAMEYISFIERFCEAPVDVVSVGYDRKATIIRKSPWVR

SEQ ID NO: 43205 - DNA, 327 bp, Unknown
  Obtained from environmental sample
  misc_feature (1)..(327): n is a, c, g, or t
atgaaaaacacattaattgacattaatattttcatggatttcttgtttaaacgacaagggcatgaaagtgttgtagagatcttcaagtactgtataaaaggaaatataaaaggatttatttgcgctcatgaaataactacattatgttactttttagacaaagcagaaatggataaatcaaaaacaaagaaggtaatttcacaattaatgaagaggtttaatgttattgaagtaaatgaagaattattgagtaaggcattaaattcggaaataaatgattttgaggatgcagtaattgaagtgtcagcaattaacaaaaacacctga

SEQ ID NO: 43206 - protein, 108 aa, Unknown
  Obtained from environmental sample
  misc_feature (1)..(108): Xaa is any amino acid
MKNTLIDINIFMDFLFKRQGHESVVEIFKYCIKGNIKGFICAHEITTLCYFLDKAEMDKSKTKKVISQLMKRFNVIEVNEELLSKALNSEINDFEDAVIEVSAINKNT

SEQ ID NO: 43207 - DNA, 834 bp, Unknown
  Obtained from environmental sample
  misc_feature (1)..(834): n is a, c, g, or t
gtgggaatagaggcctatgaaaacgctcccgtcattttcgcccccgccgtgggaagctacgttggcggggacatcaccgccgggctgctctgtaccggccttgccgccgattccggcgaattgattttatttatcgacatcggaaccaacggggaaattgtccttggaaacggcgaatttatctttgcctgcgcctgctccgccgggcccgcttttgaaggcggagggattaagcacggcatccgggcgcgcgaaggggcaatcgaacgggtggcaattgatgaaaccggcaggccgcatatccagaccatcggcggctctcctcccgccggtatctgcggatcgggaatcatttccgcgatcgcggaacttttcagaaagggaattatcgactccgccggaaaattcgccgaaaagaacggagaatacgccctttgtgatggaatcactatctgcgagaccgacatcgacaattttatccgggcaaaaggcgctattttttccgcctgccaaaccctgctcgcgagcgtcggcctctccttcaaagacgtggacaggttttacgttgcgggaggtttcggaagcttccttgatctggaagacgccagaaccataggcctcctgccgcgcctcagcgacgagaagttcagctttctaggcaacacatctgtcattggggcgtatttaaccctggtttccgaagagcgccgggccaaagaacacgaactggccgggaaaattacctacgtggatttaagcagtgagcgccaatacatggatcattacacggcggctttatttctgccgcatacagatcgcaagctgttcgagtga

SEQ ID NO: 43208 - protein, 277 aa, Unknown
  Obtained from environmental sample
  misc_feature (1)..(277): Xaa is any amino acid
MGIEAYENAPVIFAPAVGSYVGGDITAGLLCTGLAADSGELILFIDIGTNGEIVLGNGEFIFACACSAGPAFEGGGIKHGIRAREGAIERVAIDETGRPHIQTIGGSPPAGICGSGIISAIAELFRKGIIDSAGKFAEKNGEYALCDGITICETDIDNFIRAKGAIFSACQTLLASVGLSFKDVDRFYVAGGFGSFLDLEDARTIGLLPRLSDEKFSFLGNTSVIGAYLTLVSEERRAKEHELAGKITYVDLSSERQYMDHYTAALFLPHTDRKLFE

SEQ ID NO: 43209 - DNA, 894 bp, Unknown
  Obtained from environmental sample
  misc_feature (1)..(894): n is a, c, g, or t
ttggccgagangcccgaagacgcgtttcttttggaaggggcgcgccttgcgggcgtttttattgaaacgccctgcggaggcaagggaacctgccaaaaatgccgcgtgaaaataaccgtagacggtgttgcgtctaacgttctgatctgccagaccaaaaccggcaataagcctgttactgtggagcttccgggaaactccgctgtaggtgacggacagtttgagaatttcgaggatcctgccaaatacttaagccggagcggggaagcttttttaagaaaggtaagtctgcaaattcccttacccgcgctgctggacggcttgtcggacgccgacaggttttccaaaactttccttaaaactgttaattgtaaaactatcgatctgccccttgacgtattggctgttttgccggaaaaactgcgggaagctaacggcgaagtacaggcttattacttcatggaaaatgatattgccagggttgtggatatttcccgggaaaaagcctatgggattggcgtggacataggcactactaccgtcgccctctggcttgtggatttggaggacaaaaaggttcttgccgcgcgtaacgcctacaacgatcaaattgagtgcgggctggacgtgatcagccgcataaattatgcgaagaaataccttcccgatctgcgctcgcggatcataaaaacaataggtgagcttattaccgttgcctgtaaaaacacgggtgtcccgcccgaccggattctaaacgtttccctggccggcaacaccacgatgatccatttgttgctgggaatcatacccgaatatatcaggctggctccgtatacgccggcggtttttctgcctcagtttatccggcggcgcagtgggaatagaggcctatga

SEQ ID NO: 43210 - protein, 297 aa, Unknown
  Obtained from environmental sample
  misc_feature (1)..(297): Xaa is any amino acid
MAEXPEDAFLLEGARLAGVFIETPCGGKGTCQKCRVKITVDGVASNVLICQTKTGNKPVTVELPGNSAVGDGQFENFEDPAKYLSRSGEAFLRKVSLQIPLPALLDGLSDADRFSKTFLKTVNCKTIDLPLDVLAVLPEKLREANGEVQAYYFMENDIARVVDISREKAYGIGVDIGTTTVALWLVDLEDKKVLAARNAYNDQIECGLDVISRINYAKKYLPDLRSRIIKTIGELITVACKNTGVPPDRILNVSLAGNTTMIHLLLGIIPEYIRLAPYTPAVFLPQFIRRRSGNRGL

SEQ ID NO: 43211 - DNA, 864 bp, Unknown
  Obtained from environmental sample
  misc_feature (1)..(864): n is a, c, g, or t
gtggaggtcaaattgattagaggatggtataccgccgccagcgggatgcgcgcgcagcaatggcggctggacgctgtggctaataaccttgccaatgtgaacaccgacggttataaacgggatgtggcggcttttaaggcctttccggagctgcttatacgcagacaggacgacgacggggtctatttgcaccccttcggctccgccgacgccgccccaatcgtggggaaaatgggcaccggggtcgagttaaacgagctttacaccgcctttgagcaaggctctttcaaggaaacccagagcgattttgacgttgccctggaagggaaaggcttttttgccgtttccactccctggggcgagcgctatacccgcaacggttccttccaacttggcaaagaaggttaccttgaaaccaaagaaggctataaggttcttggggaatacggcccattaagggtaaaagccaacaatttccagattgacaaggacggcacggtatggataaacgcggcaatcagcgatgatcccgacgtaatggtaagccgcgaaggaaatacatgggaagacaccgtacagcttgacaccctcaaactggtcgaattcgagcttgaccgctaccttgaaaaacaggggatcagcctgtaccgggaaagcgatacctccggccccgcgacaataatagagcagggcaacaggccaaaagtcgtccagggctttatcgaggcggcgaatgttgaccccgtggtcgaaatggtgcagatgatcgaggtgaaccgttcctacgaggcgaaccaaaaaataatccaggcggaggagtccgccctcggcaccctgattaaccaggtaatgaaattcggctga

SEQ ID NO: 43212 - protein, 287 aa, Unknown
  Obtained from environmental sample
  DOMAIN (244)...(282): Domain of unknown function (DUF1078)
  misc_feature (1)..(287): Xaa is any amino acid
MEVKLIRGWYTAASGMRAQQWRLDAVANNLANVNTDGYKRDVAAFKAFPELLIRRQDDDGVYLHPFGSADAAPIVGKMGTGVELNELYTAFEQGSFKETQSDFDVALEGKGFFAVSTPWGERYTRNGSFQLGKEGYLETKEGYKVLGEYGPLRVKANNFQIDKDGTVWINAAISDDPDVMVSREGNTWEDTVQLDTLKLVEFELDRYLEKQGISLYRESDTSGPATIIEQGNRPKVVQGFIEAANVDPVVEMVQMIEVNRSYEANQKIIQAEESALGTLINQVMKFG

SEQ ID NO: 43213 - DNA, 687 bp, Unknown
  Obtained from environmental sample
  misc_feature (1)..(687): n is a, c, g, or t
atggttaggagtttatggaccggagcttccggcatgataggccagcaggccaatgttgacgctatttcaaataatctggcaaacgtgaacactcacggctacaaaaagcagcgtgtcgattttgaggaccttctctatcaaaccgtcaaagtcgcgggaactcccgccaccgaagacaccgtggtcccggtcggcattcagatggggcatggcgttaaagttgccgacacccagcgggtttttacgcagggcagcctgcaggagacagcagtctccaccgacatggcgattgccggagagggctttttcaggatacagatgtacgacggctcatgggcatatacccgcaacggcaacttcaaggttgactccgacggccgcatggttacgagtaacggctactggctgctccccgacatcatcatgcccgaaggcttcctcccggacaagatcgccattacccaggacggcagggtgtcggtaatggttccgcagatcgatttgaacaatccggtagaagtgggccgcatagagctttaccgcttcccccaaccccgtcggctttaccccggtaggggaaaacctgttcaaggttacgcagggctccaggtgagccaatccccggcaggcccggttttgagggcatgggcactatcgaacaaagattccttgaaatgtccaatgtag

SEQ ID NO: 43214 - protein, 228 aa, Unknown
  Obtained from environmental sample
  DOMAIN (5)...(35): Flagella basal body rod protein
  misc_feature (1)..(228): Xaa is any amino acid
MVRSLWTGASGMIGQQANVDAISNNLANVNTHGYKKQRVDFEDLLYQTVKVAGTPATEDTVVPVGIQMGHGVKVADTQRVFTQGSLQETAVSTDMAIAGEGFFRIQMYDGSWAYTRNGNFKVDSDGRMVTSNGYWLLPDIIMPEGFLPDKIAITQDGRVSVMVPQIDLNNPVEVGRIELYRFPQPRRLYPGRGKPVQGYAGLQVSQSPAGPVLRAWALSNKDSLKCPM

SEQ ID NO: 43215 - DNA, 471 bp, Unknown
  Obtained from environmental sample
  misc_feature (1)..(471): n is a, c, g, or t
atggatattggcggcacacaggttttctatcttagcaatcttgataatattgtcaatgacgggattgttgaccgcgcgaaaaatcaggctaacgatgtctccaaattcgaggaaacactcagaagaaccgcgtctcaagcgaatcaagataaggccggagttgttgcagaccccgattcccactccccactccccactccccactccccatcctatgcaaaaatcgacaaaaccgacaaactctacgaacagtgcgttgagcttgaaatttttcttgttaagacccttatcagcagcatgaggaacaccgtgcaaaaatccggtcttatcaatgaaggctatgccggcaaaatgtacgaggatatgttatacgacgaatacgccaaagaccttgccaaaaacgccaatttcggcatggctgaaatggcctacctcgaattaaccggacaaaggggcaaaatagttaaataa

SEQ ID NO: 43216 - protein, 156 aa, Unknown
  Obtained from environmental sample
  misc_feature (1)..(156): Xaa is any amino acid
MDIGGTQVFYLSNLDNIVNDGIVDRAKNQANDVSKFEETLRRTASQANQDKAGVVADPDSHSPLPTPHSPSYAKIDKTDKLYEQCVELEIFLVKTLISSMRNTVQKSGLINEGYAGKMYEDMLYDEYAKDLAKNANFGMAEMAYLELTGQRGKIVK

SEQ ID NO: 43217 - DNA, 549 bp, Unknown
  Obtained from environmental sample
  misc_feature (1)..(549): n is a, c, g, or t
ttgcccaaggcttctgaacgaaggatctgccgggtcttgaaggtcagccgttccggctccaagacggcccttaagggccgtcctggagccacggggcgcacggtggagcttgagagtcgccttcgggagttgattcagttgcatcccacgtttggctataggcggttgtgggctatgctgcgcttcaaagagggttggacccttgggataaacaccgtctaccgccgactgaaaaataacgcctggctggtcaccaaccgcctaaagaccgccaagcctcgggtcaagagttcaagcagtaaggccgaatacagcgaccagcgctgggctgcggaaagagccctggagaacgcttgcctgcaccgtttcggaaccttgaggccggctcacaaaatgccgacgataagaagcgataacggcctggtgtttcaaagccgtcgtttccgggctacctgccatgattacaagctgtctcaggaatacatcacgccttatacacctatacacctgaacagaacggcttggttgaacggttctttcgcagcttga

SEQ ID NO: 43218 - protein, 182 aa, Unknown
  Obtained from environmental sample
  misc_feature (1)..(182): Xaa is any amino acid
MPKASERRICRVLKVSRSGSKTALKGRPGATGRTVELESRLRELIQLHPTFGYRRLWAMLRFKEGWTLGINTVYRRLKNNAWLVTNRLKTAKPRVKSSSSKAEYSDQRWAAERALENACLHRFGTLRPAHKMPTIRSDNGLVFQSRRFRATCHDYKLSQEYITPYTPIHLNRTAWLNGSFAA

SEQ ID NO: 43219 - DNA, 477 bp, Unknown
  Obtained from environmental sample
  misc_feature (1)..(477): n is a, c, g, or t
atgaataaaaaaacagtactgtgcatattgattttgattatggtatatgcgtcatgttcgcaaaaatacgacagtgaagatgattttcaggttaaccctatgatcgacggtgtttcggcggagattgcgaattattcaggcagaaaaagcgtcgttaacattccccccatgatactggaaatgcccgttgtcagaataggcgatgactcattcaaaaaaaaggaaatgggttgtgttataattcccgacaatgtgacatctataggcagcagggcgtttgcgtattgtaaaaacctgcgcggcataacaatttccgcaaacgtaacatccgtcggcgaggacgcgttttacggctggaattacccgcagacaatcaacatcatgggttttgaaagccgggaggaagccgacagcgcgtggcaggcttcatggcggaacggctgtagcgcgagaattaattattacgggaaacagtga

SEQ ID NO: 43220 - protein, 158 aa, Unknown
  Obtained from environmental sample
  SIGNAL (1)...(22)
  misc_feature (1)..(158): Xaa is any amino acid
MNKKTVLCILILIMVYASCSQKYDSEDDFQVNPMIDGVSAEIANYSGRKSVVNIPPMILEMPVVRIGDDSFKKKEMGCVIIPDNVTSIGSRAFAYCKNLRGITISANVTSVGEDAFYGWNYPQTINIMGFESREEADSAWQASWRNGCSARINYYGKQ

SEQ ID NO: 43221 - DNA, 330 bp, Unknown
  Obtained from environmental sample
  misc_feature (1)..(330): n is a, c, g, or t
ttggccgatatgtatccgccgctaaatgaaattatcgcttaccattgccaacaagcgacagaaaagtacctaaagggcgttttggtcacgtttggggaggaaccgccatacacgcataaccttgacgaattgtgtatatcggcagaaaagtacagcccctcgttttcaaccatattgtctttctgcacaaaaatatcacaattcgccgtacagccgcgatatgattttggtatgagcctctccgatacggatatgcgccttgctttggagtatgcccgaaagataagggcctttttggaaaaagaagtcccgaaaatgtttcaaggatga

SEQ ID NO: 43222 - protein, 109 aa, Unknown
  Obtained from environmental sample
  DOMAIN (10)...(102): HEPN domain
  misc_feature (1)..(109): Xaa is any amino acid
MADMYPPLNEIIAYHCQQATEKYLKGVLVTFGEEPPYTHNLDELCISAEKYSPSFSTILSFCTKISQFAVQPRYDFGMSLSDTDMRLALEYARKIRAFLEKEVPKMFQG

SEQ ID NO: 43223 - DNA, 729 bp, Unknown
  Obtained from environmental sample
  misc_feature (1)..(729): n is a, c, g, or t
gtgaatatgaaaaagtttgttacttttttaataattctgctgataatagtatttgcttttcttgttgtatataactttcttccgcaaaagtataaatccgtggtttcgcttcaaggagcgccgggcgctcagccgcagggtgcgggaggcgctcagagaggaggaggcggcgaaaacagggggggcggcgaaggcgctcaaagaaacgctcccggcagagatggagcgcgaaacgccgccgctatccgtgttgtaactgtagagcccggaaccatagaaaaaagcgtaattattaacggagaaatcttagcgcgtaatcaggttacgatataccctactgtaggcggcaggcttgttgaaagtaactacagtgtcggagacagggtcgccagaggcgctgtggtcgcaagagttgatccgtcaagaccgggtgaggtttattccagaaactcaataatttcaacagtatccggaacagtgctgcaagctccatacagtgtcggcgacactgttacaacccagtcgccggtgtatgtaatcggagacctttcatcgttacttatcgaaacctatattgcggaacgttttgtcgccgctataaaacaggggcttcgcgcttcactctggtttgaatccatgccgggcgaaatatttactgcggaagtatatgagattaatcctgtactggaccctgcaagccgtacattaaggatacgccttaggttttga

SEQ ID NO: 43224 - protein, 242 aa, Unknown
  Obtained from environmental sample
  SIGNAL (1)...(21)
  DOMAIN (1)...(70): Glycine rich protein family
  misc_feature (1)..(242): Xaa is any amino acid
MNMKKFVTFLIILLIIVFAFLVVYNFLPQKYKSVVSLQGAPGAQPQGAGGAQRGGGGENRGGGEGAQRNAPGRDGARNAAAIRVVTVEPGTIEKSVIINGEILARNQVTIYPTVGGRLVESNYSVGDRVARGAVVARVDPSRPGEVYSRNSIISTVSGTVLQAPYSVGDTVTTQSPVYVIGDLSSLLIETYIAERFVAAIKQGLRASLWFESMPGEIFTAEVYEINPVLDPASRTLRIRLRF

SEQ ID NO: 43225 - DNA, 381 bp, Unknown
  Obtained from environmental sample
  misc_feature (1)..(381): n is a, c, g, or t
ttggaggttcacagaatgagcgggcttttgcgtttttcgcctgacagtaacggaacctacattgctttttgcgaacctgatcatttgatactgcctgcgctgggtgaatatttttattcgcgttttggcgaaactccgtgggtaattgtcgatataaaacgaagattatgcctcagccggcggttaagggaaaaggtaaaactgaccgttattaaaaccgcagaagatatttcggcgtcagtcggcgtactcggtaatgacgaatgggaagagctttggcggcattaccataagataataaataacgaaagcaggaagaatttacacttacagcgtcaactaatgccaaaacgctactggaaatatctgcctgaaatgtag

SEQ ID NO: 43226 - protein, 126 aa, Unknown
  Obtained from environmental sample
  misc_feature (1)..(126): Xaa is any amino acid
MEVHRMSGLLRFSPDSNGTYIAFCEPDHLILPALGEYFYSRFGETPWVIVDIKRRLCLSRRLREKVKLTVIKTAEDISASVGVLGNDEWEELWRHYHKIINNESRKNLHLQRQLMPKRYWKYLPEM

SEQ ID NO: 43227 - DNA, 363 bp, Unknown
  Obtained from environmental sample
  misc_feature (1)..(363): n is a, c, g, or t
ttggaagcaattgcatccatgacagttctggaagtttcagaacttgttaaaatgatggaagaaaaattcggcgtttcagccgctgcgcccgtagcggtagcagctgtcggccctgcagccggagctgctgctcccgcggcagaagagaaaacagaatttaatgttattctaaaagcgtttgatgaagccaaaaaaattgccgttattaaggaagtccgcgtcgtaacaggactcggtcttaaagaggcaaaagaccttgttgaaggagcgccgaaaccgcttaaggaaggtgtttcgaaagacgaagcaggtaagatcaaggaagtcatcactgcggcaggcggtactgtagaaattcaataa

SEQ ID NO: 43228 - protein, 120 aa, Unknown
  Obtained from environmental sample
  DOMAIN (52)...(120): Ribosomal protein L7/L12 C-terminal domain
  misc_feature (1)..(120): Xaa is any amino acid
MEAIASMTVLEVSELVKMMEEKFGVSAAAPVAVAAVGPAAGAAAPAAEEKTEFNVILKAFDEAKKIAVIKEVRVVTGLGLKEAKDLVEGAPKPLKEGVSKDEAGKIKEVITAAGGTVEIQ

SEQ ID NO: 43229 - DNA, 348 bp, Unknown
  Obtained from environmental sample
  misc_feature (1)..(348): n is a, c, g, or t
gtgatgacttccttgatcttacctgcttcgtctttcgaaacaccttccttaagcggtttcggcgctccttcaacaaggtcttttgcctctttaagaccgagtcctgttacgacgcggacttccttaataacggcaatttttttggcttcatcaaacgcttttagaataacattaaattctgttttctcttctgccgcgggagcagcagctccggctgcagggccgacagctgctaccgctacgggcgcagcggctgaaacgccgaatttttcttccatcattttaacaagttctgaaacttccagaactgtcatggatgcaattgcttccaaatttcttcttttgtaa

SEQ ID NO: 43230 - protein, 115 aa, Unknown
  Obtained from environmental sample
  SIGNAL (1)...(21)
  misc_feature (1)..(115): Xaa is any amino acid
MMTSLILPASSFETPSLSGFGAPSTRSFASLRPSPVTTRTSLITAIFLASSNAFRITLNSVFSSAAGAAAPAAGPTAATATGAAAETPNFSSIILTSSETSRTVMDAIASKFLLL

SEQ ID NO: 43231 - DNA, 531 bp, Unknown
  Obtained from environmental sample
  misc_feature (1)..(531): n is a, c, g, or t
atggctatagttgcgaaaaaaatacaggaaagcaaaaccaaggctatcggggaactgaaagaatctctggggaaagccggtgattttatctttaccgattaccgggggcttacagtagagcagatcactgctttaaggaaacagcttcgtacgaaagaagttaaatataaagttgtaaagaataactttgcgcgccttgcctttgaacagctttccatgccggatgtatcttcttaccttgtcggtcctactgccgtagcgatcactccgaaagatgccaacgaagtggcaaaaatactctatgaatttacaaaagaagttcccgctttgaaggttaaaggcgcattggtaagcggttcagtttacgacgcggcgcagactgaggcgttctcaaaacttccaggcaggctggaacttatttccatgcttatgtctgtaatgaacgctcctgcgcgaaaccttgccgctgcgcttaacgatattccgtcaaggctggtgcgtacgataaaggctattgccgacaaaaaatga

SEQ ID NO: 43232 - protein, 176 aa, Unknown
  Obtained from environmental sample
  DOMAIN (7)...(105): Ribosomal protein L10
  misc_feature (1)..(176): Xaa is any amino acid
MAIVAKKIQESKTKAIGELKESLGKAGDFIFTDYRGLTVEQITALRKQLRTKEVKYKVVKNNFARLAFEQLSMPDVSSYLVGPTAVAITPKDANEVAKILYEFTKEVPALKVKGALVSGSVYDAAQTEAFSKLPGRLELISMLMSVMNAPARNLAAALNDIPSRLVRTIKAIADKK

SEQ ID NO: 43233 - DNA, 684 bp, Unknown
  Obtained from environmental sample
  misc_feature (1)..(684): n is a, c, g, or t
atgaagcatggaaaaaaataccgggaaagcgtaaaaaaatataacccggccaacacctacgagcttaatgagggcctgggcctcgtcaagtccatggcattcgcaaaatttgacgaaaccgtggatctttcggtcaagttgaatctgaaaaaaagccagtccgtgcgtgacaccgttgttctgcccaaccagttcaggggcgagaaaaaaatcctggtgttctgcaagcctgaaaaggaaaaagaagcccaggacgcgggcgcggcatttattggcgctgatgaccttatcgaaaaagtgaagggcggctggacggattttgatattgccgtcgcaaccccggacatgatgaaggatgtcgggaagctcggtatggtgctcggccgcaagggcctgatgcccaacccgaaaaccggcaccgttactttcgatctcaaaggaacgctggcggaactgaaaaagggccgcacggagttccgcgccgacaagaccggtgtagtgcatcttgccgtgggaaaggtttccatgaccccggaacagattgccgataatgtcaatgctgtcatcgttgagataaagcggaaacgccctgcggacgcaaaaggcgattttatcaagtccgtatcggttgcctcaaccatggggcccggcgtatgggttgccgtcgccgaacaacaggaatag

SEQ ID NO: 43234 - protein, 227 aa, Unknown
  Obtained from environmental sample
  DOMAIN (14)...(217): Ribosomal protein L1p/L10e family
  misc_feature (1)..(227): Xaa is any amino acid
MKHGKKYRESVKKYNPANTYELNEGLGLVKSMAFAKFDETVDLSVKLNLKKSQSVRDTVVLPNQFRGEKKILVFCKPEKEKEAQDAGAAFIGADDLIEKVKGGWTDFDIAVATPDMMKDVGKLGMVLGRKGLMPNPKTGTVTFDLKGTLAELKKGRTEFRADKTGVVHLAVGKVSMTPEQIADNVNAVIVEIKRKRPADAKGDFIKSVSVASTMGPGVWVAVAEQQE

SEQ ID NO: 43235 - DNA, 1029 bp, Unknown
  Obtained from environmental sample
  misc_feature (1)..(1029): n is a, c, g, or t
ttgttcataaccacggccaattcactgcactcaatcccgtaccctcttctggatcgaatggagatcatagaaatcccaggctacggagaaaatgaaaagcttgctatcgcgaaaaaattccttgtcccgaaagaattggccgagaacggactggccagggcaaaaataactttcaaggacgaagcgattctggaaatcatccgccactggacaatggaatccggcgtacgcagccttgaaagggaaatagcccgctgcgtcaggcgcgtcgcaaaagtcgcggtgaacaaggaatacggcaaaaacgcggacaaacctatcgagagttttaaaaagaatatcgacagggaagatttggaaaaacttttgggaaggcgcaaatacaaaaacgacgtggtttttaaggaagcccgcatcggtgtctcttacggccttgcctggactgaaacagggggcacaatgcttcctgtcgagacaatctgctttgaaggcagaggtgaaagcatcataaccggcaatctgggagacgtcatgaaggaaagcgccaaaatcgccatttcatatttgcgcagcgtacaggatcgctgcaagttccttgtcaaggacatgtcggcaactgatttccacatccacgttcccgaaggggcaattcccaaggacggcccgtcagcgggcataaccctggcggtctcgcttctttcaaccctctgccggattcccccaaagccgggctatgctatgactggagagcttaccctgacaggccgcatccttccaatcggcgggctaaaggaaaagctccttgctgcaatcagaaacggaatggaagaagtactgctccctgccgacaacagggaagactgggaagagctgaacgaagatattaagaaagcactgaaagttaattttgtagacaacgcgtgggaggcttttgggattctgttccccaaagagatttttggccgcacaaagaaaaagccggtcgttaaaaagaaggtttcaaaaagcgcggcagggaaaaagaagtag

SEQ ID NO: 43236 - protein, 342 aa, Unknown
  Obtained from environmental sample
  DOMAIN (113)...(317): Lon protease (S16) C-terminal proteolytic domain
  misc_feature (1)..(342): Xaa is any amino acid
MFITTANSLHSIPYPLLDRMEIIEIPGYGENEKLAIAKKFLVPKELAENGLARAKITFKDEAILEIIRHWTMESGVRSLEREIARCVRRVAKVAVNKEYGKNADKPIESFKKNIDREDLEKLLGRRKYKNDVVFKEARIGVSYGLAWTETGGTMLPVETICFEGRGESIITGNLGDVMKESAKIAISYLRSVQDRCKFLVKDMSATDFHIHVPEGAIPKDGPSAGITLAVSLLSTLCRIPPKPGYAMTGELTLTGRILPIGGLKEKLLAAIRNGMEEVLLPADNREDWEELNEDIKKALKVNFVDNAWEAFGILFPKEIFGRTKKKPVVKKKVSKSAAGKKK

SEQ ID NO: 43237 - DNA, 951 bp, Unknown
  Obtained from environmental sample
  misc_feature (1)..(951): n is a, c, g, or t
atgcgaaaggcgtatatcgcaaacaataccctgatcataacatcgctaaatttgtatgagcattcgctagataacaattttgaactaggcattgctctaaaagatgattcctacaataaagtaattggtaaactgtcagaagaactaaaaatactattcaagatgcacaaacttgataccaaaatactcgacaagttaatatcaccggctgatgagggagcgccgcaagaagtacctgttgttgaggaggcgcctgctgctgaagaagcgcttgttgctgaggaagagcctgccgccgaggaagtgcctcaggaagaaccgccagtcgacgaggaagcgcttccggaagagcctgctgctgaagaggagccgcaggaagagcctgtagttgaggaagcgcctgctgccgaagaagagcctgttgctgaggaaacgcctgtaattgaggaagagcctcaggaagagccgcttgctgccgaggaagcgcctgtagaggagccgccgacagatgatgatgaaggtatagtaattgaagagacgctggttattgaagaaacacctgaagaggaacctttaattgaggaagttcccccagaggagccgattgcagaagaagagcctattaccgaggaagctcccaaggaggagcctgctgttgaagaagagacccaggaagaaccaattattgaagaagctccccaggaggagttgattactgaggaagtgcctcagcaggaggaacctgttgctgaagaggagcctcaggaagagctttcggttgttgaggaagcgcctgtggaggagcctgctgccgaagaggagcctcaggaagagctgccgacggatgatgatgaaggtatagtaattgaagagtcgctggttgttgatgatgtgcttgaagaggagccaatcgccgaggaagcgatcaagaggaacctcgtgccgatctga

SEQ ID NO: 43238 - protein, 316 aa, Unknown
  Obtained from environmental sample
  misc_feature (1)..(316): Xaa is any amino acid
MRKAYIANNTLIITSLNLYEHSLDNNFELGIALKDDSYNKVIGKLSEELKILFKMHKLDTKILDKLISPADEGAPQEVPVVEEAPAAEEALVAEEEPAAEEVPQEEPPVDEEALPEEPAAEEEPQEEPVVEEAPAAEEEPVAEETPVIEEEPQEEPLAAEEAPVEEPPTDDDEGIVIEETLVIEETPEEEPLIEEVPPEEPIAEEEPITEEAPKEEPAVEEETQEEPIIEEAPQEELITEEVPQQEEPVAEEEPQEELSVVEEAPVEEPAAEEEPQEELPTDDDEGIVIEESLVVDDVLEEEPIAEEAIKRNLVPI

SEQ ID NO: 43239 - DNA, 699 bp, Unknown
  Obtained from environmental sample
  misc_feature (1)..(699): n is a, c, g, or t
gtgcgccttgccgccgcggaagtcatttcgatacatggtaatcccgctgcgatgaaaattctcgaaaatgttgtaaacgatgccaatgaaactgatgtagttaaagaagccgttattgcgggactgggacatgccgagaacgaggatagcattcgaattttgatttctgttcttgacaagcaaaatgaattccgcaaacaggcggaaaaagcccttgcccaaagaactgtcaagcgcgacatcattcagcttctggaaatctttaaggacgcggagccgcagttacgcgaaaaaatgattcccgtattcagggcgcagggcaggaaggccgagccgtacattctggaaattttaaaggatgaaatcgcgtcgctcaagccgtacctggttaccatactggaagaaacaggctatgtggatgaattaaaaaggcggctttccgacagggacgcggcagtccgaagggaagcggcgcaaatgctttccttgcttgacacactgcccgctttcaggggccttgtactggctgccaaggatccggatcaggatgtgcgcgtatgcgtggtaaaagccctggaaaaattaaacaattcccaaagccacgaaatccttgatagccttaaaaaggatccggacaaccgcattcgcaaatatacctactgggctttggaaaggctggattcgctgggaatggaataa

SEQ ID NO: 43240 - protein, 232 aa, Unknown
  Obtained from environmental sample
  misc_feature (1)..(232): Xaa is any amino acid
MRLAAAEVISIHGNPAAMKILENVVNDANETDVVKEAVIAGLGHAENEDSIRILISVLDKQNEFRKQAEKALAQRTVKRDIIQLLEIFKDAEPQLREKMIPVFRAQGRKAEPYILEILKDEIASLKPYLVTILEETGYVDELKRRLSDRDAAVRREAAQMLSLLDTLPAFRGLVLAAKDPDQDVRVCVVKALEKLNNSQSHEILDSLKKDPDNRIRKYTYWALERLDSLGME

SEQ ID NO: 43241 - DNA, 543 bp, Unknown
  Obtained from environmental sample
  misc_feature (1)..(543): n is a, c, g, or t
atggcaagaaaaatcaaccccaagcgaaaaggcagaacaaaattcgccgaccctcgtgacggcaagcaatacaagaccgtgaaaataggtgagcaggtctggatggcggagaacctgaattgggaaggcgcgggttgccaatacaacaacagcccgatattcggcaatgcgttcggtcgcctttacaagtgggatgaggcgatgaaatccgctcctcctggctggcacttgcccaccgatgcggagtggcagcagttggttgacttcgcgggcggcaacgatgttgcgagcaacaagcttagagccaaagatggctggcaaggcaatggcacggacgacttcggcttttcggcgctcccgggtggctataggggcagatatggcgacttcctcaccattggtgtcagtggggactggtggagtgccacagagaagggtagtgagctcgcctacaactggcgtatgttcagtggcgatgccaaagtgtacaggaccgattactacaaggattgctcgttttccgtccgtctcctccaggactag

SEQ ID NO: 43242 - protein, 180 aa, Unknown
  Obtained from environmental sample
  misc_feature (1)..(180): Xaa is any amino acid
MARKINPKRKGRTKFADPRDGKQYKTVKIGEQVWMAENLNWEGAGCQYNNSPIFGNAFGRLYKWDEAMKSAPPGWHLPTDAEWQQLVDFAGGNDVASNKLRAKDGWQGNGTDDFGFSALPGGYRGRYGDFLTIGVSGDWWSATEKGSELAYNWRMFSGDAKVYRTDYYKDCSFSVRLLQD

SEQ ID NO: 43243 - DNA, 543 bp, Unknown
  Obtained from environmental sample
  misc_feature (1)..(543): n is a, c, g, or t
atggctattattaccatttcacgcgaattggcgacccttggcgatgaaaccgccagggaactggcaaaacagctgggctgccatcttgttgacaagcagacgctggcggaacggataaaatcatatggcatcgaagacagcaagttaataaaatacgacgaacgcaagccgtcattttttgcgtcgttgtcgcatgacagggatgattacctgcattacctgaaaaccgcgattctcgcggaagcggaacgtggaagctgcgttattatcggcaggggcgcaggcgctatttttaagaatatgccggcccatatttccgtgtttttggccgcgccgcttgaaatccgcatagagcgcgttaaaaattatttccattgcgacgagcaccgggcgcgtcaaatcattgaacgcagcgaccaggatcgcatagggttttcaccgtatttttttgacattgagtgggagaatccggaaaattatcacatctcactgaaacgggaatttcttcccccgctgtctgcgccgaaattgtcatgctgttaa

SEQ ID NO: 43244 - protein, 180 aa, Unknown
  Obtained from environmental sample
  misc_feature (1)..(180): Xaa is any amino acid
MAIITISRELATLGDETARELAKQLGCHLVDKQTLAERIKSYGIEDSKLIKYDERKPSFFASLSHDRDDYLHYLKTAILAEAERGSCVIIGRGAGAIFKNMPAHISVFLAAPLEIRIERVKNYFHCDEHRARQIIERSDQDRIGFSPYFFDIEWENPENYHISLKREFLPPLSAPKLSCC

SEQ ID NO: 43245 - DNA, 1065 bp, Unknown
  Obtained from environmental sample
  misc_feature (1)..(1065): n is a, c, g, or t
gtgaaccgcgcttcggcggatattccgcgcagcagctttaccgtgcaggaactggttgacttaaccagcgaattctaccggcgcaattatatagaaggactctttctgtcttccgggattttcgccgatcccgacatcgtaatggaaaaacttatagaaaccgcgcggactctgcggacgcaggcgggctatggcggctatatccacttaaagataatccccggtaccggtgaccgccttatcaaagaggcgggtctttgggcggacaggctcagtgttaacattgaattgcccacggaaaaaagccttgtccaccttgcgccggacaagtcagggcagtcgattcttggcgcgatgggggatttttcgaatatcagctgtgagtttgaagaagcccgccgcaagccgcgttatttaccgcgggggaaggcggcagttcccgctttcgcgccggcagggcagagtacccagcttatcgtaggcgccagcgcggaagatgaccgccagatcataaacctttcaagctcgctttaccgtaaattttccctgcggagggtatattactccgcgtttattcacccgggaattccggcgcgcggttatggcggtacagatccccgcctgccggacattcccggcccgcctttggtgcgcgaacaccgcctctaccaggcggactggctcttgcgattttatcactttaaggccggtgaaatcctcggtgaagacgaagctttcctcgatccccatattgacccgaaaaccgcctgggcattgcggcatcttgatttcttcccggtcgagataaaccgcgccgattatgatacccctgctcgcgtcccgggcataggcgcgaaaaccgcccgccgcgtcatcgaaacccgccgttctcgcagcctcaactttgaaagcctacgccgtcttggcgcggtgttaaaacgcgcccgctattttatcatctgcggcgggtcctttattgagcgccccgacaaccccctgcgcatacgccgccttctttccgacattgacggcgccggcctgcagctgccgttgtttgaattttga

SEQ ID NO: 43246 - protein, 354 aa, Unknown
  Obtained from environmental sample
  misc_feature (1)..(354): Xaa is any amino acid
MNRASADIPRSSFTVQELVDLTSEFYRRNYIEGLFLSSGIFADPDIVMEKLIETARTLRTQAGYGGYIHLKIIPGTGDRLIKEAGLWADRLSVNIELPTEKSLVHLAPDKSGQSILGAMGDFSNISCEFEEARRKPRYLPRGKAAVPAFAPAGQSTQLIVGASAEDDRQIINLSSSLYRKFSLRRVYYSAFIHPGIPARGYGGTDPRLPDIPGPPLVREHRLYQADWLLRFYHFKAGEILGEDEAFLDPHIDPKTAWALRHLDFFPVEINRADYDTPARVPGIGAKTARRVIETRRSRSLNFESLRRLGAVLKRARYFIICGGSFIERPDNPLRIRRLLSDIDGAGLQLPLFEF

SEQ ID NO: 43247 - DNA, 561 bp, Unknown
  Obtained from environmental sample
  misc_feature (1)..(561): n is a, c, g, or t
atggcaaaagcgttagttttacttgcggacggttttgaggatgtcgaggctgtaacgccgattgattatctgcgccgcgccggaatagaagttaccgccgtatcaatttccgaaagccttaccgtaacaagcaaatggggcggtattaaaatgagcgctaataccacgctgactgaacttgcaaagcagggaacggacggatatgacgctgtgatccttcccggcggaatgcccggcacgtcaaaccttgcggcttcaaaagagacaggctcgctggttaaaagcatggcggcggcgggaaaaacaatctgcgccatttgcgccgctcccgcccttgtcctcgctccccttggcctgcttgccgggaaaaattttacctgctacccgggaatggaagaaaaagtgaacgaaggaaaatggtcggacagccgcgttgttgttgacggcaatgtgattacaagccggggcgcgggaacggcgggagagtttgccgccgcgattattgagaaattactggacaaagccgccgcgaaaaaattagcggacgctgttttgctgtaa

SEQ ID NO: 43248 - protein, 186 aa, Unknown
  Obtained from environmental sample
  DOMAIN (30)...(172): DJ-1/PfpI family
  misc_feature (1)..(186): Xaa is any amino acid
MAKALVLLADGFEDVEAVTPIDYLRRAGIEVTAVSISESLTVTSKWGGIKMSANTTLTELAKQGTDGYDAVILPGGMPGTSNLAASKETGSLVKSMAAAGKTICAICAAPALVLAPLGLLAGKNFTCYPGMEEKVNEGKWSDSRVVVDGNVITSRGAGTAGEFAAAIIEKLLDKAAAKKLADAVLL

SEQ ID NO: 43249 - DNA, 537 bp, Unknown
  Obtained from environmental sample
  misc_feature (1)..(537): n is a, c, g, or t
gtgcgttcaaaactcggccgcgatcttaatctttacgctcccgacagctttgaattcgcgtggatagtggactttcccatgtttgaatatgacgatgaaaacaaaaagtgggaggcggctcaccatttgtttacatggcctcaggacaaataccactcgacaatggaaagcgatcccggctccgtaaaaggcgacctttatgacttagttctaaacggctatgagttagcgtcaggctccattcgtatacacgacccggaaatgcaaaaacgggtgtttaagatagtgggaattgatcccgcgcaagcggaaaaaaagttcggctttttaactgaagcgttcaagtacggcgctcctccccacggcggaatagcccccggccttgaccgcctcgtaatgatcatggcgggacatacttcgttaaaagacgtaatcgccttcccgaaaaattccttcgccgtaagtcccatggacgactgcccctcagatgtagatcaaaaacagcttgacgaattgcatcttattgtgaagaaataa

SEQ ID NO: 43250 - protein, 178 aa, Unknown
  Obtained from environmental sample
  DOMAIN (1)...(152): tRNA synthetases class II (D, K and N)
  misc_feature (1)..(178): Xaa is any amino acid
MRSKLGRDLNLYAPDSFEFAWIVDFPMFEYDDENKKWEAAHHLFTWPQDKYHSTMESDPGSVKGDLYDLVLNGYELASGSIRIHDPEMQKRVFKIVGIDPAQAEKKFGFLTEAFKYGAPPHGGIAPGLDRLVMIMAGHTSLKDVIAFPKNSFAVSPMDDCPSDVDQKQLDELHLIVKK

SEQ ID NO: 43251 - DNA, 393 bp, Unknown
  Obtained from environmental sample
  misc_feature (1)..(393): n is a, c, g, or t
gtgattatgtttaacttaaaagtaaacccgcgtttcggcgacatagacgcccttggacatgttaacaacaccgtcttcccgatttggtttgaaatggcaagaaaacccgttatgcaaatcttcgatcctgaattaacgcttgaaaatttcccgcttatcatggctcacaatgactttgattatttaagtccgatttattttaagtttgaagtggaaattaaaacatggatttccaaaatagggacaaagtcatttaccgtataccacgaagcctggcaggaaggaaaactttgcacaaagggaaactgcgtaattgtatatatcattgacggtcagacaactcctttaacggatgacattaaaaagattttatctgagcatatggttgaatag

SEQ ID NO: 43252 - protein, 130 aa, Unknown
  Obtained from environmental sample
  DOMAIN (18)...(100): Thioesterase superfamily
  misc_feature (1)..(130): Xaa is any amino acid
MIMFNLKVNPRFGDIDALGHVNNTVFPIWFEMARKPVMQIFDPELTLENFPLIMAHNDFDYLSPIYFKFEVEIKTWISKIGTKSFTVYHEAWQEGKLCTKGNCVIVYIIDGQTTPLTDDIKKILSEHMVE

SEQ ID NO: 43253 - DNA, 1194 bp, Unknown
  Obtained from environmental sample
  misc_feature (1)..(1194): n is a, c, g, or t
gtgggctcgcttgaccgcgagcagctcgtgggcgttgaaggggagcggacctggtggcggcttgatatgcctgcctgctttgtaaagctctacaacgaaaatcccctgtacggccactggaattatcctttgggcgttactctctacggccttattgaaactgcccggttttttaagcggaatgaccgccaggcagatggtgacgctattggcagttatgtgtactcccacgtggcccagtctattcgtactttggactatgccctctatgacaaggaacatttcggcggcgctaccgccgtacaccacctgcttacttccatcgacagcctggacgactgcggctcctttggctcgctggttctggaactcgccaaagacgcggacagcggcgcgatcccaaaagaattcagcgtagcggcggattacaccgccgatcacatcatcaacaagcaggatcgaatgccggagggctgtttttacagacgctggatgatgcaccatttccatgacgagaccatatgggcggacgatctttacatgagcgttccgttcctctgccgttatgcggcatacaaaaaagaccccgccattctcgatcttgccgccctgcaatttgagggctttaagaagtatctctttattgaagacaaaaacctgatggcccatgtgtttgatctaaagcggaacatgaacacgggagttccctggggccggggaaacggctgggctatcttttcgcttagcgaactgctcatggagctcccattggaccatccccgccgtagtttcctcttgaactttttcaggcgacattccataggcatcctcgccaagcaggatgagaacggaatgtggcatcaggtactggatatgccaggctcctatccggaaacatcctgcacggccatgtttatctgcgccttttgccggggcatccgctatggctggtatatacctgaggaggccgctaaccgtgattacggtaacgcggcggaaaaagcctggcgcgctctggaaaactactcgatagacaaaaatggagctgttcacggcgtgtgcagaggctccgagttcgcgttcaacccccgctattacgccgagcatctcttgccaaggcttaacgacacccacggcatcggtattgtgcttcttgccggggtggagcttcttaaattacgggaggcattatga

SEQ ID NO: 43254 - protein, 397 aa, Unknown
  Obtained from environmental sample
  DOMAIN (26)...(394): Glycosyl Hydrolase Family 88
  misc_feature (1)..(397): Xaa is any amino acid
MGSLDREQLVGVEGERTWWRLDMPACFVKLYNENPLYGHWNYPLGVTLYGLIETARFFKRNDRQADGDAIGSYVYSHVAQSIRTLDYALYDKEHFGGATAVHHLLTSIDSLDDCGSFGSLVLELAKDADSGAIPKEFSVAADYTADHIINKQDRMPEGCFYRRWMMHHFHDETIWADDLYMSVPFLCRYAAYKKDPAILDLAALQFEGFKKYLFIEDKNLMAHVFDLKRNMNTGVPWGRGNGWAIFSLSELLMELPLDHPRRSFLLNFFRRHSIGILAKQDENGMWHQVLDMPGSYPETSCTAMFICAFCRGIRYGWYIPEEAANRDYGNAAEKAWRALENYSIDKNGAVHGVCRGSEFAFNPRYYAEHLLPRLNDTHGIGIVLLAGVELLKLREAL

SEQ ID NO: 43255 - DNA, 426 bp, Unknown
  Obtained from environmental sample
  misc_feature (1)..(426): n is a, c, g, or t
gtggcggctataactggattcaaagcagacggaatagatggcacgataggcgaagcgttggctgttccgcaccgtagttattaccactcattgatagatttggttcgcgcaaaaaaattgcagggtttggtacacataacaggttcgggctttcagggcaacattccacgcattctgcccaaaggagtttctgttcaaataaaccgctcggcttggaaggttccagaaattttcaacctaatccaaaaatgcggaaatgttgagcgagacgagatgtacagcacattcaatatgggaatgggaatgttggtatttgcagccccaagcgatgtggcagagattcgtaaatttttggaaagcaaaggcgaaacagttattgagtgtggcaaggttattgaagggaataacaatgtcgtgttcatttga

SEQ ID NO: 43256 - protein, 141 aa, Unknown
  Obtained from environmental sample
  DOMAIN (1)...(141): AIR synthase related protein, C-terminal domain
  misc_feature (1)..(141): Xaa is any amino acid
MAAITGFKADGIDGTIGEALAVPHRSYYHSLIDLVRAKKLQGLVHITGSGFQGNIPRILPKGVSVQINRSAWKVPEIFNLIQKCGNVERDEMYSTFNMGMGMLVFAAPSDVAEIRKFLESKGETVIECGKVIEGNNNVVFI

SEQ ID NO: 43257 - DNA, 393 bp, Unknown
  Obtained from environmental sample
  misc_feature (1)..(393): n is a, c, g, or t
atgattattctccctgcccttgagcaggattttgagtggattaaagtcattcaaagcgaggcgggattgcctttgtggaagcctagctctgcttcttgggttttggagcggagtgcttttgttatatggcaggttgcagtcgatgagtgcgagcttttgtccattgccgtgaatgcccacgagcgaggcaagggatatgcaaaaatattgatggaacatagccacaaggaatttgcaaaacaaggcataaaaaaattctttttggaagttagggaaaacaatacctctgcaatctgtctttacaaaaaatttggatatgaaaaaatcgcagagagaaaaaaatattatgcagacggagaatgcgcggtggttatgaatttaattctcaaatga

SEQ ID NO: 43258 - protein, 130 aa, Unknown
  Obtained from environmental sample
  DOMAIN (34)...(117): FR47-like protein
  misc_feature (1)..(130): Xaa is any amino acid
MIILPALEQDFEWIKVIQSEAGLPLWKPSSASWVLERSAFVIWQVAVDECELLSIAVNAHERGKGYAKILMEHSHKEFAKQGIKKFFLEVRENNTSAICLYKKFGYEKIAERKKYYADGECAVVMNLILK

SEQ ID NO: 43259 - DNA, 741 bp, Unknown
  Obtained from environmental sample
  misc_feature (1)..(741): n is a, c, g, or t
atggctcaaaaggaatattcagtaggctatgcgttgtttatagcctgtgcagccgccataggtggctttctgttcggttttgatacttctgtgataaacggaaccctagatgctcttaggttcaagctaggcgcaaacgatgcccagcttgggcttgcagcttccatagcggttttgggtgcggcaggcggtgctttctttgcgggtgccttggcagacaaattcggacgccgcaaggttatgataacttctagtgttctctttttagtcagtgcaataggttctggcaatccctactttttcacaacggctggaagcgcggcaaatatgattgaatttatcgtttggcgtgttatcggtggagttggagttggtgcggcgagcattattgttccagcttatatcgcggaaatctcccccgcacctttgcgtggcaggcttgctactatgcagcagttcgctatagttataggaatttttgcggcacttctctccaattatttcctaggcgaaattgctggcggcgagggtgcggcgattatagacaaagtgactcgttcaccgatagatgttacaaaaatcggtgcttttgaaacttggcaatggatgttttgggtagagtgcattcctgcggctctttatggattgctcgttttgtttatccccgaaagcccccgttatttggtggctcgcaagcagccacaaaaagctggcgaattttgggcaaattctctcgcctag

SEQ ID NO: 43260 - protein, 246 aa, Unknown
  Obtained from environmental sample
  SIGNAL (1)...(26)
  misc_feature (1)..(246): Xaa is any amino acid
MAQKEYSVGYALFIACAAAIGGFLFGFDTSVINGTLDALRFKLGANDAQLGLAASIAVLGAAGGAFFAGALADKFGRRKVMITSSVLFLVSAIGSGNPYFFTTAGSAANMIEFIVWRVIGGVGVGAASIIVPAYIAEISPAPLRGRLATMQQFAIVIGIFAALLSNYFLGEIAGGEGAAIIDKVTRSPIDVTKIGAFETWQWMFWVECIPAALYGLLVLFIPESPRYLVARKQPQKAGEFWANSLA

SEQ ID NO: 43261 - DNA, 825 bp, Unknown
  Obtained from environmental sample
  misc_feature (1)..(825): n is a, c, g, or t
atggattgctcgttttgtttatccccgaaagcccccgttatttggtggctcgcaagcagccacaaaaagctggcgaattttgggcaaattctctcgcctagcgttgtagctcaaaaaatagaagacattaaaaaaagtttgcattccgaagtggcaccaaagttcagcgacttgctggaaaaagttgcaggcaaaactcgcttggctcccattgtctgggttggaataggcattgcggcattgcaacaatttgttggcataaatgtaattttctactacggcaatgttctatgggagtcggtaggttttactcaacaagatgcaatgaaaacaagcgttctctcctctgttgttaatatagccagcaccattatagccatagcgttggtagataggctaggcagaaaacccttgcttttggcaggttctgttggaatgttcgtaactcttggcattatggcagccatatttggcacagcaggcttagattcccacggcaatccagaaattaaaggtgccgttgcttacattgcggttatatctgcaaatttctatgtggtattctttgctttctcatggggaccagtgtgctgggttttgctaggcgaaatgttcaacaaccgcatccgcggcgcagccctagccttaggcggattatctcaatggatttccaactttgcaatatcaagttctttcccaattttgctggcaaaaataggcttaggtggtgcttacggcatttactgcttctttgcttttgtgagcatattctttgtgctgaaaaaggttcaagaaactaaggggaaggaattggaggatatgtag

SEQ ID NO: 43262 - protein, 274 aa, Unknown
  Obtained from environmental sample
  DOMAIN (3)...(274): Sugar (and other) transporter
  misc_feature (1)..(274): Xaa is any amino acid
MDCSFCLSPKAPVIWWLASSHKKLANFGQILSPSVVAQKIEDIKKSLHSEVAPKFSDLLEKVAGKTRLAPIVWVGIGIAALQQFVGINVIFYYGNVLWESVGFTQQDAMKTSVLSSVVNIASTIIAIALVDRLGRKPLLLAGSVGMFVTLGIMAAIFGTAGLDSHGNPEIKGAVAYIAVISANFYVVFFAFSWGPVCWVLLGEMFNNRIRGAALALGGLSQWISNFAISSSFPILLAKIGLGGAYGIYCFFAFVSIFFVLKKVQETKGKELEDM

SEQ ID NO: 43263 - DNA, 801 bp, Unknown
  Obtained from environmental sample
  misc_feature (1)..(801): n is a, c, g, or t
ttggagcatcccactcacggagtgcttcgggtctctcaggctcttcaactggaaggcctctccgtctcctcaggcggcgtccgtggggtctggcagcggcacggcttggtcagtcggcacgaccggctgttgcggctggataaggaagtccggcaaacaccattcgaactcacgccaaacccaattgaggctttggaacgcttctccccggagttccgggagcggcacatcgaaagccgccataccggtgatctggtcgccgtcgataccttcttcgtcggccacctcaaaggcgtgggcaaggtctatctgcaatcggccatagactgcttctcgcgctacgcctggggccggctgtacaacagcaagatgcccgtcaccgccgtccatctcctcaacgaaagcgtcctgccgacttttgacgagcaccaggccatcgtcaaaaccgtgctttcagacaacggccgggaattctgcggccgccaggataatcatccttacgagctgttcctgcaaatggagggcatagagcatcgcaccactaaagtgcgccggcctcaatccaacggctttgtggagcgtctgcaccgaaccttgctggatgaacacttccgcattatgggccgtaagaaatggtacgaatccatcgcggaaatgcaagccgacctggacctgtacctacatcactacaaccaggaacgcccacatcagggccgaaacatgaacggcaaaactccctaccaggtcttcctcgaaggcctgccaagcgacacgccaaaggaggggcttgaggccgcttaa

SEQ ID NO: 43264 - protein, 266 aa, Unknown
  Obtained from environmental sample
  DOMAIN (78)...(251): Integrase core domain
  misc_feature (1)..(266): Xaa is any amino acid
MEHPTHGVLRVSQALQLEGLSVSSGGVRGVWQRHGLVSRHDRLLRLDKEVRQTPFELTPNPIEALERFSPEFRERHIESRHTGDLVAVDTFFVGHLKGVGKVYLQSAIDCFSRYAWGRLYNSKMPVTAVHLLNESVLPTFDEHQAIVKTVLSDNGREFCGRQDNHPYELFLQMEGIEHRTTKVRRPQSNGFVERLHRTLLDEHFRIMGRKKWYESIAEMQADLDLYLHHYNQERPHQGRNMNGKTPYQVFLEGLPSDTPKEGLEAA

SEQ ID NO: 43265 - DNA, 777 bp, Unknown
  Obtained from environmental sample
  misc_feature (1)..(777): n is a, c, g, or t
gtgaggacctgccccaggacggggattcagtacaagtcggcgattaagcccgtgggagaaactttttcgggcaaaaccctgaacgtgatgaacggaacttttaataccgtccaggcggaacccgccacggaagaagaaatctacaacaccgtaaaagtcatgggcggcgaggattgggaatactggatcgaggcgctggataaagagggcctgctttcgtcaaaatcccgcaccgtggcctattcctacctcggccccgaacactcctggcccatatacaaaaacggaaccataggcaaagctaaagaagacctggagagggcctgcgaggaaatcaacaagacatacgccgcaaaaggcaaaatcgccggcgcgtgggtctcggtaaacaaggccctggtgacccgctccagcgcggtcatccccatcatcccgctgtacatttcctgccttttcaaggtgatgaaggacatggggcttcacgagggttgcatcgagcaggttgtaaggctttaccgcgaccggctttacgccgctgaaagcggagaccccgaaatggttcccgttgaccgcaagggccgcatccgcatagacgactgggagatgcgcgaagacgtacaaaaagcggtcatggcaaaaatggcggccgtcaccgaagccaacgtgcagaccgaaaccgacgtcgccggcttcaaacacgatttccttgaagcccacggctttgatgtcagtggcgtgaattacgacgcggatgttgacctggacaagtaccagtaa

SEQ ID NO: 43266 - protein, 258 aa, Unknown
  Obtained from environmental sample
  DOMAIN (1)...(252): Short-chain alcohol dehydrogenase
  misc_feature (1)..(258): Xaa is any amino acid
MRTCPRTGIQYKSAIKPVGETFSGKTLNVMNGTFNTVQAEPATEEEIYNTVKVMGGEDWEYWIEALDKEGLLSSKSRTVAYSYLGPEHSWPIYKNGTIGKAKEDLERACEEINKTYAAKGKIAGAWVSVNKALVTRSSAVIPIIPLYISCLFKVMKDMGLHEGCIEQVVRLYRDRLYAAESGDPEMVPVDRKGRIRIDDWEMREDVQKAVMAKMAAVTEANVQTETDVAGFKHDFLEAHGFDVSGVNYDADVDLDKYQ

SEQ ID NO: 43267 - DNA, 648 bp, Unknown
  Obtained from environmental sample
  misc_feature (1)..(648): n is a, c, g, or t
ttgtgccagagacaccggcgaggtcttcttccccaattcccattcccagtagttgactatttcttcatttctcatcattttaaaggtatgaatcaaaatcttccccatgagtaccgaaaggttgccgaagacctgttcccctcggacagttttccgtccaaaaaagggacaagccttgcagaagccgccgcttttgccgaagcgctgggaataggctccgagtaccaaaggcttctgggagttaagagaaacgccgcggagatgcgtaagttcctggctcattttcaaaacaacctcgatcttttgatacagaaaacctgggttgaggaggcggatgaatcacgcaaggaaaaagtacaagacgacgttttgccctttatggcgcggattgaacaggggaatttccagcaggcccttgagcaatttggttcaatactggaagagcttgcgtatctgctttttggacggcaaagctccaaagaggattttaccgagtatacctttaggatcgatttgcagatggggctgttctggtggtacggaacccggcttggcagtctgaaagacgccggaaaaaccggcgctgtaagcgatgaaatcctttgggcaatattgcttatcggtatttgttatctgactaatttttaa

SEQ ID NO: 43268 - protein, 215 aa, Unknown
  Obtained from environmental sample
  misc_feature (1)..(215): Xaa is any amino acid
MCQRHRRGLLPQFPFPVVDYFFISHHFKGMNQNLPHEYRKVAEDLFPSDSFPSKKGTSLAEAAAFAEALGIGSEYQRLLGVKRNAAEMRKFLAHFQNNLDLLIQKTWVEEADESRKEKVQDDVLPFMARIEQGNFQQALEQFGSILEELAYLLFGRQSSKEDFTEYTFRIDLQMGLFWWYGTRLGSLKDAGKTGAVSDEILWAILLIGICYLTNF

SEQ ID NO: 43269 - DNA, 402 bp, Unknown
  Obtained from environmental sample
  misc_feature (1)..(402): n is a, c, g, or t
gtgcgctgcaccgcggatctggctacaaaaggcggcaatgccaatgccggaaatgcagtcaaggtaaaaggtacgattcactgggtttccgttgccgacgcaataccgctggaagcgcgtctgtacgattatcttttcagcgtggagcggcctatggaagttgccgcccgtcctgacggcagccccggagaatttaccgacaaccttaatcccgattcgcttgaggttattcccaatgcctttggcgaaccctgccttgccaaagctcaggcaggagaggtttttcagtttgaacggctcggttactttacccgcgatcccgacaacggcagcggcgggaagcctgtgttcaacaagactataggcttgagggacacgtgggcgaggataaagagcaaatag

SEQ ID NO: 43270 - protein, 133 aa, Unknown
  Obtained from environmental sample
  DOMAIN (1)...(106): tRNA synthetases class I (E and Q), anti-codon binding domain
  misc_feature (1)..(133): Xaa is any amino acid
MRCTADLATKGGNANAGNAVKVKGTIHWVSVADAIPLEARLYDYLFSVERPMEVAARPDGSPGEFTDNLNPDSLEVIPNAFGEPCLAKAQAGEVFQFERLGYFTRDPDNGSGGKPVFNKTIGLRDTWARIKSK

SEQ ID NO: 43271 - DNA, 885 bp, Unknown
  Obtained from environmental sample
  misc_feature (1)..(885): n is a, c, g, or t
atgcgcgccggcgaattccctgatggggcaaggaccctgcgcgccaaaatcgatatggcacatcccaacctgctcatgcgcgatcctgtcatgtaccgcatacgccgcgaaacccattaccgcacgggcaacaattggtgcatctatcccatgtacgatttccagcaccctttgtccgacgcgagagaaggcattacccattccctctgttcgcttgaatacgagatacaccggccgctgtacgaatggtttatccgcgaagctgaggttttcccgtcgcggcagatagagttcgcccgccttaacctgagccataccgttatgagtaaacgctggctgttgaagctggtgcaggacaagaaggtctccggatgggatgatccccggatgcccacaatcgcgggcctgcgccgcaggggctattcgccgcaggcaatacggaactttgtttcgcagatcggcattgccaaaaccgacagcatggtggacatcgcttttttggaatactgcctccgcgaggatttgaacaaaagggctccgcgggttatggcggtgctgaaaccgcttaaactgataatcgaaaactgggaagaagggaaaacagaagaactggaagcggtgaataaccctgaagaccccgccgcgggatcacggcgcatacatttttcccgcgagttgtggattgaaagggaggattttgaggaaaacccgccgccaaagtatttccggcttttccccggtaatactgtgcgcctgcgctatgcgtatatagtcacctgcaccggcttgacaaggacgccgccgggaatatcgttgccgtgcgctgcaccgcggatctggctacaaaaggcggcaatgccaatgccggaaatgcagtcaaggtaa

SEQ ID NO: 43272 - protein, 294 aa, Unknown
  Obtained from environmental sample
  DOMAIN (179)...(285): tRNA synthetases class I (E and Q), anti-codon binding domain
  misc_feature (1)..(294): Xaa is any amino acid
MRAGEFPDGARTLRAKIDMAHPNLLMRDPVMYRIRRETHYRTGNNWCIYPMYDFQHPLSDAREGITHSLCSLEYEIHRPLYEWFIREAEVFPSRQIEFARLNLSHTVMSKRWLLKLVQDKKVSGWDDPRMPTIAGLRRRGYSPQAIRNFVSQIGIAKTDSMVDIAFLEYCLREDLNKRAPRVMAVLKPLKLIIENWEEGKTEELEAVNNPEDPAAGSRRIHFSRELWIEREDFEENPPPKYFRLFPGNTVRLRYAYIVTCTGLTRTPPGISLPCAAPRIWLQKAAMPMPEMQSR

SEQ ID NO: 43273 - DNA, 954 bp, Unknown
  Obtained from environmental sample
  misc_feature (1)..(954): n is a, c, g, or t
gtgctggagattaccagccatagagacggggatgtaattaccggccgcccctggctttacgggaacgcctatatattccgcccgccgggggaaacagttaacaggcagacaaaagcgttatacggagtcaacagggttgaggttagctttgacaatggccgcacttttttactggcaaagggggcgggcgactggagattccgcctggaaaccagcctgctggaaatgggcgtactgccaatcgttgtcagggcgacttttaacaatgatgaatttaccgtgcgccgcatattgcttgtagtggatcccgtgcccccgacggtaaacgtcataggccccgtcgagaacagcgcgtaccggactacggtaacggtgtttggttcctcccttgatgactatgacatggaatctgtggaagtgagtctgcgtccgggaaacaagttcggatattcggtacccggctttatccagggcatgtacgttgacgcctgcttcatgggcggtctgctctggagcgccggacttgggttgacgttctttaacgacaacgtcaaactccaggctaccgcatcccaggcgcctccaaatacgcgtttttccggcatggcttatggcggaaaggtgcttgcgaatgtttggaataaaaaccttggcgcatggttcggccctgactggtcattctggaaaaccagtttcgtgctgggagcgcatttcgcgtacttcaccatggatgaaggcgagaatcccctgtggatgggggagttcctcggacaatgggaggttattaagtccaacatggattttttcttcccgaaatggaagtactttaataaattgtcgttttacgtggaattgggcgtttggtttgccccgtcggatgtggacaaaagtcaggacataaatgcgcagcctaccatactccgtattggttttggcctgcgatgcagcctgtag

SEQ ID NO: 43274 - protein, 317 aa, Unknown
  Obtained from environmental sample
  misc_feature (1)..(317): Xaa is any amino acid
MLEITSHRDGDVITGRPWLYGNAYIFRPPGETVNRQTKALYGVNRVEVSFDNGRTFLLAKGAGDWRFRLETSLLEMGVLPIVVRATFNNDEFTVRRILLVVDPVPPTVNVIGPVENSAYRTTVTVFGSSLDDYDMESVEVSLRPGNKFGYSVPGFIQGMYVDACFMGGLLWSAGLGLTFFNDNVKLQATASQAPPNTRFSGMAYGGKVLANVWNKNLGAWFGPDWSFWKTSFVLGAHFAYFTMDEGENPLWMGEFLGQWEVIKSNMDFFFPKWKYFNKLSFYVELGVWFAPSDVDKSQDINAQPTILRIGFGLRCSL

SEQ ID NO: 43275 - DNA, 615 bp, Unknown
  Obtained from environmental sample
  misc_feature (1)..(615): n is a, c, g, or t
atgagcaaaggaagagaggagatgaagagagcaatgccagaaaacaaatatcaggcagcaggcagcaaaggaagaaggaaaccgtaccgtcttatctttgctatttgctatttgctatttgctatttgccctgcctgggcccgcggaaagattgagaccgtcaccgccgaaggcactgagacttggcggcacaatttcgatattaccgggcggagaaaaggcatatataactatcttgtaaacgcacaggaccatgcgggaaacgaatcggtttcaggcccattcaatataaagattgatcccaaatcgggcctccccgaggtgaaggtaatattcccggaaaatggctctgtcatacggcagaatatcaatgttttaggcaccgccaaagggtattttgacattgaaaaagtatctgtccgtctggacggcggcgaaactcttgaagcggaaggcaaggaatactggagcaggatgatcgaatttaatggcgcttccgacagcaagggcaaatccagaggtattaccgatggcaaacacgccctgtttatcaaggccaccgataccaatggaaccggcggcccggaactgagaatcgattctcggccgatctga

SEQ ID NO: 43276 - protein, 204 aa, Unknown
  Obtained from environmental sample
  misc_feature (1)..(204): Xaa is any amino acid
MSKGREEMKRAMPENKYQAAGSKGRRKPYRLIFAICYLLFAICPAWARGKIETVTAEGTETWRHNFDITGRRKGIYNYLVNAQDHAGNESVSGPFNIKIDPKSGLPEVKVIFPENGSVIRQNINVLGTAKGYFDIEKVSVRLDGGETLEAEGKEYWSRMIEFNGASDSKGKSRGITDGKHALFIKATDTNGTGGPELRIDSRPI

SEQ ID NO: 43277 - DNA, 933 bp, Unknown
  Obtained from environmental sample
  misc_feature (1)..(933): n is a, c, g, or t
atggtgggcgtcagacaagatgcctctgtcaaaagacgcttgcgggattacttgggcagggagcccgaaagcggagtcaaccccgatgaagtggtggcagtcggcgcggctatacagggggccgtgctgaagaaggacgtgaggggcttggttttgctggatgtgaccccgctctccttgggcatagagaccgagggcggcggattcgcgagggtaatacccagaaacaccaagattcccgcaagggactcgaggatattcactacagtgaccgatgaacaaacgcgcgtcgagatacacgtgttgcagggggagcgcgagttcgctgaggccaacaagagccttgggcgctttgatttgatggatctgccgccccttcccgcaggtgccccgcagatagaggtttcctttgacattgactccaacgggatagtcagggtgggtgccagggacctgacgacaaaggtcgaacagtgcatgagagtctggcccagttcgggtcttacggagatggagatacggcggatgataagggatgccgccacctgtaccgaggatgatcgccgcaggcgcgatgacctgaagcgcttggccagcacggagggcacgatttactcgtgcgaaaaggcacttgccgcctatggaaaatacctgcccacgggcagcgcgagcgaaatcaggttgctgctcgaactcaccaagagcgccgtcgcggcaaaaaacatcggcttgctcaaagaaaacgaagacggcttgaccgaagcgcaggcacttctgacggcggcggccatcgccgcagccgaagacgcggtttttgcggatgttcaaggggaagaaagcttgcatgtgggggagagcgcggacggggggcgtcccatgaccaagaaggtgccaggtctttccgtgcgttgcgggagaaacgatgaagcgtga

SEQ ID NO: 43278 - protein, 310 aa, Unknown
  Obtained from environmental sample
  DOMAIN (1)...(265): Hsp70 protein
  misc_feature (1)..(310): Xaa is any amino acid
MVGVRQDASVKRRLRDYLGREPESGVNPDEVVAVGAAIQGAVLKKDVRGLVLLDVTPLSLGIETEGGGFARVIPRNTKIPARDSRIFTTVTDEQTRVEIHVLQGEREFAEANKSLGRFDLMDLPPLPAGAPQIEVSFDIDSNGIVRVGARDLTTKVEQCMRVWPSSGLTEMEIRRMIRDAATCTEDDRRRRDDLKRLASTEGTIYSCEKALAAYGKYLPTGSASEIRLLLELTKSAVAAKNIGLLKENEDGLTEAQALLTAAAIAAAEDAVFADVQGEESLHVGESADGGRPMTKKVPGLSVRCGRNDEA

SEQ ID NO: 43279 - DNA, 864 bp, Unknown
  Obtained from environmental sample
  misc_feature (1)..(864): n is a, c, g, or t
atgcaagctttcttccccttgaacatccgcaaaaaccgcgtcttcggctgcggcgatggccgccgccgtcagaagtgcctgcgcttcggtcaagccgtcttcgttttctttgagcaagccgatgttttttgccgcgacggcgctcttggtgagttcgagcagcaacctgatttcgctcgcgctgcccgtgggcaggtattttccataggcggcaagtgccttttcgcacgagtaaatcgtgccctccgtgctggccaagcgcttcaggtcatcgcgcctgcggcgatcatcctcggtacaggtggcggcatcccttatcatccgccgtatctccatctccgtaagacccgaactgggccagactctcatgcactgttcgacctttgtcgtcaggtccctggcacccaccctgactatcccgttggagtcaatgtcaaaggaaacctctatctgcggggcacctgcgggaaggggcggcagatccatcaaatcaaagcgcccaaggctcttgttggcctcagcgaactcgcgctccccctgcaacacgtgtatctcgacgcgcgtttgttcatcggtcactgtagtgaatatcctcgagtcccttgcgggaatcttggtgtttctgggtattaccctcgcgaatccgccgccctcggtctctatgcccaaggagagcggggtcacatccagcaaaaccaagcccctcacgtccttcttcagcacggccccctgtatagccgcgccgactgccaccacttcatcggggttgactccgctttcgggctccctgcccaagtaatcccgcaagcgtcttttgacagaggcatcttgtctgacgcccaccatatcactttgttcacataa

SEQ ID NO: 43280 - protein, 287 aa, Unknown
  Obtained from environmental sample
  misc_feature (1)..(287): Xaa is any amino acid
MQAFFPLNIRKNRVFGCGDGRRRQKCLRFGQAVFVFFEQADVFCRDGALGEFEQQPDFARAARGQVFSIGGKCLFARVNRALRAGQALQVIAPAAIILGTGGGIPYHPPYLHLRKTRTGPDSHALFDLCRQVPGTHPDYPVGVNVKGNLYLRGTCGKGRQIHQIKAPKALVGLSELALPLQHVYLDARLFIGHCSEYPRVPCGNLGVSGYYPRESAALGLYAQGERGHIQQNQAPHVLLQHGPLYSRADCHHFIGVDSAFGLPAQVIPQASFDRGILSDAHHITLFT

SEQ ID NO: 43281 - DNA, 561 bp, Unknown
  Obtained from environmental sample
  misc_feature (1)..(561): n is a, c, g, or t
gtgccctccgtgctggccaagcgcttcaggtcatcgcgcctgcggcgatcatcctcggtacaggtggcggcatcccttatcatccgccgtatctccatctccgtaagacccgaactgggccagactctcatgcactgttcgacctttgtcgtcaggtccctggcacccaccctgactatcccgttggagtcaatgtcaaaggaaacctctatctgcggggcacctgcgggaaggggcggcagatccatcaaatcaaagcgcccaaggctcttgttggcctcagcgaactcgcgctccccctgcaacacgtgtatctcgacgcgcgtttgttcatcggtcactgtagtgaatatcctcgagtcccttgcgggaatcttggtgtttctgggtattaccctcgcgaatccgccgccctcggtctctatgcccaaggagagcggggtcacatccagcaaaaccaagcccctcacgtccttcttcagcacggccccctgtatagccgcgccgactgccaccacttcatcggggttgactccgctttcgggctccctgcccaagtaa

SEQ ID NO: 43282 - protein, 186 aa, Unknown
  Obtained from environmental sample
  misc_feature (1)..(186): Xaa is any amino acid
MPSVLAKRFRSSRLRRSSSVQVAASLIIRRISISVRPELGQTLMHCSTFVVRSLAPTLTIPLESMSKETSICGAPAGRGGRSIKSKRPRLLLASANSRSPCNTCISTRVCSSVTVVNILESLAGILVFLGITLANPPPSVSMPKESGVTSSKTKPLTSFFSTAPCIAAPTATTSSGLTPLSGSLPK

SEQ ID NO: 43283 - DNA, 1284 bp, Unknown
  Obtained from environmental sample
  misc_feature (1)..(1284): n is a, c, g, or t
atgaataataaatattttcccctgtcaaaagaggagcttgaaaagctgacgaagcgttttcccacgccgttttatctgtatgacgagaaaggcattgtcgaaaacgtccgcaggataaaggatgcgttctcctgtttccccggctacaagcagcatttcgcggtaaaggctctgcccaatccctacatcttaaagatacttgccgccgaagacatgggggccgactgctccagcggccctgagcttctgctggcggaaatggccggcattacaggcgagaacataatgttttcatccaatgagactccggcgaaggaatacgaactggcaaggcagcttggcgcggtgatcaatctggatgacgtttcacacattgaattcctggaaaaaaccgcgggattttctcaattgatttcgctccgctataaccccggtcctcttaaagagggaaacgccataatcggaaagccggaagaggcgaaatacggccttacccgggaacagataatacggggctttgccctgctgaaagagaagggagtcaggcgttttggcctgcataccatggtggcttccaatgagctttcaattccctaccatgtcgagacagcccgtatgctgtttgagcttgcggcggaggtactggataaaaccggaatcaagatcgaatttataaaccttggcggcggcgtgggcatcccctacagtccggatcaggaagcggttgattacaatgttctgacctcaggtattcaaaaggagtacaacgatgtgcttaaacctgtcggtctggattgcggtatccataccgagtggggcaggacgattaccgggccttacggctggctggtggcgcgggctattcataaaaaagaaatttaccgcaattacatcgggcttgacgcgtgtatggcggatctaatgcgccccgcgctgtacggagcgtaccaccacatcagcgtccccggcaaggaaaacgagccgataggcaaaatttatgacgttgtcggcagtctgtgcgaaaacaacgataaattcgcgatacagcgtaagctgcccagaattgatacggcggcgcaagcgccgggtggcaagggcgattttgtggtgatccatgacgcgggggcgcacggcagggcaatgggctttaactacaacggcaaactgcgctgcggggaactgcttctcaggcgggacggttcaaccgccatgatacgccggcccgaaactgcggatgattatttcgcgactcttgaccttgcgggcctgaaaagattttcataa

SEQ ID NO: 43284 - protein, 427 aa, Unknown
  Obtained from environmental sample
  DOMAIN (282)...(396): Pyridoxal-dependent decarboxylase, C-terminal sheet domain
  misc_feature (1)..(427): Xaa is any amino acid
MNNKYFPLSKEELEKLTKRFPTPFYLYDEKGIVENVRRIKDAFSCFPGYKQHFAVKALPNPYILKILAAEDMGADCSSGPELLLAEMAGITGENIMFSSNETPAKEYELARQLGAVINLDDVSHIEFLEKTAGFSQLISLRYNPGPLKEGNAIIGKPEEAKYGLTREQIIRGFALLKEKGVRRFGLHTMVASNELSIPYHVETARMLFELAAEVLDKTGIKIEFINLGGGVGIPYSPDQEAVDYNVLTSGIQKEYNDVLKPVGLDCGIHTEWGRTITGPYGWLVARAIHKKEIYRNYIGLDACMADLMRPALYGAYHHISVPGKENEPIGKIYDVVGSLCENNDKFAIQRKLPRIDTAAQAPGGKGDFVVIHDAGAHGRAMGFNYNGKLRCGELLLRRDGSTAMIRRPETADDYFATLDLAGLKRFS

SEQ ID NO: 43285 - DNA, 465 bp, Unknown
  Obtained from environmental sample
  misc_feature (1)..(465): n is a, c, g, or t
gtgtccataaacgcgcaagaaatttccctgccttcatgggacggaaacgcccgctgtttcgcgcttaaagtcctcgacgaaataaaacgcgacaactgggaactttccattcttttctgcggcgataaaacaatcacggatttaaaccgccaataccgcggcaagaatgaacccactgacatactttcttttaacttaggcgaaacaataaaagataacgataaaacggtgtttttgccgggagatatcgtcatttcccttgatacgctaaaagaaaacgccagatattttaacgcgccggaagatgaggagttacgcagattattaattcatggtatcctacacttagacggaatggaccataaaacattggataaacttgagcctatgctcgtattacaggagaagatactgaacaaattgaaaacagaacaaataatcacggaaaagggagcggtaaattga

SEQ ID NO: 43286 - protein, 154 aa, Unknown
  Obtained from environmental sample
  DOMAIN (40)...(134): Uncharacterized protein family UPF0054
  misc_feature (1)..(154): Xaa is any amino acid
MSINAQEISLPSWDGNARCFALKVLDEIKRDNWELSILFCGDKTITDLNRQYRGKNEPTDILSFNLGETIKDNDKTVFLPGDIVISLDTLKENARYFNAPEDEELRRLLIHGILHLDGMDHKTLDKLEPMLVLQEKILNKLKTEQIITEKGAVN

SEQ ID NO: 43287 - DNA, 747 bp, Unknown
  Obtained from environmental sample
  misc_feature (1)..(747): n is a, c, g, or t
ttgaaagccccttttaaaataaatacgcaggcgattaaagagctggaagaggaccaacaacagatgatccgcggcgtcgtggaattatccgacaccacggtaaaagaggtaatggttcccagaaccgacactgtttttctttcggcggacgcctcaaaagaggaattgcttaaattcataagcgaaagcgaacactcgcgttttcccgtatacaaagatacggttgataacgtaacaggcgtacttcatgtaaaagacgtattaaaagcgcttataaatgataaaccgttcaatattaacacattggcaagaaagccgttttttatccccgaatcaaaacatatcgatgaccttttgcgcgagatgcgccgtaaaaaagtccatatcgccgtagtggtagacgaatacggcggagtgtccggtattgttactatggaagatataatcgaagaaataatcggcgacattcaggatgaatttgatcatgaaaccgaagatgtggtggttctcggagagggaatttggctttgcgacgccagagttaatcttgaatttttagccgaagaaataaacatcgagtttcccgtcgatgattttgatacgctcggcggttttgtttttgatcttttcggcaggataccggcagtaaatgaaaaaacagaatataaggattatgattttatcatacaggaaattgacgggcataaaattaactcgataaaaattgtaacccataaaaaagactag

SEQ ID NO: 43288 - protein, 248 aa, Unknown
  Obtained from environmental sample
  DOMAIN (168)...(246): Transporter associated domain
  misc_feature (1)..(248): Xaa is any amino acid
MKAPFKINTQAIKELEEDQQQMIRGVVELSDTTVKEVMVPRTDTVFLSADASKEELLKFISESEHSRFPVYKDTVDNVTGVLHVKDVLKALINDKPFNINTLARKPFFIPESKHIDDLLREMRRKKVHIAVVVDEYGGVSGIVTMEDIIEEIIGDIQDEFDHETEDVVVLGEGIWLCDARVNLEFLAEEINIEFPVDDFDTLGGFVFDLFGRIPAVNEKTEYKDYDFIIQEIDGHKINSIKIVTHKKD

SEQ ID NO: 43289 - DNA, 483 bp, Unknown
  Obtained from environmental sample
  misc_feature (1)..(483): n is a, c, g, or t
ttgccaacacaggacagcgccgtgccgaccggagccgctcatcaccgtggacgaggccgtctcccagtcgccggaagagatgggttagggtgcgggacatgtttctctggaacgcacatgaagaacctagaacatgacgatagacgaccgccgcacaaggaaggggagccatgcacatttggcagaacgaagcatttcggaaaatggctgaaagacctggacaaaacggtaaaagtgctccttacattagaaatagcagaggcggaaggcggcaagccagggaagcgcatgaagggcaccaacggcatatacgaacttgtgttggatgtggggcctgggtacaggctatactactatcaagtcgaaggccccgattacatgttgctcacgggcggcactaaggacagccaaaggaaagacatcgcaagggcaatgaaaatgcgggacgcggaagaggaggcgagaggtgggcggaaacattag

SEQ ID NO: 43290 - protein, 160 aa, Unknown
  Obtained from environmental sample
  DOMAIN (100)...(150): Phage derived protein Gp49-like (DUF891)
  misc_feature (1)..(160): Xaa is any amino acid
MPTQDSAVPTGAAHHRGRGRLPVAGRDGLGCGTCFSGTHMKNLEHDDRRPPHKEGEPCTFGRTKHFGKWLKDLDKTVKVLLTLEIAEAEGGKPGKRMKGTNGIYELVLDVGPGYRLYYYQVEGPDYMLLTGGTKDSQRKDIARAMKMRDAEEEARGGRKH

SEQ ID NO: 43291 - DNA, 1023 bp, Unknown
  Obtained from environmental sample
  misc_feature (1)..(1023): n is a, c, g, or t
atgccaagccagccgacatcctccaagtcagtccgcgtaagagcggtgctggtctccgtctttgcgggcgcggccatccttggcatcaagtactacgccgcgtacgtgtccggctcggcggccctgtggtcggacgccatagagtccgtggtgaacgtggtggcggcggtgttcgccttcggcgcgatacttttcgcggagaagccagcggaccgcgggcacccgtacggccgcgggaagatagagcacttcagcgccgcgttcgagggcggccttgtggcgctcgcggccggcatcatcgtctgggaggccgccggcaacctgtacgagcagttgttccttggacacgccaccataaaggatctgggcataggcagcggcatgttgtggagcttcgtgggcggagcgtccaacggtgtgctgggactcttcctgatattcaccggcaggcggcaccagtcaaagaccctggaggccgacggtctgcacgtcctgtcagactgcctgaccaccgtcggctccatagccgcgctgttcctagtgaaaatgacgggcctgcactggctggaccccatggtggccttcgtgctgggcctgatgctggccaggacaggctacgtgctggtcagggattcctcgcaggccctgctggacatagaggatcccggcctgctggaaaagattgtggccgccatcaacctgattcgcccaaaggacatagtctcggtacacgagctgaggacactgcgcttcggcaggcgcgtccacattgagatacacatagtggtgccgtcgcactattccatgaagatggggcacgacctctccgagggctttggcaacaggctggtggaggagcttggggtggagggcgaggcccacacccaccttgacccctgccagccccagcactgccacgcctgtgcattcgagccttgccaacacaggacagcgccgtgccgaccggagccgctcatcaccgtggacgaggccgtctcccagtcgccggaagagatgggttag

SEQ ID NO: 43292 - protein, 340 aa, Unknown
  Obtained from environmental sample
  DOMAIN (16)...(304): Cation efflux family
  misc_feature (1)..(340): Xaa is any amino acid
MPSQPTSSKSVRVRAVLVSVFAGAAILGIKYYAAYVSGSAALWSDAIESVVNVVAAVFAFGAILFAEKPADRGHPYGRGKIEHFSAAFEGGLVALAAGIIVWEAAGNLYEQLFLGHATIKDLGIGSGMLWSFVGGASNGVLGLFLIFTGRRHQSKTLEADGLHVLSDCLTTVGSIAALFLVKMTGLHWLDPMVAFVLGLMLARTGYVLVRDSSQALLDIEDPGLLEKIVAAINLIRPKDIVSVHELRTLRFGRRVHIEIHIVVPSHYSMKMGHDLSEGFGNRLVEELGVEGEAHTHLDPCQPQHCHACAFEPCQHRTAPCRPEPLITVDEAVSQSPEEMG

SEQ ID NO: 43293 - DNA, 822 bp, Unknown
  Obtained from environmental sample
  misc_feature (1)..(822): n is a, c, g, or t
atggttttgcaaccgcttatagccgttcccccagagaggcgccgatcccatgccaagccagccgacatcctccaagtcagtccgcgtaagagcggtgctggtctccgtctttgcgggcgcggccatccttggcatcaagtactacgccgcgtacgtgtccggctcggcggccctgtggtcggacgccatagagtccgtggtgaacgtggtggcggcggtgttcgccttcggcgcgatacttttcgcggagaagccagcggaccgcgggcacccgtacggccgcgggaagatagagcacttcagcgccgcgttcgagggcggccttgtggcgctcgcggccggcatcatcgtctgggaggccgccggcaacctgtacgagcagttgttccttggacacgccaccataaaggatctgggcataggcagcggcatgttgtggagcttcgtgggcggagcgtccaacggtgtgctgggactcttcctgatattcaccggcaggcggcaccagtcaaagaccctggaggccgacggtctgcacgtcctgtcagactgcctgaccaccgtcggctccatagccgcgctgttcctagtgaaaatgacgggcctgcactggctggaccccatggtggccttcgtgctgggcctgatgctggccaggacaggctacgtgctggtcagggattcctcgcaggccctgctggacatagaggatcccggcctgctggaaaagattgtggccgccatcaacctgattcgcccaaaggacatagtctcggtacacgagctgaggacactgcgcttcggcaggcgcgtccacattga

SEQ ID NO: 43294 - protein, 273 aa, Unknown
  Obtained from environmental sample
  misc_feature (1)..(273): Xaa is any amino acid
MVLQPLIAVPPERRRSHAKPADILQVSPRKSGAGLRLCGRGHPWHQVLRRVRVRLGGPVVGRHRVRGERGGGGVRLRRDTFRGEASGPRAPVRPREDRALQRRVRGRPCGARGRHHRLGGRRQPVRAVVPWTRHHKGSGHRQRHVVELRGRSVQRCAGTLPDIHRQAAPVKDPGGRRSARPVRLPDHRRLHSRAVPSENDGPALAGPHGGLRAGPDAGQDRLRAGQGFLAGPAGHRGSRPAGKDCGRHQPDSPKGHSLGTRAEDTALRQARPH

SEQ ID NO: 43295 - DNA, 633 bp, Unknown
  Obtained from environmental sample
  misc_feature (1)..(633): n is a, c, g, or t
atgatgacacggcaggaaacggcatattacgcgcttgaagccctgaaaaaagccggcgccggcaaagctgcctgtaagatgagcaccggacgcaaggatgagtttaatgtggaagccaataaattttcactgttgcgcaccctcttcaataatgagctgtccatcaaggcgattaaggatggccggaaaggggtaattgtaattaataaactggacaaagattccgttgacgaagccgtggcaaactgcattgccatgactgcatctgccctgcccgatgacgcggaggatattgccgaaaagggcgaaaacaaatctttcgatcaaacctgcggcgggccgaatatggacaaactcttttccagaacaaaggaatttctcgatcagataggtcagaccggaagcgaatttccgaagatagtgcttgaaggcctggtttcggattttaacagtgccgagaccacctacgtaaacagcaacggcgtggaattcaactcctcttccgaaaagtatgatatgcaaaccatgttctcggcgaaagacggagggaagtcttcgtcctttaacggttactttgcaagattgcgtcactcgaaactccctttatggaacttggcatgcagaggcagctaa

SEQ ID NO: 43296 - protein, 210 aa, Unknown
  Obtained from environmental sample
  misc_feature (1)..(210): Xaa is any amino acid
MMTRQETAYYALEALKKAGAGKAACKMSTGRKDEFNVEANKFSLLRTLFNNELSIKAIKDGRKGVIVINKLDKDSVDEAVANCIAMTASALPDDAEDIAEKGENKSFDQTCGGPNMDKLFSRTKEFLDQIGQTGSEFPKIVLEGLVSDFNSAETTYVNSNGVEFNSSSEKYDMQTMFSAKDGGKSSSFNGYFARLRHSKLPLWNLACRGS

SEQ ID NO: 43297 - DNA, 705 bp, Unknown
  Obtained from environmental sample
  misc_feature (1)..(705): n is a, c, g, or t
atggaacttggcatgcagaggcagctaatcgacgagtcgtcaagatcgcttgacccccgcatggtggacggaaaatttaccggaaaaatcctgctcagccccgcttgtgacgacatgatctggggatcgctttttgcacacttcctctgcgacgcgccgcttattaagggcacaagccgctggaaggacgcgcttggcacaaaggtcgccgattccaaattaacgctgcgcatgtcgccgcttaacccgatgattgtcgccggcgaacgttttacaacggacggttttgaaagccgtgacatggatataatccgcgacggcgtgctgaaaaacttcgcgctgacattatacggctcacgaaaatccggaaaaccaagggcgctcaattcagccttttacaacattgagatcgcggcgggtgacaagccgcttcatgaaattatcaagggcattgatcgcggaattttaatgaaccgtttttccggcggctcgtccggcgccagcggcgaaatatccggcgtggcaaaaaacagttttctgatacagaacggaaaagtgaccgatgccattaaagaaacgatggtgtcatttgacataacagacatcctcgagaacattacagccatatcatcggaacgctgccagaacggagttaccctgctaccctggtgctgctttgacggagttacaatttcggggaaataa

SEQ ID NO: 43298 - protein, 234 aa, Unknown
  Obtained from environmental sample
  misc_feature (1)..(234): Xaa is any amino acid
MELGMQRQLIDESSRSLDPRMVDGKFTGKILLSPACDDMIWGSLFAHFLCDAPLIKGTSRWKDALGTKVADSKLTLRMSPLNPMIVAGERFTTDGFESRDMDIIRDGVLKNFALTLYGSRKSGKPRALNSAFYNIEIAAGDKPLHEIIKGIDRGILMNRFSGGSSGASGEISGVAKNSFLIQNGKVTDAIKETMVSFDITDILENITAISSERCQNGVTLLPWCCFDGVTISGK

SEQ ID NO: 43299 - DNA, 648 bp, Unknown
  Obtained from environmental sample
  misc_feature (1)..(648): n is a, c, g, or t
atggaaatcgccgagttcaaaaaaattgtcctttcaaattaccaacagcagggaagaaaattcccctggcatttcgcagatccctggggtgtgatggtttcggaattcatgctgcagcagacgcggaccgagagggttattccctattgggaaaactggatgaagctctggccgcaaccaaaagcccttgcggacgcttcgatggaaaacgccctgcgcgcctggtcgggtcttggttacaaccgccgctgccgttaccttaaagaaagcgccgcaatcatcgcaaacgattacgacaacaaagtgccggaaacgccccaggctttgctttcgcttcccggcgtcggcccttacatgtcctccgccattgcctgctttgcgtataactatccgacagtctttattgaaacaaacatacgttcagccgttatccattgcttttttcccgaaagaaacgatgtcaaagattccgagataatcccgatactggaagcggcgcttaaccgtagcgagccgcgcacatggcattacgcgctaatggattacggcgcgttcctgaaaaagacaactgcaaacccaagccgccgcagcgcccattataccaggcaaagcccgttcaacggctttttcaggcaggccaggggttaa

SEQ ID NO: 43300 - protein, 215 aa, Unknown
  Obtained from environmental sample
  DOMAIN (97)...(126): Helix-hairpin-helix motif
  misc_feature (1)..(215): Xaa is any amino acid
MEIAEFKKIVLSNYQQQGRKFPWHFADPWGVMVSEFMLQQTRTERVIPYWENWMKLWPQPKALADASMENALRAWSGLGYNRRCRYLKESAAIIANDYDNKVPETPQALLSLPGVGPYMSSAIACFAYNYPTVFIETNIRSAVIHCFFPERNDVKDSEIIPILEAALNRSEPRTWHYALMDYGAFLKKTTANPSRRSAHYTRQSPFNGFFRQARG

SEQ ID NO: 43301 - DNA, 465 bp, Unknown
  Obtained from environmental sample
  misc_feature (1)..(465): n is a, c, g, or t
atggcgactaaccacaagcctgtgattaaaggcactgatcacggaatatggcggcggataaagctaatccctttcaccgaaaggataccggaagaaaagcaggacaagcatttggaattgaaactgcgggaagaggcaagcggtatccttaactggctgttggaagggatagaaaactggaagcaggagcgattgaaaacgccgaaggctgtattgtttgccactgacgaatacaggggggagatggacgttatcgggaatttcataaaagaaaaatgtggccaaaaaaaggagatgacgataccaattaaaaagctatacaaggcatattctgactggtgcgaagaaaacaacgaacacgctgtaagcgagaggttttttaccctgcggcttaaagagatgggttttgagcagagcagaacgtcaacggaaagatattggattggaattgggctggtggaataa

SEQ ID NO: 43302 - protein, 154 aa, Unknown
  Obtained from environmental sample
  misc_feature (1)..(154): Xaa is any amino acid
MATNHKPVIKGTDHGIWRRIKLIPFTERIPEEKQDKHLELKLREEASGILNWLLEGIENWKQERLKTPKAVLFATDEYRGEMDVIGNFIKEKCGQKKEMTIPIKKLYKAYSDWCEENNEHAVSERFFTLRLKEMGFEQSRTSTERYWIGIGLVE

SEQ ID NO: 43303 - DNA, 636 bp, Unknown
  Obtained from environmental sample
  misc_feature (1)..(636): n is a, c, g, or t
atgattcacgagaaagggcttgaaatggtacggaatatttatgacgagcttttgaagaccgccgattatagggagcgcatagatattgaaaaagcggcgatgatgagcgagagcgtgcgaaggcgcaaggcttttgttgaggcggctacttggatttcagcattgagagtaaatacggaagaattagacaataatccgtggttgttgaatgtgaagaatggaacagttgatttattaagtggtgaatttagagaacatagacaggaagacttaataactaagattgccaatgttgaatataaccctaaagctgattgtccgctttggaagaaatttattcgggaaattatggattataaagcagatttaataaggtttatacaaactgcggcagggtggtcgctgtccggcgatgtttcagaacaaactatgtttatactatatggaaccggagcaaacggaaaatctacttttttaaatgttattatgtatttgttaggtgattatgcaatttcaacttttacggatacttttttgaagaaatcgggagataataatactaatgacgtggcacgtctacggggtactcgttttgtagcaactactngagttgagcaagggcgggcgcttttctga

SEQ ID NO: 43304 - protein, 211 aa, Unknown
  Obtained from environmental sample
  misc_feature (1)..(211): Xaa is any amino acid
MIHEKGLEMVRNIYDELLKTADYRERIDIEKAAMMSESVRRRKAFVEAATWISALRVNTEELDNNPWLLNVKNGTVDLLSGEFREHRQEDLITKIANVEYNPKADCPLWKKFIREIMDYKADLIRFIQTAAGWSLSGDVSEQTMFILYGTGANGKSTFLNVIMYLLGDYAISTFTDTFLKKSGDNNTNDVARLRGTRFVATTXVEQGRALF

SEQ ID NO: 43305 - DNA, 378 bp, Unknown
  Obtained from environmental sample
  misc_feature (1)..(378): n is a, c, g, or t
atggatcctttcgaatcagtccgcgctttaatttacaagcaccgcggaatggcgcacttcgccagctctcattatgaagaagccattgccgatttttccgagtcttacaggctcgatccaaaatcctataaagccgcttattacgaagggatagtatgttctgtagtcaaacgctacaaccaggcagtagacgcttttaaccgctcgcttgatataaacccctatcagccttactgccttttccgccgcggtcaggcttattaccatcttgaagattaccctcatgcgcttggcgattgcgaagcggctttggttctggaatccttcgaggccgcccgcaagttcaaggacttattgcttaataagctcaaaatgtga

SEQ ID NO: 43306 - protein, 125 aa, Unknown
  Obtained from environmental sample
  DOMAIN (77)...(110): Tetratricopeptide repeat
  misc_feature (1)..(125): Xaa is any amino acid
MDPFESVRALIYKHRGMAHFASSHYEEAIADFSESYRLDPKSYKAAYYEGIVCSVVKRYNQAVDAFNRSLDINPYQPYCLFRRGQAYYHLEDYPHALGDCEAALVLESFEAARKFKDLLLNKLKM

SEQ ID NO: 43307 - DNA, 567 bp, Unknown
  Obtained from environmental sample
  misc_feature (1)..(567): n is a, c, g, or t
atgacggcggataaaacgaaaacaaaaatacgggttcgatccacaacggtactggctgtcaggcgttacgggaaagttgccatggccggtgacggccaggttaccttcggcgaaacggtgttgaaaaacaacgccaaaaaggttcgccgccttatggacggcaaagtcctttgcggttttgccggggcgaccgccgatgttttcgcccttcatgatcgctttgagacaaaactcaaggagtattcaggcgatcttgtcagggcggcggtggagcttgccagagagtggagaacggacagggctctccgccgtttggaagccatgcttcttgttgccgatatcggcaagaccctgctaatttccggaaccggcgatgtaatagagcccgccgaaggcgcccttgccatcggctcaggatccaactacgcccgtgcagcggcgttggcatatttggatgggtctgagctttcagccagggaaatcgccgagcgctcactaaaaatagcgggtaatatctgcgtatttacaaatgataatttaacaatagaggaacttgccaatgaatga

SEQ ID NO: 43308 - protein, 188 aa, Unknown
  Obtained from environmental sample
  DOMAIN (11)...(185): Proteasome A-type and B-type
  misc_feature (1)..(188): Xaa is any amino acid
MTADKTKTKIRVRSTTVLAVRRYGKVAMAGDGQVTFGETVLKNNAKKVRRLMDGKVLCGFAGATADVFALHDRFETKLKEYSGDLVRAAVELAREWRTDRALRRLEAMLLVADIGKTLLISGTGDVIEPAEGALAIGSGSNYARAAALAYLDGSELSAREIAERSLKIAGNICVFTNDNLTIEELANE

SEQ ID NO: 43309 - DNA, 888 bp, Unknown
  Obtained from environmental sample
  misc_feature (1)..(888): n is a, c, g, or t
gtggaagaataccttgcctacctttcttccgtgcggggggtctccgagcgcaccgcttccgcttacaggcgggatctcctgcatttctccgactattgcgccaaccacggcttttctcccgaaaaggcggagcgggcgcaggttaggggttttatcgccgacctttccgccgagggggccgcttctgtaagcgtcaaccgctctctttcttcaattcgcggtttttaccgctggatgctgcgtttcggcttccgccaggacgatccttcttctcccttaagaaaccttaaaacgccaaaaacgcttcccgtctttctttgggaagccgagatggcccacttttccacgctccccgaaaaagcggggatactctggcccgatcgggacaaggcgctgatcctggcgatgtattcaggcggccttcgcatatccgaagctgcttcgataaacttaaaaaacgtggcgcatgatttctcaagcgccaggatcatcgggaagggaaacaaggagcggcaggtttttttctccgaggaagcaaaagaagccctgctcacctatctgcctgccagaaaggcccgcatcaaggcggagcgtcccaccgacaggctttttataagcctcaagggagatccgatttccgttcccggcctgcgctggattattacaaagtattcggaaagatcggggcttgataaaaatatccacccccattccctgcgccatagctttgcgacgcatttggtaaattcaggctgcgatgtgcgggtggtgcaggaactcttaggccatgccagcatcagcacaacacagcgatatacccatgtcaacatggaacatttaaaaaaggtttataaaaaggcgcatccacacggaggagaaaaaaaatga

SEQ ID NO: 43310 - protein, 295 aa, Unknown
  Obtained from environmental sample
  DOMAIN (1)...(83): Phage integrase, N-terminal SAM-like domain
  misc_feature (1)..(295): Xaa is any amino acid
MEEYLAYLSSVRGVSERTASAYRRDLLHFSDYCANHGFSPEKAERAQVRGFIADLSAEGAASVSVNRSLSSIRGFYRWMLRFGFRQDDPSSPLRNLKTPKTLPVFLWEAEMAHFSTLPEKAGILWPDRDKALILAMYSGGLRISEAASINLKNVAHDFSSARIIGKGNKERQVFFSEEAKEALLTYLPARKARIKAERPTDRLFISLKGDPISVPGLRWIITKYSERSGLDKNIHPHSLRHSFATHLVNSGCDVRVVQELLGHASISTTQRYTHVNMEHLKKVYKKAHPHGGEKK

SEQ ID NO: 43311 - DNA, 1635 bp, Unknown
  Obtained from environmental sample
  misc_feature (1)..(1635): n is a, c, g, or t
gtggacatggcggcccttgccttcggcatagatgacctcaaagttataaccagcgccgggttcggcgagctaaaggacaacacggaacggaatattgttgaaggggcgctgatctccattgaaaatcagacaggctatattacggcgatagtcggcggctcaaagtatgacgaatcaaaccagctgatccgcgccacgcagggcaacatacagcccggatcgtccttcaaacccctttactactccgcggcaatagacaccagaaaactcacggcctcatcgcttatctatgacgtgcccgttgttttccacaatgaggacggcaccccctaccttccgcaaaatttcaggggcgaatggaaaggctccgtattgttatacgacgcgttgtcgcattccatgaacgtgccctccctgaaaattctggacgccataggctttgacgccgcgataaaccgcgccgcggaactgttcgggataagcgacagggaacagatccgcaaaatatttccccgcgtttacccattgggactgggtatcatttccgcgtcgccgcttcgcatggcaagggctttcgccgttttcggcaaccagggccgcgaggtaacgcccatcgccatacgttatgtggaagacagaaacggccgcgtggtgctggacccggagcgggatctccgccaacagcagaaaagggctaaccagcaggttataagcccgcagaacgcgtacataatgtcaaaaatactggaaaaaaccgtggaagagggaagcctggcaaacggctcgggatggggggcgaaattcaccttccaggacgagtacgggaaatctttcaggatgccggtcgccggcaaaacaggaaccccgcagaactgttccgacgcctgggcagtcggctacagtccctactacaccacggcgattgggttcggttttgacaaaccgggcaactcccttggcgtggaccttaccggatccacactggccgggccggtctggggcgactatatgcgcgtaattcaccaggggctgccgctcagggatttcgtccgcccggcgacgggaattgttgacgtaacggtttgcgcgaaatccggcctcttaaaaaccgcctcgtgcaaccagggcgttaccctccccttccttaccggaacccagcctgccgagtattgtgacatatgcggcaagaatgtacgggttgtgattgatcacccaatgcgtggccccacgatgggaatgaatgatactgtcctccttggccagcttaagatgcccacgctgccggatgatcttttccccgatatggcgggcgggcagaggcagaacagccaggcaaacaggccggcaaacaaccgcagaccgaaccagcagccggccaatccaaatcagggaaggcccggcttaaacaacccgtatctggatgacgatatgcctgtctcgcccgaacaggaaagcagggccggaaccaacaacggcccggaatatttccgcgggcctcaaaacaccccggcaaataacagtacaaattcgcaaacaaggccccagtccgggacttcagcctggactgcgtctcaggaagcaggcgaatatccatacgatcttgaaatcccaaattacgatccgctgttggattaa

SEQ ID NO: 43312 - protein, 544 aa, Unknown
  Obtained from environmental sample
  DOMAIN (35)...(338): Penicillin binding protein transpeptidase domain
  misc_feature (1)..(544): Xaa is any amino acid
MDMAALAFGIDDLKVITSAGFGELKDNTERNIVEGALISIENQTGYITAIVGGSKYDESNQLIRATQGNIQPGSSFKPLYYSAAIDTRKLTASSLIYDVPVVFHNEDGTPYLPQNFRGEWKGSVLLYDALSHSMNVPSLKILDAIGFDAAINRAAELFGISDREQIRKIFPRVYPLGLGIISASPLRMARAFAVFGNQGREVTPIAIRYVEDRNGRVVLDPERDLRQQQKRANQQVISPQNAYIMSKILEKTVEEGSLANGSGWGAKFTFQDEYGKSFRMPVAGKTGTPQNCSDAWAVGYSPYYTTAIGFGFDKPGNSLGVDLTGSTLAGPVWGDYMRVIHQGLPLRDFVRPATGIVDVTVCAKSGLLKTASCNQGVTLPFLTGTQPAEYCDICGKNVRVVIDHPMRGPTMGMNDTVLLGQLKMPTLPDDLFPDMAGGQRQNSQANRPANNRRPNQQPANPNQGRPGLNNPYLDDDMPVSPEQESRAGTNNGPEYFRGPQNTPANNSTNSQTRPQSGTSAWTASQEAGEYPYDLEIPNYDPLLD

SEQ ID NO: 43313 - DNA, 450 bp, Unknown
  Obtained from environmental sample
  misc_feature (1)..(450): n is a, c, g, or t
gtgcttgttcgcagcactttgcacaccgtagagatattttgtcagggagaacgcattgcttgccatgtccggagcatggatccccgcaaacgcttcatcaccgagccttcccacatgccggaaagccaccgggccgttgccgactggtcgccagaacggtttgtatcctgggcgtcaaaaataggggacaagaccaaagcgtatatcacctggctattagaacgaaaagagcatcccgaacaggccttcagaacatgtgccggcatactccgtgtagccgcaaccgtagcgccccagcggatggaagaagcctgtgagaatgctatgtcacaaaatattttttcttacgcttattttgttaagctgttggaaaaccgaagcgccgataaaccgctcatccatgaaaacttgcgggggaaagattatttctcaggaggcagccatgtttga

SEQ ID NO: 43314 - protein, 149 aa, Unknown
  Obtained from environmental sample
  misc_feature (1)..(149): Xaa is any amino acid
MLVRSTLHTVEIFCQGERIACHVRSMDPRKRFITEPSHMPESHRAVADWSPERFVSWASKIGDKTKAYITWLLERKEHPEQAFRTCAGILRVAATVAPQRMEEACENAMSQNIFSYAYFVKLLENRSADKPLIHENLRGKDYFSGGSHV

SEQ ID NO: 43315 - DNA, 813 bp, Unknown
  Obtained from environmental sample
  misc_feature (1)..(813): n is a, c, g, or t
ttgcatgaaaaagattacagcgtgcttgacgtagtgcggcgcaagacagcagaaggagggcgcgttcttatatgcacaagctggacgcggattgatagccaaaggaaactaacaaatcttctaacggaaaacggttatagagttgctattctcacatccacagtgcctcccaataagcgcgaggaatgggtaagcaagcaggttaagggcggtgttcaagtgctaatcacaaaccccagtttggttgaaaccggattggacttgaatgacttcacaacgttatatttttacaacattgcgtacaatctgtttacccttcgacaatcttccaggcgctcatggcgcataaaccaaaaagcgccgaagatagaagtctatttcagctactatgaaggcactatgcagcacagggctatccgcttgatggcgtccaagctggctgtggcgggaatcattgagggcaacattagtgatgaagggttagccgctatgtccgattgcgccgatatgtctaccgctttggcgcgggaacttacccaaggtatcaagaacgaggttgaggatttaggcgcagtatttaagaaaatggcaaagctaaagcctgaaccgaatcacaaagagattgtacctgaatgtactaagcctgtatcaaccgaaaaggttcaggaagaattattcccggatttcttttccaagaaggtttcttatgttgctcgtaaaaaagagggcatacaggaagatactttcttgcagaagctcaggcagtttaaagaaaaggtcaaatcccgtcattctgaacagcatactgcctga

SEQ ID NO: 43316 - protein, 270 aa, Unknown
  Obtained from environmental sample
  DOMAIN (40)...(117): Helicase conserved C-terminal domain
  misc_feature (1)..(270): Xaa is any amino acid
MHEKDYSVLDVVRRKTAEGGRVLICTSWTRIDSQRKLTNLLTENGYRVAILTSTVPPNKREEWVSKQVKGGVQVLITNPSLVETGLDLNDFTTLYFYNIAYNLFTLRQSSRRSWRINQKAPKIEVYFSYYEGTMQHRAIRLMASKLAVAGIIEGNISDEGLAAMSDCADMSTALARELTQGIKNEVEDLGAVFKKMAKLKPEPNHKEIVPECTKPVSTEKVQEELFPDFFSKKVSYVARKKEGIQEDTFLQKLRQFKEKVKSRHSEQHTA

SEQ ID NO: 43317 - DNA, 1500 bp, Unknown
  Obtained from environmental sample
  misc_feature (1)..(1500): n is a, c, g, or t
atggaaaagattaagttatcattgggtatactggcagtgacgggtcttgtatcctgcgcctccgggccgcggatttcgggggcggggcttttaacgcccgccactctcagcctggttcaaaacgccgtttttgaagtagttctggataaaccggccgaagatcccacggtttacgagaaggaattaaattggagtttggttccttatgttatcagaaatgacaaatactattccatcgggacggcgtttgcaatctccaaaactgaattggtaacggctttccatgtgatcaacctgggttttgaaagcatgatcttcagtaaattccatattcgggattcaaagggaaatgtctatgaagtggatcaggttaccggcggttccaacgaaaaggactacctgatttttaccgttaagggaaaaacctttgatgaattttttgagtttgaaaagaagttcaaaaccggcgataccgttctcagcataggaaacgccctcggtgaaggcgtggtggtgcggaacgggcttgtccttggcaccgttcccgaagaagattccggccgttggaatttgcttaaaagttccgcggacggcaatcccggaaattcaggcgggccgttggtaactccggagggaaaagttgtcggcgtggtaaactccctcagggaaaatattctgtattcggttccggcggaggtcattctcggcggcagccggtctgagctcccttaccgtcaaaagtcccgtgtaggacacctgatactgtcaaacaagctgaactacatttttgaatatcaggcgcggctgccggataattacacgaaggtaagggcttcaatctgcgaagcctataacggtttttacgatgacaccatgacaaagcttttcaaggaagcgccggaatacctttccggaccaaacaacgcgtacctgctcaacagttccctatcgacaatttttccggaagtcagttttgtggatcccaatgacgacaactggaaactgtcgggcctggacaaaaaaaattatcccctggacgacgacggacggctgtatcacgcttcggtatccggaatagacttctataaaattaaaaggcccctttccgtatccgtagaaaaaatttgcaccgatccgaaatatattatggatttgatcctccgcaatatccgcaccgacagatccctttggggcaatgacaaataccggatactctcttacggggaaccttcctccaagggatctttccgggacgcgctcggaaggacatggattaccgcccattgggtcataggctttgaggatgaagtccagataatgtatatcctcccccagcccaacgggccgggcattatttcaacaagcaggacagctcgtacctccacgtttacgaatgggatctgcgcaagacatgcgatcaccttttttcggcctacgacggttcttttgaagaatggagttcttttatcacccttgaacagtttattcccgacttcctga

SEQ ID NO: 43318 - protein, 499 aa, Unknown
  Obtained from environmental sample
  SIGNAL (1)...(26)
  DOMAIN (71)...(235): Trypsin
  misc_feature (1)..(499): Xaa is any amino acid
MEKIKLSLGILAVTGLVSCASGPRISGAGLLTPATLSLVQNAVFEVVLDKPAEDPTVYEKELNWSLVPYVIRNDKYYSIGTAFAISKTELVTAFHVINLGFESMIFSKFHIRDSKGNVYEVDQVTGGSNEKDYLIFTVKGKTFDEFFEFEKKFKTGDTVLSIGNALGEGVVVRNGLVLGTVPEEDSGRWNLLKSSADGNPGNSGGPLVTPEGKVVGVVNSLRENILYSVPAEVILGGSRSELPYRQKSRVGHLILSNKLNYIFEYQARLPDNYTKVRASICEAYNGFYDDTMTKLFKEAPEYLSGPNNAYLLNSSLSTIFPEVSFVDPNDDNWKLSGLDKKNYPLDDDGRLYHASVSGIDFYKIKRPLSVSVEKICTDPKYIMDLILRNIRTDRSLWGNDKYRILSYGEPSSKGSFRDALGRTWITAHWVIGFEDEVQIMYILPQPNGPGIISTSRTARTSTFTNGICARHAITFFRPTTVLLKNGVLLSPLNSLFPTS

SEQ ID NO: 43319 - DNA, 1617 bp, Unknown
  Obtained from environmental sample
  misc_feature (1)..(1617): n is a, c, g, or t
atggtaagcgtccttttaatgggtatgttttttcgttccccgaaaattcccatcagggaaaaaatcgtaaaccttgccactgtagttttcctgcttttgagctgtaacatgagtgtgcttgactatatgtggaatgccttccatttcacaaaaatgttgtatttccgcttctctttcctgctttcgtttactttggtgtcaatggcatacagggtttttttgctgaagaaaacaatggatcggcgggatctgaccgccatgggtatatgcgccgctttttttattctgatggcaattataggcgggcacagaaaaagcttcatcatcggctacgccggtttatgcgtcctttaccttttggtttggaatatgcccgctaaaaaaatgaaagacaaaattagaattgcgcttgaatatgggttttttattgctgatattaatagaactttccattacttcctatctgggcgtaaacagaacggtacaaccttcaggagccgttatccggacaactatgccaaagtgcaggaagctttaagcctgcgcgaaagcgccggctcaaatttctatagaactgagatgacagattggtatacggcgaacgatccatctctttacggctacaacggaatttcgattttttcatctactgctaatgttggagtcataaattttatggaaggcatcgggcttcccgcctcggctggggacaacagttattcctacgcggagacaagccccttggccaacgctttcctgaatttgcgttatttgataagccgcggcggcaatgcctacgataatagcgttttttgggagactaccggcaaggcgggcaataccttgctattggaaaacaaacgctggttaccactgggatttatggtgaataaagagctaagcgattataaacatgactccaacccctttgtatcgcaaaacaacctgtttcgcctagcaacaggcttaagcggagacctcttcgcggttaagactgttcctaataatccaatttccggaaaagactctgttggtaccaacgtatttgcctggggttatgaaataccggcggatggcatgtattacgcatattgtgtgtttccaaacgaagaaagggctatcgtttttcatggagacgaggtaatacggacaatagacaactatagtccgtacatattcacgcttgacagtttttcagaaggcgattttattatcttcattaccggcccagaggtttcaaaggaagctgcgaagatcctggtagggcgtatcgacaatgaactctttaaccggggttacgcccttttggcggatgagattctgaacctcacagaattctctgaaaccaaaatatctggcaatataactgccttaaaagacggactcctttatacctctatccccaatgatagaaactgggcggcgtttgttgacggctttaaggctccgattatacaagttgacggcggcatgatcgctttgcggctagacgcgggaacgcacaacgtagaattccggtatctcaacagggacttgattacgggaattatcacaagctttctttcactgaccgtatttgccgtactgattattttccgccgcgaaaaagccgtatag

SEQ ID NO: 43320 - protein, 538 aa, Unknown
  Obtained from environmental sample
  misc_feature (1)..(538): Xaa is any amino acid
MVSVLLMGMFFRSPKIPIREKIVNLATVVFLLLSCNMSVLDYMWNAFHFTKMLYFRFSFLLSFTLVSMAYRVFLLKKTMDRRDLTAMGICAAFFILMAIIGGHRKSFIIGYAGLCVLYLLVWNMPAKKMKDKIRIALEYGFFIADINRTFHYFLSGRKQNGTTFRSRYPDNYAKVQEALSLRESAGSNFYRTEMTDWYTANDPSLYGYNGISIFSSTANVGVINFMEGIGLPASAGDNSYSYAETSPLANAFLNLRYLISRGGNAYDNSVFWETTGKAGNTLLLENKRWLPLGFMVNKELSDYKHDSNPFVSQNNLFRLATGLSGDLFAVKTVPNNPISGKDSVGTNVFAWGYEIPADGMYYAYCVFPNEERAIVFHGDEVIRTIDNYSPYIFTLDSFSEGDFIIFITGPEVSKEAAKILVGRIDNELFNRGYALLADEILNLTEFSETKISGNITALKDGLLYTSIPNDRNWAAFVDGFKAPIIQVDGGMIALRLDAGTHNVEFRYLNRDLITGIITSFLSLTVFAVLIIFRREKAV

SEQ ID NO: 43321 - DNA, 468 bp, Unknown
  Obtained from environmental sample
  misc_feature (1)..(468): n is a, c, g, or t
ttgctgcccagggcggcgtgtatctcgtccaggatcacacagcgcactgtggaaagcacctgccgccccctggggttaagaaggatgatgccaaggctttcaggcgtcagggccaggatggaaggcggcagggaaagaaagcgtctgcgctcggcctggggtgtgtctcccgaacgggtctcgacccttatggccggaaacgcctcgcctgccttttcgaagcgcttctgtatcccctcaaggggcaagagcagatttcgcttaatgtcttcgtttagggctttcaggggcgagacgtatagcactgacagtttgccaaccgaatacgtcccctccgcaaaacgcgaaattgccgaaagaaagcctgtcagggttttgccgcttcccgtgggcgcgatggcaaggacgttttctcccgccgcgattagcggccaggcttcctcttgtactgctgtgggcttcgcgtag

SEQ ID NO: 43322 - protein, 155 aa, Unknown
  Obtained from environmental sample
  misc_feature (1)..(155): Xaa is any amino acid
MLPRAACISSRITQRTVESTCRPLGLRRMMPRLSGVRARMEGGRERKRLRSAWGVSPERVSTLMAGNASPAFSKRFCIPSRGKSRFRLMSSFRAFRGETYSTDSLPTEYVPSAKREIAERKPVRVLPLPVGAMARTFSPAAISGQASSCTAVGFA

SEQ ID NO: 43323 - DNA, 1254 bp, Unknown
  Obtained from environmental sample
  misc_feature (1)..(1254): n is a, c, g, or t
ttgtgttcgagttgcggcggttcggagtttgccgtcgacaattggggttctaaggatttgactatcaaatacggcggcgtcactgctaattcgaaggcctactacgagttggacgccgttcacgtgcgttattcgcgtactcttgccctcggcggcgccgtcggcaagttggaggtattttccgctgtggatgtcaatgaggcgcgttataggatgtccattgccggcggcggtcttacgtatgtggtgcgagttccggcgaacggtcgcggcatagagcttgtggacacggttagggcgtcgtcgtacgcgtggagcgatgtgggcggcgagggcgtgaggtatatggctatgcttgagaaagatatcgttgattacagcgattcccttgtgtcagcgggcgataggccggttcaggacgcgaggtatcagatacgggatttgcgcgatgtttccaactcgacggattttctgatcgttacgcaccaggattttttgagcgccgcttgctcgttggccgcgcacaagacgatgatggggtttagcgcacccaaggtggtgttgctgggcgatatattggatcagtttggcggcggcaatacggatcccgttgcgataaggaatttcttgtactatgtgtacggaaattggaagggcggcgatgttttctcgtacgttacgctaatgggcgccggtcactacgattacaagaacgtatcttcccgtgccgtcaattttatgccggtgccctatataagcggcaggataaacgaggatttttacgtattttttaacacgtgggtgcatccgaattcgcagcacgacaattattactacatagggcggatgccggtgaggagtttatccgaggcgcttgacatggtgaagaagatcaaggagatggaggatccgagcgtggctgatttcgggtcgtggcgcgctagggtgctgctaagcgccgacgacgaccagcagggagcggccgaggaccgcacagaccctacgcacacatcctcgtccgaacgtgtttcgcgtgttataggcgcacggcgtccggatattgatcaaaaaaagatttacctctttgaatacgcgtgggacgagcgttacagcaagcctgccgcgacgagggcgtatataaacgagatcaacagcggcgtcgcggtcgtcaattggtttgggcacggttccttgagcccaataccggaccagaagcttttttatagggaggctgtttcggccgctttgacatag

SEQ ID NO: 43324 - protein, 417 aa, Unknown
  Obtained from environmental sample
  misc_feature (1)..(417): Xaa is any amino acid
MCSSCGGSEFAVDNWGSKDLTIKYGGVTANSKAYYELDAVHVRYSRTLALGGAVGKLEVFSAVDVNEARYRMSIAGGGLTYVVRVPANGRGIELVDTVRASSYAWSDVGGEGVRYMAMLEKDIVDYSDSLVSAGDRPVQDARYQIRDLRDVSNSTDFLIVTHQDFLSAACSLAAHKTMMGFSAPKVVLLGDILDQFGGGNTDPVAIRNFLYYVYGNWKGGDVFSYVTLMGAGHYDYKNVSSRAVNFMPVPYISGRINEDFYVFFNTWVHPNSQHDNYYYIGRMPVRSLSEALDMVKKIKEMEDPSVADFGSWRARVLLSADDDQQGAAEDRTDPTHTSSSERVSRVIGARRPDIDQKKIYLFEYAWDERYSKPAATRAYINEINSGVAVVNWFGHGSLSPIPDQKLFYREAVSAALT

SEQ ID NO: 43325 - DNA, 1707 bp, Unknown
  Obtained from environmental sample
  misc_feature (1)..(1707): n is a, c, g, or t
ttgaacagcattgatgcgcagatttttgttgccgttccccataccggtgaaattctctttgcaaacaattttttaaaaaaacactttaacattgagggggattgcgtcggagagctttgttataagatttttataagagatagagatatggatggaatatgcgatttttgcccctgctatcagcttgacaaagaaccggacagcactgtcgtatgggaactgtacaaccccgttacgaaccgcatatatcgcaatactgcccgctatattgaatggtctgacggaagaattgtcctaatccagcattcagtcgatgtaaccgattttattgaggcaaaagaacaggccgaacagagcaaccgttacaagagccaattcctgtcgcgcatgagccacgaggtacgcacgccgatgaacgcgatcctgggcattaccgaaattcagcttcaggataaagcgctgtcgccgggcatgcgggaagccctggacaggatttacagttcgggttatttactgctgggcatcatcaacgacatactggacttgtccaaaatagaggcgggcaagctggaactggcgccggttaactatgatgtcccaaacttcatcaatgacaccgtgcatctgaatattatgcggttcgacaacaagccgattgaattcagccttcaggtggacgagttcgttcctatgacgctgttcggcgatgaactgcgcattaaacagattttaaataacctgctttccaatgcgtttaaatacactgaaaaaggcgagattgagctttcggtttttccggaacctccaggcgactctcccgaggacgtaattatcgttttttgtgtacgcgataccgggcagggcatatcagaggaacatatgtgcaggctgtttgaggattatatgcgctttaatcgggacaagaaccgtactgttacggggacaggtctggggcttagtattaccaaacgtctcatcaatctgatgaacggtgaaattcgtgtcgagagccagctggacaagggatcggtatttacagtacgtttgccgcagaggcgcctcggggaagctatatgcggagcgaaaaccgcgcggcaactgcgggaatttgacttccacaccacagtaatagcaaataagacgcggattgtacacgattatatgccttacggcagcgttctggttgttgacgatgtcaaatcaaacctgtttgtcgccaggggtttgctggcgccttatggcttacaaatcgatgccattgaaagcggagttaaagccattgaaaaaatcagggacggcaatgtgtatgacattatttttatggaccacatgatgcctgtaatgaacggtattgaggcgacaaaaatcttacgcgatatgggctacaatcggcccattgtcgcgctgaccgccaatgctcttgtgggacaagcggagatgtttatgcaaaacggttttgacgccttcattaccaagccgattgacacgcgcaagctgaacgccgtattgaaagattttattcgggataaaagacctgccgaaacagtggattcaacactgtggaagcagtttaaaaatgatgataaaagcaagggggtccccatggaaaagaaaagaaaactatccgagttggaagaatgctttctgaatgacgccgaagaagcaattaatgtatggagggtttatacacgactcggccgaatctga

SEQ ID NO: 43326 - protein, 568 aa, Unknown
  Obtained from environmental sample
  DOMAIN (122)...(188): His Kinase A (phosphoacceptor) domain
  misc_feature (1)..(568): Xaa is any amino acid
MNSIDAQIFVAVPHTGEILFANNFLKKHFNIEGDCVGELCYKIFIRDRDMDGICDFCPCYQLDKEPDSTVVWELYNPVTNRIYRNTARYIEWSDGRIVLIQHSVDVTDFIEAKEQAEQSNRYKSQFLSRMSHEVRTPMNAILGITEIQLQDKALSPGMREALDRIYSSGYLLLGIINDILDLSKIEAGKLELAPVNYDVPNFINDTVHLNIMRFDNKPIEFSLQVDEFVPMTLFGDELRIKQILNNLLSNAFKYTEKGEIELSVFPEPPGDSPEDVIIVFCVRDTGQGISEEHMCRLFEDYMRFNRDKNRTVTGTGLGLSITKRLINLMNGEIRVESQLDKGSVFTVRLPQRRLGEAICGAKTARQLREFDFHTTVIANKTRIVHDYMPYGSVLVVDDVKSNLFVARGLLAPYGLQIDAIESGVKAIEKIRDGNVYDIIFMDHMMPVMNGIEATKILRDMGYNRPIVALTANALVGQAEMFMQNGFDAFITKPIDTRKLNAVLKDFIRDKRPAETVDSTLWKQFKNDDKSKGVPMEKKRKLSELEECFLNDAEEAINVWRVYTRLGRI

SEQ ID NO: 43327 - DNA, 468 bp, Unknown
  Obtained from environmental sample
  misc_feature (1)..(468): n is a, c, g, or t
gtgcatggagtttcaaataacatgaccgtcgtagcgtggcaaaacggtactcaggctttagtgggaaaaataatacaaacgggcgctcttgaaagccttgttatgcccgtatttgacgttaattcacttgtatcgtgccgtttttcagtatcgcgttttgaaggaattgttgaagggcagggcagttccgagaattctttaacgatgaggtttgtcccccgcagggcgagagatgaaataaatatcggagatatagtcgttacaagcggtatgggcggaatatatccgccaggcattaatttaggacgcgtcagcagcattaatattcttgaatatgaaaccactttagaagtggacgttatcccaatgatcgatttttcaaggcttgagtatgtttttgtcattgaagccgaaagccaagattttgattctataaggacgtattccataggaacattcgatgattag

SEQ ID NO: 43328 - protein, 155 aa, Unknown
  Obtained from environmental sample
  DOMAIN (2)...(139): rod shape-determining protein MreC
  misc_feature (1)..(155): Xaa is any amino acid
MHGVSNNMTVVAWQNGTQALVGKIIQTGALESLVMPVFDVNSLVSCRFSVSRFEGIVEGQGSSENSLTMRFVPRRARDEINIGDIVVTSGMGGIYPPGINLGRVSSINILEYETTLEVDVIPMIDFSRLEYVFVIEAESQDFDSIRTYSIGTFDD

SEQ ID NO: 43329 - DNA, 447 bp, Unknown
  Obtained from environmental sample
  misc_feature (1)..(447): n is a, c, g, or t
atgcagcgtggattctttggtaaatcgccgaggcagggcggcaataaattaccgggagcgcagatcaattcttctgtctttgtatttgtaattttaattattatttcaacattaatgcttttagtgtccagcagaaattttattttcggcgtaaaaaatacgggactgtccctgttttcgggagtaagaggcggcatatatgaattatcttctcttgtttcaagaactgtattgtcgattaaagaacttacaaatttaagaaaagaacacgcagatcttttaaaacagcttgatcgttatgaagagttagaacgaagcaacgcggaaatttatcaggagaatataaggttaaaagaacagcttgattttcaaaaacgcttcgatacagaagaatccccgcgcaaatatcgggaagagatccgcataatcttttctcggcccttgtaa

SEQ ID NO: 43330 - protein, 148 aa, Unknown
  Obtained from environmental sample
  misc_feature (1)..(148): Xaa is any amino acid
MQRGFFGKSPRQGGNKLPGAQINSSVFVFVILIIISTLMLLVSSRNFIFGVKNTGLSLFSGVRGGIYELSSLVSRTVLSIKELTNLRKEHADLLKQLDRYEELERSNAEIYQENIRLKEQLDFQKRFDTEESPRKYREEIRIIFSRPL

SEQ ID NO: 43331 - DNA, 570 bp, Unknown
  Obtained from environmental sample
  misc_feature (1)..(570): n is a, c, g, or t
ttggacattgagagagggattacgggaaaattcctgttatatcgctcggacggaatggttgtaacaagcgctatccgcacagggagcgatgaattggtcgagtcaattattaaacatatacgaagcgttcataacctgataatcggcgaacaaatgtcggaaaaattaaaaattgaaattggaaacgcctctcctgacagaataattgaaaaaatggaagtaaaaggcaacgatgccattacagggcttcctcgcagactggaaattgattctgtcgaggtaagagaagctcttaaagatccaataacaaaaattattgacgagattaaaacagtgcttggaaaaacacctcccgagcttgcggctgacatcgtagatcgaggaattgtaatgacaggcggcggctctctgcttaaaggactggataaacttatccaaaaagaaacgggcgttcccgcgattatcgccgaacagccggaactttgcgtcgcgcttggagcgggaaaatattttgattacataaaaggcgcagaccttaccaaaaatatttatgacagattaaacggataa

SEQ ID NO: 43332 - protein, 189 aa, Unknown
  Obtained from environmental sample
  DOMAIN (3)...(179): MreB/Mbl protein
  misc_feature (1)..(189): Xaa is any amino acid
MDIERGITGKFLLYRSDGMVVTSAIRTGSDELVESIIKHIRSVHNLIIGEQMSEKLKIEIGNASPDRIIEKMEVKGNDAITGLPRRLEIDSVEVREALKDPITKIIDEIKTVLGKTPPELAADIVDRGIVMTGGGSLLKGLDKLIQKETGVPAIIAEQPELCVALGAGKYFDYIKGADLTKNIYDRLNG

SEQ ID NO: 43333 - DNA, 1527 bp, Unknown
  Obtained from environmental sample
  misc_feature (1)..(1527): n is a, c, g, or t
atgggaacacgacagaacccgctgctgccgaacgaagcggcggctaaggcgattttaacgcggcttgcgggcgagaagttttcggtggccgacgtgcagaggacggagaagagccgcaagccctacgcgcctttcatcacgtccacgctgcagcaggaggcggcgcgcaagcttgggttcagcgcggcaaggactatgatggtcgcgcagcagttgtacgaaggtttggaacttgggccgctgggatctatgggtctaatcacctatatgcgtaccgactcgacgcgtatcgccgcggaggctatctccgacgcccgcaccgtggtgaagaaactcttcggcgcgaagcacgtgccgtcggcgccgcgctactacggcaagagcaagaacgctcaggacgcacacgaggctatcaggccgtcgcaggtgaacttggactttgccccggataaggtgaaggcgtttctgtcgcgagatcagtacaaactctacgagttggtgtggaagaggtttttggcgtcgcagatggagaacgcgctcttcgattccacccgcgtggacatcggcggaggcgggtgcgtgtttagggcgagcgggtctatcatgaagttcgacggttttcttgccctatacgacgagactgttgaggacgccgttgataccgtggagggccagaacgacacgctgccggaacttgcggtcggcgccgccgtggataagaaggaactcgttgacaagcagcacttcacgcagccgccgccgcggtacacggaggcgtcgctggtgcgggagcttgaggacaagggcataggccgcccgagcacctacgctcagatcatagacacgctcaaacgccgcaagtacacgacggtggaggctcgcaggttttcgcccacggacgtcggctacatggtgaagaacaccttggtcaaccagtttccagatgtgttcgacgtggggttcaccgcggagatggagtcgcggttggatgagatagagtcgggcggcgccgattggataggcgtgctaaagacgttctacaccccgtttgccgaccgcctcgaggtggtgcgcggcaacatcaaggatctgcgcgcgcaaaatcaggaagttaccgataaaaaatgtccgtcgtgcggggagaattttctcgtcgtcaagtggagcaaaaacggcaaatttttagcctgcccgggatttcccacctgtaaatacacagagccgcttgagaaagacgcctccgtacaaacggacgagaagtgcgacaagtgcggcgcgccgatggttgttttgaccatgaacaacagcaagtttttgggctgctcgcgctttccagattgcaagaacaccaagtcgctctccataggcgtaccttgcccgcaggcgggctgcgacgggagcgtggtggagcgcaagacgcgcaggggcaaggtgttctacggttgcaacaagtaccccaagtgcacctttgccagttgggacaaaccgattgccagaaagtgcgataagtgcgggaatccctattga

SEQ ID NO: 43334 - protein, 508 aa, Unknown
  Obtained from environmental sample
  DOMAIN (418)...(455): Topoisomerase DNA binding C4 zinc finger
  misc_feature (1)..(508): Xaa is any amino acid
MGTRQNPLLPNEAAAKAILTRLAGEKFSVADVQRTEKSRKPYAPFITSTLQQEAARKLGFSAARTMMVAQQLYEGLELGPLGSMGLITYMRTDSTRIAAEAISDARTVVKKLFGAKHVPSAPRYYGKSKNAQDAHEAIRPSQVNLDFAPDKVKAFLSRDQYKLYELVWKRFLASQMENALFDSTRVDIGGGGCVFRASGSIMKFDGFLALYDETVEDAVDTVEGQNDTLPELAVGAAVDKKELVDKQHFTQPPPRYTEASLVRELEDKGIGRPSTYAQIIDTLKRRKYTTVEARRFSPTDVGYMVKNTLVNQFPDVFDVGFTAEMESRLDEIESGGADWIGVLKTFYTPFADRLEVVRGNIKDLRAQNQEVTDKKCPSCGENFLVVKWSKNGKFLACPGFPTCKYTEPLEKDASVQTDEKCDKCGAPMVVLTMNNSKFLGCSRFPDCKNTKSLSIGVPCPQAGCDGSVVERKTRRGKVFYGCNKYPKCTFASWDKPIARKCDKCGNPY

SEQ ID NO: 43335 - DNA, 2244 bp, Unknown
  Obtained from environmental sample
  misc_feature (1)..(2244): n is a, c, g, or t
ttgcacacggggaagcctctgctgacactggctggcgcgggttcgggcaaaacaagggttatcaccacaaagatagcgtggctaatcagggaacggggaatggatccgcgttccattttggcggtaacatttacaaacaaagcggcaagagaaatggcggaacgtgcaaggcagattgacgaacgcgcgggggacgcaatgctgcggacttttcactcttttggagcgtggtttttgcggcgcaacggaagtcttatcggtcttgattcggagtttaccatttacgacgacgatgatgtcgtatcgcttctttcctctattttggaaaacatgcctaaacccgatgtaaaacattacgctcacaacatttccagagcgaaagattattttctctcccccgacgatcccgaacttgcgattatcgatcacaacaaaaagttccgtgacatttacaagcgatacgaagagcgcatggcgcagattggcaatgtcgatttcggcgatttgataaaaaaacccgtggagattttacgcagtcagccggaagtggcgcggcgttttcatgagcgctttcaggtaataatggtggacgagtatcaggacgcaaacgtggcgcagttcaggctgttaaaagaattgtgcggtcccgatacctacgtttgtgtggttggcgacgacgaccagtccatttaccgtttccgaggcgcggaagtaaaaaatattcttgagtttcccgatcgtttttcgggcgcggacattatccgccttgaacaaaattaccgctcgacatcttccattttgcaagtagcgtcctctgttgtcgattataaccacggacgtttgggaaaaactctccgcgccgaaaaaggagacggacctgcgcccgtgcttgtctatcttcacgaccaaaacgaagaagcgtctttttgcgccgataaaatcgccgcttccgtaaaaaagaaagaaacagcgtggtcggattgggctatcctttaccgcaccaatgcgcaatcggcagggtttgaaactgtttttatgcgaaagagtatcccctaccgagttatcggctctttaagattttatgaacgtgaagaaattaaagactctctcgctcttttggctttccttgtaaatccccgtgatgaagtcgctttccgccgtgttgtaaacaaacctacaagaggcgtgggagcggcgacagtcgataagctaacggaagcttgcgccgaacacaacggcgacttgcttgagacaagccgcacgatggactgttccgcaaaagcgcgtaaaggtttgaatgagtttatcaaagtaattgaagacgcaaaaaatttgttgtctcattctgtacacacatacgaagaagatgaagacagcgaacttgtatcgggcgataatctttcgcttctggttacaaaaataattaacgattcaggtattgccgagtatcataaaacgcaagatgaaatagctgggatttcaaaaacaggcaacttgatggagcttgtaaacgccgccggtgaatatcaaaacacccgtgaaggactgctcgaatttttggaagacatcgaacttgaccgttcaatggaagacaacgcaaacgcaaataaatccggcgacttgcaaaacgccgtaacgcttattacttttcacaacaccaaaggtttggaattcaaacgtgtaataatgacggggcttgaacaaggtatctttccaagagaggacaaaaaagacgatgaacttgaagaagagcggcggcttttttatgtgggagccacccgcgccatggacgaactatatttgacaacctgcgcagagcggcgaatgtacggaagaaccgcacctgcgcaaccatcgctgtttttgcgcgagatagacagaagctgtctgcaaataaaagaacttccgccgacgcaaggcactgcgccgcaatacgcaaacaaaagatcattcatcgggagaaattttaatccgcttaatcctcaaagcctgcgcgcaagcagtaccggcaggggaacaagtatcggcgcaggcaacagcgcaggcagcggcgcaaaaagcaaagcaaacgcagaacttgaagaacgcgcaggctggcgaataggacagcgtttgtttcacgaggatcacggttacggcgcagttgtgggaataaaagacagcgaggacggtcctgttgttcatgtccgtttcgattcagggttggacaaacgatttttaagcgagattcagggcagagcctag

SEQ ID NO: 43336 - protein, 747 aa, Unknown
  Obtained from environmental sample
  DOMAIN (2)...(461): UvrD/REP helicase
  misc_feature (1)..(747): Xaa is any amino acid
MHTGKPLLTLAGAGSGKTRVITTKIAWLIRERGMDPRSILAVTFTNKAAREMAERARQIDERAGDAMLRTFHSFGAWFLRRNGSLIGLDSEFTIYDDDDVVSLLSSILENMPKPDVKHYAHNISRAKDYFLSPDDPELAIIDHNKKFRDIYKRYEERMAQIGNVDFGDLIKKPVEILRSQPEVARRFHERFQVIMVDEYQDANVAQFRLLKELCGPDTYVCVVGDDDQSIYRFRGAEVKNILEFPDRFSGADIIRLEQNYRSTSSILQVASSVVDYNHGRLGKTLRAEKGDGPAPVLVYLHDQNEEASFCADKIAASVKKKETAWSDWAILYRTNAQSAGFETVFMRKSIPYRVIGSLRFYEREEIKDSLALLAFLVNPRDEVAFRRVVNKPTRGVGAATVDKLTEACAEHNGDLLETSRTMDCSAKARKGLNEFIKVIEDAKNLLSHSVHTYEEDEDSELVSGDNLSLLVTKIINDSGIAEYHKTQDEIAGISKTGNLMELVNAAGEYQNTREGLLEFLEDIELDRSMEDNANANKSGDLQNAVTLITFHNTKGLEFKRVIMTGLEQGIFPREDKKDDELEEERRLFYVGATRAMDELYLTTCAERRMYGRTAPAQPSLFLREIDRSCLQIKELPPTQGTAPQYANKRSFIGRNFNPLNPQSLRASSTGRGTSIGAGNSAGSGAKSKANAELEERAGWRIGQRLFHEDHGYGAVVGIKDSEDGPVVHVRFDSGLDKRFLSEIQGRA

SEQ ID NO: 43337 - DNA, 312 bp, Unknown
  Obtained from environmental sample
  misc_feature (1)..(312): n is a, c, g, or t
ttggatgacgaaaaaaatcgtttacggttatttgttgtcggaaaaacggattacggcggattaagaagcgaaataagacggataaccgatcccgaattatgcaaggacgacgctaaagccagaaaaattcttgaagaaaaagaaatctggtatcgctatgctccgacagattcctcgaatattatggcggacgtactttggttttttatgcaaaattattttcccgataaaacttcgttaaaacattcgggacgctacgaaaatatatttctaaaggaatccgctcccgacaagttaatgtgggttccttaa

SEQ ID NO: 43338 - protein, 103 aa, Unknown
  Obtained from environmental sample
  misc_feature (1)..(103): Xaa is any amino acid
MDDEKNRLRLFVVGKTDYGGLRSEIRRITDPELCKDDAKARKILEEKEIWYRYAPTDSSNIMADVLWFFMQNYFPDKTSLKHSGRYENIFLKESAPDKLMWVP

SEQ ID NO: 43339 - DNA, 687 bp, Unknown
  Obtained from environmental sample
  misc_feature (1)..(687): n is a, c, g, or t
gtgggttccttaaaaaaaatgattgaatatcttatcccctcaaatattgacgacagaatactgaaccgagccgcccggataattcaagacggcggtcttatcgctctgccgacggacacaagctggagtattgtctgctcgattaaatcgccgcaagctataaaaaaattgagaaatctttccggcgaaagggacgagcggcattttaccctgctctgctcaagcatttcccaatttgtggaagtcgtaaaaatggataatacccgttttaggctgattaaccgtctttcacccggtccttatgtttttattttggaaacgttatcgggtacgcaaaaatttcttgacattcgccgccgtgagcttggcgtgcgcattcccaatcatcctgttccgataagattgatagaaactcttaaatcgccgctttattcaatcacggcgaaaaaaagcatggtaagcggcaatgagacggacgcccgtcacgcagaggcggcggataccgaattgccgccaatccctgaagacgaactttttgaaaacggctgggaacttgaaggcattgaaggcttgagccttgttcttgacgacggcgaggaacgtgagcgaattttttccactattcttaatttatgcgaagacgaggtgaaggtgttgcggtatggagcgggggaatggagtgattag

SEQ ID NO: 43340 - protein, 228 aa, Unknown
  Obtained from environmental sample
  DOMAIN (26)...(222): yrdC domain
  misc_feature (1)..(228): Xaa is any amino acid
MGSLKKMIEYLIPSNIDDRILNRAARIIQDGGLIALPTDTSWSIVCSIKSPQAIKKLRNLSGERDERHFTLLCSSISQFVEVVKMDNTRFRLINRLSPGPYVFILETLSGTQKFLDIRRRELGVRIPNHPVPIRLIETLKSPLYSITAKKSMVSGNETDARHAEAADTELPPIPEDELFENGWELEGIEGLSLVLDDGEERERIFSTILNLCEDEVKVLRYGAGEWSD

SEQ ID NO: 43341 - DNA, 654 bp, Unknown
  Obtained from environmental sample
  misc_feature (1)..(654): n is a, c, g, or t
atgttgaatttggcttccaactatatagcggtaaacggcatatccaatgcggttctgaaagttaagaacgaagaggcgcttaacgacgccagaaaatcgctttacaaggcagtaatttatcttgaagaaactgtcagcaattacatcgattcacctttttcagaatatgaagaaaaacttgccgctatagaaacttttgatcaaaatcagcgatatcagctgatacggaagatagggctttctatagacctacttgagaatgcttacggagacaattcaaaatggaaatggacatttgtagaattggaagggcgttatgccacaatcgcaaaaaacatccttgatttacggaatgtcattaattattccagaccggattccgatttttatgattcaacggtttatcatttaaggttagtaaaaaaacttttatcacagtctgctgatcgttaccgtgaaaaatacgaattatctacaagccaaatgtctgattttaaaactggaattaattatctcggcgcgttaaggcgcatacatgctgtgctttctgaaagcgaagaagccgaagctataaagaaaaaatacgcgatttggtctgcaaaacttgaaacagatatgaagaaacaggaagaagcaaagaaaaagagagcatga

SEQ ID NO: 43342 - protein, 217 aa, Unknown
  Obtained from environmental sample
  misc_feature (1)..(217): Xaa is any amino acid
MLNLASNYIAVNGISNAVLKVKNEEALNDARKSLYKAVIYLEETVSNYIDSPFSEYEEKLAAIETFDQNQRYQLIRKIGLSIDLLENAYGDNSKWKWTFVELEGRYATIAKNILDLRNVINYSRPDSDFYDSTVYHLRLVKKLLSQSADRYREKYELSTSQMSDFKTGINYLGALRRIHAVLSESEEAEAIKKKYAIWSAKLETDMKKQEEAKKKRA

SEQ ID NO: 43343 - DNA, 675 bp, Unknown
  Obtained from environmental sample
  misc_feature (1)..(675): n is a, c, g, or t
atgatcagatcggccgagtttttcatttcatttatgtcaaaaaaattcatagcagggctaattgcgcctgatgttttgcaaaatgctatttcaataaaaaaatgcgagattttggaaattcgctatgatttatttgagaatatggacgactggtccggtcttttgcaaaaagtttctgagcttaatccaaaagctctaaaactcggcacaatcaggctggaaaaagatggtggaaaatggaaaaattctagagctagcgaaagaatgggtttatttgacaaatccttagactggatagacttggaaagaggaatgataactgaaaaaacgggccataaaataatttgctcttggcacttattcgacagagttccaaatatgagcgagttaagcgaatttgccgaggaatgtttagaacttggggttcaagggtgcaaagtagccgcaatggctcattcaaagtgcgatgcagaacccttatacgatttcgcaaaaaaatatggagaaaaatttgaattattttccgcctttgcaatgggcgaacagggaaaggaaagccgtgttcgttctttgaaagagggtgcgaatttgacttatgcctcaattggaaaagctcttgcccctgggcaattaagcgtagaggagataaattatcaaaccaacggaagccagtag

SEQ ID NO: 43344 - protein, 224 aa, Unknown
  Obtained from environmental sample
  DOMAIN (16)...(219): Type I 3-dehydroquinase
  misc_feature (1)..(224): Xaa is any amino acid
MIRSAEFFISFMSKKFIAGLIAPDVLQNAISIKKCEILEIRYDLFENMDDWSGLLQKVSELNPKALKLGTIRLEKDGGKWKNSRASERMGLFDKSLDWIDLERGMITEKTGHKIICSWHLFDRVPNMSELSEFAEECLELGVQGCKVAAMAHSKCDAEPLYDFAKKYGEKFELFSAFAMGEQGKESRVRSLKEGANLTYASIGKALAPGQLSVEEINYQTNGSQ

SEQ ID NO: 43345 - DNA, 1077 bp, Unknown
  Obtained from environmental sample
  misc_feature (1)..(1077): n is a, c, g, or t
ttgacagattggccgagagatttgataatttcagactacaaaatgcccggaatgacaggactggatttgctgaaagccgtgaaaaaagaccgcccttcacagccgtttttgatgatgaccgcatttggttccattgaaatggcagtagaggctttgcaaaatggcgcagaccattttatagaaaaaaaagattttgaacacgcagaaataatagaacatgctgttgctatggtacttgaaaaatacaagtacagaatggaaaattctgttttgaaaaaacgtctttgcgaaaaagattttattgggcacagcgaaaaatttgtggcactcaataaatttgtagaaacagttgcacccacaaacgcttctgttttaataacgggagagtctggggttggaaaagaagttttggctcgcgccctgcattaccaaagtttgagagctggctgtccgtttatcaaaataaattgcgccgcattgccggagtctttaatagagagcgaactctttgggcacgagaagggagccttcacaggagccttgaaaactaggcgtggcaaatttgagcttgcagacggcggcacccttttgctagacgaaataggcgaaatgccgcttgccgcacaaagcaagctactacgcgttttgcaagaacgcacagttgttcgcattggcggagacgatgagataaaagttgatgttcgcataatttgcaccaccaatagggatttgaaaaaagaagtggaaaatggaaacttcagagaagatttatattatcgccttagcgttgtgcctgtgcacattccgccgctcagggaacgcacagatgatattccagatttgctgaattattttatcggcaaattcaacgagaagaatggtcgcgcgtgggagagggcaagcgaagaaactgtgtctatgcttcaagagcaaatgtgcccaggcaatattcgccaactagaaaatgccattgcgagggctatggtattctgcaaaggtacaattttaaccccagaattttttgaaattgaaggtggcaaaaatgtgtctgctggcaaaacaaaaaagaaggcataa

SEQ ID NO: 43346 - protein, 358 aa, Unknown
  Obtained from environmental sample
  DOMAIN (123)...(263): ATPase family associated with various cellular activities (AAA)
  misc_feature (1)..(358): Xaa is any amino acid
MTDWPRDLIISDYKMPGMTGLDLLKAVKKDRPSQPFLMMTAFGSIEMAVEALQNGADHFIEKKDFEHAEIIEHAVAMVLEKYKYRMENSVLKKRLCEKDFIGHSEKFVALNKFVETVAPTNASVLITGESGVGKEVLARALHYQSLRAGCPFIKINCAALPESLIESELFGHEKGAFTGALKTRRGKFELADGGTLLLDEIGEMPLAAQSKLLRVLQERTVVRIGGDDEIKVDVRIICTTNRDLKKEVENGNFREDLYYRLSVVPVHIPPLRERTDDIPDLLNYFIGKFNEKNGRAWERASEETVSMLQEQMCPGNIRQLENAIARAMVFCKGTILTPEFFEIEGGKNVSAGKTKKKA

SEQ ID NO: 43347 - DNA, 387 bp, Unknown
  Obtained from environmental sample
  misc_feature (1)..(387): n is a, c, g, or t
atggactacgagttctacgggtatcaacgcgacgatttgataaagttggacatactgataaacggttcccccgtggacgccttttccaccatcatccaccgcgacaactcctactcctacggccagatgatcacgtcgaagctgaaggaactgatcccgcgccagcagtacgaggtggcgatacaggcggcgataggcagcaaggtgatagcgcgcaccacggtcaaggcctaccgcaaagacgtgaccgcgaagtgctacggcggcgacatcacgcgcaagcggaagttattagagaagcagaaggagggcaagaagcgtatgaagcagatagggaacgtcgaggtgccgcaggaggcgttcttggccgttttgagtcgggattga

SEQ ID NO: 43348 - protein, 128 aa, Unknown
  Obtained from environmental sample
  DOMAIN (20)...(128): GTP-binding protein LepA C-terminus
  misc_feature (1)..(128): Xaa is any amino acid
MDYEFYGYQRDDLIKLDILINGSPVDAFSTIIHRDNSYSYGQMITSKLKELIPRQQYEVAIQAAIGSKVIARTTVKAYRKDVTAKCYGGDITRKRKLLEKQKEGKKRMKQIGNVEVPQEAFLAVLSRD

SEQ ID NO: 43349 - DNA, 771 bp, Unknown
  Obtained from environmental sample
  misc_feature (1)..(771): n is a, c, g, or t
gtgacaaagatatattatttcagcggtaccggtaacagcttatggtcggcaaaaagaatcgcccgcataatcggcggatcttgcgagctgcataatatcggtcttgaggctgaaaaagacgaaataacaattgacgcacaagcggtggtatttgtgtacccttcctacgcttacggtctgcctttgatagtccgccgcttcgcgaagaaggccgtatttaaaacgccgtatctggcggcgtttgtaacctacggctccgatcccggaggcacgcaggcggaattaagcaggatactaaaaaagaaaaatatcggctcgctttactttggcaaaattcccgcggcggaaaattacattcccgtctttggcccctccaatgacgagaaaatcgcgaaacgctccgccatgcaggaaaaagagactgaaaaagccgcgcgttatgtgattgaaagacggacaaacaaagttaatcccttccgcccgctgtcttcctttatatcgtttcttttttcgcttggagtaaaaatattttacaaacattacaaggtaagcgacaaatgcaacggctgcggcgtctgcgaaaaggtttgcccggtcggcgcaattaaaatgaaggaaaagcgccccgtcttcagcggcaaatgcgaaaattgcgtcgcctgcatcgacatctgcnccttgcgcgccattcagtccggacgcgccagattcggcacccgcgggtattgccatccggatatcaatattagagaacttggcagagggatgtag

SEQ ID NO: 43350 - protein, 256 aa, Unknown
  Obtained from environmental sample
  DOMAIN (180)...(203): 4Fe-4S binding domain
  misc_feature (1)..(256): Xaa is any amino acid
MTKIYYFSGTGNSLWSAKRIARIIGGSCELHNIGLEAEKDEITIDAQAVVFVYPSYAYGLPLIVRRFAKKAVFKTPYLAAFVTYGSDPGGTQAELSRILKKKNIGSLYFGKIPAAENYIPVFGPSNDEKIAKRSAMQEKETEKAARYVIERRTNKVNPFRPLSSFISFLFSLGVKIFYKHYKVSDKCNGCGVCEKVCPVGAIKMKEKRPVFSGKCENCVACIDICXLRAIQSGRARFGTRGYCHPDINIRELGRGM

SEQ ID NO: 43351 - DNA, 942 bp, Unknown
  Obtained from environmental sample
  misc_feature (1)..(942): n is a, c, g, or t
atggtcaggatcggccgagttcctaagcaacaggagatcataaaagggctgatagaagacaccgccaaaagccaggaagccatgcgggagacgattcaatcaattgatgacatttcaaaatcggtggaaggcatatcgcaggcgattaaaataatcagctcaatagcggctaacaccaatttattgtccatgaacgctgcgatagaagccgcgcacgccggcaatgcgggtaggggttttgcggtggttgccgatgagatacgccgcctttctgacagtacccgggagaattcggtaaacatttccaagacgctgaaaagcatcatcaacggagtaaccgttaccgaaaaacagtcggaaggcaccggaacgcggattaccgcaatgtcaaaagaaatcggcgattttgccaaaactatgtccgatctaatcaataccttcggcgaactgtcgtcgcaaagcggcgagattacatcagcgttggacagccttatccgtcaaagcgacaaagtaaaaaccggctatggcgaaatactgtcaatgacggaaaaactgcgcgaggtaatggttgatttgaatatgctgtcgaagaaaaaggttcttatagttgatgatgaggaaatcacccttgagatgacaaaagaaattctgcacaataattataatgttaccacggccaattccgccaaggccgctttggacttgtttctgggcgggtatactcctaattttattttactggatttgtatatgcctgaaatgggcggctgggacgcccttatcagaatacgcaacctcagcaaattacaccaaaccaagatagcgatatacacggcatcgaacgacccgaaagacagggcaaaagcgaatgagtttggcgcggttgaatacatacacaagcntatcaatgggtccgagctgcttgaaagaataaaaaattga

SEQ ID NO: 43352 - protein, 313 aa, Unknown
  Obtained from environmental sample
  DOMAIN (12)...(195): Methyl-accepting chemotaxis protein (MCP) signaling domain
  misc_feature (1)..(313): Xaa is any amino acid
MVRIGRVPKQQEIIKGLIEDTAKSQEAMRETIQSIDDISKSVEGISQAIKIISSIAANTNLLSMNAAIEAAHAGNAGRGFAVVADEIRRLSDSTRENSVNISKTLKSIINGVTVTEKQSEGTGTRITAMSKEIGDFAKTMSDLINTFGELSSQSGEITSALDSLIRQSDKVKTGYGEILSMTEKLREVMVDLNMLSKKKVLIVDDEEITLEMTKEILHNNYNVTTANSAKAALDLFLGGYTPNFILLDLYMPEMGGWDALIRIRNLSKLHQTKIAIYTASNDPKDRAKANEFGAVEYIHKXINGSELLERIKN

SEQ ID NO: 43353 - DNA, 1329 bp, Unknown
  Obtained from environmental sample
  misc_feature (1)..(1329): n is a, c, g, or t
atgccggatgaaataaagaacatagtatacaaaaatttgccgttacgaattcgcggcggaattaaagaagctgtggatgaaatagaagccgtgaaagaaactgtggagaatacggatgacgtgtatgcaaggaatgacaactattatgaagaacaaagaacagaattgatttctttcatcggagaaaatattatagaatgggaaagccccgattgccttatctggaaagaaataaagccaaaggaagaaccgaggattacccctgttgaagatttaatcaaagaaattgagcatgcttgttcttcagaagaactttatataccgtcttataaaacaaataaaatgtcgaaagaagacttgcggaatgcctttgcggcgttccatgatcgaaaaaatgaattacaaagcatacgaaaactttcaatatcggcaaaggtgttacccgccgccgcgccgctttttgaaaacgcgcctcttgagattctgcacattgacggtaaattaactgaagaatggccggagtttatggtaaattgcggtaaaataaaatcaatttctttaagcatatatggattaaccgaatttccctcatggatacgcaatgccgtttctctgaaaaaacttgaaatttcttgtttacaagaaaaaatattaataccggattggattggggatttgcaatcaataacggagattggcatatatgacagtaatcttaaaacatttcctgacggcatagggagtttaaggaatctttcaaaacttattctcaactataccgctatagaagaaatgccggactgcgttggcaatttatcttctttaaaggagttatttttgtaccataataattcattatcatccttgcccgataatattggtaacgtggcgaatcttgaaaaagtaaccatcgaacattccgccatagaaaaacttcctgaaagttttggcaatttatcttcactaaaagtgttaatattgatcggtaacagaaaattaaaatctttgcttgaaagcattgggaatcggaaggatgtggaatatttcgaatttcgttattcagccgtaaaaataatacccgaaagtataggaaatttaaaaaaccttagtgattatagattagttggaagtaaaatagaaaaattacccgacagtatcggcaatttggaaaaattgacatggctttatctggaatataataaaaacttaagaagcctgcccgacagcgttggaaacttaaaaaatctaaacaccgtgaatctttacggcacgggattggcaatactgccggatacattggcggatctgttcttttctaggctatgttaa

SEQ ID NO: 43354 - protein, 442 aa, Unknown
  Obtained from environmental sample
  misc_feature (1)..(442): Xaa is any amino acid
MPDEIKNIVYKNLPLRIRGGIKEAVDEIEAVKETVENTDDVYARNDNYYEEQRTELISFIGENIIEWESPDCLIWKEIKPKEEPRITPVEDLIKEIEHACSSEELYIPSYKTNKMSKEDLRNAFAAFHDRKNELQSIRKLSISAKVLPAAAPLFENAPLEILHIDGKLTEEWPEFMVNCGKIKSISLSIYGLTEFPSWIRNAVSLKKLEISCLQEKILIPDWIGDLQSITEIGIYDSNLKTFPDGIGSLRNLSKLILNYTAIEEMPDCVGNLSSLKELFLYHNNSLSSLPDNIGNVANLEKVTIEHSAIEKLPESFGNLSSLKVLILIGNRKLKSLLESIGNRKDVEYFEFRYSAVKIIPESIGNLKNLSDYRLVGSKIEKLPDSIGNLEKLTWLYLEYNKNLRSLPDSVGNLKNLNTVNLYGTGLAILPDTLADLFFSRLC

SEQ ID NO: 43355 - DNA, 669 bp, Unknown
  Obtained from environmental sample
  misc_feature (1)..(669): n is a, c, g, or t
gtggatgaaaggcagccgcgcatcttgtttgatcatgttatcgcctattatgtccgtaaaggcatacaaatacctattgcctcaagccaagtgtttcaagcaaggttaaaagaaaaattcgacgagcgtgacggtatgtattttctccatgaacaggcgctggaatatgacaagaaaaagctacaaaccggtactttaaagcaatcggaactttttgtcattaacgaagaaagcgctattcaatggcttaaaagcattctttcgaaaaaaccaatggcaatacaggatatttttcctgagtatatgcaaaaacttaccggattcgacaaaaaagaagaaaagctggaactaagagaccttctggaacaaaactttgttaaagacgatgccgaaagatggcatgtaccggatccgcaaaatgccgttcatgttgaaaaaatccgggagaaagctttgttaaaggagtttgaaaattataaatccgtctcccggaaactcaaaatattccgtatagaagcagtccgggcaggtttcaagaaagcatataacgaccatgattacgaaaccatacttaaaacagccgataaattacccggtgacgccatcgaggaagacccgatgctccttatgtggtataccagcgcaaaaacacgtatggggaaggattga

SEQ ID NO: 43356 - protein, 222 aa, Unknown
  Obtained from environmental sample
  misc_feature (1)..(222): Xaa is any amino acid
MDERQPRILFDHVIAYYVRKGIQIPIASSQVFQARLKEKFDERDGMYFLHEQALEYDKKKLQTGTLKQSELFVINEESAIQWLKSILSKKPMAIQDIFPEYMQKLTGFDKKEEKLELRDLLEQNFVKDDAERWHVPDPQNAVHVEKIREKALLKEFENYKSVSRKLKIFRIEAVRAGFKKAYNDHDYETILKTADKLPGDAIEEDPMLLMWYTSAKTRMGKD

SEQ ID NO: 43357 - DNA, 312 bp, Unknown
  Obtained from environmental sample
  misc_feature (1)..(312): n is a, c, g, or t
atgacaaaagaaagcgaatttttggaatacgcaagaattctcgccgtcagccaccatgaaaaatgggacggcacgggttacccgcacgggttaaaagaagatgaaatccccttattgggacgcatcatggcgatagccgacgtatacgacgcgcttgtttccgcaagatcatacaaaaagccgtttacgcacgaagaagccgtaaaaataatggcagacagcaaaggaaaacaatttgacccctgtcttattgatatgtttctggaagttgctgataaattcaaacaaactattcccggcgaacagccctaa

SEQ ID NO: 43358 - protein, 103 aa, Unknown
  Obtained from environmental sample
  misc_feature (1)..(103): Xaa is any amino acid
MTKESEFLEYARILAVSHHEKWDGTGYPHGLKEDEIPLLGRIMAIADVYDALVSARSYKKPFTHEEAVKIMADSKGKQFDPCLIDMFLEVADKFKQTIPGEQP

SEQ ID NO: 43359 - DNA, 1062 bp, Unknown
  Obtained from environmental sample
  misc_feature (1)..(1062): n is a, c, g, or t
ttgaaagcatccctgtgcgaaaacgtttttaaaaagagaagaagcgaagctgccctatgccgccaggtttttattgacaaagcgcttgcctttccttcgattaatttccgatttattcaagacggcaagttaaaagattttttccccgcagtatcctcaaagaaggaaaggtttgccgccgcgttactgcaagcgcgggaaattaattttgtacacgaaataaatgttacgggctcgggattttccgcaacagtggtaatcggcggcgcggaactttacaggaacgacaggcggcagttgtatgtttttgccaacggcagaagggtacaggacttttcgcttattcaagcaatggaatacggctgtcaaggctggttcccaaacggcgttcatcccgtaggcgcggtatatatagaaatagacccgtccctcgccgattttaacattcaccccgccaaacgcgaagttcgcttccgcgaccccggcgcaattcaccacgccgtctccggcggagtaaaaaatttcttccacagctacttcttgagaacttcgcgtaaaaaaccacaaccggaagaagacgcgtctcaaagagaaaaagaattccttttccctaataataactttgaaaaaaatcgcaactctgaagaatacgaaaatatatcaaataaaaactttgcgcctttgcgccttggcgagaactcttctccgaacaattccccctcacgcattaccgataattttatagccgaatccaacgaaccggaggttcgacgtcgccgtgaaaattcattcgcaaatgattccgccgctatcatctacggcgacatgcggtacataggcagagttttcggtctttttatattgatcgaatggggagataaactctacttaatcgatcaacacgccgcgcatgagcgtatcctttacaaccgttttctgaagagcctatcnccagacaggaactgctctctcccattccattcacgacgcaaagcgccgaagaagacgcgtttcttgaagcaaagaaggaagaactgtcccgccttggccttgacattgtaa

SEQ ID NO: 43360 - protein, 353 aa, Unknown
  Obtained from environmental sample
  DOMAIN (63)...(177): DNA mismatch repair protein, C-terminal domain
  misc_feature (1)..(353): Xaa is any amino acid
MKASLCENVFKKRRSEAALCRQVFIDKALAFPSINFRFIQDGKLKDFFPAVSSKKERFAAALLQAREINFVHEINVTGSGFSATVVIGGAELYRNDRRQLYVFANGRRVQDFSLIQAMEYGCQGWFPNGVHPVGAVYIEIDPSLADFNIHPAKREVRFRDPGAIHHAVSGGVKNFFHSYFLRTSRKKPQPEEDASQREKEFLFPNNNFEKNRNSEEYENISNKNFAPLRLGENSSPNNSPSRITDNFIAESNEPEVRRRRENSFANDSAAIIYGDMRYIGRVFGLFILIEWGDKLYLIDQHAAHERILYNRFLKSLSPDRNCSLPFHSRRKAPKKTRFLKQRRKNCPALALTL

SEQ ID NO: 43361 - DNA, 768 bp, Unknown
  Obtained from environmental sample
  misc_feature (1)..(768): n is a, c, g, or t
atgaagtcgttctgcgtctttacggttgtttttttgtttttggggatatgttccgttgccgcgcaagacataatcattttgaaagacggtaatacaatagcggcaaaagtgtctgaaatatctccgacagaaatcagatataagcgtttcgacaatttagacggaccaacgatcgtaattcccgcagacagagtattatctataagataccaaaacggcactcaagaaataatcaatgcaactcccgtccccgaacagaaaaaaactccggtgaaacccgtagatacaactccgcctttagaccctaataaatttatttttgcaatgaatgttaatcccggcggtctttttaatattgttcctgcgcctacattctgttttgagtttggcaagggacattttaacagtgaattacatcttagctttccaatttttggaggttttggagggttagccacattcaattatttctggcctaatagggttggaggtttttatcttggcggaggaatagggtttattgtaggtacttttgaagaatattacacagaaccttacgaggtatccgaaggggaatatacaagaacagaatatagtgatgaatggagatatactactgcagccatttttacagttggtttaaatatcggttggaaatttgtaacacgatcaggcgtatatttccgtacaggtacttatcttggatatgctacttctactattttttatttaaaacctgattttgcaatagggtattgttttaaataa

SEQ ID NO: 43362 - protein, 255 aa, Unknown
  Obtained from environmental sample
  SIGNAL (1)...(21)
  misc_feature (1)..(255): Xaa is any amino acid
MKSFCVFTVVFLFLGICSVAAQDIIILKDGNTIAAKVSEISPTEIRYKRFDNLDGPTIVIPADRVLSIRYQNGTQEIINATPVPEQKKTPVKPVDTTPPLDPNKFIFAMNVNPGGLFNIVPAPTFCFEFGKGHFNSELHLSFPIFGGFGGLATFNYFWPNRVGGFYLGGGIGFIVGTFEEYYTEPYEVSEGEYTRTEYSDEWRYTTAAIFTVGLNIGWKFVTRSGVYFRTGTYLGYATSTIFYLKPDFAIGYCFK

SEQ ID NO: 43363 - DNA, 489 bp, Unknown
  Obtained from environmental sample
  misc_feature (1)..(489): n is a, c, g, or t
ttgaataaattgcttaagcatccgacattttttgctggttccaatgcgatttttactcttgctgaaataggacaaattaccggatatatctctgcatcggctgttaccgacatatactacattgtcaggaaaactcttggaaaagcagccgcgcatgaagctataaagaaaatgctgctggttttttatccggctactgtaacagacaataatatctatcaggcgcttgatttggaatgggatgattttgaagattctgttcaatatgttgttggagaagatcttgctgttgattacataattaccagaaatattaaggattttgtctccggttctattcccgcagtaaccccggaacagtttattgagtctattaccaatagagaatcttaccacgaacactcacgaacttttaccacatatcttgtcgttgttcatggtttaaattatttaaaacaataccctattgcaaaatcaggttttaaataa

SEQ ID NO: 43364 - protein, 162 aa, Unknown
  Obtained from environmental sample
  misc_feature (1)..(162): Xaa is any amino acid
MNKLLKHPTFFAGSNAIFTLAEIGQITGYISASAVTDIYYIVRKTLGKAAAHEAIKKMLLVFYPATVTDNNIYQALDLEWDDFEDSVQYVVGEDLAVDYIITRNIKDFVSGSIPAVTPEQFIESITNRESYHEHSRTFTTYLVVVHGLNYLKQYPIAKSGFK

SEQ ID NO: 43365 - DNA, 711 bp, Unknown
  Obtained from environmental sample
  misc_feature (1)..(711): n is a, c, g, or t
ttgggcggcggcagaactccccgccccggcgaaattacccttgcccattttgggatactgtttcttgatgaagcgccggaatttaaaatcaatgtgttacaagccttgcgcgaaccgctggaagaccgggtaatcagcatctcccgcgccgaggggccggtacacctccctgcggaatttcagttgctgttggcggcgaatgcctgcccctgcggacggctgggaatgaggcatcacgagcaaggcgaatgtctttgttcgccgcaggaaatttaccgctattggcgcaaattcggcggggcgcttcttgaccgcgttgaaattcgcgccgccgttgttccgcccgccataaacgaaatcggcaagccgcacagcggcgaatcctccgccgatataaccaaacgggtacaggcggcggttaccattcagcgggagcgtttcaaaggaatgggaatccgccgcaacgccctgattcccgccggcaaaatagaaaccttatgccccatgaatgaaggggcgcacagcgcgtttcaaaaagcccttgcccatctggggctttccggcagagcctaccacggcatattgcgggtagccagaaccattgccgatttagacgggaaagaaatcatcgacacggttcatattctggaagcggttcagcaccgccgctatggagaagacccttatgaaattgtaacagcagaggtttag

SEQ ID NO: 43366 - protein, 236 aa, Unknown
  Obtained from environmental sample
  DOMAIN (2)...(120): Magnesium chelatase, subunit ChlI
  misc_feature (1)..(236): Xaa is any amino acid
MGGGRTPRPGEITLAHFGILFLDEAPEFKINVLQALREPLEDRVISISRAEGPVHLPAEFQLLLAANACPCGRLGMRHHEQGECLCSPQEIYRYWRKFGGALLDRVEIRAAVVPPAINEIGKPHSGESSADITKRVQAAVTIQRERFKGMGIRRNALIPAGKIETLCPMNEGAHSAFQKALAHLGLSGRAYHGILRVARTIADLDGKEIIDTVHILEAVQHRRYGEDPYEIVTAEV

SEQ ID NO: 43367 - DNA, 783 bp, Unknown
  Obtained from environmental sample
  misc_feature (1)..(783): n is a, c, g, or t
ttgagaatggagagtggagagtggagagtgggggagcagattgagtttctttttagtgaggagctaggtgctgttttgcagattaaagaaagtgattttgaagcggcttgcaagttattcccatttgaaaaaattggaaaattaacaaatgatttctgcttaacaataaataactctcaactctcaactccgggctctcaactatataaaaagcctatatccgaactgagaaaactctggagccgaacctctttcgaaatagcaaaactccgcgacaatccagactgcgcagaacaggaatacgactggaaatgcagcgaaaaagacaaaggaatcaacataacattcaactctcaactctcaactctcaactctcaactctctctcaactctcaactaaaaagacccctaatcgcaatccttcgtgagcaaggcgtgaatggcgaagttgaaatggctgcagcctttgacaaagccggattcaaagcggtggatgttcacacgggcgatattataaatggcaaaatggatttaagcgaattctccggcttggtggcttgcggtggttttagctatggagatgttttgggggcaggggagggctgggcaaagagcattttgttcaacgaaagggcgcgtgatgtttttcaaaaattctttgagagaaaagacacattctcgctcggcgtttgcaatggctgccaaatgctttccaacttaaaagacattataccaggtgccgcccatggcccaagttcaagcaaaatttatctgaacgtttga

SEQ ID NO: 43368 - protein, 260 aa, Unknown
  Obtained from environmental sample
  misc_feature (1)..(260): Xaa is any amino acid
MRMESGEWRVGEQIEFLFSEELGAVLQIKESDFEAACKLFPFEKIGKLTNDFCLTINNSQLSTPGSQLYKKPISELRKLWSRTSFEIAKLRDNPDCAEQEYDWKCSEKDKGINITFNSQLSTLNSQLSLNSQLKRPLIAILREQGVNGEVEMAAAFDKAGFKAVDVHTGDIINGKMDLSEFSGLVACGGFSYGDVLGAGEGWAKSILFNERARDVFQKFFERKDTFSLGVCNGCQMLSNLKDIIPGAAHGPSSSKIYLNV

SEQ ID NO: 43369 - DNA, 906 bp, Unknown
  Obtained from environmental sample
  misc_feature (1)..(906): n is a, c, g, or t
ttgctactgggcaacccaccgaagatgatacgcaaagataaaaaaattgaaaataacaactctcaactctcaactctcaactctcaactaaaagaaatcgcagagcgtgtcctctctcaccccgctgtggcagacaagggctttttaatcacaataggcgaccgttccgtaacaggtatggttgttcgggagcagatggttggtccttggcaggttcctgttgcggactgtgcggtaacaacaagcaccttggattccacaaaaggggaggcgttttccattggggaacgtactccgctcgcctcgctgaattcagcggctgctgccagaatggcagttgcggaggcaataacaaatatagcggcggcaaaaataagccatatttcaaaaatacgcctttccgcaaactggatggcgaaccctgcgacagcaggggagggagccgctttatacgaggctgttcaagctattggaatggacttttgccctaaacttggaatagccattcccgttggcaaagactctatgagtatgagtacaatatgggaagaaagtggggagaaaaaagtcgtaacttcgcctgtttccttgatagtaagcgcatttgctccttgcgaagatgtgtgcaaaagtttaactcccgaacttcaaaaagttgaaaattcaattctaattctggcggatttgggtcagggcaaaaatagaataggcggttcaatagcttgtgaagtgttcaaccaaataggcggcgaagttccagatgcagatgcgcagacattaaaacaattcttcaacgcggttcaaaccctaaactcagaaaacaaaatcctagcctaccacgaccgctccgatggcgggcttttcacaacccttgcggagatggcttttgctggacacatggaatag

SEQ ID NO: 43370 - protein, 301 aa, Unknown
  Obtained from environmental sample
  misc_feature (1)..(301): Xaa is any amino acid
MLLGNPPKMIRKDKKIENNNSQLSTLNSQLKEIAERVLSHPAVADKGFLITIGDRSVTGMVVREQMVGPWQVPVADCAVTTSTLDSTKGEAFSIGERTPLASLNSAAAARMAVAEAITNIAAAKISHISKIRLSANWMANPATAGEGAALYEAVQAIGMDFCPKLGIAIPVGKDSMSMSTIWEESGEKKVVTSPVSLIVSAFAPCEDVCKSLTPELQKVENSILILADLGQGKNRIGGSIACEVFNQIGGEVPDADAQTLKQFFNAVQTLNSENKILAYHDRSDGGLFTTLAEMAFAGHME

SEQ ID NO: 43371 - DNA, 1350 bp, Unknown
  Obtained from environmental sample
  misc_feature (1)..(1350): n is a, c, g, or t
atgagcgaaaattttatcgatcagaaatacatcgaagatttgcttgaaaacgccaaattcgcggatgacgcaagcgtcagcttgtcgctggataaggcgcagtgcggggaggctcttgcgcatggcgaaattgccgcgcttttggtgaacaaaaatcctgaacaccttgcacgtatttttgagatagcgggaaatatcaaaaaacggatttacggcaacagaatcgttatgttcgcgccgttatatgtcagcgatttttgcgcaaaccgttgcgcgtattgcaattttaaccaaggacatgaatttaaccggcataaacttacaatggatgaattacgcgaagaagtaaaaatattggaaatgatggggcacaaacggcttgccgttgaagccggtgaacacgcaaaggagtgccctattgattatattcttgagtgcctaaaaactatttatgaaatgaaatttgaaaacggggaaattcgacgcgtaaacgtgaatatcgcggcgaccaccgtggaaaactaccaaaaattgaaagccgctggaataggcacttatattctttttcaagaaacgtaccacgagcctacttacaataaagtacaccttgccggtcctaaaaaaaattatctatatcaccttacagcctttgaccgcgcccaagaagcgggtattgacgatgtgggcggaggcgttcttttcgggcttggcgacccttactttgacgttttagggcttctgcttcacaatgaacatcttgaaaaaaaattcaatgtgggctttcacacaatttccgtcccacgtatttgcaaagcggaaggaatgaatattgagaattttccaaatctggtggacgacgacacgtttgcaaaaatcgtggcaatcatccgtattgcggttccgtttacgggcatgattctctccacaagggaaagccatgaaatgcggaaaaaacttcttcattatggaatatcgcagataagcgccggttccagcacggaagtcggcggttatgtgaaacgcaaacgaaatgaaaaaacaactccgcaatttattgtaaacgacgacaggagcgcgatttccattatttctgaattgatggacgacggctacattccaagtttctgcaccgcctgttaccgcattggaagaaccggggaccgctttatgtcgcttgcgaaatcgggacaggttggcaatgtctgccttcccaacgctctcatgactctctgcgaatattccatggattacggtgatgacgctttcaaagaaaaagcgtcctccattattgaaaaggaaatttctcaagtagccgatgaaacaatacggcgtaaggctatcgaaacatag

SEQ ID NO: 43372 - protein, 449 aa, Unknown
  Obtained from environmental sample
  DOMAIN (81)...(250): Radical SAM superfamily
  misc_feature (1)..(449): Xaa is any amino acid
MSENFIDQKYIEDLLENAKFADDASVSLSLDKAQCGEALAHGEIAALLVNKNPEHLARIFEIAGNIKKRIYGNRIVMFAPLYVSDFCANRCAYCNFNQGHEFNRHKLTMDELREEVKILEMMGHKRLAVEAGEHAKECPIDYILECLKTIYEMKFENGEIRRVNVNIAATTVENYQKLKAAGIGTYILFQETYHEPTYNKVHLAGPKKNYLYHLTAFDRAQEAGIDDVGGGVLFGLGDPYFDVLGLLLHNEHLEKKFNVGFHTISVPRICKAEGMNIENFPNLVDDDTFAKIVAIIRIAVPFTGMILSTRESHEMRKKLLHYGISQISAGSSTEVGGYVKRKRNEKTTPQFIVNDDRSAISIISELMDDGYIPSFCTACYRIGRTGDRFMSLAKSGQVGNVCLPNALMTLCEYSMDYGDDAFKEKASSIIEKEISQVADETIRRKAIET

SEQ ID NO: 43373 - DNA, 645 bp, Unknown
  Obtained from environmental sample
  misc_feature (1)..(645): n is a, c, g, or t
atgcaagtatccaaaattatgacccggaatcctgttattacccatcccgacctttcgcttagcaacgcgcgcttgttaatggacagggaaaaagttggtcatataccggtactaaataaacataatgagcttgtgggccttatcacaagagtcgatctattgaaggacggcccgacacccgtgaccagccttgatgtgtacgagatcagctacctgctttcaaaactcacagtggaaaaagtgatggaacgaaatgtgatcaccgttcatgaaaacgaagttgtggaagaggcggccaggatcatggcggacaaaggaattggctgtctgcccgtgttgaacgactcccttttgacaggcattattaccgacaagaatattttccatttttttattaacgcttacggagcgcgtcacaagggcatacggataacaattaatttcagggaaaaacttggtcagtttgcggcgtttgccggcgcgttagctgaaaggggcggtaatattgtcgcctttgtcacctccgaaggtgatgatgttgcccaccgcagggcaactcttaaaattaccggtattagccgcgccgcagtggaggaagccgtcaatacttttgacggcgtggaaattgaggatatccgcgaataa

SEQ ID NO: 43374 - protein, 214 aa, Unknown
  Obtained from environmental sample
  DOMAIN (5)...(132): CBS domain pair
  misc_feature (1)..(214): Xaa is any amino acid
MQVSKIMTRNPVITHPDLSLSNARLLMDREKVGHIPVLNKHNELVGLITRVDLLKDGPTPVTSLDVYEISYLLSKLTVEKVMERNVITVHENEVVEEAARIMADKGIGCLPVLNDSLLTGIITDKNIFHFFINAYGARHKGIRITINFREKLGQFAAFAGALAERGGNIVAFVTSEGDDVAHRRATLKITGISRAAVEEAVNTFDGVEIEDIRE

SEQ ID NO: 43375 - DNA, 441 bp, Unknown
  Obtained from environmental sample
  misc_feature (1)..(441): n is a, c, g, or t
gtgataatctggaaatgggcgcgtattctcggcgctctgttaccgcggctgaaaaatcaggcgataaaaaaagacatggaaaaagtgtttgatatttttcccaggttaaaagaacgcatacgccaggtggcgggaacgctttcaggcggcgaacagcagatgctggctatgggccgcgcgttaatggccaagccccgcctgctgctccttgacgagccgtcaatgggccttgcccccctcctcgtcgatgaaatttattcacctgtcaagggaattaatgaaacaaggacaacggcgctgcttgttgaaccaaacgcttacaaggcccttgcgcacgcgtcccgggcgtatatccttgaaaccggggagattgtccaaaactgcatgactcccgagttaatgaatgatgaatcggtaaaggcctcctatttaggaggatga

SEQ ID NO: 43376 - protein, 146 aa, Unknown
  Obtained from environmental sample
  DOMAIN (1)...(122): ABC transporter
  misc_feature (1)..(146): Xaa is any amino acid
MIIWKWARILGALLPRLKNQAIKKDMEKVFDIFPRLKERIRQVAGTLSGGEQQMLAMGRALMAKPRLLLLDEPSMGLAPLLVDEIYSPVKGINETRTTALLVEPNAYKALAHASRAYILETGEIVQNCMTPELMNDESVKASYLGG

SEQ ID NO: 43377 - DNA, 660 bp, Unknown
  Obtained from environmental sample
  misc_feature (1)..(660): n is a, c, g, or t
ttggtcctggttattgacgatgcgggaaacaatttacgggatctggattccttcctgaaatttcccggccccatcactatttccgtcctgccgggactggcttattcggcagaaactgcccggagggtcagggccgccggtaaggagttgtttcttcatcaacccatggaacccctgaacggccaggatcccggaccaagagccatcaaaaccggcatgagtcccgccgaaatcaaggatgctcttgtaaaaaaccttaacgaaatcggccctgtttcgggctttaacaaccatgaaggatcccgggcaaccggcgatccggcgatcatgcggcccgtcctggaaatcagccgggacagcggcctcttcttcctcgattccagaactaccgccgatactgttgcccctcaaatcgccaatgaaataggcattaccatcgttcagcgggatgtctttctggacaacgagcaggatcgcggttcaatccttgccgccctggaaaacggctgcaagcgggcggaacaaaacggaatagccattttcatcggccatacatggacacccaacctggcatcgatccttacagaaatgtacccccagcttatcaaaaggggctttatctttgcttctgtaggaacagttttaaataggggaaagtaa

SEQ ID NO: 43378 - protein, 219 aa, Unknown
  Obtained from environmental sample
  DOMAIN (3)...(216): Divergent polysaccharide deacetylase
  misc_feature (1)..(219): Xaa is any amino acid
MVLVIDDAGNNLRDLDSFLKFPGPITISVLPGLAYSAETARRVRAAGKELFLHQPMEPLNGQDPGPRAIKTGMSPAEIKDALVKNLNEIGPVSGFNNHEGSRATGDPAIMRPVLEISRDSGLFFLDSRTTADTVAPQIANEIGITIVQRDVFLDNEQDRGSILAALENGCKRAEQNGIAIFIGHTWTPNLASILTEMYPQLIKRGFIFASVGTVLNRGK

SEQ ID NO: 43379 - DNA, 1407 bp, Unknown
  Obtained from environmental sample
  misc_feature (1)..(1407): n is a, c, g, or t
atgaatgcgaatgaatttatctgccacgaagaaatcatggcttccattaattgggtagaggaaaacaaacacaacgagaacttaattcgtcagctaatgcaaaaggcttctgaaaacaaggggttaaaccaccgcgaggcggctcttgttttggaagcgggcgataaagacgaaattttccgccttgcaaggcggataaaagaaactttttacggaaacagaattgttcttttcgcgccgctgtacctttccaattattgcgtaaacggctgtttgtactgcccttatcattcgcagaacaaaacaatggcgcgaaaaaaactttcgcaggacgaaatccgcagggaagcaatcgcgttacaggatatgggtcataagcgccttgcgatagaagcgggtgaagacccgctgaacaacccaattgaatatattgttgagtcaatgaaaacgatatacagcataaaacataaaaacggcgcgatacgccgcttgaatgtaaatattgccgccacaactgtagatgattataaacttctcaaagacgccgatatcggaacatatattttgtttcaggaaacatataacagggaaaagtataaagaactgcatccgtccggtcccaaatcggactatgactggcacaccgaagctatggacagggcaatgcagggcggaatagacgacgtagggttaggcgttttattcggtcttggtcagtatctttatgaatttatagcgatacttatgcacgcagaacatctggaagcgtcgcacggcgtcggtccacacaccataagcgttccgcgcatacgcgccgcagaaggaataaatcccggttctttcaaaaacggcatagacgacgatacattcgaaaggattgccgcctgccttagggtcagcgtcccctatacgggaattattgtctccacaagggaaagcgaagaatccagaaaaaaagttttggaacttggagtttcccaaatcagcggcggttcccgcaccagcgtcggcggttatgaaaaagaagaagaagaaaacacaaaacaatttaaaattaacgacagccgcccccttgatgaagttgtaaactggcttataaaagataaatttattcccagtttttgcactgcatgttaccgcgaaggacgcacaggcgatcgttttatgtcgctgtgcaaatcaggacagatacaaaattgctgtctgcccaacgcgcttatgactttgcaggaatacctgattgattacgcggcaagcggcacaaaagactcaggagaagaattaataaagagcgaaaatgaacatataccgaatgaaaaaatgcgctcgcttgtcataaaacacttgggagaaatcaaacatggaaaccgagattttcagggtgtgaagtttataaagacactataa

SEQ ID NO: 43380 - protein, 468 aa, Unknown
  Obtained from environmental sample
  DOMAIN (81)...(251): Radical SAM superfamily
  misc_feature (1)..(468): Xaa is any amino acid
MNANEFICHEEIMASINWVEENKHNENLIRQLMQKASENKGLNHREAALVLEAGDKDEIFRLARRIKETFYGNRIVLFAPLYLSNYCVNGCLYCPYHSQNKTMARKKLSQDEIRREAIALQDMGHKRLAIEAGEDPLNNPIEYIVESMKTIYSIKHKNGAIRRLNVNIAATTVDDYKLLKDADIGTYILFQETYNREKYKELHPSGPKSDYDWHTEAMDRAMQGGIDDVGLGVLFGLGQYLYEFIAILMHAEHLEASHGVGPHTISVPRIRAAEGINPGSFKNGIDDDTFERIAACLRVSVPYTGIIVSTRESEESRKKVLELGVSQISGGSRTSVGGYEKEEEENTKQFKINDSRPLDEVVNWLIKDKFIPSFCTACYREGRTGDRFMSLCKSGQIQNCCLPNALMTLQEYLIDYAASGTKDSGEELIKSENEHIPNEKMRSLVIKHLGEIKHGNRDFQGVKFIKTL

SEQ ID NO: 43381 - DNA, 717 bp, Unknown
  Obtained from environmental sample
  misc_feature (1)..(717): n is a, c, g, or t
atgcttcatgaaaataaaacggtaattgtcaaaggggttgatactcattcgctggttaccgttccgggggaaaatgggtcagaaacctttatctgggttaagggggaaaaggggccgacccttgaaaaatttattcctgaccggctttcaggcgaaaactatacccatatccccattagaagcgccatgtcctcaagtttcggcacggtcggcgcgtatctgataatactggttatcgttttctttctgggatttctggctatctttgcggagcccgcccttgccgttaccgccgttaccgttgaagaaatgaccaccggtatttttaagcgttcaaaattaatcatgattgccgccgccggagtggggatggggatggctgttggttttgcgcgggtactgttcagtaatgtgctgccttcgggcggtattcatctttcatggatactgaccccctgttacggtctggcgttactcctaacggtattcgcgccggaagatttttcttcgatagcctgggatgtcgccggcattgccaccggccccatcgccgttcccattattattactacaggtctgggactgggacgtgattccctgcgggcggacggcgctttcggtattgtagcgacggcgagcgtcctcccgattatcgtcattctcgtgtcgggaatccttgataaggcaaaatcgaaacgggcgttgaagaacttttag

SEQ ID NO: 43382 - protein, 238 aa, Unknown
  Obtained from environmental sample
  DOMAIN (51)...(228): Protein of unknown function (DUF1538)
  misc_feature (1)..(238): Xaa is any amino acid
MLHENKTVIVKGVDTHSLVTVPGENGSETFIWVKGEKGPTLEKFIPDRLSGENYTHIPIRSAMSSSFGTVGAYLIILVIVFFLGFLAIFAEPALAVTAVTVEEMTTGIFKRSKLIMIAAAGVGMGMAVGFARVLFSNVLPSGGIHLSWILTPCYGLALLLTVFAPEDFSSIAWDVAGIATGPIAVPIIITTGLGLGRDSLRADGAFGIVATASVLPIIVILVSGILDKAKSKRALKNF

SEQ ID NO: 43383 - DNA, 1437 bp, Unknown
  Obtained from environmental sample
  misc_feature (1)..(1437): n is a, c, g, or t
gtgttgcctgatacggatttaaaccctgacataacaatctacattgaagacgataaaggtacggtgcgcgattcaacagggagacgctggcgttatgccgcgcaaagcgaatacgcgttttcaagagcgcagggtattttggaattgagtataagaccgtccggaatggtagcagttgcgtattccaaaggcgcagacaaaaaaccatgggatacttctttgggcggttacagtacaagcggatttttagaaagtattcaacaatggtttggctcttctgtcgatctttcaacttatcctcaatgcggaaaaggcggaacagagccggggagagttgaatttgctatgggttccgctcttgttctttatcagccgggaacgttttcgccctttgaaaaaagaaaccgttacgacgctccctcaagctccgccgaaaaagccgctttggtgcgcgcttcttccggcagtgagataaaaggctatgaattaatactattggagaatacggcggttatcgatgaaactcttttttccggcgtcgtaagtcaaaagggcgtatatgagcttgtaatttcaaatggtaataaaaatttacgggatcctcaaaactgctggccattagctgttgattaccctgaaatttatctgccttcttccggcgttttttcaggtgatattgtcatacgttttacaaatttaagcggtacaagcggttattttatcggtacggatgtaattcccggctctgtgcaggtttggcgcagcggtattcaatataccgattttaactataaccagtcttcaggcgaggtcgctattaacggttctgtaggacagaatgaaattattcgcataacgtacttgaaaaaaagcgaaggaacccgcctggggagcgttgcggcgggttttggtgcgatttatcaaaagccggcaaatccgttttcggctcaagccgccgttggaatccgctggaatataacggaggattcatttaccgaggaagaaaattcaagtcagggtactgttggaataagcgcgaagacggcgtgggaatatgattatctaaaagccaaaattaccgccggttttgcttttgtccaaacggatacaaccggtctttaccgcgccgccggaatggaaggtaatgagacaataatatcccttacgccggaaacatcgtttatttcaaatccgccgtcgtctgaaatagtaaatgacgttaacttaagcaaccgctcggacttaatctacagaaattacaataacaataccttacttggcaataacctgatgtacattgaatggaacgcggacattgtcgctggacttaacagaccctatcccgttaaagaccgtcagttaggcgacactaaagttcttgccgcggaatttgattttgggaaagatgaatggacaggctttcagattccattttaa

SEQ ID NO: 43384 - protein, 478 aa, Unknown
  Obtained from environmental sample
  misc_feature (1)..(478): Xaa is any amino acid
MLPDTDLNPDITIYIEDDKGTVRDSTGRRWRYAAQSEYAFSRAQGILELSIRPSGMVAVAYSKGADKKPWDTSLGGYSTSGFLESIQQWFGSSVDLSTYPQCGKGGTEPGRVEFAMGSALVLYQPGTFSPFEKRNRYDAPSSSAEKAALVRASSGSEIKGYELILLENTAVIDETLFSGVVSQKGVYELVISNGNKNLRDPQNCWPLAVDYPEIYLPSSGVFSGDIVIRFTNLSGTSGYFIGTDVIPGSVQVWRSGIQYTDFNYNQSSGEVAINGSVGQNEIIRITYLKKSEGTRLGSVAAGFGAIYQKPANPFSAQAAVGIRWNITEDSFTEEENSSQGTVGISAKTAWEYDYLKAKITAGFAFVQTDTTGLYRAAGMEGNETIISLTPETSFISNPPSSEIVNDVNLSNRSDLIYRNYNNNTLLGNNLMYIEWNADIVAGLNRPYPVKDRQLGDTKVLAAEFDFGKDEWTGFQIPF

SEQ ID NO: 43385 - DNA, 396 bp, Unknown
  Obtained from environmental sample
  misc_feature (1)..(396): n is a, c, g, or t
ttgccaacggttttatcacaatgcaacacatttctattacatagaattagcaatgaccgtgaccaagaattaataaataagctcgttccagataatttgcgtgggttgcttcgcgaactaccgtctttgccatcacaaagagcaatactgttaggttgggcttcagaactcccgattatggtacacataaaatttctcaaagaggaacaccgtccgaaatccgatgatccagattattgggatgtttggactggtaaaaagaagcgaaaaattaactgggaggaaattgcccatgattggcaaggagccggacaaacaaaagaaagttgtactaaacagactgaaaaagaaccagaaatagtagtacaaaaagacgatgatgatttgccattttaa

SEQ ID NO: 43386 - protein, 131 aa, Unknown
  Obtained from environmental sample
  misc_feature (1)..(131): Xaa is any amino acid
MPTVLSQCNTFLLHRISNDRDQELINKLVPDNLRGLLRELPSLPSQRAILLGWASELPIMVHIKFLKEEHRPKSDDPDYWDVWTGKKKRKINWEEIAHDWQGAGQTKESCTKQTEKEPEIVVQKDDDDLPF

SEQ ID NO: 43387 - DNA, 933 bp, Unknown
  Obtained from environmental sample
  misc_feature (1)..(933): n is a, c, g, or t
gtgcacttttcctccgatgacggaacggcttcctacagtttcctcttttacctgttcaagtttctcaacctggtttgttcatcgggggcatttattccgtatgtgttagcggaaaatgaaacgcttaaaattatctggcggccttttgaaacactgccgcccgttcccggtatgctggatgctctagcgttgcacgaatgcgggatgctcagtgtcaaggctgataaacagaaaaaaggcggcaaaaaaacaaaggagcaaaaatctgaaagtaaaaccgcaagcgggcgcagcgtggtcgatctgcttgcatctgcgtttttgaccgaatgggtcaggcgaaaatttttgctgttccggggaagggcgggcagtttcggcaggcaggggacaggggatgaataccgggaattgttaaatgtatttttccagggaatagggattgacgtttctgccccggcacagcgcagcctgcctgccgcaatagaccagtggcttgctgtgctgcacattgattttacggcgtaccgttacagcatcaccataactcctttttcaaagaaagcgttagatgaaattactgacaacactgatttctatttttcaatggacgcgctcattgaaaaggaagacggggtagaaaaaattcccctgtcaaaatgcagtgatttggaaatactccgcgccccgaccgcactggcaaattatctgcctgaaattcgggaacttggcagcaagcaaaaagtgcggctgtcagaaaccaggctgaccgccttcctcgattccgccgccgcgctccttgcccggcttggcataacggtcaaccttcccaaggccctgcaccgcgaaattaagccccggctggtaatcaaggggaagtcatccggcggctcgctgaaacgttaccttatttggacgcgttgcagactttga

SEQ ID NO: 43388 - protein, 310 aa, Unknown
  Obtained from environmental sample
  misc_feature (1)..(310): Xaa is any amino acid
MHFSSDDGTASYSFLFYLFKFLNLVCSSGAFIPYVLAENETLKIIWRPFETLPPVPGMLDALALHECGMLSVKADKQKKGGKKTKEQKSESKTASGRSVVDLLASAFLTEWVRRKFLLFRGRAGSFGRQGTGDEYRELLNVFFQGIGIDVSAPAQRSLPAAIDQWLAVLHIDFTAYRYSITITPFSKKALDEITDNTDFYFSMDALIEKEDGVEKIPLSKCSDLEILRAPTALANYLPEIRELGSKQKVRLSETRLTAFLDSAAALLARLGITVNLPKALHREIKPRLVIKGKSSGGSLKRYLIWTRCRL

SEQ ID NO: 43389 - DNA, 1344 bp, Unknown
  Obtained from environmental sample
  misc_feature (1)..(1344): n is a, c, g, or t
ttgctttccggcttcggctgcatactcgccgatgacatgggcctgggcaaaaccgtccaatctattgcggtgctgctgcggctgaaagagcaggggcttctttcagaagggagctgccttgtcgtggctcccgcggcgcttcttggcaactgggaaaaagagctggaacgtttcgccccttccctgagggtttcccgctaccacggaagccgcagaaatcttgacaaacaacacgacgtgttccttaccacctaccagacggcggtacgcgactcggcgaaactgaaggacgaggggttctccctgctccttgtggacgaagcccatctgatgaaaaacgccgaaacccgcatatcccggacggtgaagcagcttcgttccaaataccgcctcgccctctcgggaacgccggtagaaaaccgccttgaggaccttcgctccctttttgattttatccttccaggctatctgggcggcgccgaggagttcaagaaacagttccgcgtccccatcgaagttatgcgaaaccgagaacaggccgaagccctgcgaaaaataaccgccccctttcttttgaggcggttgaaaacggacaaggccatcatcaaagacctgcctgaaaaaatcgttgccaacgaatacgccgtgctggaaaaggatcaggcggcgttatacgaaagcgtcgtttccgaatcaatcaaaaagtctgaagaggtcgatccaaaggatcgttccgcattgatcctctccctgcttacatccctcaagcaaatatgcgatcatccccgcgtgtttgacaaggaaagcccggcggtttcggaactttccggcaaatcgcagttgctgcttgtccttttggaagaaattctcgccaataaggaaaagaccctcgtctttagccaatacgttgaaaccctggactgccttgatcggatcatcaggaaggaactgggcgaggccccgctgatctaccacggcggcatgggacagaatgtccgcgccgagacggtagaccgtttccagaacgacccttccgcgaggataatgctggtcagcctgaaagcgggcggcctggggctgaacctgaccgccgcaagccgggtgatacattacgatctgtggtacaaccccgccgttgagaaccaggcaaccgaccgggccttccgcatcggccagaagcggactgtttttgttcaccgttttatcaccaaaaacagttttgaggaaaaaattgacgcgatgataaccagcaagcgcgaactggctgacatgactgttgcctcgggggaatcatggattgcgcggatgagccacgaggaattaaaaacgctgtttgatcggtaa

SEQ ID NO: 43390 - protein, 447 aa, Unknown
  Obtained from environmental sample
  DOMAIN (313)...(391): Helicase conserved C-terminal domain
  misc_feature (1)..(447): Xaa is any amino acid
MLSGFGCILADDMGLGKTVQSIAVLLRLKEQGLLSEGSCLVVAPAALLGNWEKELERFAPSLRVSRYHGSRRNLDKQHDVFLTTYQTAVRDSAKLKDEGFSLLLVDEAHLMKNAETRISRTVKQLRSKYRLALSGTPVENRLEDLRSLFDFILPGYLGGAEEFKKQFRVPIEVMRNREQAEALRKITAPFLLRRLKTDKAIIKDLPEKIVANEYAVLEKDQAALYESVVSESIKKSEEVDPKDRSALILSLLTSLKQICDHPRVFDKESPAVSELSGKSQLLLVLLEEILANKEKTLVFSQYVETLDCLDRIIRKELGEAPLIYHGGMGQNVRAETVDRFQNDPSARIMLVSLKAGGLGLNLTAASRVIHYDLWYNPAVENQATDRAFRIGQKRTVFVHRFITKNSFEEKIDAMITSKRELADMTVASGESWIARMSHEELKTLFDR

SEQ ID NO: 43391 - DNA, 996 bp, Unknown
  Obtained from environmental sample
  misc_feature (1)..(996): n is a, c, g, or t
atgaaaagtaaaaaaatagcgatgtgttttttagctgttgcgattttgtgcgcagtgttaaatacgaattgttcggttcgtgcggaagcacagcctgttacgccgccgaaaattacacagccgacacctccgaatcagccgcaagttacgcagccgaatcaacctaaggttacacagccgactcagccgactccacggcaagttacaccgccgaatcagccgcaaagcgtttctttagtttacatgacagacaaaataacccccgaaggtttgcttgccgtttataacgctcttggactggaagcaagcggaaaggtcgcggtaaaaataagcacgggggaaccgggcaatacccactttctttctcctttgctgattaagaatctggtgcagaaagtaaatggcactatcgttgagtgcaacaccgcttacggcgcaaaacgcgggaataccgcagcccattatcaggtggcgaaggatcacggttttacggcaatcgcgccggttgtgattatggatgaaaaatctgagattagtattcccgttacaggcggcaaacatttaaaagaagatattgtaggcgcgcgttttaaagagtttaattttcacattgtactgtctcattttaaagggcatggaatgggcggcttcggcggagcgttgaaaaatatgtctatcggttacgcatcatcagccggcaaatcatggattcattcggcgggaaagaaaaagagcggctttggcggcgcacagaacgactttcttgaatcaatggcggaagccgccaaagcggtcgccgatgccaacaagggaagaatgctctacatcaacgtaatgaaccacctttccgttgactgcgactgcaacggcagacccgccgcccccacaatggcagacatcggtatactcgcctctcttgatcccgtcgcccttgatcaggcctgtgttgatcttgtgtacaaggcaaaagacggcaaagaccttatgagcggatag

SEQ ID NO: 43392 - protein, 331 aa, Unknown
  Obtained from environmental sample
  SIGNAL (1)...(28)
  misc_feature (1)..(331): Xaa is any amino acid
MKSKKIAMCFLAVAILCAVLNTNCSVRAEAQPVTPPKITQPTPPNQPQVTQPNQPKVTQPTQPTPRQVTPPNQPQSVSLVYMTDKITPEGLLAVYNALGLEASGKVAVKISTGEPGNTHFLSPLLIKNLVQKVNGTIVECNTAYGAKRGNTAAHYQVAKDHGFTAIAPVVIMDEKSEISIPVTGGKHLKEDIVGARFKEFNFHIVLSHFKGHGMGGFGGALKNMSIGYASSAGKSWIHSAGKKKSGFGGAQNDFLESMAEAAKAVADANKGRMLYINVMNHLSVDCDCNGRPAAPTMADIGILASLDPVALDQACVDLVYKAKDGKDLMSG

SEQ ID NO: 43393 - DNA, 711 bp, Unknown
  Obtained from environmental sample
  misc_feature (1)..(711): n is a, c, g, or t
atgattggaattataggcgcaatggaaaatgaagtaagtctgctttgtgaaactatgggaaaatactctgttcaaaaaacaggggagtttgagttcaatacaggaagaattgaaggaaaggatgtaactgttcttcgctgcggcatcggcaaggtgaacgccgctgtaggctgcgccctgcttatccagcagtttaagccttcctgcataataaatacaggctccgcaggcggcattcattccgatctgaaagtgggagatgccgttatttctacggggcttctttatcacgatgtagatgttaccgcttttaattatgcgcccggtcagcttcccggtcagcctcaagtttttaaggcggacgaaaaacttgtaaaaatcgccgagaacgctgttgatgaattaaaagcggaaaaaattcttcccgccgattttacccaccgccgaggcgtaatcggctcaggcgatatttttatgcacgaacccgaacgtataaacgccgtgcgccgtgttttccccgacgtagacgcagtggaaatggaaggagcggcgatagcgcaagcctgctgtcttttctccgttccttttttggtaatccgcgctctctctgatattgcgggaacgcagtcgcctgtaagttttgatgaatttcttccgatagcgtccaaacattcttctaaaatagtaataagaattatcaagaaaaaataa

SEQ ID NO: 43394 - protein, 236 aa, Unknown
  Obtained from environmental sample
  DOMAIN (1)...(233): Phosphorylase family
  misc_feature (1)..(236): Xaa is any amino acid
MIGIIGAMENEVSLLCETMGKYSVQKTGEFEFNTGRIEGKDVTVLRCGIGKVNAAVGCALLIQQFKPSCIINTGSAGGIHSDLKVGDAVISTGLLYHDVDVTAFNYAPGQLPGQPQVFKADEKLVKIAENAVDELKAEKILPADFTHRRGVIGSGDIFMHEPERINAVRRVFPDVDAVEMEGAAIAQACCLFSVPFLVIRALSDIAGTQSPVSFDEFLPIASKHSSKIVIRIIKKK

SEQ ID NO: 43395 - DNA, 561 bp, Unknown
  Obtained from environmental sample
  misc_feature (1)..(561): n is a, c, g, or t
atgaactcatggatattgctatggaaggcggacggaatgagcggcagcggaaaaaacggaaataatcgcaaaaatcgccatcgtttttctggaaagagagacgatgttcaaaaaaatgataaaaaatacaatgacattatttttactgaaggcaaattcgaaaaagcgcgtcagaatacagaccgacttttttggacagcgcctgttctcccgattaatcctattacaactcctgactgtccatggtgtggaaagcaaataacggatatagctaccgcaatttctgataaggataccggtctgcctgtgcattttgactgtgtgcttgcaaagctcaaggaagaatggaaaaacatgaaacaaatgtcagtgcctgttacggaaaaagcagaagcaaatgaaagtgtctgttatattggcggcggacgttttggggtagttcattataataactaccctgatacagggagctttacaataaagaaaatttttgaatgggaagcgaaagacagcgatattgaatggcgcaggccaatcagtgaatatttttctataacataa

SEQ ID NO: 43396 - protein, 186 aa, Unknown
  Obtained from environmental sample
  misc_feature (1)..(186): Xaa is any amino acid
MNSWILLWKADGMSGSGKNGNNRKNRHRFSGKRDDVQKNDKKYNDIIFTEGKFEKARQNTDRLFWTAPVLPINPITTPDCPWCGKQITDIATAISDKDTGLPVHFDCVLAKLKEEWKNMKQMSVPVTEKAEANESVCYIGGGRFGVVHYNNYPDTGSFTIKKIFEWEAKDSDIEWRRPISEYFSIT

SEQ ID NO: 43397 - DNA, 543 bp, Unknown
  Obtained from environmental sample
  misc_feature (1)..(543): n is a, c, g, or t
gtgcgcctgatgccgccggatatgccgcacttcctattctacaacgtgcccgacccgacctccgtgccgccgtgcaaggcgctgcgcaacgtcaacttcttggggctgtcggtcggagaccgcgacatcttcaaggtagtgacgccgctcttggtccacaaggccgagacggaatccgccgcggatatacagaaaggcctgcaacgctgcgctctggagggcgaaatcgccggaggaaaccttttggaggtgctgcaattcatagagataggcagcaaaaccggttgcctgatggtcgaaactcacggcccgttcggactggtttattttagcgagggacggataatctacgcggcggcgaaagggccggagggcgggcctatatacggggtggagggcgtgtacgagatactcaaccagccgatgggaaaattccgctttataacgaacaaacagccaaaagtggcgaacctgaatctgcctactttgtcggtgcttatggagtggactaaggagaaggatgagtcgcataaaggccgttaa

SEQ ID NO: 43398 - protein, 180 aa, Unknown
  Obtained from environmental sample
  misc_feature (1)..(180): Xaa is any amino acid
MRLMPPDMPHFLFYNVPDPTSVPPCKALRNVNFLGLSVGDRDIFKVVTPLLVHKAETESAADIQKGLQRCALEGEIAGGNLLEVLQFIEIGSKTGCLMVETHGPFGLVYFSEGRIIYAAAKGPEGGPIYGVEGVYEILNQPMGKFRFITNKQPKVANLNLPTLSVLMEWTKEKDESHKGR

SEQ ID NO: 43399 - DNA, 828 bp, Unknown
  Obtained from environmental sample
  misc_feature (1)..(828): n is a, c, g, or t
ttgcgcgcacgccttcacgcgttcgccgctccgaacgggacggttttcgtttgcaccggcatgctctcccgcgcggcgaacgaggcgcaggtggccgccgtgttggcgcacgagcttgggcatatcgttttggagcataccgaaaagaatctgctggagatgaagcgtcaggcgcgcggccttgtttctgaggagtcgcggcgtaatcccgaagcgttgattttgagcgacggggtggccggtacggtggtgggcgacgctctgcgctcggccattgccgggtacaccgagcgggttgagcgcgaggcggacagcgttgcggtcgtcaggatgaccgccgccggatatgagccgccgcccgatttcaggggatttattaacgctatgagggacgacggcgtagtgccggcgagcggcggcgacgacgatatagagagagggtacttcaacgtcaagctcggcggggttatactgcacgaggtgatgatgaaccacgccgccggcaagcccgagcttgtagaaccgctcctagaccgtctgctcgcggtcgacagctgcgacgtggcggcgctgataaagcgcggcgacatggagcgccagatgtcgccgaggagttccgcggcgatagagtggtacgagaaagctttggcgtgcagccccggcaatccggcggcgcttagggctataggtttcgcctaccactcgataggccgcaaagatatggcgcgtggatacctgcgcggttactgcgacagggcggccggcgcggcggatataaagatggcgcgcgagctgttgcgtcaatgcgaacagcggggggggaaatga

SEQ ID NO: 43400 - protein, 275 aa, Unknown
  Obtained from environmental sample
  SIGNAL (1)...(26)
  DOMAIN (1)...(188): Peptidase family M48
  misc_feature (1)..(275): Xaa is any amino acid
MRARLHAFAAPNGTVFVCTGMLSRAANEAQVAAVLAHELGHIVLEHTEKNLLEMKRQARGLVSEESRRNPEALILSDGVAGTVVGDALRSAIAGYTERVEREADSVAVVRMTAAGYEPPPDFRGFINAMRDDGVVPASGGDDDIERGYFNVKLGGVILHEVMMNHAAGKPELVEPLLDRLLAVDSCDVAALIKRGDMERQMSPRSSAAIEWYEKALACSPGNPAALRAIGFAYHSIGRKDMARGYLRGYCDRAAGAADIKMARELLRQCEQRGGK

SEQ ID NO: 43401 - DNA, 1122 bp, Unknown
  Obtained from environmental sample
  misc_feature (1)..(1122): n is a, c, g, or t
atgctttcctttaacgccgaaggcgcggaattgcggcagcctgccgcggtgatgactcacccgcgcccagacacccgttatgtgaaaaacacgacgcagccgatctccgtaagcttcgcgtggaatcggataaaccttgagaaggaagaccgtttgcgccttgaaatatccgctgacaggagctttaaccgcattgttaaatcagttgaaaatctcaatgcctccgctgaaatatcccttaacgcgggtctttggaactggcgattatcttacaatggcgccgttctctccacagggaggctgtctgtaacagaagcgtcaaaccttaacctgttaagccccgtaaagggcagcctgttccgctatcaggacgatccgcccctgatccatttccaatggtctgaaattgaagaagcgttacactacattatcgaaatatcatcaatactggactttgccaatccgcacataagcagaaaaacagccacgccttttttaacctgttcctatctgggccccgggacatggtattggcaggtacagccggttttcccttccgcttacgaaggcactgccggtttttcgcaagtttccaatttcgatattgaacgagccattataaacgcgggcgatgaaatagtagtattgcccgaaccaaagatcgaacctgtggctgccgtgaaagaaactcctcccgttcggcaggtagacagatcgcttcctcaaccgcccctgccaccgccgggaaacaggcatccggcaaacggccatcgtttcggaatcgaagaactcaaagcccaaaaaaccatcgtcttcagctggtcaagcgtaaagggagctaatgcgtataccattacactgtacgaacaaaccgcaaacggcaggcggcagttacaccgcattcctttgggaaacaaaactacatggacgcttgataatatcggcctgttgggacgcggagaatttgtctggcgggtagacgcgtctttcgtcgcaagcaacaccgccaggcgaaatggtatggttgaacggtccggcaggccgggggaaaattcttttgtcatcgacatccccctccccgaggttcatatggaagatccgggggtgctctatggttactaa

SEQ ID NO: 43402 - protein, 373 aa, Unknown
  Obtained from environmental sample
  misc_feature (1)..(373): Xaa is any amino acid
MLSFNAEGAELRQPAAVMTHPRPDTRYVKNTTQPISVSFAWNRINLEKEDRLRLEISADRSFNRIVKSVENLNASAEISLNAGLWNWRLSYNGAVLSTGRLSVTEASNLNLLSPVKGSLFRYQDDPPLIHFQWSEIEEALHYIIEISSILDFANPHISRKTATPFLTCSYLGPGTWYWQVQPVFPSAYEGTAGFSQVSNFDIERAIINAGDEIVVLPEPKIEPVAAVKETPPVRQVDRSLPQPPLPPPGNRHPANGHRFGIEELKAQKTIVFSWSSVKGANAYTITLYEQTANGRRQLHRIPLGNKTTWTLDNIGLLGRGEFVWRVDASFVASNTARRNGMVERSGRPGENSFVIDIPLPEVHMEDPGVLYGY

SEQ ID NO: 43403 - DNA, 660 bp, Unknown
  Obtained from environmental sample
  misc_feature (1)..(660): n is a, c, g, or t
atgaacaataccctttttgaaaatgatgtatgcctcgtcatcaacaagctctgcggagaagacgggcaaaaatcgcttttgcctttgagacctgtccatcgcctggacactcccgcctcaggctgcctgcttcttgcgaagactcaggaggccgcggcttttctttccgctgcctttgcttccgttgaagctgaaaaatctgtggaaaaaaggtattgggccattgttgaaaatgttgagaacgccgaaaagctcaggagcggctttcccagtattggtgaatggcgggaagctatccattggattagttttacggcaaaacaaaataaatcttttgtccataacgaagaaaggccaaatacaaaaaaagcgttgctccgctggaggcttgtgggctccggagaccgctaccttttcctggaagcggaactcatcaccggccgccaccatcaaataagggcccagcttgccgccctagggttccccataaaaggcgacctaaagtacggcgcccggcgtagcgaaaaaaccggcggcatccgtctccacgcccgttcactgcgctttcccaatcccttaacacctgggagttcaatttttgtagaagctcctccgcctcacttagattcactctgggaagcctttcttcgagtgttatga

SEQ ID NO: 43404 - protein, 219 aa, Unknown
  Obtained from environmental sample
  DOMAIN (10)...(158): RNA pseudouridylate synthase
  misc_feature (1)..(219): Xaa is any amino acid
MNNTLFENDVCLVINKLCGEDGQKSLLPLRPVHRLDTPASGCLLLAKTQEAAAFLSAAFASVEAEKSVEKRYWAIVENVENAEKLRSGFPSIGEWREAIHWISFTAKQNKSFVHNEERPNTKKALLRWRLVGSGDRYLFLEAELITGRHHQIRAQLAALGFPIKGDLKYGARRSEKTGGIRLHARSLRFPNPLTPGSSIFVEAPPPHLDSLWEAFLRVL

SEQ ID NO: 43405 - DNA, 843 bp, Unknown
  Obtained from environmental sample
  misc_feature (1)..(843): n is a, c, g, or t
atgaaacaggtcgttgtaaatatcaacaaactcaatggtcatgttgaaaaccagagcaacaatgtttcccaggcgtcatccgcgcttgaggaaatggtgaccaatatcaattcggttaccgaaaccatcgtcaaaaacgccgtcaacgtgcagattttaaaggaagcctctgaagtaggcagaagcggtctgtctgaggtggttgcggacattcaggaaatcgccaccgagtcagaaggccttctacagataaactccgtaatgaaaagcatcgccagccagaccaatctgctttcaatgaacgcggcgatagaagcggcccatgccggacaggcgggcaagggcttcgccgtagtcgctgacgagatacgcaaactggctgagagttccagcgaacaatccaagacaatcggtgatattttgaagaagataaaaagttccatagacaagatatcgggttctacgcagaatgtgctgacaaaattcgaggcgattgactcaagcgtcaagacagttgcagagcaggaagaaaacatccgcaacgcgatgcaggaacaggaaacaagaagcaggcagttgcttcaaagcgccagcagtttgaatgagcttaccgagcaggtaaaaggcggttctaacgagatgcttgaaggttcaaaggaagttatccaggagagtactaatcttgaaaaagcgactcaggaaataacctttggtatgaacgtgatggcctcaggcgcggatcaaataaacgtcgcggtaagccgcgtcaacgagataagcggcaagaatcgaaaaggcattgagactttaatgcatgaagtttcgcggtttaaggtagcgtag

SEQ ID NO: 43406 - protein, 280 aa, Unknown
  Obtained from environmental sample
  DOMAIN (16)...(236): Methyl-accepting chemotaxis protein (MCP) signaling domain
  misc_feature (1)..(280): Xaa is any amino acid
MKQVVVNINKLNGHVENQSNNVSQASSALEEMVTNINSVTETIVKNAVNVQILKEASEVGRSGLSEVVADIQEIATESEGLLQINSVMKSIASQTNLLSMNAAIEAAHAGQAGKGFAVVADEIRKLAESSSEQSKTIGDILKKIKSSIDKISGSTQNVLTKFEAIDSSVKTVAEQEENIRNAMQEQETRSRQLLQSASSLNELTEQVKGGSNEMLEGSKEVIQESTNLEKATQEITFGMNVMASGADQINVAVSRVNEISGKNRKGIETLMHEVSRFKVA

SEQ ID NO: 43407 - DNA, 549 bp, Unknown
  Obtained from environmental sample
  misc_feature (1)..(549): n is a, c, g, or t
atggaaatttttctcgttcctgtcaatattggaatatcagcaaccccatggagttacgcggttggggttacaacaaaaacagtaatggcttccgtaaatgaaatgttggtcatgaccgtcgtcatcagcatcatcgtacttgcggtggcaagtatagcagcggtaatcctgtccggaaccatcagcaagcccattgtgaaggtgacagaaacactaagggacatttccgagggtgaaggcgatttgacaagggttcttgcctcaggctcaaaagacgagatcggcgatcttgcccgtttcttcaatcagactttggcgaaaatcagaaatcttgtggtaaacataaaaaaggaagctcttaaactgtccgaaattggtacggatctggccggcaacatgacggagactgccgcggcggtaaacgaaattacagccaatattcaaaatattaaaggacaggtgataaaaccaaagcgccagcctgaacgaaacgaacgccaccatgaaacaggtcgttgtaaatatcaacaaactcaatggtcatgttga

SEQ ID NO: 43408 - protein, 182 aa, Unknown
  Obtained from environmental sample
  DOMAIN (39)...(110): HAMP domain
  misc_feature (1)..(182): Xaa is any amino acid
MEIFLVPVNIGISATPWSYAVGVTTKTVMASVNEMLVMTVVISIIVLAVASIAAVILSGTISKPIVKVTETLRDISEGEGDLTRVLASGSKDEIGDLARFFNQTLAKIRNLVVNIKKEALKLSEIGTDLAGNMTETAAAVNEITANIQNIKGQVIKPKRQPERNERHHETGRCKYQQTQWSC

SEQ ID NO: 43409 - DNA, 1686 bp, Unknown
  Obtained from environmental sample
  misc_feature (1)..(1686): n is a, c, g, or t
atggcggaagaaactgacaaaaataaaaaaccaaaagcgcagttaattaaacattcacaagctgaagaggctcctgcggaaaagaaaactgcggaacaggttgagcgtcccaaggtaaaaattttagtaaaaaaaccggcggcctcaactcccaagaaaacttctaccaaagttgttgtcagtactcccatagttaaatccacccaattcccaaaaacagaaactaatgaaaaaagcccgtcacaggaaccttcagattccgcaaaggtaacctcttttcaaattgcccaacgtcccgccgccgcggctggtaaagtcggcggcaaattggtcgggaataacgcccctccccagcgtatgggaaggccgggacaaccgaggggaaataaaagtaacgaatcaggtcctccaaacaggccgagttttggaccgcgtcagggtggaggggggcaggtaaaaagacccggcttccagcccaagcaaggtccagggggaggcggcaacagacagcagtttgggggcggttttaaccgtccgccttccggaaaccgcagcgcgggaggaatgggagcggctccggcaaccccgctgccggaaggaaaagggccggcaaaacggaaattcatcacaaagaaacccgtttacacccgcaaagaaaaagagcttgagatggaggaaaaactcctccagacaaagaagaagatcacccaggttgcaaatccggttccaaagacaatagaaattatggaagtaatttcagtatcggaattggccagaaaaatgaacctaaaagcttccgacttgatccataagttaatggctatgggtcagatggttacgataaaccagcagattgacgcggataccgctacgatccttgcctcggaattcggcgctgatgtcaggatcgtaagtctttacgatgaaacggtaatacagaccgaaagtgacgacgacgccgaaatgctgcccaggccgccgattgtaacggtaatgggccatgtagatcacggcaagacgaagctccttgacgcaataagaagcgccgatgtagtgtccggggaattcggcggaattacgcagcatataggcgcatacaccgttgagaccccaaacggaagaattacttttttggatactccggggcacgaagcttttacccgtatgcgggcaaggggcgctcaggttacggatatagtcatcattgtcgtggcggcggatgacggggttatgcctcagacagtggaagccattaaccacgccaaagatgccggggttccgatcatcgtagcggtgaacaagatcgataaaccggaagctaacgtggaaaaggtcaagacccagctttcagaataccagttgattcccgaagactggggcggtcagacaatttttgttgaagtatcggcacttaaaaaagagggcatcgataaactgattgaggcgatactccttcaggctgaaattcttgacttaaaggcaaattataaccgtagcgccgaaggaaaggttctggaatccaggatcgatcacggcagaggaatcgtggctaccgtgatggttcagaaaggaactctcatgatcggcgattcgtttgtcgcaggcgtctggcccggcaaggttcgcgcccttttcaccgacaagggcgacaaggtgaggaagcgacgccgtctcggccgaatctga

SEQ ID NO: 43410 - protein, 561 aa, Unknown
  Obtained from environmental sample
  DOMAIN (352)...(489): Ras family
  misc_feature (1)..(561): Xaa is any amino acid
MAEETDKNKKPKAQLIKHSQAEEAPAEKKTAEQVERPKVKILVKKPAASTPKKTSTKVVVSTPIVKSTQFPKTETNEKSPSQEPSDSAKVTSFQIAQRPAAAAGKVGGKLVGNNAPPQRMGRPGQPRGNKSNESGPPNRPSFGPRQGGGGQVKRPGFQPKQGPGGGGNRQQFGGGFNRPPSGNRSAGGMGAAPATPLPEGKGPAKRKFITKKPVYTRKEKELEMEEKLLQTKKKITQVANPVPKTIEIMEVISVSELARKMNLKASDLIHKLMAMGQMVTINQQIDADTATILASEFGADVRIVSLYDETVIQTESDDDAEMLPRPPIVTVMGHVDHGKTKLLDAIRSADVVSGEFGGITQHIGAYTVETPNGRITFLDTPGHEAFTRMRARGAQVTDIVIIVVAADDGVMPQTVEAINHAKDAGVPIIVAVNKIDKPEANVEKVKTQLSEYQLIPEDWGGQTIFVEVSALKKEGIDKLIEAILLQAEILDLKANYNRSAEGKVLESRIDHGRGIVATVMVQKGTLMIGDSFVAGVWPGKVRALFTDKGDKVRKRRRLGRI

SEQ ID NO: 43411 - DNA, 447 bp, Unknown
  Obtained from environmental sample
  misc_feature (1)..(447): n is a, c, g, or t
gtggttaatggcttccactgtctgaggcataaccccgtcatccgccgccacgacaatgatgactatatccgtaacctgagcgccccttgcccgcatacgggtaaaagcttcgtgccccggagtatccaaaaaagtaattcttccgtttggggtctcaacggtgtatgcgcctatatgctgcgtaattccgccgaattccccggacactacatcggcgcttcttattgcgtcaaggagcttcgtcttgccgtgatctacatggcccattaccgttacaatcggcggcctgggcagcatttcggcgtcgtcgtcactttcggtctgtattaccgtttcatcgtaaagacttacgatcctgacatcagcgccgaattccgaggcaaggatcgtagcggtatccgcgtcaatctgctggtttatcgtaaccatctgacccatagccattaa

SEQ ID NO: 43412 - protein, 148 aa, Unknown
  Obtained from environmental sample
  misc_feature (1)..(148): Xaa is any amino acid
MVNGFHCLRHNPVIRRHDNDDYIRNLSAPCPHTGKSFVPRSIQKSNSSVWGLNGVCAYMLRNSAEFPGHYIGASYCVKELRLAVIYMAHYRYNRRPGQHFGVVVTFGLYYRFIVKTYDPDISAEFRGKDRSGIRVNLLVYRNHLTHSH

SEQ ID NO: 43413 - DNA, 1062 bp, Unknown
  Obtained from environmental sample
  misc_feature (1)..(1062): n is a, c, g, or t
atggcggagggaatatccgttttgacctttaatcaatcccatgcggaaatgcgcgatctgtcatctgttgatgaactgctttcttataacggcgattcggcaatactatggattaatgtaaacggcttaaaagatattgactcgataaaaaaactggaaaaaatgtataatatccatcctctgactattgaagacgcccttgataccacgcatcagccaaaagtcgaaacgtttgaaaattaccgttttatttccttaaagtcaataaggcatgagaaaaaaatccatttgataaaacaggaaattaaaaaacgttattccataagaaaccgaaaaaaaataatggaacaactggaagacatgaaggaatttgttattgatcataccaatataatcataatgaagaatgtgttaataaccattcaggaaataccgggcgattcattcggggatataagaaaacggattttggaaaacatcgggcagattcgcaaaatggggacggattatcttgcctattcattgatagataccgtggttgacgaatattttattacactggctcatttggaaaatgatattgaagatctggaagatcgcgccgtgaagacggataatgacgcgttcatttccgaaatacaggaaacaaagaaattccttttctatataaaacgggcaatgctgccattgcgggagaatcttatgattatatcccgccaggatatgctgttagcaaacgaagaactaaagccgttccttcaggatttgagggaaaatttatcaaacgcgatagactccgtagagacttaccgtgaatggctgacaaatataatggacgtaaacctttcggttctgtcataccagttaaacaaggtgatgaaaatattggctgtaatatcggcaatatttattccgttaacttttattgcggggatatacggcatgaactttgaattcatgcccgaactggcgcagccatggggctatcctcttgtgctggggttaatggggactgtcgcgctgtcaatggttttattatttaaaacacggaaatggttctaa

SEQ ID NO: 43414 - protein, 353 aa, Unknown
  Obtained from environmental sample
  DOMAIN (32)...(353): CorA-like Mg2+ transporter protein
  misc_feature (1)..(353): Xaa is any amino acid
MAEGISVLTFNQSHAEMRDLSSVDELLSYNGDSAILWINVNGLKDIDSIKKLEKMYNIHPLTIEDALDTTHQPKVETFENYRFISLKSIRHEKKIHLIKQEIKKRYSIRNRKKIMEQLEDMKEFVIDHTNIIIMKNVLITIQEIPGDSFGDIRKRILENIGQIRKMGTDYLAYSLIDTVVDEYFITLAHLENDIEDLEDRAVKTDNDAFISEIQETKKFLFYIKRAMLPLRENLMIISRQDMLLANEELKPFLQDLRENLSNAIDSVETYREWLTNIMDVNLSVLSYQLNKVMKILAVISAIFIPLTFIAGIYGMNFEFMPELAQPWGYPLVLGLMGTVALSMVLLFKTRKWF

SEQ ID NO: 43415 - DNA, 384 bp, Unknown
  Obtained from environmental sample
  misc_feature (1)..(384): n is a, c, g, or t
atgatcagatcggccgagagtggtacgcggcagatacgttactccgacgagcttaccccgagcgtcttcgcccgcatgatacgggaacggaaccagatagcccaggcttaccgttccgccggcgaaggcagcaaggcggaatggcttggcaagatggacaacgaaaaacgctccattctttccgccgcttacgagcaggcggagacgatccgcggaaaggccgacgctacggcgacgcggatttacgctgacgcgtacaaccaggacagggacttctttaatttctggcgcggcgtggaatcctaccgcggcaccctgccgaagtttaagaaaactttatctacggatatggaatatttccgttatctgtataccccgcgatag

SEQ ID NO: 43416 - protein, 127 aa, Unknown
  Obtained from environmental sample
  misc_feature (1)..(127): Xaa is any amino acid
MIRSAESGTRQIRYSDELTPSVFARMIRERNQIAQAYRSAGEGSKAEWLGKMDNEKRSILSAAYEQAETIRGKADATATRIYADAYNQDRDFFNFWRGVESYRGTLPKFKKTLSTDMEYFRYLYTPR

SEQ ID NO: 43417 - DNA, 807 bp, Unknown
  Obtained from environmental sample
  misc_feature (1)..(807): n is a, c, g, or t
gtggacaggggcggggggcttttggagcctaagttgttcagttttgatttttcacaggttctcaggctggacaccgaaatcagcatgaacgacgatctggtgctcatcgttaaaaaagaccccgccgataaccacattctgatgcgccgttcggtgatgtcgggttacagcaaaaagcagggcttttaccgcatggaagaaattgacgaaaagatccatcccctgcgcctgccctcgcgtcccgtacagtttcaacgtgaaggcttcaaaatggcaggtcaggtcagacaggaatatttcattgtcaattttgacgccgccgcttttattggcatgaaggatccgcttgaaataatcccttatgaaaattgggacgcttcctcgtttaaaaccgcgtatcttgtagagagccttacaagcgacgccgattatgaacattattcacaatccacgtataatgaggacggcgatcttttttggcctgaggcggcggaactcggattaagcgaaaaggaatacgccctgtacacggcttacggaaacgacgagcggattcgtgccctggcggaagaaataaccgccgattacgacagctacggcgacaaggcggaagtgatttatgaatggctgaaatacggcgatttccgctacagcctaaaaccgggcattgccccggacgggcgaccagctcgcgtggtttttgttccagtccaaaaaaggctattgctcctattatgccttcgcgatgaccctgcttttgagatccatcgggattccggcgcgtattgccgccggtttcttccttga

SEQ ID NO: 43418 - protein, 268 aa, Unknown
  Obtained from environmental sample
  misc_feature (1)..(268): Xaa is any amino acid
MDRGGGLLEPKLFSFDFSQVLRLDTEISMNDDLVLIVKKDPADNHILMRRSVMSGYSKKQGFYRMEEIDEKIHPLRLPSRPVQFQREGFKMAGQVRQEYFIVNFDAAAFIGMKDPLEIIPYENWDASSFKTAYLVESLTSDADYEHYSQSTYNEDGDLFWPEAAELGLSEKEYALYTAYGNDERIRALAEEITADYDSYGDKAEVIYEWLKYGDFRYSLKPGIAPDGRPARVVFVPVQKRLLLLLCLRDDPAFEIHRDSGAYCRRFLP

SEQ ID NO: 43419 - DNA, 855 bp, Unknown
  Obtained from environmental sample
  misc_feature (1)..(855): n is a, c, g, or t
ttgccccggacgggcgaccagctcgcgtggtttttgttccagtccaaaaaaggctattgctcctattatgccttcgcgatgaccctgcttttgagatccatcgggattccggcgcgtattgccgccggtttcttccttgatccggagaacggggcctttgattattaccaggtgcgctccaatatggcgcacgcgtgggttgaggttccctttcccggctgcggctggattgaatttgatccgacttcgataaacctcgcggaaggcgaggaattccgtttttcctccggcgatcccaacttgttcgagcggctgatgcgggagattctggagaaccgttcgcgcctgcgggccaaaacgggaaatgatctcagggataccctgggggatgcccggtcgctggcggatctgtccgccatgctgcttaaaaaagtactgcttccgctgttaatcgtgtcgctgataataatttttatgttaatccgctgcggtttctggtttttatatgttatgcgtcataacaaacgggggcgcgcggtttgcctctggaaacacgcgcggcggcggctcaggcttgccgcccttggttatcccggcctgaagagccggctttcggaatccgaatgggcttcccgtaccgacgcggcggttaaaggcgcgtattcactgtacctcggggccgccgccgcccgtttcgcgcctgaatataatgatgagcattttgccgccatgaaaaacgattaccgccttttttcggaatcgtacaggaaaaccattcccctgtggcgcaggctgctcgcgtggcttcttccccctcttgcccttatgcctaaaaaaatcggaaatcgggattaa

SEQ ID NO: 43420 - protein, 284 aa, Unknown
  Obtained from environmental sample
  DOMAIN (15)...(82): Transglutaminase-like superfamily
  misc_feature (1)..(284): Xaa is any amino acid
MPRTGDQLAWFLFQSKKGYCSYYAFAMTLLLRSIGIPARIAAGFFLDPENGAFDYYQVRSNMAHAWVEVPFPGCGWIEFDPTSINLAEGEEFRFSSGDPNLFERLMREILENRSRLRAKTGNDLRDTLGDARSLADLSAMLLKKVLLPLLIVSLIIIFMLIRCGFWFLYVMRHNKRGRAVCLWKHARRRLRLAALGYPGLKSRLSESEWASRTDAAVKGAYSLYLGAAAARFAPEYNDEHFAAMKNDYRLFSESYRKTIPLWRRLLAWLLPPLALMPKKIGNRD

SEQ ID NO: 43421 - DNA, 1143 bp, Unknown
  Obtained from environmental sample
  misc_feature (1)..(1143): n is a, c, g, or t
atggtttcaggctttgaccgctattttcagatcgccccctgtttccgcgacgaggattcccgcgccgaccgttctcccggggaattctatcagcttgattttgaaatggcgttcgcggggcaggaagacgtattccgcgtggcggagactgtaatgtacgctgtttttacaaatttttcaaacaagccggtaagccccgcgcctttcataagaatcccctatgccgaatcaatgcttaaatacggaactgacaagcccgatctccgcaacccccttgttatcaccgaccttagcggttttttcgctgacgtagaattcaaacccttcaaaaacatccccgtcaggggaatagtcacgcaaggcgcggcattacagtcaaaatccttctttgaaaaaatgcttgcctatgccacggaaatcggcatgaaaggcctcggttacatctccgttatggaggacggcggccttaaagggccgatagtcaagttcctttccgaagagaaacagaacacgcttagaaaagacctttgcttaaaaacaaacgacacgctgtttttcatcgcggacgcgccggcgaaggtaaacaacctcgcggggcagatccgcacggcattgggcaatcagttgaatcttattaacaaggacagattcgagttttgctttatcgtggactttcccatgtacggcaaaaacgaagaaacaggcgcgattgaatttacccacaaccccttctccatgccgcagggcgggcttgaggcgctggaaacaatggtgcccctcgacatcctcgcctggcagtacgacatcgtatgcaacggcgtggaactttcctccggcgctgtccgcaaccatcttcccgaagtgatggtaaaagcctttgaaattgccggatacacccaagccgatatagagaaaaaattccccgccctctacaacgctttccactacggcgctccgccacacgccggcatggctcccggcattgacaggattgttatgctgttggcggaagaagaaaacatccgcgaagtggtagccttcccaatgaacagctccgcgcaagatttgctgatgggcgctccttgtgaagttacggaacaacaacttcgcgaagtgcatataaaggtaaggcagtcgaaataa

SEQ ID NO: 43422 - protein, 380 aa, Unknown
  Obtained from environmental sample
  DOMAIN (109)...(198): GAD domain
  misc_feature (1)..(380): Xaa is any amino acid
MVSGFDRYFQIAPCFRDEDSRADRSPGEFYQLDFEMAFAGQEDVFRVAETVMYAVFTNFSNKPVSPAPFIRIPYAESMLKYGTDKPDLRNPLVITDLSGFFADVEFKPFKNIPVRGIVTQGAALQSKSFFEKMLAYATEIGMKGLGYISVMEDGGLKGPIVKFLSEEKQNTLRKDLCLKTNDTLFFIADAPAKVNNLAGQIRTALGNQLNLINKDRFEFCFIVDFPMYGKNEETGAIEFTHNPFSMPQGGLEALETMVPLDILAWQYDIVCNGVELSSGAVRNHLPEVMVKAFEIAGYTQADIEKKFPALYNAFHYGAPPHAGMAPGIDRIVMLLAEEENIREVVAFPMNSSAQDLLMGAPCEVTEQQLREVHIKVRQSK

SEQ ID NO: 43423 - DNA, 858 bp, Unknown
  Obtained from environmental sample
  misc_feature (1)..(858): n is a, c, g, or t
ttggtagtgcctgtctttttacaggagcgtttctggggctttgtcgggtttgatgattgccgccgggaacgggtatttaccgaaaacgaggaatccatccttcgttcgggaagcctcctaatcgccaacgcccttctgcgtaacgatatgatgcagaacatccgcgccggcgccgcggaactggaggtggcgcttgcgaaggcccagtccgccaaccgcgccaaaagcgagtttctgtcaaatatgagccatgagatgcggacacccatgaacgccattatcggaatgacgctgatcggcaaatcggcgtccggccttgaaaaaaaggattacgcttttgaaaagatagaaggcgcctccacccatcttttgggcgttatcaatgatgttcttgacatgtcaaaaattgaggccggaaaatttgaattatctttagtggaattcaatattgaaaagttactgcaaaaagtgataagcgtgatcaatttccgggtggatgaaaaacatcaatgcctgactgttaatcttgacccgcgtattcccggtaatctgaacggggatgatcagaggctggcgcaggtgattgcaaacctgctcaccaacgccgtcaaatttacgcccgaaggcggctcaatacatctgaacgcgcgttttataaaggaagaaaacggcctgtgtaccatacaaattgacgtgacggacaccggaattggaatcagcgccgaacaacaatcccgcctgttttcctctttcgagcaggcggaaaagcggcacctcgcgcaaatttggcggcacaggtctgggacttgccatttccaaacatatagtagagcttatgggcggcgaaatctggcttga

SEQ ID NO: 43424 - protein, 285 aa, Unknown
  Obtained from environmental sample
  DOMAIN (186)...(278): Histidine kinase-, DNA gyrase B-, and HSP90-like ATPase
  misc_feature (1)..(285): Xaa is any amino acid
MVVPVFLQERFWGFVGFDDCRRERVFTENEESILRSGSLLIANALLRNDMMQNIRAGAAELEVALAKAQSANRAKSEFLSNMSHEMRTPMNAIIGMTLIGKSASGLEKKDYAFEKIEGASTHLLGVINDVLDMSKIEAGKFELSLVEFNIEKLLQKVISVINFRVDEKHQCLTVNLDPRIPGNLNGDDQRLAQVIANLLTNAVKFTPEGGSIHLNARFIKEENGLCTIQIDVTDTGIGISAEQQSRLFSSFEQAEKRHLAQIWRHRSGTCHFQTYSRAYGRRNLA

SEQ ID NO: 43425 - DNA, 642 bp, Unknown
  Obtained from environmental sample
  misc_feature (1)..(642): n is a, c, g, or t
ttggaatcagcgccgaacaacaatcccgcctgttttcctctttcgagcaggcggaaaagcggcacctcgcgcaaatttggcggcacaggtctgggacttgccatttccaaacatatagtagagcttatgggcggcgaaatctggcttgattcaaaacccggcgtgggatcgattttctcctttaccgttctgcttaaacgcggcaagacagaagaaaacgccgaaagccggccccataaggcggcttcggggcaacaggtatccttcaaaggccgccgcatccttttggccgaggatgttgaaatcaaccgggagattgtactggcgcttcttgaaccgaccggaatcgagatcgactgcgcggtaaacggcaaagaggccgtgaagatgttcagccacaaacccaaaggctacgatttaatttttatggatatgcagatgccggagatggacgggttggaagccactcaccagatacggtccattgagggacacaagaatatagttccgataatcgccatgaccgccaacgtttttaaggaagatatagaaaaatgccttgcggtcggcatgaacgatcatatcgggaagccgcttgatttcaacgaggtaatggcaaagctgcaattttatttaaaataa

SEQ ID NO: 43426 - protein, 213 aa, Unknown
  Obtained from environmental sample
  DOMAIN (7)...(66): Histidine kinase-, DNA gyrase B-, and HSP90-like ATPase
  misc_feature (1)..(213): Xaa is any amino acid
MESAPNNNPACFPLSSRRKSGTSRKFGGTGLGLAISKHIVELMGGEIWLDSKPGVGSIFSFTVLLKRGKTEENAESRPHKAASGQQVSFKGRRILLAEDVEINREIVLALLEPTGIEIDCAVNGKEAVKMFSHKPKGYDLIFMDMQMPEMDGLEATHQIRSIEGHKNIVPIIAMTANVFKEDIEKCLAVGMNDHIGKPLDFNEVMAKLQFYLK

SEQ ID NO: 43427 - DNA, 2271 bp, Unknown
  Obtained from environmental sample
  misc_feature (1)..(2271): n is a, c, g, or t
atggcgaagaaaaagcgtaaaccctccgctacgccgcccgcggccgcggcggaaggcgtcaaagcgccgcgatattcgccgcgcctcgttctcattttgtcaatcgcgttcctctgcgccctctgcctgatccagttttggggcatactctccggcggcaggaacttctgggaggatatcgttgagggcgagtttcctgtccgcgttttcgccaaactatcgttctttaggggcgagttccctcactggaacccgttcaccttcggcggtatgccgttcttcgccactggcacgggtattctctaccccttcaacctattgctgtcgctgttgcctgtgggtaacgcggcgctctggtacatgatgcaggcggtaatagcgttgcacgtgctgataggcggcctctgtatgcgcgcctacctgcgctttcacaaccgcacaaacgcggcgtcgctcttcggcgcggcggcctttatgctgggcgggtatctgataacacgcgtcatccatccccgcatcctctgcgtggcggcatggctgccgcttatgcttttgctaatggaaaagggcgtccgcgaactcaagcccgcgtatgtagtgataggtggattgctgctcggttgcgtcatgcagatggggcacgcgcaggtgatgttttataccgtcgtctttatgctgacctacgccctgtttctctcttgtctttacgggttgaatagatcggcggcggcagtatcaaaggcgtccctattaacaacgtataaacctgtcttgcatagggcggcgctctccgccttgtattttataatcgccgccggactttgcttggttcagtaccttcctatttttgaggcgggcggccacacggtgcgcagcaattttactataaccgacgccagcgagggttcgttgcagtttgtccaattgttcacggcgctgcttccgaagctcttcggagcgtacaccggcggcgaccggtcggttccggcgttctggcttacggacgctttcaagcacgggtactacaattattgggaatcgtgcttctacttcggcgtgtccacgcttatactctccgcggcgttcttccgcaaaatcaaaaccgaccgtacggttctcttcgcggccgcgtggatcgtattggcttttttagtcgcgttgggcggcaattttttcttctacaagctgctcttttcgcttggaataccggggttcaactcgtttagggccgcgcccaggatattgctcgtttgggcgtttctctttccggtagcggcctccgccgcgctcgacgctcttaatgacgtaaagtcttcgggcaagttacggatactgttgatctcgctttgcgccgccgccgcgattttgggattgatcgccgctgccgggagcttggcgtcggttttcccgctcatgaacgtggccgacggcaaggtcgatagggcgcagtacgcgtcgcggcaggggatgatgttgcttgtcaacgtgttgcttttctgggttacgttgatactatttttcaaaaatgtcataaatgaaaagcgggcgaagattctcatagtagtttgcgtttcaatcgacatgctggtcttcgccgccggccagcacattacgcgccgcgatggggccgacgccgtgttccaaaaggcgcagggtacggtggaaacaataaaaaacctgagcaaggaagagattgtcaggttcaatacgcggcagtatatagtcgaacccggcgtaaaattaggcaacaacaccaacctaatgatgacgcagaggaatcaaggctacgtgagcgggatagaaattatggaaggttacaaccaattccgcctcaaatacgcggcgctaccgctcgacggggctaaattcaacactatgctcgacctgatgaacgtcaggtactacgtcaacccgcggctgaaagagggcgacaaagacgttatgctgcgcaacgaaacatgcttgccgcgcgcaaagctgttttataaagccgtggttgtggacggcggagccggcagtattcatgatagcgttaatagcgacggtattgattcgttggtaatcaattacatgaacagcccaaactacaatcaccgtaacgaagtcgtcgttacagacccgaacttagcgaaattcgccggcggcgacgggacgggagaggtaaagatcgctaaatacgatttcaataggatagaacttgatgttgatacggacaaagaggcgatcctatggctaagcgaaatctggtacccggcgtgctcggccatctga

SEQ ID NO: 43428 - protein, 756 aa, Unknown
  Obtained from environmental sample
  SIGNAL (1)...(16)
  misc_feature (1)..(756): Xaa is any amino acid
MAKKKRKPSATPPAAAAEGVKAPRYSPRLVLILSIAFLCALCLIQFWGILSGGRNFWEDIVEGEFPVRVFAKLSFFRGEFPHWNPFTFGGMPFFATGTGILYPFNLLLSLLPVGNAALWYMMQAVIALHVLIGGLCMRAYLRFHNRTNAASLFGAAAFMLGGYLITRVIHPRILCVAAWLPLMLLLMEKGVRELKPAYVVIGGLLLGCVMQMGHAQVMFYTVVFMLTYALFLSCLYGLNRSAAAVSKASLLTTYKPVLHRAALSALYFIIAAGLCLVQYLPIFEAGGHTVRSNFTITDASEGSLQFVQLFTALLPKLFGAYTGGDRSVPAFWLTDAFKHGYYNYWESCFYFGVSTLILSAAFFRKIKTDRTVLFAAAWIVLAFLVALGGNFFFYKLLFSLGIPGFNSFRAAPRILLVWAFLFPVAASAALDALNDVKSSGKLRILLISLCAAAAILGLIAAAGSLASVFPLMNVADGKVDRAQYASRQGMMLLVNVLLFWVTLILFFKNVINEKRAKILIVVCVSIDMLVFAAGQHITRRDGADAVFQKAQGTVETIKNLSKEEIVRFNTRQYIVEPGVKLGNNTNLMMTQRNQGYVSGIEIMEGYNQFRLKYAALPLDGAKFNTMLDLMNVRYYVNPRLKEGDKDVMLRNETCLPRAKLFYKAVVVDGGAGSIHDSVNSDGIDSLVINYMNSPNYNHRNEVVVTDPNLAKFAGGDGTGEVKIAKYDFNRIELDVDTDKEAILWLSEIWYPACSAI

SEQ ID NO: 43429 - DNA, 651 bp, Unknown
  Obtained from environmental sample
  misc_feature (1)..(651): n is a, c, g, or t
gtgtcggacgaatttaatgaggcgtatcttcccttagcctggcagtggaaccataatccggataacgcttgctggtcgctgagcgaaaggccgggtttcctgcggataaagacgggtaggaccagcaagaccattttccatgcgcggaacacattaacccagcgtacttttgaaccggcctgcgaaggcgtaattgcgcttgagccgggaaacatgaaagacggcgacattgccggttttatggcattggggcccattgcgggtttcacgggcatagaacaggaaggcagccaaaaatatatagtaatgtacacggctgacaatgacagttcaaccaacccctcaacccaagggcagagagcttcccaaaccagaatggcacaggtggcctttaacggcgacagagtgtatttcaggcttaaattccagttcaaaaccggttctttcacaaccgaaaccgcgaagttcgagtacagcctggacggagaaaaatggcaaagcatcggaacaaccgtgaatatcaagtggacattgcggcattttaccggttatcgttttggattgtttaattacgcggcaaaagaagcgggcgggtatgttgattttgatttttttcatttagtacagggaaaaaatcacatggcgtattaa

SEQ ID NO: 43430 - protein, 216 aa, Unknown
  Obtained from environmental sample
  misc_feature (1)..(216): Xaa is any amino acid
MSDEFNEAYLPLAWQWNHNPDNACWSLSERPGFLRIKTGRTSKTIFHARNTLTQRTFEPACEGVIALEPGNMKDGDIAGFMALGPIAGFTGIEQEGSQKYIVMYTADNDSSTNPSTQGQRASQTRMAQVAFNGDRVYFRLKFQFKTGSFTTETAKFEYSLDGEKWQSIGTTVNIKWTLRHFTGYRFGLFNYAAKEAGGYVDFDFFHLVQGKNHMAY

SEQ ID NO: 43431 - DNA, 702 bp, Unknown
  Obtained from environmental sample
  misc_feature (1)..(702): n is a, c, g, or t
atggatgcatacaaaacgttacgggaagaatcatacgaagcgaaccttgaaataaagaggcagggtcttgccatttacacatggggcaacgtttccgcttttgatcctgacaagggagtattcgccataaaaccttccggcgtggaatacgatgaattaacgcctaaaaagatagtgttagtcgatcttgagggaaaagttattgacagcaaactaaaaccctcttccgacacaaaaacccatcttgtcctgtaccgtgaatttaagggaatctgcggcgtaacgcatacgcactcgccttacgctatcgcttgggcgcagacaggaaaatcaatacccgtctttggcacgactcacgccgatcattgcgcttttgaaataccgtgtacaagttttataaatcagcaggatgtaaaaaacgattatgagttggaaacaggcaatttaattgttaatacttttaagaacggtaatttagattgttcgcagattacaatgacgctggttgccggacacggaccttttacttggggaaacagcgcagctcaatctgtgtaccacagcgttatactggaagaaatctgtaaaatggcgttattcaccctaatgattgactcaaacgcaaaaccgctgcccgagcacattatcaaaaaacattgggaacgcaaacatgggacaaacgcgtattatgggcaaaaataa

SEQ ID NO: 43432 - protein, 233 aa, Unknown
  Obtained from environmental sample
  DOMAIN (9)...(219): Class II Aldolase and Adducin N-terminal domain
  misc_feature (1)..(233): Xaa is any amino acid
MDAYKTLREESYEANLEIKRQGLAIYTWGNVSAFDPDKGVFAIKPSGVEYDELTPKKIVLVDLEGKVIDSKLKPSSDTKTHLVLYREFKGICGVTHTHSPYAIAWAQTGKSIPVFGTTHADHCAFEIPCTSFINQQDVKNDYELETGNLIVNTFKNGNLDCSQITMTLVAGHGPFTWGNSAAQSVYHSVILEEICKMALFTLMIDSNAKPLPEHIIKKHWERKHGTNAYYGQK

SEQ ID NO: 43433 - DNA, 723 bp, Unknown
  Obtained from environmental sample
  misc_feature (1)..(723): n is a, c, g, or t
ttgccggcgcaagcggtttcttttttagcggggcttttccttgacttctttcgctttatcggcctttcttattttttggcgtttaaaattctttttattataatgataactttaacgatactcgccctctccatacagaaaaaaatgaaaccgttaggctcccttccgctgtcaaacgcgctggaagttattttctcagtcagggaccttcgcgcgattagtttgttaggcaaactaaataaagcggaagattcttcacaagagaaaatacttcttggcgaattacacaataccccttcccacctcgcgattgacggtatattggagcgggcatgttcgccaaaaatggccacgcgcacggaagcgataagggcgcttgaaatgcttcagaaactgagcaaaaaagccgagaaagcgttagttgacgacgccatgaataacccttacacaacagcatatatttccgcgcgtattttaggaaaacacaattgtaccgaagccattcccatattacgcgaaattaccaaatcaggggattatatgctcgcgggagaagcaataattgcccttgcaaaaatgaaagatgaagcctttcgtcccgaaatagaaaaattaattctaagctctgataaccctcggctaaaaatcatgggagcggaggcgttgggcttatatcaaaatgttgaatctgttcattattttaggttgtacgcctcgccataa

SEQ ID NO: 43434 - protein, 240 aa, Unknown
  Obtained from environmental sample
  misc_feature (1)..(240): Xaa is any amino acid
MPAQAVSFLAGLFLDFFRFIGLSYFLAFKILFIIMITLTILALSIQKKMKPLGSLPLSNALEVIFSVRDLRAISLLGKLNKAEDSSQEKILLGELHNTPSHLAIDGILERACSPKMATRTEAIRALEMLQKLSKKAEKALVDDAMNNPYTTAYISARILGKHNCTEAIPILREITKSGDYMLAGEAIIALAKMKDEAFRPEIEKLILSSDNPRLKIMGAEALGLYQNVESVHYFRLYASP

SEQ ID NO: 43435 - DNA, 741 bp, Unknown
  Obtained from environmental sample
  misc_feature (1)..(741): n is a, c, g, or t
ttggccgtgggtcccgacaggggcagttttatgacgcagattcaaatcattaacagcgcgattggaatggtcagcagttttctgatagccatggcccttggcacggaaccgcccatttttttgttttccatcctgctcggaggcggcgttattacggggattgtaagcggttatgtgataaaaaaagttcccgagccgccaagcgaaaaggacaggaggggaatgagccttgccgcgactttcaaagacgctttcgcgcaggacagcctccgcagttttatggttattctgtttttggtgattcttgtgtcaggcgttacgcgaacattcgtagtggtttacgcccgcgaggtgtttgagcataacgacggccttattttgctttactcggtcttcggcggattgggctacctgatagcgggattaagcataaaattccttgtagacaggctgggcgcaaagccgctttttcttgtctgcgtgatactgggactggtatgcatgattcccgttgtttttcttccggtgtcggcaatttttaacatgacgggcgcgattctttttttggtctttttgtttttcatgctgaacttcggttttttgggttccgaaggaatcgctcagacttattttttggctttaattccgtctgaaaaaactctggacttgggcattatttatttttttattttaggcattgccggcgcaagcggtttcttttttagcggggcttttccttga

SEQ ID NO: 43436 - protein, 246 aa, Unknown
  Obtained from environmental sample
  misc_feature (1)..(246): Xaa is any amino acid
MAVGPDRGSFMTQIQIINSAIGMVSSFLIAMALGTEPPIFLFSILLGGGVITGIVSGYVIKKVPEPPSEKDRRGMSLAATFKDAFAQDSLRSFMVILFLVILVSGVTRTFVVVYAREVFEHNDGLILLYSVFGGLGYLIAGLSIKFLVDRLGAKPLFLVCVILGLVCMIPVVFLPVSAIFNMTGAILFLVFLFFMLNFGFLGSEGIAQTYFLALIPSEKTLDLGIIYFFILGIAGASGFFFSGAFP

SEQ ID NO: 43437 - DNA, 912 bp, Unknown
  Obtained from environmental sample
  misc_feature (1)..(912): n is a, c, g, or t
ttgataaaagaagcatttatatggccgctagaggagaggatctctcttatgaatgcgctgaaatggtttatgaatgaaattatggaagggaaggccagcgaaatacagatggcggcttaccttgcggcaatgtccgtgaaaggtgagactattgatgaaattaccgcgtcagccgcgggaatgcgcaagcactgcgtcaggattttgcatgacatggacgtactggaaattgtcggcaccggtggggatcattccaattccttcaatatatccaccacttccgctctggttatttccgcagccgggtttcctgtcgcaaaacacggaaatcgcgccgcgacaagcaaaacgggggcggctgatgttcttgaagccctcggggtcgatataacaatcccgcccgaacaaagtttaaatcttttaaaaaccatcaatctttgttttctctatgcgcagaattatcatatttcaatgaagtatgtcggtcccgtaagacgtgagcttggcattcgcacaatttttaatatactcggtcctttggtaaatccggcgggcgcgaacatggaattgttaggcgtgtacgagcatgagcttgttgaaccgatggcgaaagttttatgcaaccttggagtaaaaagaggcatggttgttttcggtcaggatgggttagacgaaatctccctcagcgcacccactacagtctgtgaattacgcgacggattcattaaaacttatgaaattaaacctgaacaatttggatttgaacgctgtaaaaaagaagacctgttaggcggaactccgtcggaaaacgcgcagataacaaggggtattcttccggcgagaaaggtccaaaacgagacgcggtgcttcttaattcagccgccgcaattcatatcgtcaaacctgaaataa

SEQ ID NO: 43438 - protein, 303 aa, Unknown
  Obtained from environmental sample
  DOMAIN (1)...(66): Glycosyl transferase family, helical bundle domain
  misc_feature (1)..(303): Xaa is any amino acid
MIKEAFIWPLEERISLMNALKWFMNEIMEGKASEIQMAAYLAAMSVKGETIDEITASAAGMRKHCVRILHDMDVLEIVGTGGDHSNSFNISTTSALVISAAGFPVAKHGNRAATSKTGAADVLEALGVDITIPPEQSLNLLKTINLCFLYAQNYHISMKYVGPVRRELGIRTIFNILGPLVNPAGANMELLGVYEHELVEPMAKVLCNLGVKRGMVVFGQDGLDEISLSAPTTVCELRDGFIKTYEIKPEQFGFERCKKEDLLGGTPSENAQITRGILPARKVQNETRCFLIQPPQFISSNLK

SEQ ID NO: 43439 - DNA, 627 bp, Unknown
  Obtained from environmental sample
  misc_feature (1)..(627): n is a, c, g, or t
gtgcgtattcttatcgatggggcgcaatcggtggcgcatacgccgcttaatgtcagcgaattggatgcggatttttttgtgttctcgggacacaaaattttcgctcctactggcataggcgctgtatacggaaaagcggacgctctggaagaagccaaaccgtatcagggcggcggaaacatgataaaagacgttacttttgaacgtacggtatacaatcccgcgccatcaaagtttgaagcgggaaccggtaacattgccgacgcggtagggctgggcgcggcgcttgattatgtttccggcataggaattgcgaacatcggcgcgtatgaacatgaacttcttgattacgcgacaggcgaacttaaacgcataaacggactgcaccttatagggactgctacggaaaaagcgagcgttttgtcttttgtgttggacagcgcgagcgtcgagcaggttggcaaacatcttgcaaatcacggaattgccgtgcgcgcaggccaccactgcgctcagccgattttgcgccgtttcggactggaagcgacagtacgcccgaccatcgcattctacaacacagccgaagaaatcgacaaactggtatgcgcggttaaagaactcgcgtaa

SEQ ID NO: 43440 - protein, 208 aa, Unknown
  Obtained from environmental sample
  DOMAIN (2)...(200): Aminotransferase class-V
  misc_feature (1)..(208): Xaa is any amino acid
MRILIDGAQSVAHTPLNVSELDADFFVFSGHKIFAPTGIGAVYGKADALEEAKPYQGGGNMIKDVTFERTVYNPAPSKFEAGTGNIADAVGLGAALDYVSGIGIANIGAYEHELLDYATGELKRINGLHLIGTATEKASVLSFVLDSASVEQVGKHLANHGIAVRAGHHCAQPILRRFGLEATVRPTIAFYNTAEEIDKLVCAVKELA

SEQ ID NO: 43441 - DNA, 1170 bp, Unknown
  Obtained from environmental sample
  misc_feature (1)..(1170): n is a, c, g, or t
atgtgtgggggaaaaccttacaacccagcatatctgccagcagatacgagatgcgtaaacggcattcctacatttgaatttgaagacggtcgcgatcaccaaacatataaagcagtggtaataggttcacagatttggatggcggagaatttgaactacaaagcaagtggtagcaaatgttatggcgaagacggttttgtctttaacgaggaagctacggggtttgataaaatattatcaaactctgaattacaagctaactgcagtatctacggaagactttacgattgggcaacagctacgggtagctccacagcaaaccaaagcggcattcaaggcgtttgcccaaatggttggcatttgcctagtgatgccgagtggaatgttttgatgaagttcgttaatcctagctgttctgattctaacaaaagagatgaaggtgatattagctattgtgctgatgctggaaaaaaattgaaagcagactctcctttgtggaatgaaaatggcaaaggcacggacgattacggctttgcggctctgccgggtggcgcgggctctgtgtacatatttgctggcaaagttggctactggtggagtgccacggagaacgcggacaacggcgactactactacttccggcgcatgcaaatcggcaacgaggatgtcgacaggagctacgtcggtaagacctatacgttcagtgttcgttgcctccaagattcccaatctttgcctgttggcggtagtagttcatctgtcacgagtggcaacggtaccagttctagttccagttccaaggtcaattcgtcttcatctgccaatcctgtagttccgtcttcgtctagcaatagcgaaccgggcaacttaattataagcggttgcccatatacaaccaccacttccaattcgcttgatgttcacgctatgagcacaaatccggtaagcgtaagcatttacctttcaacagcaagcagcgccgcaggcagtggaataatagcgacttccaacacggttacatggacaggaacaaaagtccccaacggcacatttacaattgtagtagacatattgcaaggcggcagcttgaaatattacaaagcgtcaggcgtttcgctcaacaacggaagcggaacagtatcatggaacagtttcagtcagtttaattaa

SEQ ID NO: 43442 - protein, 389 aa, Unknown
  Obtained from environmental sample
  misc_feature (1)..(389): Xaa is any amino acid
MCGGKPYNPAYLPADTRCVNGIPTFEFEDGRDHQTYKAVVIGSQIWMAENLNYKASGSKCYGEDGFVFNEEATGFDKILSNSELQANCSIYGRLYDWATATGSSTANQSGIQGVCPNGWHLPSDAEWNVLMKFVNPSCSDSNKRDEGDISYCADAGKKLKADSPLWNENGKGTDDYGFAALPGGAGSVYIFAGKVGYWWSATENADNGDYYYFRRMQIGNEDVDRSYVGKTYTFSVRCLQDSQSLPVGGSSSSVTSGNGTSSSSSSKVNSSSSANPVVPSSSSNSEPGNLIISGCPYTTTTSNSLDVHAMSTNPVSVSIYLSTASSAAGSGIIATSNTVTWTGTKVPNGTFTIVVDILQGGSLKYYKASGVSLNNGSGTVSWNSFSQFN

SEQ ID NO: 43443 - DNA, 1080 bp, Unknown
  Obtained from environmental sample
  misc_feature (1)..(1080): n is a, c, g, or t
ttgagaaaaaggattacgccttttgaaaagatagaaggcgcctcctcccatcttttgggcgttatcaatgacgtccttgatatgtcaaaaattgaggccggaaaatttgaattgtcttttgtggagttcaatattgagaaaatgctgcagaaggtgataaacgtcattaaattccgggtggatgaaaaaaatcagcgcctgacggttaatcttgacccgcgtattcccgttaatctgaacggggatgatcagagactggcgcaggtgattacaaacctgctcaccaacgccgttaaatttacgcccgaaaacggctcaatacacctgaacgcgcgttttctgtatgaggaagatggcctgtgtaccatacaaatggaggtaaaggataccggaattggaatcagcgccgaacagcaatcacgcctgtttacctctttcgcgcaggcggaaagcagcacctcgcgcaagttcggcggcacgggtctggggcttgccatttccaaacatatagtggagcttatgggcggtaaaatctggcttgaatcggagcttggcctgggatcgactttttcctttaccgttctgcttaaacgcggcaaatatgaagacgccgaaagcttcaacgacgcggataaagcggcggagcagcaggtatccttccgcgggcgccgcctccttatggcggaggatgttgaaatcaaccgggagattgtacaatcccttctggaaccgacggagatcgggatcgactgcgcggtaaacggcgttgaggcgctgcggatgttcagcgaagatccggaaaaatacgatataattttaatggacatacagatgccggagatggacggtttcgaagccacccgcaagatcagggctctggaagaagagatcaagaactcaggcatgagttttgccaaaggcaaaactcaaaacaataatagggatttgcacaagcaaatccctattattgccatgaccgctaacgtgttcaaggaagacattgaaaaatgccttcaggttggcatgaacaaccatatcggaaagccgcttgacttcaacgaggtaagtggaaaaggctga

SEQ ID NO: 43444 - protein, 359 aa, Unknown
  Obtained from environmental sample
  DOMAIN (223)...(356): Response regulator receiver domain
  misc_feature (1)..(359): Xaa is any amino acid
MRKRITPFEKIEGASSHLLGVINDVLDMSKIEAGKFELSFVEFNIEKMLQKVINVIKFRVDEKNQRLTVNLDPRIPVNLNGDDQRLAQVITNLLTNAVKFTPENGSIHLNARFLYEEDGLCTIQMEVKDTGIGISAEQQSRLFTSFAQAESSTSRKFGGTGLGLAISKHIVELMGGKIWLESELGLGSTFSFTVLLKRGKYEDAESFNDADKAAEQQVSFRGRRLLMAEDVEINREIVQSLLEPTEIGIDCAVNGVEALRMFSEDPEKYDIILMDIQMPEMDGFEATRKIRALEEEIKNSGMSFAKGKTQNNNRDLHKQIPIIAMTANVFKEDIEKCLQVGMNNHIGKPLDFNEVSGKG

SEQ ID NO: 43445 - DNA, 666 bp, Unknown
  Obtained from environmental sample
  misc_feature (1)..(666): n is a, c, g, or t
atgggaatggcagatatgggcgtacttacgcggtttaatttcttaaaaacatacgttcaaagggataaaaatatgtccctgggccctgtaataaagaacatcggtccgcctgcgcttggcgagcctctgcccactgttgcgagcgccggcgtagcgtataaaccgattcgccctcttactatagcaatagacttttctatgcctcttaatataatgaactttgatctttccgaaaaaccgtattttgcgcttggtgcagccgttaatgtgacaaaatttttatccatgcgcgccggaactatggtaaaagccggaggcagccgcgttactgtcggcagcgccgtcaatctggataaaatttcgatagatgtaaactatactctggatttacttacccagttacagccgttgaacaggttaagtctcggtgtacgtcttgaccttggagacgacggacggcagaaaaaagccgatatggttaatgagctgtatcttttgggattggacgctttcgcgcaggggaaatatgccgacgcaaaaatttgctggcaggaagccttaaaacttgacccgaaatttgaacccgcgcaggaagggcttgatacgctaaaaagccgccaagagcttcaagaaagagttgaggatctgttcaaacttgatttctag

SEQ ID NO: 43446 - protein, 221 aa, Unknown
  Obtained from environmental sample
  DOMAIN (160)...(193): Tetratricopeptide repeat
  misc_feature (1)..(221): Xaa is any amino acid
MGMADMGVLTRFNFLKTYVQRDKNMSLGPVIKNIGPPALGEPLPTVASAGVAYKPIRPLTIAIDFSMPLNIMNFDLSEKPYFALGAAVNVTKFLSMRAGTMVKAGGSRVTVGSAVNLDKISIDVNYTLDLLTQLQPLNRLSLGVRLDLGDDGRQKKADMVNELYLLGLDAFAQGKYADAKICWQEALKLDPKFEPAQEGLDTLKSRQELQERVEDLFKLDF

SEQ ID NO: 43447 - DNA, 657 bp, Unknown
  Obtained from environmental sample
  misc_feature (1)..(657): n is a, c, g, or t
atgacagattggccgagttccccgcttggcgttccttcacgtatgaatatcggccagcttctggaaacagaactaggctgggccggttccactcttgatgaatggtattccgctcctgtttttcagtctccttcgacaagtcaaatagaagaaaaactgaaagaagcggggcttccggttacaagtaaggcgactctaagggacggaagaacaggagagccttttgtaaaccagattttctgcggagtgatttactttcttaaactgcatcaccttgttgacgacaagatgcatgcccgatccacaggtccgtattcgcttgttacccagcagccgcttggcggaaaagcccagttcggcggacagaggttaggtgaaatggaagtctgggcgcttgaagcttacggggcagccaacacattgcaggaacttttgacaattaaatcggacgacatgacaggccgttccaaaatttatgaagcaattgtaaagggcgaaccttctacaacagcgggtattccggaatcatttaacgtactggttcaggaattacgcggtcttgctcttgatctgtctatttttgatgctaagggaaagcaaatacctctcactgaaaaggatgaggaattaataaccaaaccgggaagtaatttttaa

SEQ ID NO: 43448 - protein, 218 aa, Unknown
  Obtained from environmental sample
  DOMAIN (1)...(118): RNA polymerase Rpb2, domain 6
  misc_feature (1)..(218): Xaa is any amino acid
MTDWPSSPLGVPSRMNIGQLLETELGWAGSTLDEWYSAPVFQSPSTSQIEEKLKEAGLPVTSKATLRDGRTGEPFVNQIFCGVIYFLKLHHLVDDKMHARSTGPYSLVTQQPLGGKAQFGGQRLGEMEVWALEAYGAANTLQELLTIKSDDMTGRSKIYEAIVKGEPSTTAGIPESFNVLVQELRGLALDLSIFDAKGKQIPLTEKDEELITKPGSNF

SEQ ID NO: 43449 - DNA, 951 bp, Unknown
  Obtained from environmental sample
  misc_feature (1)..(951): n is a, c, g, or t
atgcacggaataatggaaaacgattttatgttttcaggcaagggggaagttccctggcacggcatcggggcggtactggacggggtactgacatccgatgaagcaatcaaagaagcgcgtctggcctggaccgttgagcaaacccaggtctatgccgaatccaactgggccgaacctatccccggttaccttgccaatgtgcgcagcgacacaaaagaagtgttaggcatcgtgtccgaaaggtacaaggtcgcccaaaataaagacgtgttcgagttcgcggatgaacttatcgggaatagaaatatgaaatgtacttacgaaaccgcaggctctttgtttaacgggcggcgtgtattcatgcttgtcaacatgcccgaaagaaaaatcgtggaggacgaatacaagccgtacctctgcctgtctaacgcccatgacggttccgcctgcctgcaaatctttcttaccggcatcagggtggtgtgcaacaacaccttatcggcggcacttaacacggcgaaaagaaaaatctcaatccgccatctttccattatggaacagcggaaagacgaagcggtaaaagctatgggcgccgcgtcaaagtatttccacgaccttgaggttttcgcttcccatcttgccggaaagaaggtaaacatcgtcaaagtgcttgacaggctgtttcccgcgtccagagacatgacaacacggcaactgaaatccaacaaagaagtaaagggatttatccaaaaccttcttaaaaccaaagatgatcttcaaaacatcaaaaagaccgcatggggagtattcaacgccattgccgatttccgctcaaacggcgagccgaaacgcaaaaccaaaacttacgaagaagcgaaaatggcacggtttattgacggtgacgaggtaatgaaccaggcccagaaaattatcacggaacttgccgaataa

SEQ ID NO: 43450 - protein, 316 aa, Unknown
  Obtained from environmental sample
  misc_feature (1)..(316): Xaa is any amino acid
MHGIMENDFMFSGKGEVPWHGIGAVLDGVLTSDEAIKEARLAWTVEQTQVYAESNWAEPIPGYLANVRSDTKEVLGIVSERYKVAQNKDVFEFADELIGNRNMKCTYETAGSLFNGRRVFMLVNMPERKIVEDEYKPYLCLSNAHDGSACLQIFLTGIRVVCNNTLSAALNTAKRKISIRHLSIMEQRKDEAVKAMGAASKYFHDLEVFASHLAGKKVNIVKVLDRLFPASRDMTTRQLKSNKEVKGFIQNLLKTKDDLQNIKKTAWGVFNAIADFRSNGEPKRKTKTYEEAKMARFIDGDEVMNQAQKIITELAE

SEQ ID NO: 43451 - DNA, 555 bp, Unknown
  Obtained from environmental sample
  misc_feature (1)..(555): n is a, c, g, or t
atggacctgcacaacctcgcggaggcaagcaaagagtacaatctggatattcatgtttttaacctgggaacctataccaacgacaagatagttgaaacccagcgccgttttatgcgcgaaaaacttgacaccgacattgactgccttgaagcctacaacacgggttataatctcggaatcgacggcgccaagctgcatgatattcttaagaatatccataataacgactacggccatacgatgcttaccgttcctgttttaaatcccgataaaacccatacctattacgccgatcttgaagtcccggtacgtaaccattgcattgttccctggtgccaggccaatgtcaactacaacggcgacgtgcatttttgcgccgattatcccgattacattcttggcaatattaaggaacaatctttcaaggatatttataacggggaccgcgccaacaagttcagaaaaaccattcatgaatgcgagggcggcatgttccccggatgcctgcgttgttatcagaacatgctgttcggtaaaagaataaagggattttaa

SEQ ID NO: 43452 - protein, 184 aa, Unknown
  Obtained from environmental sample
  misc_feature (1)..(184): Xaa is any amino acid
MDLHNLAEASKEYNLDIHVFNLGTYTNDKIVETQRRFMREKLDTDIDCLEAYNTGYNLGIDGAKLHDILKNIHNNDYGHTMLTVPVLNPDKTHTYYADLEVPVRNHCIVPWCQANVNYNGDVHFCADYPDYILGNIKEQSFKDIYNGDRANKFRKTIHECEGGMFPGCLRCYQNMLFGKRIKGF

SEQ ID NO: 43453 - DNA, 1053 bp, Unknown
  Obtained from environmental sample
  misc_feature (1)..(1053): n is a, c, g, or t
atgtttgacgtgtccggcaccctggaaccgctgtgcgtggaagcggcgctgcggaacctgggccttaacgcggacgccgtggtcagcatgggcggggaggaccttatcgtctattccctggatgcccagggcaagatcatcaataatttttccggcaataaatgcgccagcggcaccggggaatttctcaagcagcagcttgcccgcatggacatgacgcttgacgatattgagaatgttccccagaccgcgaaggttcacgccctttcaacgcgctgttcggtgttcatgaaaagcgactgcacccacaggctcaacaagcgcgaggcgaccaaggacgacatagtgttgtccctctccgacgtgatggccgtcaaggttatcgactttttgaaacgcgccaaagtgacgaagggcagggtagtgctgacgggcgggattaccctgaaccggcacattatacgctttatccgcgagaaggccccgcagattgaatttatcatccccgagaccgcgcctgtttttgaggccctgggcgcggcggtgatggcccccaaatcgggcagcagcctgccctctgttgacaagctcctcaagataaacgagatacgtttcggagtgctgggcgcgctgaaagactggaaggacaaagtacagttttttgacaagggcgaagggaaagtccgcgccggtcacaggtatatacttggcgttgacggcggctctaccactaccaaggcctgcctggttgacatggaaaccgacgaaatcgtggcgagccattacggcaggacccacggcgatccggtgaaggcgctgaaagagtgtctgcgatattttcaggaaaaagtgttcgccgataccggcgtaaaaaaatcgatatacggctcgtgtcaacgaccggttccagccgcgagattcttggcgtgtttctggaaacgccgggcgtgtataacgaaattatcgcccactcggtggggactacctactttgacaaagaagttgaaacgatttttgaaatcggcggccaggacgctaagtatgtgctgttaa

SEQ ID NO: 43454 - protein, 350 aa, Unknown
  Obtained from environmental sample
  misc_feature (1)..(350): Xaa is any amino acid
MFDVSGTLEPLCVEAALRNLGLNADAVVSMGGEDLIVYSLDAQGKIINNFSGNKCASGTGEFLKQQLARMDMTLDDIENVPQTAKVHALSTRCSVFMKSDCTHRLNKREATKDDIVLSLSDVMAVKVIDFLKRAKVTKGRVVLTGGITLNRHIIRFIREKAPQIEFIIPETAPVFEALGAAVMAPKSGSSLPSVDKLLKINEIRFGVLGALKDWKDKVQFFDKGEGKVRAGHRYILGVDGGSTTTKACLVDMETDEIVASHYGRTHGDPVKALKECLRYFQEKVFADTGVKKSIYGSCQRPVPAARFLACFWKRRACITKLSPTRWGLPTLTKKLKRFLKSAARTLSMCC

SEQ ID NO: 43455 - DNA, 609 bp, Unknown
  Obtained from environmental sample
  misc_feature (1)..(609): n is a, c, g, or t
gtgacagacggtattatcaactctaatgttgacgcggtaaaaagcatagtctgtatgggtaaacgcgcgagcattatgggcggccgcctgcgcgccggagaggagatcagcgccaatgttctgggaaatccgacaagcggcacggaaacaatttgcgaagtaggctttgatcccaagagcaaagtcgaattggaacggcttatgacccagaaaacgacttccactgacgagcttgaaactatcagaatggatcttcaggttttaattaatacaaagaaacagcgtaaaactctccctgaagagaaagaagcctacatgcaggaattaatggaaaggcgccaagttttaacagaggaattaaaaaaggtggaagaaaggatcgtaaaaatacaggaattcatgaacggcatacaaacccgcggaagagtatccgctgcaaagaaagtgtatccgggcgtaaaaataatgatccgcgatgttaaagaagaggttcgcagcgattaccgcgctacgacctttattttggaaaacggcctaatcagggtatcaaaatacgaagaacctaacgagatggcccaaaaaggacttgatggctatagctcccattga

SEQ ID NO: 43456 - protein, 202 aa, Unknown
  Obtained from environmental sample
  misc_feature (1)..(202): Xaa is any amino acid
MTDGIINSNVDAVKSIVCMGKRASIMGGRLRAGEEISANVLGNPTSGTETICEVGFDPKSKVELERLMTQKTTSTDELETIRMDLQVLINTKKQRKTLPEEKEAYMQELMERRQVLTEELKKVEERIVKIQEFMNGIQTRGRVSAAKKVYPGVKIMIRDVKEEVRSDYRATTFILENGLIRVSKYEEPNEMAQKGLDGYSSH

SEQ ID NO: 43457 - DNA, 333 bp, Unknown
  Obtained from environmental sample
  misc_feature (1)..(333): n is a, c, g, or t
ttgatggctatagctcccattgaccttcaaacattatttactcaattggacaaggttgccaaaactcaatccgcccaacgggagagtcaggttattcaacaggctatgcagggcgtccagcttcagcgtaaaacagaagaacaaattgagcaggtgaacgaagcccaaaatatgggagaaggcgttgagaaagtaaacgataaaaaacagaatgataaagataaagacggagaaaagaggaagaacagagaacagaccgaaaaagaagacgaagataaatcttctgttttaagggatcttaatttggggaaaaaaatagatataagcctatga

SEQ ID NO: 43458 - protein, 110 aa, Unknown
  Obtained from environmental sample
  misc_feature (1)..(110): Xaa is any amino acid
MMAIAPIDLQTLFTQLDKVAKTQSAQRESQVIQQAMQGVQLQRKTEEQIEQVNEAQNMGEGVEKVNDKKQNDKDKDGEKRKNREQTEKEDEDKSSVLRDLNLGKKIDISL

SEQ ID NO: 43459 - DNA, 633 bp, Unknown
  Obtained from environmental sample
  misc_feature (1)..(633): n is a, c, g, or t
atgaccttagacgtacggtcgaacgactatctgtacacccgcgatctcggactgataagggagatagacggcaaagttgagccggccaatcccatttacgccgaactgatagtccgaacactcaactggagtgtccagatgtcgctgcagcgggatcacgccgactacgaggttccccgctacctgaaggacggcaagattgacgtagactacttgctcaaggatttccaacgatattggcgggagaacagcgggatatggacagagtgctacgaaacgcagttttaccaatacaccgaagccgctccccacctggttctgcaagcattcctacagcgcgtgataaacggcggcggtcaaatcatccgcgagatggccttaggcaagacacgtgcggatctgtgcgtggtctacaatgggcgaaaatacccgatagagctgaaaatcctgcaaaacatgagaggcggtgtcaatgagggcatagagcaaatactgggatatatggacaaggttggctcgaatgtcgggtggctcgttatttttgatcgggatgcgggtaagagctgggatgagaagatttatacgcgggtggagacagcagaggggaagtgggttacaatttttggatgttga

SEQ ID NO: 43460 - protein, 210 aa, Unknown
  Obtained from environmental sample
  misc_feature (1)..(210): Xaa is any amino acid
MTLDVRSNDYLYTRDLGLIREIDGKVEPANPIYAELIVRTLNWSVQMSLQRDHADYEVPRYLKDGKIDVDYLLKDFQRYWRENSGIWTECYETQFYQYTEAAPHLVLQAFLQRVINGGGQIIREMALGKTRADLCVVYNGRKYPIELKILQNMRGGVNEGIEQILGYMDKVGSNVGWLVIFDRDAGKSWDEKIYTRVETAEGKWVTIFGC

SEQ ID NO: 43461 - DNA, 903 bp, Unknown
  Obtained from environmental sample
  misc_feature (1)..(903): n is a, c, g, or t
atgaatgaagacccaaaaagttttaatcaccttaaaaaagaagaggatagttctacttcagcggtagtcggcaatatgctggattatctgattgattacaaccctgtttcaaaggagtgggaacctcgtgtcgcttccgcaaggactgttgttgacgaaaaaaacggctctatgcaggttatctacacgttaagggaagatatttattggagttattataattcggacaaaaagataaaagtaacaagcgatgatgttatcttctggtatgatgaaataacaggcgatcctgagtttcaaagctcgcattattacgggcagtatctaaccatgcctgacggagaagaagctcatatcgatataaaaaaaattgacgaccgccgtttttcctttcatttccccagaattgtcgccgagccgtatttatcaactaacatggattttggtcctcgtcatgtttacgagccggtgaaaacacaggacggcgtagaaggtgtaaaaaaccttttcagcgtcgccgtcgatcctcaaaccatcccttctatgggcgaatggtttttagctgaatatactccaagccagagacttgtatacaaacgcaataaagattactggagaaaggacgcaaacggcgtaacgctcccctaccccgaagaaatgatcattcgtataattcccgaagaaaacacaaaacttttaatgtttaagaacggagatgttgaaagctacagccttcgtcccgaagacgttgacggacttataaacagaggcgacggaagctatactgtttttaacagcgaaagagctttaagcgcgtcgttttggacattcaccnanatccctgtaacgaaaaaaagccttcatacgaatggntttacaaaaaaagattccgtcaggctatga

SEQ ID NO: 43462 - protein, 300 aa, Unknown
  Obtained from environmental sample
  misc_feature (1)..(300): Xaa is any amino acid
MNEDPKSFNHLKKEEDSSTSAVVGNMLDYLIDYNPVSKEWEPRVASARTVVDEKNGSMQVIYTLREDIYWSYYNSDKKIKVTSDDVIFWYDEITGDPEFQSSHYYGQYLTMPDGEEAHIDIKKIDDRRFSFHFPRIVAEPYLSTNMDFGPRHVYEPVKTQDGVEGVKNLFSVAVDPQTIPSMGEWFLAEYTPSQRLVYKRNKDYWRKDANGVTLPYPEEMIIRIIPEENTKLLMFKNGDVESYSLRPEDVDGLINRGDGSYTVFNSERALSASFWTFTXIPVTKKSLHTNGFTKKDSVRL

SEQ ID NO: 43463 - DNA, 798 bp, Unknown
  Obtained from environmental sample
  misc_feature (1)..(798): n is a, c, g, or t
ttggacattcaccnanatccctgtaacgaaaaaaagccttcatacgaatggntttacaaaaaaagattccgtcaggctatgagctgccttcttaaccgtgacagaataaacgcgcaagtgtaccgcgggctggccgaacccaaactcaatctttttccggaaccgaatccttattataatccgaatattaaccttcaatatctttttgacgttaaacgcgcgcaggaacttttgtcctctatcggtattaaaaaagatttcaggggaattatgcgcgacagtaaaaaccggcggatagaattcaaccttgttatcagatcggaaagtaccatatatcaggataccgcgtccataatcagggacgagctttccaaaataggaattaaagtgaatattcgcattgtagatttccagaaacaggttgaacagttattcaatactttcgactgggattctacgttaatcgccctttccggttccaacatttttccaagtcaaggaagcaatgtctggccgacaacgggaaatcttcacctttggaatccgaaccagacaacgcccgctacggactgggaggcgcgtcttgattacctctacaacgaggggaaatttactatcgacagcgatagggcgcagggaatttgggacgaatttcaatcgattttaatggaacaatgcgctataattcaccttatgcgttcccgcggtttttgggcgattaataacaggtgggattttacaaatgtttattatgataacttaaacggcgcggaaacaagttttatatatctccggtag

SEQ ID NO: 43464 - protein, 265 aa, Unknown
  Obtained from environmental sample
  misc_feature (1)..(265): Xaa is any amino acid
MDIHXXPCNEKKPSYEWXYKKRFRQAMSCLLNRDRINAQVYRGLAEPKLNLFPEPNPYYNPNINLQYLFDVKRAQELLSSIGIKKDFRGIMRDSKNRRIEFNLVIRSESTIYQDTASIIRDELSKIGIKVNIRIVDFQKQVEQLFNTFDWDSTLIALSGSNIFPSQGSNVWPTTGNLHLWNPNQTTPATDWEARLDYLYNEGKFTIDSDRAQGIWDEFQSILMEQCAIIHLMRSRGFWAINNRWDFTNVYYDNLNGAETSFIYLR

SEQ ID NO: 43465 - DNA, 1173 bp, Unknown
  Obtained from environmental sample
  misc_feature (1)..(1173): n is a, c, g, or t
atgccttccgatacggcttcgttcttttccgctgaaccggagcagcgggccaaggcggtgtacgttgccggttccgaagaagaactagtgaggatcgcgaatgcggcggttcattctggggatctttcttccagggaatttgccctatgtttcccgggagagaccgtagaaacccaagtgatccagaatgaagaggctatgttttccccagaatcttttctcgaagacttcaaaaccgcattgatggctgttttgcctctcgccctagccctgatcattgcgattaccgtctttgcccgggatcgaattctaaattccgatacggtcgttttaggtatattatttgccgccatagggatgtttgccttaaaccttgggatgagtggtggtatcacggcgattagttcccaggcagggcgtgcgcttaggcaaacttatagggaaaccattctttctgaagagatcgtcgtgctgacgggggttgatgaaaattccttcgttaccatgcctggtgagagtgggccggagacctatatctggattcccggggataaaggccctgtcctggaaaaatttatcccggatcagcttactttggacaatacttattctcatattcatattagaaatggcatatttttacggtttgggagcttgggtacttatctttttattctgttgatagtatttttcctgggtttttttgcgattttcgcggaaccgggtcttgcggttaccgccgttactgtggaagaaatgaccatcggtacctttaaacgtcagagattaatattcctggctgctataggcgtggngcggggcatgatccttggttttgcgcggatactgatcagcaatatgctgccgactggaggtatccatctctcatggatactggcgccatgttacggtttagcccttctgctgactatcattgcgcctgaagatttttcttccattgcgtgggacgtggccggaattgcaaccggtcctatcaccgtgcctataattatcacggcaggccttggattgggacgcgattcccttcgctctgacggcgcgttcggcattgtggcgactgccagtgtcttccccataatcgcgattctcgtgtcgggaattatcgacatggcaaaatcaaaacgggcaatcaggagcggctatggcgaatga

SEQ ID NO: 43466 - protein, 390 aa, Unknown
  Obtained from environmental sample
  DOMAIN (187)...(377): Protein of unknown function (DUF1538)
  misc_feature (1)..(390): Xaa is any amino acid
MPSDTASFFSAEPEQRAKAVYVAGSEEELVRIANAAVHSGDLSSREFALCFPGETVETQVIQNEEAMFSPESFLEDFKTALMAVLPLALALIIAITVFARDRILNSDTVVLGILFAAIGMFALNLGMSGGITAISSQAGRALRQTYRETILSEEIVVLTGVDENSFVTMPGESGPETYIWIPGDKGPVLEKFIPDQLTLDNTYSHIHIRNGIFLRFGSLGTYLFILLIVFFLGFFAIFAEPGLAVTAVTVEEMTIGTFKRQRLIFLAAIGVXRGMILGFARILISNMLPTGGIHLSWILAPCYGLALLLTIIAPEDFSSIAWDVAGIATGPITVPIIITAGLGLGRDSLRSDGAFGIVATASVFPIIAILVSGIIDMAKSKRAIRSGYGE

SEQ ID NO: 43467 - DNA, 1239 bp, Unknown
  Obtained from environmental sample
  misc_feature (1)..(1239): n is a, c, g, or t
atgggagcggcagtgcgcggacttgggtataacgcagaggcgcttccagttgcgacaagcaaaactgtacagattgcgcgcgctcacgcgtccggcaaggaatgtgttccctctcatcttgtacttggcagtgcgctggagtttttcttcagcgaaaaataccgcaaggatgaactttatctgctctttgtgccgataacaacgggaccgtgcagaacaggccagtactatgtgttttacgaaaatcttttccgagatatgcgtttggaaaacgtagttgtctttatcctttccgctgataattcctacaccgaacttggaagcgattttgcgaaacaaatgtggatagggcttgtgttatctgactatctaaaagatattcagtgttcactcaaagcctgcgccgccgagcctgtaaaagcaattgaagaatttgagcatttatggcgcaaggttatgcacgctgttgagcacaatccgaatagtttatggaaagagttaaaacacgccgcaaacggcattagaaaaatcccgcttaaaagaaaacttgcgggctgtccgcgcgtgcttattgtaggcgagatttatgtgcgccgcgatgattttgcggtgggcgaacttatcgaccttatgagcgagcgcggcgttgtagtaaagatcgccggaatcagcgagtggattcactaccttgattttgtgcgcgaatatgatcttaacaaaatgatcaaactgcgcaagaagggaagcaggattttctctcctccatggatggaacttaaaaaacttcaaattgaggaatggtggaaacatcatattgagaaaaaagcaatcgctattctgaaaccgacaggccttattcccgaaacgcctcacgatatgcgccacataatgaaattcacccagaaacattttgttaatcttgaactccagtcggagattgcggtttcatcaggttcggctgccgctgcgatggacgcgggttattcaggcattgttaacatcagcccgtttgcctgccttatagggcgcgttatagaagggctttttactccgtgggcgcgggaacgcaactatccggtgctttccgtagaagtggacggcaaccttctgccgcctaacattgtaaacaaactgaatatttttatggttaacgtactgcgtttcaagggcgagggcgatgtttctacgttagttgacactcccgccgctgcgaatgatcagaaaaaagagtcagcatga

SEQ ID NO: 43468 - protein, 412 aa, Unknown
  Obtained from environmental sample
  misc_feature (1)..(412): Xaa is any amino acid
MGAAVRGLGYNAEALPVATSKTVQIARAHASGKECVPSHLVLGSALEFFFSEKYRKDELYLLFVPITTGPCRTGQYYVFYENLFRDMRLENVVVFILSADNSYTELGSDFAKQMWIGLVLSDYLKDIQCSLKACAAEPVKAIEEFEHLWRKVMHAVEHNPNSLWKELKHAANGIRKIPLKRKLAGCPRVLIVGEIYVRRDDFAVGELIDLMSERGVVVKIAGISEWIHYLDFVREYDLNKMIKLRKKGSRIFSPPWMELKKLQIEEWWKHHIEKKAIAILKPTGLIPETPHDMRHIMKFTQKHFVNLELQSEIAVSSGSAAAAMDAGYSGIVNISPFACLIGRVIEGLFTPWARERNYPVLSVEVDGNLLPPNIVNKLNIFMVNVLRFKGEGDVSTLVDTPAAANDQKKESA

SEQ ID NO: 43469 - DNA, 663 bp, Unknown
  Obtained from environmental sample
  misc_feature (1)..(663): n is a, c, g, or t
atggaacagcttacggtaaacattcataaactcaatactcatgttgaaaaacagagttcccaggtttcccgcgcttcgtccgctattgaacagatgatggcgaatatcaattcggttaccggaacgcttattaacaacgcggttaatgttaagacgctaagagaagcctccgaagtgggacataaaggcctgcaggatgtggcaaaggatattcaggaaatagcccacgagtcagaagggcttatggaaattaacgcggtaatggaaaacatcgccagccagaccaatttactttcgatgaacgccgcgattgaggcggctcacgccggggagtccggcaagggcttctcggttgtcgccggcgaaatccgcaaactggcggaaagttccaccgaacaatccaaaacaatcggcaatgtactgaaaaaaataaaagaatcaatcgacaagataaccaaatccaccgaaaacgtgcttggaaaattcgaggcgattgactcaagcgttaaaatcgttgcggatcaggaggagaatattcgcaatgcgatggaagaacagtctacgggaagcaagcaggtacttgaaggcataagcgaagtaaacgaattaaccgggcaggtaaaaacgcttccaatcaaatgcttgacggcgcaaaagaagtaa

SEQ ID NO: 43470 - protein, 220 aa, Unknown
  Obtained from environmental sample
  DOMAIN (16)...(220): Methyl-accepting chemotaxis protein (MCP) signaling domain
  misc_feature (1)..(220): Xaa is any amino acid
MEQLTVNIHKLNTHVEKQSSQVSRASSAIEQMMANINSVTGTLINNAVNVKTLREASEVGHKGLQDVAKDIQEIAHESEGLMEINAVMENIASQTNLLSMNAAIEAAHAGESGKGFSVVAGEIRKLAESSTEQSKTIGNVLKKIKESIDKITKSTENVLGKFEAIDSSVKIVADQEENIRNAMEEQSTGSKQVLEGISEVNELTGQVKTLPIKCLTAQKK

SEQ ID NO: 43471 - DNA, 369 bp, Unknown
  Obtained from environmental sample
  misc_feature (1)..(369): n is a, c, g, or t
gtgcttgtaaggacaaaagtaacgtctaataaatcgccgtggctttcacgtcttgaacttggcgctcattacattgttccggtatcgcatggcgaggggcgatttatcgcaagtgaggaacaaatccgccgtcttgcggcaaacggccagatagcgactcagtatgttgatttggacggtaacccttcgcaagatatacgctttaacccgaataattcaaatttcgcaatagaaggcattatatcgcccgacggcagagtcttcggccgcatggctcacaacgagcgcttcgacgacggtctttttaaaaatataccggaaataaggaagatggatattttcgcgggagcggtagattactttaaataa

SEQ ID NO: 43472 - protein, 122 aa, Unknown
  Obtained from environmental sample
  misc_feature (1)..(122): Xaa is any amino acid
MLVRTKVTSNKSPWLSRLELGAHYIVPVSHGEGRFIASEEQIRRLAANGQIATQYVDLDGNPSQDIRFNPNNSNFAIEGIISPDGRVFGRMAHNERFDDGLFKNIPEIRKMDIFAGAVDYFK

SEQ ID NO: 43473 - DNA, 573 bp, Unknown
  Obtained from environmental sample
  misc_feature (1)..(573): n is a, c, g, or t
atgaagatatgctgtgttgataccgccaggctgcccgccgaatggacagccggaaccgccgcccgcgccgttgattttttttcttttgtttccgccgctgacatacgctgggttgaacgttccgaggcagagacaaacagcgcgtacaaacagataattccgtatattgtagtagtgcaaagcggcgggcgtatcctgtgttatccgcggcatggcgcggaaagccgcctgcacgggttttattcctgcggcattggcgggcatatcgacatcgaagatgcgagagatacttttaaagaaacagttaacgccggcatgatgcgcgaattaaaagaggagcttgcgaattttcgggaagaccgtgtggagcttgtttacaggggcattatcaacgagacggaaagccccgtagggcaggttcatcttgggctggtgtacacctgtctgtgcctgggcgattacgcgccgcagccatcggaagaaacaaccggcatggaatggaaaaccccggaagaactgaaactcgtcaaaaaagagctgtggtctgatctggcgctggagctaattaagtaa

SEQ ID NO: 43474 - protein, 190 aa, Unknown
  Obtained from environmental sample
  misc_feature (1)..(190): Xaa is any amino acid
MKICCVDTARLPAEWTAGTAARAVDFFSFVSAADIRWVERSEAETNSAYKQIIPYIVVVQSGGRILCYPRHGAESRLHGFYSCGIGGHIDIEDARDTFKETVNAGMMRELKEELANFREDRVELVYRGIINETESPVGQVHLGLVYTCLCLGDYAPQPSEETTGMEWKTPEELKLVKKELWSDLALELIK

SEQ ID NO: 43475 - DNA, 639 bp, Unknown
  Obtained from environmental sample
  misc_feature (1)..(639): n is a, c, g, or t
atgtttacattctgtcctaaatgcgcgtcaaaaaatatcacttttaaggaagggaaatatttccattgccctgattgcggttttgtgtactatcataatacagccgcggctacaggctgcattattgaagctgatgggcggctgttgtttctagtacgcggaaaggagccctcaataggcaagttggatctgtgtggcggctttgtcgatccgggcgaaggcgcgcttgagggcctgtacagggaaatcaaggaagaactcggctggtcgccgcccattccgcaaggcgcatcgcttaacgaagtatttaccttctttgcctcgttttccaatcgctatccctataaaaatattatttacaatacctgcgatatgtatttttacctttccgcgccaggtttgtgcgagcgcgatcttgttctcgaaaaggcggaaatagaggccgtccgtttcctgaaacccgaagaaattaatatgggggaaatagcttttgattcaaccaggcgggcagtgcaggcgtatttacagataatagagaataaagggaagagaaaatttattgcgctacagcagatgccgcaatacattcccgtaccatttccccgattatttgagcgggcattttgttggttgacatag

SEQ ID NO: 43476 - protein, 212 aa, Unknown
  Obtained from environmental sample
  DOMAIN (33)...(173): NUDIX domain
  misc_feature (1)..(212): Xaa is any amino acid
MFTFCPKCASKNITFKEGKYFHCPDCGFVYYHNTAAATGCIIEADGRLLFLVRGKEPSIGKLDLCGGFVDPGEGALEGLYREIKEELGWSPPIPQGASLNEVFTFFASFSNRYPYKNIIYNTCDMYFYLSAPGLCERDLVLEKAEIEAVRFLKPEEINMGEIAFDSTRRAVQAYLQIIENKGKRKFIALQQMPQYIPVPFPRLFERAFCWLT

SEQ ID NO: 43477 - DNA, 1140 bp, Unknown
  Obtained from environmental sample
  misc_feature (1)..(1140): n is a, c, g, or t
atggggaaaggaagcaaccttgaaatgataaaacctcttctgcgaaaggccgagtgcagagtgggcggcggcataagaacaccccagcaggcgcgggaattagtaagtcttggggcgcggaagataatcgttggctcgggcgctttccgagatcccgcaaaaaaaggcgcgggcattgccggcggcgagttcgcggtaaatatccccttccttgaatccatgtcgaagaaaattgggcgggaacggctgattgtcgccgttgacgcccgcgccggtgaaattgtcgtagacggctggaaaacccccaccggccttgatctcattgaggcggcaaaagccgtcgagccttttgcccaggagttgctctttacctgcgtagaacgcgaaggcaccatgaccggcatcgatcttgtccccgcgcgaaaattgcgcgaagcggtcaactgccaaataaccgttgccggcggcgtttcaaccttgggtgaaattgaggaaattgccgcccttggctgtgacgtacagcttggcatggccttgtacaccggaaaaataagtctcgccgaagcctttgttacatcgctaaactggaaaaagggagagtccttactcccaataatagttcaatcccctgacggtcagatactaatgaccggctttaccgacaaagaagcgttagctgaaacatttaaacgcggtaatgtctgcttccacagccgcaccaggaataaactctggatgaagggtgagacatcgggcaatacgttaaaattgctgcgtttgcggacagactgtgacagggacgcccttcttgcgatagcggaaccggcgggccccgtctgccacacgggcgcgtggtcgtgtttcgcggctaacagggattatacattgcggtttttgcaggacataattcaggagcgttttcgcaatcccgcgcccggctcgtatacggccacccttgacgacgagcttgtccgtgaaaaaataatggaagaggcgaaggaactctgcgacgcgaaggcccatgatgaaatcgtctgggaggccgccgatttgttttactttgcggcagtcctgatgacaagggcgggagtcgccgtccaggaaattcttgacgaactcgacaggaggcataaaaaataa

SEQ ID NO: 43478 - protein, 379 aa, Unknown
  Obtained from environmental sample
  DOMAIN (1)...(185): Histidine biosynthesis protein
  misc_feature (1)..(379): Xaa is any amino acid
MGKGSNLEMIKPLLRKAECRVGGGIRTPQQARELVSLGARKIIVGSGAFRDPAKKGAGIAGGEFAVNIPFLESMSKKIGRERLIVAVDARAGEIVVDGWKTPTGLDLIEAAKAVEPFAQELLFTCVEREGTMTGIDLVPARKLREAVNCQITVAGGVSTLGEIEEIAALGCDVQLGMALYTGKISLAEAFVTSLNWKKGESLLPIIVQSPDGQILMTGFTDKEALAETFKRGNVCFHSRTRNKLWMKGETSGNTLKLLRLRTDCDRDALLAIAEPAGPVCHTGAWSCFAANRDYTLRFLQDIIQERFRNPAPGSYTATLDDELVREKIMEEAKELCDAKAHDEIVWEAADLFYFAAVLMTRAGVAVQEILDELDRRHKK

SEQ ID NO: 43479 - DNA, 429 bp, Unknown
  Obtained from environmental sample
  misc_feature (1)..(429): n is a, c, g, or t
atgccgataaacatagttattgatgcaaatttgtggatttcttttcttataggaaaaagattgaaaagtttgaggcatttatgcctgaataagaatatttccgtgttttattgcgatgaaattattggagaatttattgatgtgagcaacagaccaaaaataaagaaactaggaataaagaaaagaaatgtttctgttgtgttaaaatttattagaacgcattgcaccaaagctgaaattaaaggtgttgcagaaagcaaagttagagatgcaaaggatttatatttgctttctttttcagatgcagttaatgcgaattttttgcttacaggcgacaaaggtcttcaatctttggaaaggcataatattacaaaaataatttcttattctgaatttatgtccatatttgacgatttagtgaattcttaa

SEQ ID NO: 43480 - protein, 142 aa, Unknown
  Obtained from environmental sample
  misc_feature (1)..(142): Xaa is any amino acid
MPINIVIDANLWISFLIGKRLKSLRHLCLNKNISVFYCDEIIGEFIDVSNRPKIKKLGIKKRNVSVVLKFIRTHCTKAEIKGVAESKVRDAKDLYLLSFSDAVNANFLLTGDKGLQSLERHNITKIISYSEFMSIFDDLVNS

SEQ ID NO: 43481 - DNA, 336 bp, Unknown
  Obtained from environmental sample
  misc_feature (1)..(336): n is a, c, g, or t
atgagaaacggaaatacaatccaaatttcaaacccctcgaattcgaggggtttagaaacctccattatctacgcgagcgaagccgatgtcttaaatgtggctctatttggaatgaccgcaaagcaatggcgagataaaaataacgatttgaaaggcaatataagagattatgcctctataaatgagttgatatgtctttcaaatatggaaaacataaatgcagtattgataaatgacggtattccacaaaaagaacggctaataaaattaaatggaatagctattcagcaaatgagtattctaagcgaagcggagaataagaaacttttaagataa

SEQ ID NO: 43482 - protein, 111 aa, Unknown
  Obtained from environmental sample
  misc_feature (1)..(111): Xaa is any amino acid
MRNGNTIQISNPSNSRGLETSIIYASEADVLNVALFGMTAKQWRDKNNDLKGNIRDYASINELICLSNMENINAVLINDGIPQKERLIKLNGIAIQQMSILSEAENKKLLR

SEQ ID NO: 43483 - DNA, 330 bp, Unknown
  Obtained from environmental sample
  misc_feature (1)..(330): n is a, c, g, or t
ttgataaaatctgcaaaaaagtctattgttctaattgacaattacattgacgaaagtgttttaatgttgctttcaaaacgaaataccaaagtatcggcaaagatttacacagcacatatttcacagcaactgcaattagacatccaaaaacacgcagcccaatatccaacaattactgtggataaattttcaaaatcacacgacagatttctgttaattgacgattgtacatatcacataggggcatcactaaaagacttgggaaaaaagtggtttgccttttctaaaatgcaaataaaagcaaacgatttactgaaaaatatttgttga

SEQ ID NO: 43484 - protein, 109 aa, Unknown
  Obtained from environmental sample
  misc_feature (1)..(109): Xaa is any amino acid
MIKSAKKSIVLIDNYIDESVLMLLSKRNTKVSAKIYTAHISQQLQLDIQKHAAQYPTITVDKFSKSHDRFLLIDDCTYHIGASLKDLGKKWFAFSKMQIKANDLLKNIC

SEQ ID NO: 43485 - DNA, 1773 bp, Unknown
  Obtained from environmental sample
  misc_feature (1)..(1773): n is a, c, g, or t
gtgatcgcgagagagaatatggttcccctcggcacttactggataaatcagcttaccgaggaattggcaaacatacccaacagatcatacaccgtcctttcagcggggactacgggagcggactggacgattacgggtgaaattattgataccgccgaaggtccaatccgggtttatacccgtcttatccgcgcggaagaccgggccgttgaggcaagtttccattttgactttgagcgaaatgaacggataatcgcattgcttgtttcggggggaagccaggggggcggcggtcgttcttcatcgtcagtagcgccggatgccctggaacccgacagttttgagaatcccgtaccccatgaaatcggcgctgatgaaaacgcgcagcttgtaaaccgcactctgcacagcggagacgaggactttttcctcctcatttctgataaagacggacggcttacaatggaaacaacgggcagtaccgacacctacatggaattttacgatgccgagacgcgggagaaactggcgcaaaacgatgacggaggcagcggcagcaacgcgcggatcagatacagtgtacaagccggaaagcgttatatctcgaaaataagaggctatgacggaagcaccgggtcttacggtttccgcgcctatatttccatacgtacctcttccggcagttttgataatcccctgtcttatgaaataggccaagatgaaaatgtccctgtcatgaaccgctctctggataatgatgacgaagactatttcctcctcgttcccgccaatgacggacagcttatagcggagacaacgggcagcactgacacctacatggaattttacgatgctgagtcacgggaaaaactgggacaaaacgatgacggtggcagcggcagcaacgcgcggatcagatacagcgtgcaggcgggaaaaagctatatcgcgaaagtaagaggctatgacagaagcaccggatcttacggtttccgcgcgtatctttccatacggacctcttccggcggttttgaaaaccccctgacttttgaaatcggctctgatgaaaacgtcccggttatgaaccgcaatcttgacgatgatgacgaagactatttcctccttattcccgccagtgacggacagcttatagcggaaacaacgggtggcactgacacctttatggagctttacaacgccgaaacacggcaaaaacttgcggaagacgatgacggaggatcgaggagcaacgcgcgaatcaggtacaacgtggaggccggaaagcgttatattgccaaagtaaggggctatgacggtgataccggggcttatggtttccgcgcatatatgcgcgtgcaggtcaggcttaccccggacgagtatgaaccggataatgatgcggcttccgccaaacagatagaaatcggaacaccccaacagcataccttccacgacaccaatgacgtggactgggtaaaatttcagataacgcagccgggaccttacattatccgggcgaggggtgccaattcaaaccgtctggacacctatattgaactcttcgactcaaacgtaagttccattgacgaggatgacgacggcggagaaggcgtggattcccgccttgccctgcaccttgaaaacggcctttactatttaaaggtgaatgccttgacgagaaccccagtcagccatacatcattagcattgaaagtgaaagcgctatggaaaaagaaagctttcccgttggttcaaatatttttatttttttaa

SEQ ID NO: 43486 - protein, 590 aa, Unknown
  Obtained from environmental sample
  DOMAIN (368)...(448): Bacterial pre-peptidase C-terminal domain
  misc_feature (1)..(590): Xaa is any amino acid
MIARENMVPLGTYWINQLTEELANIPNRSYTVLSAGTTGADWTITGEIIDTAEGPIRVYTRLIRAEDRAVEASFHFDFERNERIIALLVSGGSQGGGGRSSSSVAPDALEPDSFENPVPHEIGADENAQLVNRTLHSGDEDFFLLISDKDGRLTMETTGSTDTYMEFYDAETREKLAQNDDGGSGSNARIRYSVQAGKRYISKIRGYDGSTGSYGFRAYISIRTSSGSFDNPLSYEIGQDENVPVMNRSLDNDDEDYFLLVPANDGQLIAETTGSTDTYMEFYDAESREKLGQNDDGGSGSNARIRYSVQAGKSYIAKVRGYDRSTGSYGFRAYLSIRTSSGGFENPLTFEIGSDENVPVMNRNLDDDDEDYFLLIPASDGQLIAETTGGTDTFMELYNAETRQKLAEDDDGGSRSNARIRYNVEAGKRYIAKVRGYDGDTGAYGFRAYMRVQVRLTPDEYEPDNDAASAKQIEIGTPQQHTFHDTNDVDWVKFQITQPGPYIIRARGANSNRLDTYIELFDSNVSSIDEDDDGGEGVDSRLALHLENGLYYLKVNALTRTPVSHTSLALKVKALWKKKAFPLVQIFLFF

SEQ ID NO: 43487 - DNA, 1728 bp, Unknown
  Obtained from environmental sample
  misc_feature (1)..(1728): n is a, c, g, or t
atggtcaggatttcggcacgagctctcactaaatatattgtcgatatttcagaccattttgttgttctttacacagacggaagaggtctggctgatgttaacaaccttccttcccccgcaataattattcatgaacctcgctacctgactgtttttaacctaccacaatcagtttctaaatttagttttagcaaggttttcgttcataatcaggcaggccctgtcgcaaagtgcgccgattattcgcaagtagtcttgtccgttcaccagaataaggctaccgccaaaatccctttgctttacaattctttggatcaagattttactgaaactggcgtcttttacgtcgtcttcgatattaatatcgatgttgaaacacgctttactcttacccttgacgatcaggttaaagtttctttcattaacggtaatggtaatcttgatattcttaatatcccggataaacctgtgccttaccttaccttaaggggtcttccgttaaacgctacaaaacaacatgtttctaatgtcaatgtctataacctcgcgggttctgtcgccgcttgtgctgacactaaaaatattgttgtctccaaaaataatgaatatctaactttcttaatacctctttcttctgcttcgaacggcggctatttccaagatacaggaaggttcgccattgagttcactattaacgtggattacgaaactcaaatctcttattcccatagtgataaagttatcctctcctttgttaatggctcggccgaatttgacattaattctttctttggcttctttgatgcttctttgtcaaatgcttatgattctaacagacctgttattagagcgggatcttccttcgacgttaacggaaaaagatggacaattaaaagcgattatcaggtaaacgctttctcgccaaattcttcctgccttctgtatctttatgcttataacacagacgatgatgtcattttcgaattttcaccaacagcgccttcttataagcctaaccgtaaaagttggtataacggcaataaacgcgccctgtggaaaatggtctacattaacccatctcaattcttatttaaaacttatatcgaaaatgattttccccagcttgggacattgactctcgcttactcggattattcccaaattgtttcggctaaacctgttcataaatccattaacggcgccgttaatcctgcgccggaaactattactcttagtccaggtatttatgcaattgaacttgttggcgcaggcggcggagcaggaagcaattatgacggtacagccaatccgggcggttcagggggcgttgtcagagaattaattacccttaactctaatacttcttttaccgccttcactggttccgccggcgagtccgctggtgtttcttcttacataggtacattagccattgtcactactaaaaattattatacttatactacccagactttagaatatggcgggtacattcagttcgacccgtctgcatttgtttctacaaatactgttattaatgctgtctctgtttcaggaactgactactctaaagtaggcggtatgtcagggggtggcggcggcggcggcggctctggaacattcatttattccccagccggttacttccttgttgctggcggtggaagcggcggctcaggcggctcttacttactccggggggtggcggaggctcaggcggcactatag

SEQ ID NO: 43488 - protein, 575 aa, Unknown
  Obtained from environmental sample
  misc_feature (1)..(575): Xaa is any amino acid
MVRISARALTKYIVDISDHFVVLYTDGRGLADVNNLPSPAIIIHEPRYLTVFNLPQSVSKFSFSKVFVHNQAGPVAKCADYSQVVLSVHQNKATAKIPLLYNSLDQDFTETGVFYVVFDINIDVETRFTLTLDDQVKVSFINGNGNLDILNIPDKPVPYLTLRGLPLNATKQHVSNVNVYNLAGSVAACADTKNIVVSKNNEYLTFLIPLSSASNGGYFQDTGRFAIEFTINVDYETQISYSHSDKVILSFVNGSAEFDINSFFGFFDASLSNAYDSNRPVIRAGSSFDVNGKRWTIKSDYQVNAFSPNSSCLLYLYAYNTDDDVIFEFSPTAPSYKPNRKSWYNGNKRALWKMVYINPSQFLFKTYIENDFPQLGTLTLAYSDYSQIVSAKPVHKSINGAVNPAPETITLSPGIYAIELVGAGGGAGSNYDGTANPGGSGGVVRELITLNSNTSFTAFTGSAGESAGVSSYIGTLAIVTTKNYYTYTTQTLEYGGYIQFDPSAFVSTNTVINAVSVSGTDYSKVGGMSGGGGGGGGSGTFIYSPAGYFLVAGGGSGGSGGSYLLRGVAEAQAAL

SEQ ID NO: 43489 - DNA, 807 bp, Unknown
  Obtained from environmental sample
  misc_feature (1)..(807): n is a, c, g, or t
ttgcacccatacaaaaaaggtatcagcatgactaaaacaacacagtctcgttctgcagcttcattaaacaaaaaagaaaatgatttaatcatacgcatagtaaataaaaaaaacaaaataaaaaatactacttcaataataaaaatatcgactataaccattatttgtgttcttcttgtatttatagttatttcaattttcggtatacattcaatgaaaacaacaagcattaaacctgctatcctcattggaaaagataaactaaaaaacgatatgtatttttttacaaacagactatcaactgaatatggacaattaaaacttatagacggcgaactaatcgggcaggaaggcatttccctaaaaaacaattataaattggtagatgaaataagttccgattataatattgaggcaacagtctttgcccgtaacggtaatgacttccgcctaataagtaccagtattgtagacaacaccgganaacgtgcggttgatacttttcttgaaagagacaatgccgcatatcagcacatacaaaacggtaacggttatataggaaaagatgtcattctcggtaaaaattatattaccaaataccgcccgattttcacggaaaacggaaaagaagtaatcggcattttgtttatcggatttgatatgactgcaatcgaaaaagtaattaacagcaatattgttaaatacattataagaatgacagttatcacgtttatcattttattggcttccgtctcatttttaggaatgggatttaaatttaaattttttagtttaaaagaaaggtag

SEQ ID NO: 43490 - protein, 268 aa, Unknown
  Obtained from environmental sample
  misc_feature (1)..(268): Xaa is any amino acid
MHPYKKGISMTKTTQSRSAASLNKKENDLIIRIVNKKNKIKNTTSIIKISTITIICVLLVFIVISIFGIHSMKTTSIKPAILIGKDKLKNDMYFFTNRLSTEYGQLKLIDGELIGQEGISLKNNYKLVDEISSDYNIEATVFARNGNDFRLISTSIVDNTGXRAVDTFLERDNAAYQHIQNGNGYIGKDVILGKNYITKYRPIFTENGKEVIGILFIGFDMTAIEKVINSNIVKYIIRMTVITFIILLASVSFLGMGFKFKFFSLKER

SEQ ID NO: 43491 - DNA, 699 bp, Unknown
  Obtained from environmental sample
  misc_feature (1)..(699): n is a, c, g, or t
atggcaaagacaccaattactccggttatacggattgatgaagaaaagtgcgttaattgttacgcctgtattgccgaatgtcctgtaaaatactgcatggacgcatcaaaagaaaaagtgttaataaattcagacctttgtatcggttgtggcagttgcatattagcctgccaccatgaagcaagaacgccgattgacgacacaccacgtttcttttcagaccttaaacaaggaaatgaaattatcgccgttgtagctccagccgttgcgtccgtgtttcccgacaagcacctaaaccttaacggttttttaaaatcgcttggcgttaaagatttttttgacgtaagcttcggcgcagaattaaccgttgtttcatacctcaattacataaaaaataaaaatccgaaaatggtaatagcgcagccctgtcccgccattgtcagctttatcgaaatttatcaccctgaattaataccataccttgcgcctgcggacagcccaatgcttcacactgcaaaaatgatcagagaatattatccgaaatataaaaatcataaaatcgcaatgatttctccatgtatcgccaaacgccgcgagtttgacgagaccagatttgcggactacaacattaccatggttgccctgaaaaagtatttgcaggcgcaaaaaaataaacttatcttctttttcaaaagttga

SEQ ID NO: 43492 - protein, 232 aa, Unknown
  Obtained from environmental sample
  DOMAIN (10)...(33): 4Fe-4S binding domain
  misc_feature (1)..(232): Xaa is any amino acid
MAKTPITPVIRIDEEKCVNCYACIAECPVKYCMDASKEKVLINSDLCIGCGSCILACHHEARTPIDDTPRFFSDLKQGNEIIAVVAPAVASVFPDKHLNLNGFLKSLGVKDFFDVSFGAELTVVSYLNYIKNKNPKMVIAQPCPAIVSFIEIYHPELIPYLAPADSPMLHTAKMIREYYPKYKNHKIAMISPCIAKRREFDETRFADYNITMVALKKYLQAQKNKLIFFFKS

SEQ ID NO: 43493 - DNA, 726 bp, Unknown
  Obtained from environmental sample
  misc_feature (1)..(726): n is a, c, g, or t
ttgcttgacaccgcagaacgttttgtaccgggcatacggagaaacacagagaaaatcgaaggagtacacagcatatacgcctacttgatagaaacagcggaagcattaaatgatcctgatgaagaattacctctattaatcgactgcctgaattgcgaaaaaggctgtaacggcggtcccggtacgggtaacagccagctgtcaataaacaaacttaaaaaaccaatccgcaaacgaagcgcagaacttgaacaacatatcgcacccaaacaaaaaaaagaacagtacgaaaaatatcacaaactgctgaaccagtactggaaaccgggcctgtatgatcgcggttatcgtaatctttcagaaaactatgacaagaaaacacctaacgaaattgaattgaacgcaatttacctcaagatgaaaaagttttcacaggaagatatatacgattgcggagcctgcggatataaaagatgcagaagaatggcaacggcgatttttaacggtattaacaaacccgagaattgcgcccattatacccttgccgtactcgcggaaaaaacaagtaccgaagaattaaaccgcaagcttcaggaacacatcagccaggcgtcaatacttattgacggaataaataaattggtgcaggatttaaacgctactatcggttcgcaggcaacggcagtcaatcattcggcggcggaaaccgagctcgtgccgatctga

SEQ ID NO: 43494 - protein, 241 aa, Unknown
  Obtained from environmental sample
  DOMAIN (149)...(179): Putative Fe-S cluster
  misc_feature (1)..(241): Xaa is any amino acid
MLDTAERFVPGIRRNTEKIEGVHSIYAYLIETAEALNDPDEELPLLIDCLNCEKGCNGGPGTGNSQLSINKLKKPIRKRSAELEQHIAPKQKKEQYEKYHKLLNQYWKPGLYDRGYRNLSENYDKKTPNEIELNAIYLKMKKFSQEDIYDCGACGYKRCRRMATAIFNGINKPENCAHYTLAVLAEKTSTEELNRKLQEHISQASILIDGINKLVQDLNATIGSQATAVNHSAAETELVPI

SEQ ID NO: 43495 - DNA, 606 bp, Unknown
  Obtained from environmental sample
  misc_feature (1)..(606): n is a, c, g, or t
ttgcagggcactggaacgggtgttggaaaaacctgtgtatctgcctttttattggattatttcaaggtgacaagaaaaaagaaagttttgtattacaagcccattcaatgcgggcagccaacagatatggactttataaaaaaagtgaccaaaacaaaacccaaagacatatattgctcctataaccttaaaaccccaagctcgccgcattttgcctttgctagggaaaatgttaaatttgaaaaaaatgtgataagaaaatttttggcaaatgcaaaaaaacaatacgattttatagttatggaagcagctgggggcataagggttccaataaccgaaaattttgatatggcagatttggcaaaactctctaattttaaggttttgctcgtggcttcccctggtcttggcaccataaaccacaccttgctttccatagactatttaaaatcaaaaaaagttgaaatcataggttttgtgttttccccagcgagttttgttgacgaactaaccgaagaaataattgcggacaatgccaaaacaatagagaaaatttcgggagttccctacaagggaaccgcactgccagtaccctttatcccttaa

SEQ ID NO: 43496 - protein, 201 aa, Unknown
  Obtained from environmental sample
  DOMAIN (1)...(197): CobQ/CobB/MinD/ParA nucleotide binding domain
  misc_feature (1)..(201): Xaa is any amino acid
MQGTGTGVGKTCVSAFLLDYFKVTRKKKVLYYKPIQCGQPTDMDFIKKVTKTKPKDIYCSYNLKTPSSPHFAFARENVKFEKNVIRKFLANAKKQYDFIVMEAAGGIRVPITENFDMADLAKLSNFKVLLVASPGLGTINHTLLSIDYLKSKKVEIIGFVFSPASFVDELTEEIIADNAKTIEKISGVPYKGTALPVPFIP

SEQ ID NO: 43497 - DNA, 492 bp, Unknown
  Obtained from environmental sample
  misc_feature (1)..(492): n is a, c, g, or t
atggtcttgcctgtgccgaagcctccgggtatggcggcagttccgcccttggaaagtgggaagaacacgtcgataaccctttggcctgtgactaaaggcgtgtccggggaaagcctctcggcgttgggcctcgggatgcgtaccggccaccactgcgcgagcggaatctcaatgccccggagcgtacgcgccgtaacagaagaaaccgttagttcttcttcgccgcttaactcggtgatgaaatctccgggccgaatgccagggggaaccatgatcttgcaggtgatgctttcggtttccttcacggcgcccaaaacaaggccgggagcggcaggaatttttccgccctctttaagttttgccgccagaagtggatcgggaataaaacgccattttttgtcaggatccaggggatgtccccggctgccagactccatgaaagccccgttttgcgcgtatagttcctcaagggggcgctgtattccatcgtag

SEQ ID NO: 43498 - protein, 163 aa, Unknown
  Obtained from environmental sample
  misc_feature (1)..(163): Xaa is any amino acid
MVLPVPKPPGMAAVPPLESGKNTSITLWPVTKGVSGESLSALGLGMRTGHHCASGISMPRSVRAVTEETVSSSSPLNSVMKSPGRMPGGTMILQVMLSVSFTAPKTRPGAAGIFPPSLSFAARSGSGIKRHFLSGSRGCPRLPDSMKAPFCAYSSSRGRCIPS

SEQ ID NO: 43499 - DNA, 1449 bp, Unknown
  Obtained from environmental sample
  misc_feature (1)..(1449): n is a, c, g, or t
ttgaagatgtggaagtgggtaactactatgattacacctaacggttacggcttgccggacccggaagaacttgaaaggtgggcgttaacttatttcccggaacttcaggaaaaagagatcaataaggtcgaagacgccaagactgaatattcccccgtcgtcgtgccgtatacaagtacgcctaccggcgcgccttccgaagagacgctttttaaaagctctcctttgggagcgggcggttttgacgtaaaccgtattcgcggcgatttccctattctgaacgagagagtcgcgggcggcaaacagcttatctggcttgacaacggcgctacaacgcaaaagccaaacgccgtaatagaccgcatctcttatttttacagacacgaaaattcaaacgtccaccgcggcgcgcacgaacttgccgcccgttccacagacgcttacgaagcggcgcgggaaaccatcgccaaatttataggcgctccctcaaaagacaatattgtctttgtgcgcggaacaacggaaggcgttaaccttgtggctcaaagttacgttaaacccctgctttcacccggcgatgaaataatactcactatccttgaacaccacgccaacattgtcccctggcaaatcatagcgcaggaaacaggcgcggtaataaaagtcgctcccgttgacgatacgggacagatcattttgtccgaatacgcgcgcttgttctgcccgcgcacaaagtttgcctcagtaacgcatgtttcaaacgcgttgggaacaattaccccggttcacgagatgattcagatagcgcacggtaacggagtgcgaatccttatcgacggagcgcagtctgtagcgcatacgccgcttaatgtcagcgagttggacgcggatttttttgtgttttcgggacacaagattttcggtcctacgggcataggcgcggtgtacggaaaagcggacgctcttgaagaagccaaaccgtatcagggcggcggcaatatgataagggacgtaacttttgaacgcacggtatacaatcccgcgccttccaagtttgaagcgggaaccggcaatatgcccgatgccgtgggccttggcgcggcgctggattatgtttcgggcattggaattgcgaacatcagcgcttacgagcatgaactgcttgattacgcgacccgcgaactcaagcgcataaacggcctgcgccttatcgggactgccgcggaaaaggcgagcgttttgtcttttgtgctggacggcgcgagcgtggagcaggttggcaaacacctcgcgagccacggtattgccgtgcgcgccgggcaccactgcgcacagccgatcttgcgccgctttggactggaagcgacagtacgtccaaccattgcgttttacaacacggcggaagaaattgacaaactggtgggcgcgatcagggaacttgcgcggtaa

SEQ ID NO: 43500 - protein, 482 aa, Unknown
  Obtained from environmental sample
  DOMAIN (139)...(423): Beta-eliminating lyase
  misc_feature (1)..(482): Xaa is any amino acid
MKMWKWVTTMITPNGYGLPDPEELERWALTYFPELQEKEINKVEDAKTEYSPVVVPYTSTPTGAPSEETLFKSSPLGAGGFDVNRIRGDFPILNERVAGGKQLIWLDNGATTQKPNAVIDRISYFYRHENSNVHRGAHELAARSTDAYEAARETIAKFIGAPSKDNIVFVRGTTEGVNLVAQSYVKPLLSPGDEIILTILEHHANIVPWQIIAQETGAVIKVAPVDDTGQIILSEYARLFCPRTKFASVTHVSNALGTITPVHEMIQIAHGNGVRILIDGAQSVAHTPLNVSELDADFFVFSGHKIFGPTGIGAVYGKADALEEAKPYQGGGNMIRDVTFERTVYNPAPSKFEAGTGNMPDAVGLGAALDYVSGIGIANISAYEHELLDYATRELKRINGLRLIGTAAEKASVLSFVLDGASVEQVGKHLASHGIAVRAGHHCAQPILRRFGLEATVRPTIAFYNTAEEIDKLVGAIRELAR

SEQ ID NO: 43501 - DNA, 540 bp, Unknown
  Obtained from environmental sample
  misc_feature (1)..(540): n is a, c, g, or t
atgattacgcgcttgttaaaaaatatttccgacaatcagcgcataagacccggaaacaaggccggttcacccatgcccgatgatttagacgaattactttcaaaagtgtggaaagaacccgcatttttcttggcgcacccgcgcgctatcgcggctttccagcgcgaatgcacgcgcaggggcgttccgccgtcaaccacgtcgctctttggcggttcttttattctgtggcgcggtattccaattattccgacagacaaactgtttgtggacggcttgaaaaacccaaagagcaagggcggaaaaaccaatattctgctggtgcgcaccggagaggcaaaacgcggagttgtcggtttgtaccagacaggtttgcagaacgaacaaggcagaggactttccgtacgtttcaggggagtagataacaaaggactcgcgtcctacctcctgtcgctgtactgctcagccgcaattctcgctgacgacgccatagccgttcttgaagatgtggaagtgggtaactactatgattacacctaa

SEQ ID NO: 43502 - protein, 179 aa, Unknown
  Obtained from environmental sample
  misc_feature (1)..(179): Xaa is any amino acid
MITRLLKNISDNQRIRPGNKAGSPMPDDLDELLSKVWKEPAFFLAHPRAIAAFQRECTRRGVPPSTTSLFGGSFILWRGIPIIPTDKLFVDGLKNPKSKGGKTNILLVRTGEAKRGVVGLYQTGLQNEQGRGLSVRFRGVDNKGLASYLLSLYCSAAILADDAIAVLEDVEVGNYYDYT

SEQ ID NO: 43503 - DNA, 789 bp, Unknown
  Obtained from environmental sample
  misc_feature (1)..(789): n is a, c, g, or t
gtgcgcgtgtgtcaggtggacggtcagcttgttgtaaacccgacctatgaacaaatagaaaaatccacaatggaaatcatggttgcgggaacaaaagacggcattacaatggtagaaggcggagcgaaagaagtaagcgaagagctgatgatcgaagcgcttgataaagcccacgcgcagattaaagaattctgcgctttgcaggaaaaattgcgcgagcttgccggaaagccgaaacttccccttgctcctctgccgtattctttggaaaatgcggacgctatccgttccgtagcttttccgaaactgcaaaccgcctgcttccttcccacaaaacacgaaaggcacgacggcattaaagctgtaaaaaccgaattggcggctcaacacgccgcgcagcttgaagatgaaaaccagaaaaaacttttcgacgcgttatttgaagatatgcagtatgaaatcctgcgctcatcaattttgaataacggaaagcgcgtggacggcagaggtttggaagacatccgcagcattacctgcgaagtcgggattttacagcgcactcacggttccgctctgtttacacgcggcgaaacacaggcgcttgccgtaacaacattgggaacggtttttgacgaacagattttcgacgacatcgaaggcgataaacgcgagaactttatgctccattacaacttccctccgtattcggtcggcgaagtcggcagaacgggtacggggcgcagagagataggacacggacaccttgcacagcgctctttaaggcgatga

SEQ ID NO: 43504 - protein, 262 aa, Unknown
  Obtained from environmental sample
  DOMAIN (173)...(262): 3' exoribonuclease family, domain 1
  misc_feature (1)..(262): Xaa is any amino acid
MRVCQVDGQLVVNPTYEQIEKSTMEIMVAGTKDGITMVEGGAKEVSEELMIEALDKAHAQIKEFCALQEKLRELAGKPKLPLAPLPYSLENADAIRSVAFPKLQTACFLPTKHERHDGIKAVKTELAAQHAAQLEDENQKKLFDALFEDMQYEILRSSILNNGKRVDGRGLEDIRSITCEVGILQRTHGSALFTRGETQALAVTTLGTVFDEQIFDDIEGDKRENFMLHYNFPPYSVGEVGRTGTGRREIGHGHLAQRSLRR

SEQ ID NO: 43505 - DNA, 801 bp, Unknown
  Obtained from environmental sample
  misc_feature (1)..(801): n is a, c, g, or t
atgattccctcaaaagatgaattcccgtatacagtccgcgttgtctcggaaatcatggagtctaacggctcttcttcaatggcttcagtttgcggcggaactctttccatgcttcacgccggagtcccgatgaaaaaacccgtagccggaattgcgatggggcttatcacggaaggaaaagccggtcccggcgacagattcgcggtgttatctgatattctaggcgaagaagatcaccttggggacatggattttaaagtcgccggaaccaaagacggaataacaggctttcagatggatataaaaatcgccggagtcagtcaggaaattatgcgcaaagcgctggatcaggcgaaacgcggaagaatgcatatcctttcgataatgaatcaatgtctggataaacctgtcgaggaaatcagcgaatacgcccccaaaattgttactttacggattgatatcgataaaatcggagcgcttatcggtcccggcggaaagaatatcaaggcgttatgcgaacaatattctgttaagattaacacggaagacgacggcactgtgacaattttcggcaaaacttcaaaagacgcggaagacgcgaaagcggcggttgtcggaatagcctgcgatccggagattgacaaggtatacaacggcactgtaaagcgcataatggactttggcgcgtttgtggagattctccccggtaaggaaggacttgtacatataagcaaactttcaaggcagaggatcgagaaagttaccgacgtgttaaaggaaggtcagcagatacccgtttaa

SEQ ID NO: 43506 - protein, 266 aa, Unknown
  Obtained from environmental sample
  DOMAIN (210)...(266): S1 RNA binding domain
  misc_feature (1)..(266): Xaa is any amino acid
MIPSKDEFPYTVRVVSEIMESNGSSSMASVCGGTLSMLHAGVPMKKPVAGIAMGLITEGKAGPGDRFAVLSDILGEEDHLGDMDFKVAGTKDGITGFQMDIKIAGVSQEIMRKALDQAKRGRMHILSIMNQCLDKPVEEISEYAPKIVTLRIDIDKIGALIGPGGKNIKALCEQYSVKINTEDDGTVTIFGKTSKDAEDAKAAVVGIACDPEIDKVYNGTVKRIMDFGAFVEILPGKEGLVHISKLSRQRIEKVTDVLKEGQQIPV

SEQ ID NO: 43507 - DNA, 1062 bp, Unknown
  Obtained from environmental sample
  misc_feature (1)..(1062): n is a, c, g, or t
atgtcggctccgtttgcgtgtcttgtcggtacgctcatgaccgtagggcgtttaacgtcagataacgaaatccttgttatgctttcttccggtctatcgtataagaatgttttttttccggctgttacaatggggataataatttctcttttatcattttttacaaacgacatactgcttccggcgggcactgttcaatttaacaaattatggcgtaaaatacttgtctccactcccgcgctggaaatggaagctaattcggtaaaaaaattccaggataccgtaattgttacgggcggcgtaaaagataatataatagaaaacctgcttataatggataaaacagaaaacggcgaacgcagaatcatattggcaagcagcgcggaattaaaagacggcggaaaagaaggtttaagtcttaaccttgactccgcgtttgttcattcgtcaaaggaaatagcgagagaggattacgattacgccaatacggaaagtttacagtactgggtttccaatcaggatattattcagcagtatgtaagcgtaagcccaagagagatgagttccagagacgttcatgcagcgattatagacaaaaaagcggatctggctttaaggctgaacgacagaaaaataaaaatgataaataacgcgacaggcttggaaaatattttaagagccggtccctcaggagagggttggaaccgcagaacgacaaccgtcgctacttttgataaggatattgaatctctaaacctaatgatgagagacagatcccttctcattcatataatcgaaatatacagaaaattttccgttcctcttggcgcgttttgttttgtttttcttgccgtctctctcgggttaatggcgaagaaaagcgggcagaccgtagggtttattttcggcaatattatcgccgtgttatactggtctatgctttttataggacaggcaatgggcttgcgcgccggaacgccgccttttttatcaatgtggtctcccaacattttctttttatccataggcattgttcttgcaattattaaggtgcgcaaatga

SEQ ID NO: 43508 - protein, 353 aa, Unknown
  Obtained from environmental sample
  DOMAIN (1)...(349): Predicted permease YjgP/YjgQ family
  misc_feature (1)..(353): Xaa is any amino acid
MSAPFACLVGTLMTVGRLTSDNEILVMLSSGLSYKNVFFPAVTMGIIISLLSFFTNDILLPAGTVQFNKLWRKILVSTPALEMEANSVKKFQDTVIVTGGVKDNIIENLLIMDKTENGERRIILASSAELKDGGKEGLSLNLDSAFVHSSKEIAREDYDYANTESLQYWVSNQDIIQQYVSVSPREMSSRDVHAAIIDKKADLALRLNDRKIKMINNATGLENILRAGPSGEGWNRRTTTVATFDKDIESLNLMMRDRSLLIHIIEIYRKFSVPLGAFCFVFLAVSLGLMAKKSGQTVGFIFGNIIAVLYWSMLFIGQAMGLRAGTPPFLSMWSPNIFFLSIGIVLAIIKVRK

SEQ ID NO: 43509 - DNA, 1995 bp, Unknown
  Obtained from environmental sample
  misc_feature (1)..(1995): n is a, c, g, or t
atggaaaacgattacgaatattgcactgaattttccgtttcgcagaaaatactcggtatggacaaggttcttctgcgctgtgaagggctggatacaatagcggatattattctgaataacaaaaagattgcccatacgaaaaatatgcacaggatttgggagtttgacgtttcgggaattcttaaaaaagagaaaaatgaactgaagataatttttcattcgccaataaaatatttacaggaagcgcataaaaaactttatttggacggctcaggtgaatgtcttaacgggtttcctcatctcaggaaagctcactgtatgtttggctgggattggggtcctcgtcttcccgatgcgggtatatggcgggacatcagtctcgcaggcattcgcacggcccgcattgataatgtgtacataacgcagattcacaaaaaagaaacagtagaacttgatgtttccgttataattgacagcgtttcgcaaacgccgaaaagcacgcagcgttcaggagccgcaggttattcatggaaaattaacataacggatccgaaaggtaaaaccgtatcttttgttaaatcacctgacgacaaaatgcccaaacgccttgttattaacgctcctgaactttggtggcctaacggttacggctcgcagccgctttacactgtagaagttattctgctaagcccgaaaggagcggaacttgacagttggggacgcaggatagggcttcgcactatgactgtcaaacggcaaaaagacaaatggggtgaaagtttcgccgtagaggtaaacgggattgaaattttcgcgatgggcgctgattatattccggaagacaatattcttggccgcgttaacgcgaaacgtacaagaaaacttcttgaacagtgcagggaagccaatttcaattcaataagggtgtggggcggcggttattatcctgacgattatttttacgatatttgcgacgagcttggccttgtagtctggcaggattttatgtttgcatgcgctgtttacgatcttaacgatgagtttgaccttaatgtcagggcggagttagctgacaatatcaaacgcatacggcatcacgcctgtcttgggctttggtgcggtaacaatgaaatggaatggtttgtggatcagatgcgctgggtcggcaatcttaagcaaaaagccgattacattaaaatgtacgagtatattttcccgcaggtgcttaaagaacatgatccaaatgccttctattggcccgcgagtccttcgtccggcggcaattttgacgttccgaatgatccaaacaggggggacgttcactattgggaggtatggcatggcaacaagcctttttccgattatcggaattattttttccgttatgtgtcggaatttggttttcagtcttttcccgccgtaaaaaccattgaaagttttaccctgcccgaggacagaaatattttttcctatgtaatggaacgccatcagaggaataattcagctaacggtaaaatcatgaattatatgtaccagacatttttgtatcccaacgattttgacactcttgtttacgcttcgcagcttttacaggcggaagcggtcaagtacggggtagagcatttccgccgtaaccggggaaggtgcatgggggcaatttactggcagcttaacgactgctggcctgtagcgtcgtgggcttctatcgactacttcttccgctggaaggcgctgcattattacgcaaaacgttttttccggccattgatgatctcctgccacgaggaagggctgcttacccagaatccaaacgccaatcatcagccgcagataaaagccgctatcgaaaaaagtttccgcctttcggttgcaaacgaaacaaccgaagaaaaaaaacttaccgtaaaatgggaaatacgcgataaaaaagccggcgttctgaaggaaaaaaccattccccgtaaaaattccggctctttcttccctgtggcttga

SEQ ID NO: 43510 - protein, 664 aa, Unknown
  Obtained from environmental sample
  misc_feature (1)..(664): Xaa is any amino acid
MENDYEYCTEFSVSQKILGMDKVLLRCEGLDTIADIILNNKKIAHTKNMHRIWEFDVSGILKKEKNELKIIFHSPIKYLQEAHKKLYLDGSGECLNGFPHLRKAHCMFGWDWGPRLPDAGIWRDISLAGIRTARIDNVYITQIHKKETVELDVSVIIDSVSQTPKSTQRSGAAGYSWKINITDPKGKTVSFVKSPDDKMPKRLVINAPELWWPNGYGSQPLYTVEVILLSPKGAELDSWGRRIGLRTMTVKRQKDKWGESFAVEVNGIEIFAMGADYIPEDNILGRVNAKRTRKLLEQCREANFNSIRVWGGGYYPDDYFYDICDELGLVVWQDFMFACAVYDLNDEFDLNVRAELADNIKRIRHHACLGLWCGNNEMEWFVDQMRWVGNLKQKADYIKMYEYIFPQVLKEHDPNAFYWPASPSSGGNFDVPNDPNRGDVHYWEVWHGNKPFSDYRNYFFRYVSEFGFQSFPAVKTIESFTLPEDRNIFSYVMERHQRNNSANGKIMNYMYQTFLYPNDFDTLVYASQLLQAEAVKYGVEHFRRNRGRCMGAIYWQLNDCWPVASWASIDYFFRWKALHYYAKRFFRPLMISCHEEGLLTQNPNANHQPQIKAAIEKSFRLSVANETTEEKKLTVKWEIRDKKAGVLKEKTIPRKNSGSFFPVA

SEQ ID NO: 43511 - DNA, 606 bp, Unknown
  Obtained from environmental sample
  misc_feature (1)..(606): n is a, c, g, or t
atggcgaaaataaagctcactaagaacgagctaaaaaagcaaaaagattctcttaaaatgttccagcgttatcttcccacgctgatgctcaaaaaacagcagttacagggagagatacggcttaccgaatancggcttaaggaactgcacgcccaaaaagatcgtctcgacgaatccttcaaaacatggataggggtnttcggcgagaagaatgtcttcaccgtggatatattaaaaataaccaaattgaagaccgggctggggaacattgccggcgtagctattcctattttcgagggagccgaatttgtaatcacaccttatgatcttttcggaatgcccctctggcttgacgcggcagttgaaaaaatgaagcaggcgctccttcttgatcttgaagcggagattgtcgaagagcagcgcaagcggctggatcatgaattacgcgtaacgacacagcgggttaatctttttgagaaagtcaaaatccccgaaacaaaggggagcatcaaaaaaattcaggtttacctgggcgaccagcagacctccgctgtggtacgcggaaagatcgccaaaaccgggcttgtaaaggcggcaaagcaatga

SEQ ID NO: 43512 - protein, 201 aa, Unknown
  Obtained from environmental sample
  DOMAIN (2)...(196): ATP synthase subunit D
  misc_feature (1)..(201): Xaa is any amino acid
MAKIKLTKNELKKQKDSLKMFQRYLPTLMLKKQQLQGEIRLTEXRLKELHAQKDRLDESFKTWIGVFGEKNVFTVDILKITKLKTGLGNIAGVAIPIFEGAEFVITPYDLFGMPLWLDAAVEKMKQALLLDLEAEIVEEQRKRLDHELRVTTQRVNLFEKVKIPETKGSIKKIQVYLGDQQTSAVVRGKIAKTGLVKAAKQ

SEQ ID NO: 43513 - DNA, 1299 bp, Unknown
  Obtained from environmental sample
  misc_feature (1)..(1299): n is a, c, g, or t
atgaaaaaggtttatagcaaaattgaatccataaccggaagcgttattaccgtccgggccgaagggatccgttacggcgaccttgccgaggttgacaccgtattcggcacctcgcttgccgaggtaaacaggctgcaggacgaccttgtctctttgcaggtattcgccggcgggcgcggtatttccacaggcgacacggtgcgctttttggggcggcccatgcaggtgccgttttccgaaaaccttatgggcagggtgttttcaggttcgggaatgcccagggacaaaggcccggccctgcatgaaaactacatccccataggcggcccctctgtcaatccgtcagagcgcatagtcccccgcaatatgatccgcaccggcatccccatgatcgacctgttcaacaccctggtcgtttcacagaaactgccgatcttctcggtctcaggcgagccttacaacgagcttcttgcccgtatcgcgatgcaggccgaggttgacgtaatcgtgcttggcggcatgggccttaaatacgacgactaccttacattcaaggacacccttgaaaacgccggggcgcttgcccgcacggtcatgttcatgcatactgccagtgacccgacagtcgagtgtctcatgatccccgatatgtccctngccgtcgccgaacaattcgccctgcaagggaaagacgtgctggtgcttcttaccgatatgaccaacttcgcagacgcgatgaaggaaatttccattatacaggaacaggtaccgtccaaccgcggttaccccggcgacctgtacagccagcttgccagccgttatgaaaaagccgttgactttgacaccgccggttccattaccgtcctgggtgtaacgacaatgcccggcgacgacgtaacccacccggttcccgataatacggggtacataacggaaggacagtactatcttaaaaacggccgtattgaaccgtttggttctctctcgcgccttaaacaacaggtcaacggcaaaacccgcgcggaccaccgcgccctgatggacggcatgatcaagctgtactccgccttccgggatactctggaaaaaaaggcgatgggctttatgatgtccgcctgggacgaaaaactcctcaaatacggcgcactgtttgaaaagaagatgatggacctctcggtcaatatcccccttgaaaaggcccttgaccttggatgggaaattcttgcggattgtttcaatcccgaagatactggactgcggaccgagcttattagcaaattttggccgaagaaagattag

SEQ ID NO: 43514 - protein, 432 aa, Unknown
  Obtained from environmental sample
  DOMAIN (8)...(71): ATP synthase alpha/beta family, beta-barrel domain
  misc_feature (1)..(432): Xaa is any amino acid
MKKVYSKIESITGSVITVRAEGIRYGDLAEVDTVFGTSLAEVNRLQDDLVSLQVFAGGRGISTGDTVRFLGRPMQVPFSENLMGRVFSGSGMPRDKGPALHENYIPIGGPSVNPSERIVPRNMIRTGIPMIDLFNTLVVSQKLPIFSVSGEPYNELLARIAMQAEVDVIVLGGMGLKYDDYLTFKDTLENAGALARTVMFMHTASDPTVECLMIPDMSLAVAEQFALQGKDVLVLLTDMTNFADAMKEISIIQEQVPSNRGYPGDLYSQLASRYEKAVDFDTAGSITVLGVTTMPGDDVTHPVPDNTGYITEGQYYLKNGRIEPFGSLSRLKQQVNGKTRADHRALMDGMIKLYSAFRDTLEKKAMGFMMSAWDEKLLKYGALFEKKMMDLSVNIPLEKALDLGWEILADCFNPEDTGLRTELISKFWPKKD

SEQ ID NO: 43515 - DNA, 696 bp, Unknown
  Obtained from environmental sample
  misc_feature (1)..(696): n is a, c, g, or t
atggttattggcggaaagcatttcgggcaatatacttacgagcactggtttgacgatgaatatgagaaaacaaagttaacaggcgtttttttaaaacccgaagaggaaaaagactataattccgttgaaaatttaacccgtgaagcgttttggaacgtttacaaacccggatgtgacgagcatttgttgatccataacatgcgaaaggcaaaagaatttattaaagaacttgattatgtggcaatttataatgatgagattataggcaatatcgtatacgcgaaaacaaaaattttagacacaaataaagaacatgatgtaataacattcggccctgtcagcgtattacccgtttatcaaaagaaaggaataggaaaaaaattaatagaacatacaattataaaagcccagggaatgggatttaaagcgataataatttacggaaatcccaaatattatgaaagatttggttttaagaacagcagggaatataaaataacggatatggaaggtaattatcacgacgcgttattggcgctggaattacatcccaattcgctggaaaaagtatgcggaaaattttttgacggggaagtatataaaatagataaaaaagaattggaaatatttgaaaagaaatttccgaaaaaggaaaaattggtattggacacgcaaatattcaaggaagaggattaa

SEQ ID NO: 43516 - protein, 231 aa, Unknown
  Obtained from environmental sample
  DOMAIN (79)...(159): Acetyltransferase (GNAT) family
  misc_feature (1)..(231): Xaa is any amino acid
MVIGGKHFGQYTYEHWFDDEYEKTKLTGVFLKPEEEKDYNSVENLTREAFWNVYKPGCDEHLLIHNMRKAKEFIKELDYVAIYNDEIIGNIVYAKTKILDTNKEHDVITFGPVSVLPVYQKKGIGKKLIEHTIIKAQGMGFKAIIIYGNPKYYERFGFKNSREYKITDMEGNYHDALLALELHPNSLEKVCGKFFDGEVYKIDKKELEIFEKKFPKKEKLVLDTQIFKEED

SEQ ID NO: 43517 - DNA, 1281 bp, Unknown
  Obtained from environmental sample
  misc_feature (1)..(1281): n is a, c, g, or t
atgagcgacacaataatggcgcctgtttatgaaatgcttacaataaccgtaataatcagcgttgtgataatggttctggtggtnttagccgcgatattcctgtcccgttccataagcagtccaatcgttaaagttgcggaaactttaaaagatatttccgaaggggaaggcgatcttacgcgcagcatcactgttaattccaaggatgaaataggcagccttgccctgtactttaataaaacgctggagaagataaagaaactggtaataattattaagaaagagacggcaaaccttcacaatataggaaatgatcttgccggcaacatgacagaaaccgcggcggcggttaatgaaattaccgccaacatccaaagcataaacgggcgcgtcataaaccagagcgccggcgtcagcgaaacacacgcgacaatggaacaggttgtcgcaaatataaacaaacttaacggccatgtagagaatcagagcaacaatatttcccaggcatcgtccgccattgaacaaatggcggctaacatcaattcggttacagcaaccctgataaagaacaccgaaaatgtaaaggcgttaaaaggcgcttctgaaataggaagggccgggttgaatgatgtcgcctcggacataaaggaaatagcccgcgaatccgaagggcttatggaaattaactctgtaatgcaaaatatcgcaagccagacgaatttgctttcgatgaacgccgcgatagaagcggctcacgccggagacgcgggaaggggctttgcagttgtcgccgaggaaatccgcaaactggcggaatcatcaggcgagcatcaaaaaactacagctgcaatgctgaagaaaataaaagcgtccatagacaatatcaccaaatcctccgatgaagtattaaaccgtttcggcgccatagactcaagcgtaaaaacagtttcagatcacgaagaaaatatattaaacgccatgcgggaacaggaaacgggcggcaggcaaatattggaatccataggccgccttagggacataacccgctcggttaaaaacgggtccgatgacatggaggaatcgggtaaaactctggttaaggaaacggacgaattcataaaaacaagccgggaagcggtggaaggcatgaacgagatattaaaaagcgttaatcagataagcagttcggtcagccaggtaaacgacatgagtatagaaaacaaccatagctttgacgccttgaaaaaggaaactgaaaaatttaacgataccgatagataa

SEQ ID NO: 43518 - protein, 426 aa, Unknown
  Obtained from environmental sample
  DOMAIN (160)...(416): Methyl-accepting chemotaxis protein (MCP) signaling domain
  misc_feature (1)..(426): Xaa is any amino acid
MSDTIMAPVYEMLTITVIISVVIMVLVVLAAIFLSRSISSPIVKVAETLKDISEGEGDLTRSITVNSKDEIGSLALYFNKTLEKIKKLVIIIKKETANLHNIGNDLAGNMTETAAAVNEITANIQSINGRVINQSAGVSETHATMEQVVANINKLNGHVENQSNNISQASSAIEQMAANINSVTATLIKNTENVKALKGASEIGRAGLNDVASDIKEIARESEGLMEINSVMQNIASQTNLLSMNAAIEAAHAGDAGRGFAVVAEEIRKLAESSGEHQKTTAAMLKKIKASIDNITKSSDEVLNRFGAIDSSVKTVSDHEENILNAMREQETGGRQILESIGRLRDITRSVKNGSDDMEESGKTLVKETDEFIKTSREAVEGMNEILKSVNQISSSVSQVNDMSIENNHSFDALKKETEKFNDTDR

SEQ ID NO: 43519 - DNA, 747 bp, Unknown
  Obtained from environmental sample
  misc_feature (1)..(747): n is a, c, g, or t
atggccgagcgagaaggccgccgaatccgcgaagcttttatttccggccccggctgcctgttattatccgttgactacagccagatagagcttgtggttttggctcatctttcacaggatgaaaacctccttgcggccttcagggacggcacggatgtgcacgcccgcaccgccgcattgatattcggcgtcgctgaggacgaggtaaaacccgaacagcggcgcatggcaaagacgatcaatttcggcgtgatgtacggtatgagcgcgttcaggctttcaaacgaactggggatcagcagaaccgacgcgacgaattttataactgcgtattttaacacatattctggcgttaggcgttttatcgatgagcttatcaaaaaaacagaggattgcggttacgtctcgacaatacttggccgccgccggtatattcccgccattaactcgcggaacaagaccgagaaagccgcggcggagcgcattgcggttaacacccccattcagggttcggcggctgatattgtcaagaccgccatgctcagcctggacaggcggcttaccgcggaaaaaagcaaagcgcgcattctgctgcaggttcatgacgaactcatccttgaatgtccgaaagataccgcggtaaaaacagtggaactggttaagacagaaatggaacaggcggtacatttaagcgtcccgctgagggtaagcgttgagacgggaactcgctggggcagctttcattaa

SEQ ID NO: 43520 - protein, 248 aa, Unknown
  Obtained from environmental sample
  DOMAIN (1)...(247): DNA polymerase family A
  misc_feature (1)..(248): Xaa is any amino acid
MAEREGRRIREAFISGPGCLLLSVDYSQIELVVLAHLSQDENLLAAFRDGTDVHARTAALIFGVAEDEVKPEQRRMAKTINFGVMYGMSAFRLSNELGISRTDATNFITAYFNTYSGVRRFIDELIKKTEDCGYVSTILGRRRYIPAINSRNKTEKAAAERIAVNTPIQGSAADIVKTAMLSLDRRLTAEKSKARILLQVHDELILECPKDTAVKTVELVKTEMEQAVHLSVPLRVSVETGTRWGSFH

SEQ ID NO: 43521 - DNA, 1698 bp, Unknown
  Obtained from environmental sample
  misc_feature (1)..(1698): n is a, c, g, or t
atgaaagagaacgatttatcttctcattctcggcttcccaatggaaattttttcccattttgggatgatcaaacggaatataaagattttctttatgttgattgcaactgcaacctggcaaatgacgccaatccgggtacaaaggataagccctttaagacgataaacgccgccgcccgcatcgcgaagcccggaaccaaggtaataataaagggcggcgaatacagggaaacggtaaaacctgcgcggggcggcgataatgaaaaagcgatgatatgctatgaagcggccgagggagaagaagttgtcattaaggcatcagtcgtcgtaaaggattttaagcccagtaccggctggaacttccgtgaacacttttccaatgagcctcttcccaagggtatgacggtttgggagatcgatattaacccggatgactttaagggatacaaccccttttgcgccgtgaacattatccatgaccgcctgtttattgaatatggaaaaatggatatgaccacgtacctgaaccgccgtggcatggttttcgtagacggaaagcctcttaagcagcttccgctttgcagtcatatgtcaaaagcggatggcacgtactgggtagagtcaaacgggcagaggattcatgtaaggcttcccggtgacgcgagccctttcgatcataaagtggaaattaccaaccgcgaacagtgtttcgccccagatactccgtttctttcatatattcatttgcgtggtttggtatgcgctcacgccgctaacggcgcgccggttccgcagcgcggttccatctcggcctatcgggggcatcactggatcatcgaaggctgtaccattgattgggccaacacggtaggcatcgactgcgggaatgagtgctggcaccatgaatttattgaagggcagatactggggtacgatattatccgcggcaatacgattcggaacgtgggagtttgcggcatagccgttttaaacagcaaaaacctgttaatagaagacaaccttatcgaaagaaccggctggcagcggatggaactttcctgggaagccggcggcatcaaggtacaccatgccgaggacgcgttattccgccggaatgtcatcgccggaagcatcggttgtgattcaatatggatggacgttaacaactacaactgccgtttaaccgggaacctgcttattgacggtattgattcgcgggaacatatcttcatggaagccggcagggatcatgaaacaatgatcgacaacaatattatctggaatgtagaaggccgttttgaccgcaacgccataccaaaggaaccgggatcatccggatggtataaagagcagcagctccctgtggagaacggctacggcatttacggggaaggcacggacaggctgcgtattgttaataatctcatcgggaaatgccatgatgccggatatttcgccaaaatagtccccttccggattatgaagcgaggcggaacggcgcgggaatgcaagtttttcaataacctgttttacgattgcggcagcgcggccattaaattccccaatgagcataatcaggcggacgggaacgcatacgcgaagatgccgaaatggggcggttacctgaggattttacagcccgcgccgaccatgtgccttgatctggacgcgtggcgtgaattctgcggttcgatctaa

SEQ ID NO: 43522 - protein, 565 aa, Unknown
  Obtained from environmental sample
  misc_feature (1)..(565): Xaa is any amino acid
MKENDLSSHSRLPNGNFFPFWDDQTEYKDFLYVDCNCNLANDANPGTKDKPFKTINAAARIAKPGTKVIIKGGEYRETVKPARGGDNEKAMICYEAAEGEEVVIKASVVVKDFKPSTGWNFREHFSNEPLPKGMTVWEIDINPDDFKGYNPFCAVNIIHDRLFIEYGKMDMTTYLNRRGMVFVDGKPLKQLPLCSHMSKADGTYWVESNGQRIHVRLPGDASPFDHKVEITNREQCFAPDTPFLSYIHLRGLVCAHAANGAPVPQRGSISAYRGHHWIIEGCTIDWANTVGIDCGNECWHHEFIEGQILGYDIIRGNTIRNVGVCGIAVLNSKNLLIEDNLIERTGWQRMELSWEAGGIKVHHAEDALFRRNVIAGSIGCDSIWMDVNNYNCRLTGNLLIDGIDSREHIFMEAGRDHETMIDNNIIWNVEGRFDRNAIPKEPGSSGWYKEQQLPVENGYGIYGEGTDRLRIVNNLIGKCHDAGYFAKIVPFRIMKRGGTARECKFFNNLFYDCGSAAIKFPNEHNQADGNAYAKMPKWGGYLRILQPAPTMCLDLDAWREFCGSI

SEQ ID NO: 43523 - DNA, 432 bp, Unknown
  Obtained from environmental sample
  misc_feature (1)..(432): n is a, c, g, or t
atggctatggatttggccgcgttcggccgtttttcacggacatttcaggcgggcgatataattttctccgaatatgaacttggcgatactttttatcttattcaatcgggcagggtgcagcttgtaaaacttgtaggcgacattgaaaggacgctcgatgtccttcagccttccgaaatgttcggcgagatggcaattttggaaaactccccccgttccgcgtcggcggtagcgcttgacgaagttaaggttcttgaatttaactcccagaactttgaaatacttttacttggcaacccgcagattgcactgaaactgttaaaaatgttctgcaaacgcatttacgattcaaaacgccgctttatgattttaactctccccgacccgcagacaaaagtcgccgatgtttcctttgcggagaaaccggcatga

SEQ ID NO: 43524 - protein, 143 aa, Unknown
  Obtained from environmental sample
  DOMAIN (12)...(101): Cyclic nucleotide-binding domain
  misc_feature (1)..(143): Xaa is any amino acid
MAMDLAAFGRFSRTFQAGDIIFSEYELGDTFYLIQSGRVQLVKLVGDIERTLDVLQPSEMFGEMAILENSPRSASAVALDEVKVLEFNSQNFEILLLGNPQIALKLLKMFCKRIYDSKRRFMILTLPDPQTKVADVSFAEKPA

SEQ ID NO: 43525 - DNA, 312 bp, Unknown
  Obtained from environmental sample
  misc_feature (1)..(312): n is a, c, g, or t
atgtcatttaaattgattacggactcgggaacagacgcgggctggacggcaaaagcttcttatgaaataggacgctgcatgttcctgatgaacaagtttgacgagagcctgaagtatttaacaaatatgcttaccaagtatcccaagcatcccaatctgttggacgccatgcttgttatcggccagtgccacgaaaaaatgggaagaaaggaacaggcggcggctttctttaagaagataatttccatgggcggcagcagcgacggcgccgcggaaaaagcaaaaagggcgttagccgccctgggagcgtaa

SEQ ID NO: 43526 - protein, 103 aa, Unknown
  Obtained from environmental sample
  misc_feature (1)..(103): Xaa is any amino acid
MSFKLITDSGTDAGWTAKASYEIGRCMFLMNKFDESLKYLTNMLTKYPKHPNLLDAMLVIGQCHEKMGRKEQAAAFFKKIISMGGSSDGAAEKAKRALAALGA

SEQ ID NO: 43527 - DNA, 663 bp, Unknown
  Obtained from environmental sample
  misc_feature (1)..(663): n is a, c, g, or t
atgccgaagccgcttcaataccgcacaggttcgcttatatatttccagggagatccggcggataaaatatatattcttcaaaacggcaagataagccttgtttcccaggatatggaaaccggggaagatatacgcgagtcggtacagccgggcgaattcttcggggtaaaatccgcgcttggacgttacccgcgcgaggaaaacgccatggcgttatctgatacaaccgttatggtttttacagtgcaggaatttgaagccgtggcgatggcaaacacaagaattatcatgaagatgcttaaagttttctccaaccagatgaggcgcgtgcataaacaagtgtcaaaattgatggcgaaagcagaagaaccgcctgccgacggtttgtttaatgtcggtgaattttacctgaagaataaaaggtttacccacgccaaatatattttcagccgttatctgatatattatccttccggaaaaaacgcgtatcaggctacaaaaaatcttgagattgcggagaacgcgctttcccgctatggggacggcaaagggccgggcgttgcggtaagttcaggcggcggctcatccgccccgtcaaacggttttgccgcaggcgtttccgccggttccctccgcggacgatcccgccaaaatttacaatga

SEQ ID NO: 43528 - protein, 220 aa, Unknown
  Obtained from environmental sample
  DOMAIN (4)...(94): Cyclic nucleotide-binding domain
  misc_feature (1)..(220): Xaa is any amino acid
MPKPLQYRTGSLIYFQGDPADKIYILQNGKISLVSQDMETGEDIRESVQPGEFFGVKSALGRYPREENAMALSDTTVMVFTVQEFEAVAMANTRIIMKMLKVFSNQMRRVHKQVSKLMAKAEEPPADGLFNVGEFYLKNKRFTHAKYIFSRYLIYYPSGKNAYQATKNLEIAENALSRYGDGKGPGVAVSSGGGSSAPSNGFAAGVSAGSLRGRSRQNLQ

SEQ ID NO: 43529 - DNA, 894 bp, Unknown
  Obtained from environmental sample
  misc_feature (1)..(894): n is a, c, g, or t
gtgaacgatcattttccgcataaatttaacagtcagatactgcccactttgccaatcagggcgattcaggattattgtatagagcatgaatgttcgtcgtacgatcttaaatggggcgacggcatagaaattgagcatgagcgcgccgtaaaaaacaagtggcccttcattacccatctttccgagggttttgacaatgaggcaatgcacggattagagaaactggaaggcttgaaagttctggacaaccattgcttgtttattcattgtataggattcagcgacgaggacattaagaaagccgccaaggccggagcaagcgtttcatggtgcggtttttccaatatgtttatgtttaacgtaacagccaaaatacggaaaatgcttaaagcgggagtaaatgttacgatagggacagattcttccgcgacaggttcagccaatcttcttgcggaaattaaatatgacagagagttgtacagaaaactttacggcgaagatcttgaagccgaaaaaatattccaaatgatgacaataaacgcggcaaaagccttttggatgcaggataagatcggcagtttggacgaaggcaagttaggtgacattcttgttttgaaatccaaaaacagcgatccttatgaaaacatcgttaacgctgacatgaaggatattgaacttttaattttggcaggtacgcctatatacggggaaatgcgtttccttgatatttttaacggaaaacttcccgaaggttatacgcagataaagaccggtaagaaggcgatgtttgtaaagggcgatcctgcgagcctttacagggaagcaagaaaaaaaatcggttttaagaaagaactggattttcttccctttgaaccggagcaggaaggaaaataa

SEQ ID NO: 43530 - protein, 297 aa, Unknown
  Obtained from environmental sample
  DOMAIN (12)...(206): Amidohydrolase family
  misc_feature (1)..(297): Xaa is any amino acid
MNDHFPHKFNSQILPTLPIRAIQDYCIEHECSSYDLKWGDGIEIEHERAVKNKWPFITHLSEGFDNEAMHGLEKLEGLKVLDNHCLFIHCIGFSDEDIKKAAKAGASVSWCGFSNMFMFNVTAKIRKMLKAGVNVTIGTDSSATGSANLLAEIKYDRELYRKLYGEDLEAEKIFQMMTINAAKAFWMQDKIGSLDEGKLGDILVLKSKNSDPYENIVNADMKDIELLILAGTPIYGEMRFLDIFNGKLPEGYTQIKTGKKAMFVKGDPASLYREARKKIGFKKELDFLPFEPEQEGK

SEQ ID NO: 43531 - DNA, 777 bp, Unknown
  Obtained from environmental sample
  misc_feature (1)..(777): n is a, c, g, or t
ttggatgattattcccatcgcaataggttatcttgttatgcgctttcttacaaagaaagaccaatggaatatcgaaattggacaagcccatcttatgcaaaaggatatttatatcccatgagtgaaaaaagcgtcggaagatttaatgaactcatcccttggaattttattactaaattctatgagggcgtcgtaatccaaaaagacggcattttacagcgtacctttgcttaccgcgctcccgatatcgactcttccggcgctcttgaggttaataacattgcgatccgtgtaaacgattttgctatgcgtttgggttccggctgggctgtccagttggaagcccaacgcttccagcttgccgaatacccgcagagtgcctttgatatccttgcgccttatttaatcgacaaagaacgtgaggaggctttccgctccgccggccgccattttgattcaagttattatcttacttttatatggcggccgccttcggaaagcgtaaaaaaattaacgtccatgtttgttaaaagcggcgattcctcagaagaaggcatgggcgttaaacaaaacgttgaattcttcgtcaacgagtctgacgcggtcgtcagccttcttgccaacaatttgatccttgaaccgcttgacaatgaccaaactatcgcttttcttcattcaaatatttctatgaagcgccatcatatttacttccctaacactcatattatgcttgacagaattcttctgactgtgcttttggaaccactttcacaatga

SEQ ID NO: 43532 - protein, 258 aa, Unknown
  Obtained from environmental sample
  misc_feature (1)..(258): Xaa is any amino acid
MDDYSHRNRLSCYALSYKERPMEYRNWTSPSYAKGYLYPMSEKSVGRFNELIPWNFITKFYEGVVIQKDGILQRTFAYRAPDIDSSGALEVNNIAIRVNDFAMRLGSGWAVQLEAQRFQLAEYPQSAFDILAPYLIDKEREEAFRSAGRHFDSSYYLTFIWRPPSESVKKLTSMFVKSGDSSEEGMGVKQNVEFFVNESDAVVSLLANNLILEPLDNDQTIAFLHSNISMKRHHIYFPNTHIMLDRILLTVLLEPLSQ

SEQ ID NO: 43533 - DNA, 837 bp, Unknown
  Obtained from environmental sample
  misc_feature (1)..(837): n is a, c, g, or t
atgaaacttggcgattattacatacccatcatcgggataaatgattttcctgatgaatcatatcccgctattctggacggccttaacagggcaaggctcgaatacaggtgggttacacgctatatctgccttgataaagaagaaggaaaaaaagaagctagaaaaaaagaaaagtctcatcgcggaagcagaacaacccttttacaaactttcgccgaacaaacttcaggagaaaaaacaaaatctgtcaaccacggcgccagcattaaagaaagcgattctatagaagcatttattgaaattgaaaccgatcaagccgcccttggattccttacaacttgcgttatggtctgggataaagatttgaccagagcaaagaaaaaggccgacattattaaaactattattaacagcaaaggctttacctgcaaagaagaagaagcaaacggacttgaggccttccagtccatgatggcaggtcaaatttacgctaattaccgcgcactccctgttatgtcttacagcatggcgcatattgttcctctctcatccgtttgggcagggcttcgcagcaacgagcatgccttcaatgttaccggcgttgatacaccccatataatctgctccacaattgaagggactccgtttttccttaaccttaacgtaggcgatgtaggccattccgctatctgggggcctacgggcgcaggtaaatctactttgcttaatcttttggaaatgcaggtttttaaatatcccggctccctcgttatcgtctttgacaaaggccgcagttgcaggcagtgctgccttgcctcagggcggtcgtttttatga

SEQ ID NO: 43534 - protein, 278 aa, Unknown
  Obtained from environmental sample
  misc_feature (1)..(278): Xaa is any amino acid
MKLGDYYIPIIGINDFPDESYPAILDGLNRARLEYRWVTRYICLDKEEGKKEARKKEKSHRGSRTTLLQTFAEQTSGEKTKSVNHGASIKESDSIEAFIEIETDQAALGFLTTCVMVWDKDLTRAKKKADIIKTIINSKGFTCKEEEANGLEAFQSMMAGQIYANYRALPVMSYSMAHIVPLSSVWAGLRSNEHAFNVTGVDTPHIICSTIEGTPFFLNLNVGDVGHSAIWGPTGAGKSTLLNLLEMQVFKYPGSLVIVFDKGRSCRQCCLASGRSFL

SEQ ID NO: 43535 - DNA, 924 bp, Unknown
  Obtained from environmental sample
  misc_feature (1)..(924): n is a, c, g, or t
ttgacaaaggccgcagttgcaggcagtgctgccttgcctcagggcggtcgtttttatgaaccggccgcggaaaatatcgccggtattaattttcaacccttgcgcgaactggaaacggaaagagacatgatggacgctatggacttcattgaatcttgtatcaccgttaataaagaaaccgtaacggctcaaatgcgcgcttctataaaagaaagccttgaacgtacacgcgaaattccacacaacagaagaaccattactacttttcttcaatacgcaaactatcttgaccctgataccaacagacctgttttaaaagatatgttaggtgattatactatcggcggtaaatacggcaaaattttcgacgcggaagcttcagggctttctctggatactcgcttcctggctatcgaaatggaatcattaatgaatcgcggggaaaactgtgtcgtacctgcccttgtttatcttttcaactatatcgaaaagaaatttgacgggcgctttactttgcttgttcttgacgaagcatggctattcttaaaaaacgaaactttcgcggacaaaatcgcggaatggcttaaagttttacgcaaaaaaaatgtttatgttatttttgcgacgcaggatgtcgccgatgttgctaactctccattaaaaaccactatcattcaacagtgtcttacgaaaatctatctcgcggataaatcggcggttacgccaggcatgactgacgtatacagacaattcggtcttacggaggcggaaataagccttatcgcctcagctaccatgaaaagggattatttctatacaagccccatggggcgaaggctcttccaactcgatcttggccgactgacgctcgcgctcatcggatcgccgaaccacgcccttcttgacgagcttacgtcaaagtag

SEQ ID NO: 43536 - protein, 307 aa, Unknown
  Obtained from environmental sample
  misc_feature (1)..(307): Xaa is any amino acid
MTKAAVAGSAALPQGGRFYEPAAENIAGINFQPLRELETERDMMDAMDFIESCITVNKETVTAQMRASIKESLERTREIPHNRRTITTFLQYANYLDPDTNRPVLKDMLGDYTIGGKYGKIFDAEASGLSLDTRFLAIEMESLMNRGENCVVPALVYLFNYIEKKFDGRFTLLVLDEAWLFLKNETFADKIAEWLKVLRKKNVYVIFATQDVADVANSPLKTTIIQQCLTKIYLADKSAVTPGMTDVYRQFGLTEAEISLIASATMKRDYFYTSPMGRRLFQLDLGRLTLALIGSPNHALLDELTSK

SEQ ID NO: 43537 - DNA, 456 bp, Unknown
  Obtained from environmental sample
  misc_feature (1)..(456): n is a, c, g, or t
gtgcttgccgaagtcctcccgcaagacaaatccgccgaagtaaaaaagcttcaagaaacaaattctgaaacccaagcaacaaaacgccaacggcattttgtagcatttgtcggagacggtattaacgacgctcccgctcttgcgcaggcggacatcggtatcgccgtcggaagcggaacagacgtggcgatagaatccgccgacatcgttcttatgcgttctgatctgctcgacgttcccacggctattaatttaagcaagagaacaatccgcaacataaaacaaaatctgttctgggcgtttggttacaatgtgcttggcattcccattgcggcgggcttactctatctattcggcggaccgctccttaatccggtcttcgccgccgccgccatgagtttaagctcggtgtcggtcttaaccaacgcattaagactaaaaagatttaaagcgtag

SEQ ID NO: 43538 - protein, 151 aa, Unknown
  Obtained from environmental sample
  misc_feature (1)..(151): Xaa is any amino acid
MLAEVLPQDKSAEVKKLQETNSETQATKRQRHFVAFVGDGINDAPALAQADIGIAVGSGTDVAIESADIVLMRSDLLDVPTAINLSKRTIRNIKQNLFWAFGYNVLGIPIAAGLLYLFGGPLLNPVFAAAAMSLSSVSVLTNALRLKRFKA

SEQ ID NO: 43539 - DNA, 867 bp, Unknown
  Obtained from environmental sample
  misc_feature (1)..(867): n is a, c, g, or t
ttggtggaggacgcgcagggcggcaaagcgcccatcgcggcgctgggcgacaaggtttccgccgtattcgtgcctattgtatgcctgatagcgctgctggccggtattgcctggttcttcggtaccggcggcgatttaaaatttgcgctgacagtttttataaccgtgcttgttatcgcctgcccctgcgcactcgggcttgcaactccgaccgcgatcatggtgggaaccggcaaaggcgcggaaaacggtatactcatcaaaggcggagaggctttggaaacaacgcataaaacgcaaactatcgtatttgataaaaccggaaccatcaccgaaggcaagccgacagtaaccgacgtattgacaaccgaaggcgtgtctcccgatgatcttctgcaaatcgccgcgtccgccgaaaaaggttcagaacatccgcttgggcaggcgattgtaaatgatgcgcaaaaaaaagagctggagctgttaaaagcggacaattttaactcaatcacagggtttggcattgaagcaactgtaaacaaccaaaaagtcatcgccggaaatcgcaggttgatggatgagcgtatgatttcactaacggccttgcagccggactcagaacggctggcaagcgaaggcaagactccgatgtatgtcgcgattgacggcaaattggccggtataattgccgtcgccgacgttgtaaaaatgtcaagcaaagctgcgattgaaagcctgcacaaaatgggcattgaagtggctatgattaccggtgacaacaaaaataccgcctatgctatcgccaaacaagtggaattgatcgagtgcttgccgaagtcctcccgcaagacaaatccgccgaagtaa

SEQ ID NO: 43540 - protein, 288 aa, Unknown
  Obtained from environmental sample
  DOMAIN (99)...(280): haloacid dehalogenase-like hydrolase
  misc_feature (1)..(288): Xaa is any amino acid
MVEDAQGGKAPIAALGDKVSAVFVPIVCLIALLAGIAWFFGTGGDLKFALTVFITVLVIACPCALGLATPTAIMVGTGKGAENGILIKGGEALETTHKTQTIVFDKTGTITEGKPTVTDVLTTEGVSPDDLLQIAASAEKGSEHPLGQAIVNDAQKKELELLKADNFNSITGFGIEATVNNQKVIAGNRRLMDERMISLTALQPDSERLASEGKTPMYVAIDGKLAGIIAVADVVKMSSKAAIESLHKMGIEVAMITGDNKNTAYAIAKQVELIECLPKSSRKTNPPK

SEQ ID NO: 43541 - DNA, 795 bp, Unknown
  Obtained from environmental sample
  misc_feature (1)..(795): n is a, c, g, or t
ttgttgtcaccggtaatcatagccacttcaatgcccattttgtgcaggctttcaatcgcagctttgcttgacatttttacaacgtcggcgacggcaattataccggccaatttgccgtcaatcgcgacatacatcggagtcttgccttcgcttgccagccgttctgagtccggctgcaaggccgttagtgaaatcatacgctcatccatcaacctgcgatttccggcgatgactttttggttgtttacagttgcttcaatgccaaaccctgtgattgagttaaaattgtccgcttttaacagctccagctcttttttttgcgcatcatttacaatcgcctgcccaagcggatgttctgaacctttttcggcggacgcggcgatttgcagaagatcatcgggagacacgccttcggttgtcaatacgtcggttactgtcggcttgccttcggtgatggttccggttttatcaaatacgatagtttgcgttttatgcgttgtttccaaagcctctccgcctttgatgagtataccgttttccgcgcctttgccggttcccaccatgatcgcggtcggagttgcaagcccgagtgcgcaggggcaggcgataacaagcacggttataaaaactgtcagcgcaaattttaaatcgccgccggtaccgaagaaccaggcaataccggccagcagcgctatcaggcatacaataggcacgaatacggcggaaaccttgtcgcccagcgccgcgatgggcgctttgccgccctgcgcgtcctccaccaacttgattatttga

SEQ ID NO: 43542 - protein, 264 aa, Unknown
  Obtained from environmental sample
  SIGNAL (1)...(20)
  misc_feature (1)..(264): Xaa is any amino acid
MLSPVIIATSMPILCRLSIAALLDIFTTSATAIIPANLPSIATYIGVLPSLASRSESGCKAVSEIIRSSINLRFPAMTFWLFTVASMPNPVIELKLSAFNSSSSFFCASFTIACPSGCSEPFSADAAICRRSSGDTPSVVNTSVTVGLPSVMVPVLSNTIVCVLCVVSKASPPLMSIPFSAPLPVPTMIAVGVASPSAQGQAITSTVIKTVSANFKSPPVPKNQAIPASSAIRHTIGTNTAETLSPSAAMGALPPCASSTNLII

SEQ ID NO: 43543 - DNA, 1008 bp, Unknown
  Obtained from environmental sample
  misc_feature (1)..(1008): n is a, c, g, or t
atgagcgacatactgtcacaggaagaggtcgatgcgctgctcaacgcggtgtcatccggggatcttggcgaccaatcgttcgacgatgtgaaagccgacgcccctattgaagacgaaataccgttgtcgctctacgactttaagaggcccgaccgcgtatcaaagatcaatgcgcacgctgcagacctgcacgagggctatgcgcgccaattttccaccacgctcacgaactttttgcgcacattcatcgagacgcagcttgtcagcgttgaccaattgacatactcggagtttgtgatgtccatatctaaccccagctgcatctacgtgttccgtatggagccgcttgagggtttggcgatcttggagataaacccgtcgctggtattttacatcatcgacagattgttcggcgggcaggggcgtccgtttgagggtaaccgcgagttgaccatgattgaacagaacgtgataacccgcatagtgcagcgcggcctcttggatttgtgcacggtgtgggagcatatcggttcgtttacctcgaagatcgaggcgtacgagacgaacccgcagtttgtgcagatcgcgccgcccagcgagacggtgatcctgataagcttggaggtgcgtatgcagaacgcctcggggcttatgagtttgtgtttcccctacatggtgcttgagagcgtcatcaacaacctgactgtggagaactggatgtctcttcaggggcaggcgacgccggagacgcgcgaacttatggagcgggagcttagcgacgtgacgctctggatttccacggtgatagggaagacgacgctgacgatgagggacttgctgcagctgcagcgcggcgatgtgatatgtttggacaagcgtcacgacagcgatctcatggtgcagataggcggcaagacgaagcttgccggccgcccggggcttatagggcgcaagaaagcggttaagatcacaagtgtcatagaaagggaggtgcctggttgtgagtga

SEQ ID NO: 43544 - protein, 335 aa, Unknown
  Obtained from environmental sample
  DOMAIN (254)...(330): Surface presentation of antigens (SPOA) protein
  misc_feature (1)..(335): Xaa is any amino acid
MSDILSQEEVDALLNAVSSGDLGDQSFDDVKADAPIEDEIPLSLYDFKRPDRVSKINAHAADLHEGYARQFSTTLTNFLRTFIETQLVSVDQLTYSEFVMSISNPSCIYVFRMEPLEGLAILEINPSLVFYIIDRLFGGQGRPFEGNRELTMIEQNVITRIVQRGLLDLCTVWEHIGSFTSKIEAYETNPQFVQIAPPSETVILISLEVRMQNASGLMSLCFPYMVLESVINNLTVENWMSLQGQATPETRELMERELSDVTLWISTVIGKTTLTMRDLLQLQRGDVICLDKRHDSDLMVQIGGKTKLAGRPGLIGRKKAVKITSVIEREVPGCE

SEQ ID NO: 43545 - DNA, 1557 bp, Unknown
  Obtained from environmental sample
  misc_feature (1)..(1557): n is a, c, g, or t
ttgatgaattggtgcgtaaagaacttgccgccaactccgttgatgccgccgctgtataatcctactatgaatattcgcgtgcgctatgccccctcacccacggggcttcaacatatagggggtatcagaactgccctgtttaacttcctttttgcccgttccgccgggggtacgtttatactccggctggaggacacggacaggacccgttacgatcccgcctacgaacaaaacctctacgacaccttttcctggcttggtatacagtgggacgagggccccggacggggcggcccttttgccccgtatgtgcagtcccagcggacggaaacataccggaactttgccgggcaactgctggaaggcggcagcgcctaccggtgtttttgcagcgccgaacggctggaaaaggtgcgcgcagagcgggaggcggcgaagtccccggaaaccggctatgaccgcctctgccggaacattaccagaaaggaaagcgatgacagggccgcagcgggggaaagctttaccgtccggctaaagattcccctggaatccccgccttccgtaaccgggttttccgacaggctgctgggcgctatcgaatggaagaacgatgacataaaccccgatccggtgctgttaaagaccgacggtttccccacctatcacctcgctaacgtggttgacgatcattttatggaaataagccacgttctccgcgctcaggaatggctgtcgtctactccgctccatgtaagcatgtacaaatgcttcggctggactccccctgaatactgccatctccctatggtaatgggtcaggacgggaaaaaactttcaaaacgccacggcgcgaccagcgtagacgagttccgtaagcaaggctatctgcccgaagcgctgttaaattatgtcgctctactgggcgcgtcttacgaggaaggcaaggaaatttacactccggatgagcttgcgcaaaggttcagtcttgaaaaactgaacaaagcgcctgcggtctttgattacaaaaaactggaatggtacaacggccagtatatcagaatgaaaagcgacgaggagcttgcgcgcctctgtctgccctgcgcgaaagaggcgggccttttcggcgagccgggcaaagagccggatgcgcggcaaagctccgtttttaccgccgcgatgccgcttgtaaaagagcgtcttgtctttcttaacgaagttcccgaaaagatcgcgtacctgttcaaagagccgcaaatgcctgctaaggatgagttcattccgaaaaaatccgacctttctgccacgattgagttattaaagcacggactggaaatagtaaaaccgatggcggaggcgttatgtgacgagcatgcggagaatttcataaaagccgaagccgaaaagcgcgtggtaaaactcggtgatttgatgatgcctctccgtgttgcgataacaggcagccgcgtaagtcctccgctttttggatcgcttcgtatactcggcgcggaagcttcgctgcagagggtgcacaaggcgcttgagtttttggaaatataa

SEQ ID NO: 43546 - protein, 518 aa, Unknown
  Obtained from environmental sample
  DOMAIN (24)...(346): tRNA synthetases class I (E and Q), catalytic domain
  misc_feature (1)..(518): Xaa is any amino acid
MMNWCVKNLPPTPLMPPLYNPTMNIRVRYAPSPTGLQHIGGIRTALFNFLFARSAGGTFILRLEDTDRTRYDPAYEQNLYDTFSWLGIQWDEGPGRGGPFAPYVQSQRTETYRNFAGQLLEGGSAYRCFCSAERLEKVRAEREAAKSPETGYDRLCRNITRKESDDRAAAGESFTVRLKIPLESPPSVTGFSDRLLGAIEWKNDDINPDPVLLKTDGFPTYHLANVVDDHFMEISHVLRAQEWLSSTPLHVSMYKCFGWTPPEYCHLPMVMGQDGKKLSKRHGATSVDEFRKQGYLPEALLNYVALLGASYEEGKEIYTPDELAQRFSLEKLNKAPAVFDYKKLEWYNGQYIRMKSDEELARLCLPCAKEAGLFGEPGKEPDARQSSVFTAAMPLVKERLVFLNEVPEKIAYLFKEPQMPAKDEFIPKKSDLSATIELLKHGLEIVKPMAEALCDEHAENFIKAEAEKRVVKLGDLMMPLRVAITGSRVSPPLFGSLRILGAEASLQRVHKALEFLEI

SEQ ID NO: 43547 - DNA, 426 bp, Unknown
  Obtained from environmental sample
  misc_feature (1)..(426): n is a, c, g, or t
ttggtaactcagcaacgaatgggcgaagttgttgaatatatggtcgtacccaatcttagggagaaatttagggaattaggatatgatttcccaaaagctaatcccaattctgatgtttcggatcgtaaaaataatatattccttgaaattgatgttatgcttgaaaatggcgataaagcaatgcttgtcgaagtaaaaactaaacccaccaccgaagatgtacaggatcatattaaacgtcttgaaaaaatgcgtgtatatgccgatctgcacggcgaaaagcgtacatttttgggtgctgttgcaggggtggtaatgtcggacaatgtaaaagaatatatattaaaacaaggcttttttgttatagaaccttctggagaaacttttaatattattccgccaaataataaacctaaagaatggtaa

SEQ ID NO: 43548 - protein, 141 aa, Unknown
  Obtained from environmental sample
  misc_feature (1)..(141): Xaa is any amino acid
MVTQQRMGEVVEYMVVPNLREKFRELGYDFPKANPNSDVSDRKNNIFLEIDVMLENGDKAMLVEVKTKPTTEDVQDHIKRLEKMRVYADLHGEKRTFLGAVAGVVMSDNVKEYILKQGFFVIEPSGETFNIIPPNNKPKEW

SEQ ID NO: 43549 - DNA, 948 bp, Unknown
  Obtained from environmental sample
  misc_feature (1)..(948): n is a, c, g, or t
atgcgtataatatcaccatccgcatacctatccaccctaataggcctaatccgtaacttttgggctcaaaacccaatattccccttttacgcctctttcaaactgacctccaaatgccacttcggctgccccttctgcaacgtcaaaaaagaccccgtccccgacctgtccaccgccgacataaaagccatactgaggaacctctcccgctcctccgtgctcatgaccagttttgagggcggggagccgctgctgcgccctgatatcgaggaactgcttatatacgcccgccgccgcgaattctacctactattcaccacaagcgccaaagacctgctctcgtacccgatagaccgctactcgcaatacatagacttcctgcacgtatcaatcgatgagggacacgataacttgagtctattcaacgcgttaggcgaactctccaagttgccgctcggcctctccgtacagaccgtcgtcacccccgacacgttaaacgcgctggacgacaaggtgcgtatctgctacgaaaacggcgccaacatcgtggtcatccccgcggcggtaatggacaacgccaaagactgctttcccgacatggaacgcctggaacgcaaaacgcgatacttgcgcaaactctacccgaacacaatccacacccccgctggcttcttcgacgcctaccgccgcggaaagtgctcaagcgcctcggtaataatagcgcccgacggccgcctatactacccctgccacatattaggccaaaaaggccccgacctaagggttaccgccctgtcggattggctgacgtcaaaagaggccgccgatatgcgggggatgatgaaacgctgcgaaagaaactgcgggtggtaccaatactacgcgatcgactcgtacacatcaatatcgtcggtggttgacgccatgcggcccattgtgtttgattga

SEQ ID NO: 43550 - protein, 315 aa, Unknown
  Obtained from environmental sample
  SIGNAL (1)...(22)
  DOMAIN (33)...(204): Radical SAM superfamily
  misc_feature (1)..(315): Xaa is any amino acid
MRIISPSAYLSTLIGLIRNFWAQNPIFPFYASFKLTSKCHFGCPFCNVKKDPVPDLSTADIKAILRNLSRSSVLMTSFEGGEPLLRPDIEELLIYARRREFYLLFTTSAKDLLSYPIDRYSQYIDFLHVSIDEGHDNLSLFNALGELSKLPLGLSVQTVVTPDTLNALDDKVRICYENGANIVVIPAAVMDNAKDCFPDMERLERKTRYLRKLYPNTIHTPAGFFDAYRRGKCSSASVIIAPDGRLYYPCHILGQKGPDLRVTALSDWLTSKEAADMRGMMKRCERNCGWYQYYAIDSYTSISSVVDAMRPIVFD

SEQ ID NO: 43551 - DNA, 1200 bp, Unknown
  Obtained from environmental sample
  misc_feature (1)..(1200): n is a, c, g, or t
atgatacagcgtaacccctgcatcgcgaaccttaaagccggatacctctttccggaagtcgccaagaggcggcgggaatacgcagcagcccatcctgaagcaaaaattatcagcctgggagtggggaacacgacggagccgatcctgccccacattaaacagggccttgtggaaggcgcagcgcggctggggacggttgaaacctattcaggctatcaggatgaggggcttcccgctcttcgtgaaaaaatatccgctgttttctacaacggtaaatttaatacaaatgaaatttttatttccgacggagcgaagtgcgacataggcaggctgcagctgctttttggaagatcaacgcgggtagcggttcaggatccttcataccccgtgtatgtggacggctcggttttaatcggctccgcaggagccggagcggtctccggttatgaaggcataatctatcttccctgtacaaaggctaacggttttttcccgaatctttcccggctgccttcaaaaagccttttgtatttttgttcgccgaataacccaaccggcgccgtggcagacagggaacagcttgaagttcttgttaaaacatgccttgaaaaaaaagccattgtcgtctttgacgcggcctacagtgaatacatccgtgacccgaaacttcccaaaagcatctttgagattgaaggctcaaagcagtgcgccattgaagtgaattctttttccaagaccgccggatttaccggcgtgcgcctcggctggacagtggttcccgccgggctaaaatatgaaggcggcgagagcgtcaacgcggactggaaccgcgtttgttccacaatattcaacggggcctccaatatagcgcaggccggcgggcttgccgcgttagacgacgagggcctgaaggaaatcagggagcttaccgatttttacctcggcaacgcccgcctgatacgcgaggccctgcacggcatgggcgtagaaaccacagggggtgacaattccccgtatatatgggcttattttcccggcagggacagttgggaagttttttcacaactgctcgaaaaatgccaggtagttacaacacccggagccgggtttggccccgcgggggacggctacatccgcttctccgcctttggccaccgcgccgacgtggaggaagcgtgtgccaggctgaaaaaattatga

SEQ ID NO: 43552 - protein, 399 aa, Unknown
  Obtained from environmental sample
  DOMAIN (34)...(396): Aminotransferase class I and II
  misc_feature (1)..(399): Xaa is any amino acid
MIQRNPCIANLKAGYLFPEVAKRRREYAAAHPEAKIISLGVGNTTEPILPHIKQGLVEGAARLGTVETYSGYQDEGLPALREKISAVFYNGKFNTNEIFISDGAKCDIGRLQLLFGRSTRVAVQDPSYPVYVDGSVLIGSAGAGAVSGYEGIIYLPCTKANGFFPNLSRLPSKSLLYFCSPNNPTGAVADREQLEVLVKTCLEKKAIVVFDAAYSEYIRDPKLPKSIFEIEGSKQCAIEVNSFSKTAGFTGVRLGWTVVPAGLKYEGGESVNADWNRVCSTIFNGASNIAQAGGLAALDDEGLKEIRELTDFYLGNARLIREALHGMGVETTGGDNSPYIWAYFPGRDSWEVFSQLLEKCQVVTTPGAGFGPAGDGYIRFSAFGHRADVEEACARLKKL

SEQ ID NO: 43553 - DNA, 375 bp, Unknown
  Obtained from environmental sample
  misc_feature (1)..(375): n is a, c, g, or t
atggcggatcttatgcgtcccgcgctttacggcgcgtaccaccacatcagcatccccggcaaggaagacgaaccgttaagcgaaatttatgacgttgtgggcagcctgtgcgaaaataacgataaattcgcggtgcagcgcaagctgccaaaaattgttacttccgcgcaagcccctgacggcaagggcgatttcgttgtgattcatgacgcgggggcgcacggcagggcaatgggctttaactacaacggcaaactgcgctgcggggaactgcttctcaggcaggatggttcaatcgtgatgatacgccggcctgaaaccgtgaatgattattttgcgactattgacctggtgggcctgaaaaaattttcttaa

SEQ ID NO: 43554 - protein, 124 aa, Unknown
  Obtained from environmental sample
  DOMAIN (1)...(93): Pyridoxal-dependent decarboxylase, C-terminal sheet domain
  misc_feature (1)..(124): Xaa is any amino acid
MADLMRPALYGAYHHISIPGKEDEPLSEIYDVVGSLCENNDKFAVQRKLPKIVTSAQAPDGKGDFVVIHDAGAHGRAMGFNYNGKLRCGELLLRQDGSIVMIRRPETVNDYFATIDLVGLKKFS

SEQ ID NO: 43555 - DNA, 1077 bp, Unknown
  Obtained from environmental sample
  misc_feature (1)..(1077): n is a, c, g, or t
atgactgcaatcggtaaaaactcagatgacataaataaaaaggattacgcttttgaaagaattgaaaacgcttccacgcacctgttgggtgtaataaatgacattctggatatgtcaaagatcgaggcaaacaagctggaacttttccccgttacatattgtttcgagaagatgatccaaaaaattgtcgatgttatcagcttccgtaccgatgaaaaatatcagaagttaatcattaatatcgatgaaaaaataccccgttttttgacaggggacgatcagcaccttgcccaggtgatttccaacctcctgtcaaacgcggtgaaatttacccccgaaaacggaaagataagccttggcgcgaagcttctggaagaaaaagacggcttatgcacattgcagatcgaagtaagcgattccggcatagggataagcgaagaacagcagtcgcggcttttcagctcttttgagcaggcggacagcggaacttcgcgtaaatacggcggcacagggctcgggcttgccatttccaaaagcatcgtggaaatgatggatggcaggatttggattgaatccgaaccgggcaaaggttccacattctcctttacagtaaaagctaaaaaagccaatgaaataagcgttgatcctgatgagaaagaagaagagatcaaccagctggcggagaaagataactttgaaaattataccattctccttgccgaggatatagaaataaaccgggagattgtcattaccatccttgaaccgacagccctgaaaattgactgcgcggaaaacggaagggaagccgtaaataaattccgcgactcgccgaataaatacgatatgattttaatggatctccaaatgccggaaatggacggatatgaggcgacaatcgaaatccgcaaaattgagcaggaaattacgcgaaagcctgttcccattgtagcaatgaccgctaacgtttttatggaggacattgaaaaatgcctttcgattggcatgaacgatcacgtgggtaagccgctggatattaaagagttattgaagaagctgaaaaaatacctgcaataa

SEQ ID NO: 43556 - protein, 358 aa, Unknown
  Obtained from environmental sample
  DOMAIN (235)...(354): Response regulator receiver domain
  misc_feature (1)..(358): Xaa is any amino acid
MTAIGKNSDDINKKDYAFERIENASTHLLGVINDILDMSKIEANKLELFPVTYCFEKMIQKIVDVISFRTDEKYQKLIINIDEKIPRFLTGDDQHLAQVISNLLSNAVKFTPENGKISLGAKLLEEKDGLCTLQIEVSDSGIGISEEQQSRLFSSFEQADSGTSRKYGGTGLGLAISKSIVEMMDGRIWIESEPGKGSTFSFTVKAKKANEISVDPDEKEEEINQLAEKDNFENYTILLAEDIEINREIVITILEPTALKIDCAENGREAVNKFRDSPNKYDMILMDLQMPEMDGYEATIEIRKIEQEITRKPVPIVAMTANVFMEDIEKCLSIGMNDHVGKPLDIKELLKKLKKYLQ

SEQ ID NO: 43557 - DNA, 738 bp, Unknown
  Obtained from environmental sample
  misc_feature (1)..(738): n is a, c, g, or t
gtggcgagaccgaaagatcaacatcgacttttccatttcctggcgcatttataccagcgcaacggccgcctgtacaacgagaatggctcgcggactttactggacggtgagacggccattgaggcgtttgacgtttacaccaaattttttacccattataaaactcctatagtgtataattttttaaaccgtttccgcaccggcgagatgccccttgctttcgccgattacaccaatttcaacaccctggaagtttttgcgccggaactgcgcggcctctggggtttcgcccgcatgcccggactgcgaaaagccgatggcggcattgaccgttcggtgccgaccggaaccctcgcttccatgattttttccaacgcgaaaaaaccggagcttgcctgggaatttttgaagtggtgggtcagcgccgatacccagctccgcttcggcagggagcttgaaagcgtcatgggtgccgcggcgcgttatcccacggctaattttgacgcttttacgcggctttcctggggctcggatcaaatggccgtgttaagggaacagcgttcctggaccgtgggcacgccggaagtgcccggcggttactatgtcagccgccatataaccaacgcggtgcgccgcatactgaacgaaggcgaagacacgcgggaaaccctgctggattacagcataacgataaatgacgagctgataaaaaaacgcaaggaattcggtctggaataa

SEQ ID NO: 43558 - protein, 245 aa, Unknown
  Obtained from environmental sample
  misc_feature (1)..(245): Xaa is any amino acid
MARPKDQHRLFHFLAHLYQRNGRLYNENGSRTLLDGETAIEAFDVYTKFFTHYKTPIVYNFLNRFRTGEMPLAFADYTNFNTLEVFAPELRGLWGFARMPGLRKADGGIDRSVPTGTLASMIFSNAKKPELAWEFLKWWVSADTQLRFGRELESVMGAAARYPTANFDAFTRLSWGSDQMAVLREQRSWTVGTPEVPGGYYVSRHITNAVRRILNEGEDTRETLLDYSITINDELIKKRKEFGLE

SEQ ID NO: 43559 - DNA, 642 bp, Unknown
  Obtained from environmental sample
  misc_feature (1)..(642): n is a, c, g, or t
atgagtttagcgcggtatacggaaaaaaagaaagcggccttttcgtatctgttaagggaaattgcaaaaagccgcgtgtgctatatttttcttgccccttacgccatagtcttcgccctgttctatatcgcgccgcttgtggtttccgtattttacagttttacatacttcaatatcctggagccgcccaaatttatcggcctgcgtaattatatcaatcttatgttaggcgacgacgtgttcctcaaggcggtgaaaaatacttttatcatggcggcggtaaccggccccatcggttatattttttcattcctgttcgcgtggtttatcaacgagctgccccgttatatacgcgccgtggtaacgcttgtcttttacgcgccctcaatttcgcggcgcggtgtacatgatatgggcgattatttttccgggcgacgcctacggctacatcaacgggctttgnatgaatctggggattttgaatcagccggtattgtggctgagcgacaccaagtatatgatgccggttatgctggtggttattttgtggatgagtatggggacgggctttcttgcctttatcgcggggctttccacaatcgacgtaacgctctacgaggccggcctcatggacggcattaa

SEQ ID NO: 43560 - protein, 213 aa, Unknown
  Obtained from environmental sample
  misc_feature (1)..(213): Xaa is any amino acid
MSLARYTEKKKAAFSYLLREIAKSRVCYIFLAPYAIVFALFYIAPLVVSVFYSFTYFNILEPPKFIGLRNYINLMLGDDVFLKAVKNTFIMAAVTGPIGYIFSFLFAWFINELPRYIRAVVTLVFYAPSISRRGVHDMGDYFSGRRLRLHQRALXESGDFESAGIVAERHQVYDAGYAGGYFVDEYGDGLSCLYRGAFHNRRNALRGRPHGRH

SEQ ID NO: 43561 - DNA, 567 bp, Unknown
  Obtained from environmental sample
  misc_feature (1)..(567): n is a, c, g, or t
ttgtcttttacgcgccctcaatttcgcggcgcggtgtacatgatatgggcgattatttttccgggcgacgcctacggctacatcaacgggctttgnatgaatctggggattttgaatcagccggtattgtggctgagcgacaccaagtatatgatgccggttatgctggtggttattttgtggatgagtatggggacgggctttcttgcctttatcgcggggctttccacaatcgacgtaacgctctacgaggccggcctcatggacggcattaaaaaccggtggcaggaactgtggtacattacacttcccaatatgaaaggaatgttgatgttcggcgctgttatggcaattacccagtccttcggcgtagcggatgtcaccgtcgcgctggccggttttccaagtacggattacgcggtgcataccgtggtgaatcatctggttgactacggttcaatccgttttgatatgggttacgcctgcgcgatagcgacgctcttgtttcttacgatgatcgtgtgcaatgccttgattcaaaaaatgctgcgcagggtggggacataa

SEQ ID NO: 43562 - protein, 188 aa, Unknown
  Obtained from environmental sample
  misc_feature (1)..(188): Xaa is any amino acid
MSFTRPQFRGAVYMIWAIIFPGDAYGYINGLXMNLGILNQPVLWLSDTKYMMPVMLVVILWMSMGTGFLAFIAGLSTIDVTLYEAGLMDGIKNRWQELWYITLPNMKGMLMFGAVMAITQSFGVADVTVALAGFPSTDYAVHTVVNHLVDYGSIRFDMGYACAIATLLFLTMIVCNALIQKMLRRVGT

SEQ ID NO: 43563 - DNA, 1593 bp, Unknown
  Obtained from environmental sample
  misc_feature (1)..(1593): n is a, c, g, or t
ttgacgaactcggcggcgacagcacagaaatgtaaatttcatccggaagatttctcacaaagaacaccaagaaattttaccacggagtacacggagtttcacggaggaataaaagattttcgtatcnaaactccgtggtactccgtgatactccggggttttattttctttatcttctatacctcattcctatttcctaattcctcattgtcggcttctccgacaaactacacctacaactacgatttctgggaggaacaagtcgcttccccggacgcgtattatgtgagcgcctatgttctgggtaccggattgggtatcggcaatttccgcgatccgcaggggctttttgtcagggataaccgcgtttatatctgcgattcgggcaataaccggatagtcctgctggcttatgaaaacggagaacaccggctggtgtcggtgacgaaatcggtgacgattaacggcgttgagagtccctttaattatcccatggatatttttgaaagcagggacggctctctgtatgtagccgataccaacaaccaccgtatactcaggctggaccgtgactggaactacatttcttccatattaaaacccgatgatgaaagcatcgacgaaaacgccgaatttctgccgcttaaacttgtcgttgattttgccaaccgcctctttgtgcaggcccggaatatcaacaagggactcatggaatttgatagccgtgggaccttttccggttacatgggggcgaacaaggtaaatgtccatattattgattatatatggaaactcctcgccacccaggcccagaaagagagaatggaactgtttatccccaccgaatacaacaacctctgcctcgataaggatggctttatttatgtcaccaacgaaagcggtcaggtggatccagtcaggcggctcaacgcaatgggacaggatattttgattcggaacggctatgaggatccagtcggcgacctggcttacggcaaagcgggaggcgtaatcgggccctcaaagtttattgacgtggcggctatggataacgattcctatgcctgcctggacagaacgcgggggcggatttttatgtacgattttcagggcaaccttttatacgcctttggcggcctgggcaacagggaaggctgtttcctgaagccgacaggccttgcccaaatgggccgttccctgtatgccctggattcggacaccaccgcccttacccgctttgatatgacaaactacggagtgttgataaacagcgccctggacgaataccaggccggccgctacgaagcctccgcggaggtttgggaagaagtgcttaaaatgaacggcaactatgaccttgcctatatcggcataggccgggcggcgctgcggcagcgcgaataccaaaaggcgatgacttactacaaactcaagcattaccgcgaaggctacggcaaggcttttcagttataccgcaaacaatttatggaagagaacctctggaaaatgctgctggttctggctgtaattttatttgtcccgccgatcgttaaaaccgccgtgaaaatcgtcagggaggtaaaggaagcatga

SEQ ID NO: 43564 - protein, 530 aa, Unknown
  Obtained from environmental sample
  DOMAIN (161)...(188): NHL repeat
  misc_feature (1)..(530): Xaa is any amino acid
MTNSAATAQKCKFHPEDFSQRTPRNFTTEYTEFHGGIKDFRIXTPWYSVILRGFIFFIFYTSFLFPNSSLSASPTNYTYNYDFWEEQVASPDAYYVSAYVLGTGLGIGNFRDPQGLFVRDNRVYICDSGNNRIVLLAYENGEHRLVSVTKSVTINGVESPFNYPMDIFESRDGSLYVADTNNHRILRLDRDWNYISSILKPDDESIDENAEFLPLKLVVDFANRLFVQARNINKGLMEFDSRGTFSGYMGANKVNVHIIDYIWKLLATQAQKERMELFIPTEYNNLCLDKDGFIYVTNESGQVDPVRRLNAMGQDILIRNGYEDPVGDLAYGKAGGVIGPSKFIDVAAMDNDSYACLDRTRGRIFMYDFQGNLLYAFGGLGNREGCFLKPTGLAQMGRSLYALDSDTTALTRFDMTNYGVLINSALDEYQAGRYEASAEVWEEVLKMNGNYDLAYIGIGRAALRQREYQKAMTYYKLKHYREGYGKAFQLYRKQFMEENLWKMLLVLAVILFVPPIVKTAVKIVREVKEA

SEQ ID NO: 43565 - DNA, 639 bp, Unknown
  Obtained from environmental sample
  misc_feature (1)..(639): n is a, c, g, or t
ttgttcggcggtacgggcgaaggcaacaaatcacagcatgaattaaccgatattgagcaatccgttatggaaggaataatcgtccgcatactgggaaatatgcgggaggcgtggacccaggtcatcgacctgcggccccgcttgggtcagatcgacaccaacccccaatttgcccaaattgtacccccgaccgacatggtggttctggtaaccctggaaaccaaagtcggcgaagttgaaggcatgatcaacttctgtataccctacatcaccattgaaccgatcatcggcaagctgtccacccagttctggttctctacggcgcaccgtgccggcacctctgaaaacttaaccgttctgaaagataaactggaaactgttgatattgacgcggtagcggtcatcggcaagatagacctttccgtccgcgaagtgctttccctccgtatgggggatgttgtacggctgtacaatacccgcaccagcgacccctattcgctgaacatcggcagtaagcccaagttcctctgccgtcccggcgtggtgggcaaaaaactcgccgtgcagatcgtcaagaaaatcgctgaaatcaaacaggaagattttgacgaactcggcggcgacagcacagaaatgtaa

SEQ ID NO: 43566 - protein, 212 aa, Unknown
  Obtained from environmental sample
  DOMAIN (120)...(197): Surface presentation of antigens (SPOA) protein
  misc_feature (1)..(212): Xaa is any amino acid
MFGGTGEGNKSQHELTDIEQSVMEGIIVRILGNMREAWTQVIDLRPRLGQIDTNPQFAQIVPPTDMVVLVTLETKVGEVEGMINFCIPYITIEPIIGKLSTQFWFSTAHRAGTSENLTVLKDKLETVDIDAVAVIGKIDLSVREVLSLRMGDVVRLYNTRTSDPYSLNIGSKPKFLCRPGVVGKKLAVQIVKKIAEIKQEDFDELGGDSTEM

SEQ ID NO: 43567 - DNA, 738 bp, Unknown
  Obtained from environmental sample
  misc_feature (1)..(738): n is a, c, g, or t
ttgccgatatacaatggaaggactgaaacagtgtcaacatcacaaaaggcattatttagcttactaataaccgttatactctttgctttttttacggttttcgcctttatgaggctgttcgatctgatagaagcccgtttttataatccctccgtcaccgcccacatgattagcgtaaacaaccggaatgccaaaataatagaagaacttttcaaagacatcgaggaccgcctgtcagaaaccctgaaaactgacgctgtgcggagcagcttaatgtctgaaaaaaccgaggaggattattttaccctttcaaaaattttcagtcctcccagggattctcctgacaaaacgcaatctaaaacgcaatttgagatacaatgggttcgttttattgagtacgatggaacaagtctttatttttctacctacagcccggatataatagactacacttatcaaataccgttttacggcaattacaatgatcctgactttccttacgaattgattgcggttcaaaacgggggagttccaaaacataccctggacaataaatcaggacaaattctattttctttccctctgtacgattcttttgatatttactgcggtacagctttattttccatctctatggactccgtattggacaggcttttcaatgaaggaatgatgatacccggtaaggtaacaatgttaatttcaaaatccgccggggaatggtgtttggggatttag

SEQ ID NO: 43568 - protein, 245 aa, Unknown
  Obtained from environmental sample
  misc_feature (1)..(245): Xaa is any amino acid
MPIYNGRTETVSTSQKALFSLLITVILFAFFTVFAFMRLFDLIEARFYNPSVTAHMISVNNRNAKIIEELFKDIEDRLSETLKTDAVRSSLMSEKTEEDYFTLSKIFSPPRDSPDKTQSKTQFEIQWVRFIEYDGTSLYFSTYSPDIIDYTYQIPFYGNYNDPDFPYELIAVQNGGVPKHTLDNKSGQILFSFPLYDSFDIYCGTALFSISMDSVLDRLFNEGMMIPGKVTMLISKSAGEWCLGI

SEQ ID NO: 43569 - DNA, 924 bp, Unknown
  Obtained from environmental sample
  misc_feature (1)..(924): n is a, c, g, or t
ttgcatgcttttatctctaaagaggtatcccaaaggcttgacgtagatgaggaagactgcaaggttgtggaagcccattatttcaggggccgatcgattaagagcgggaacgaaaaggcaatagtgggggagcgtttttttgaagatgcccttacaaaagagggggtaaatctccattatctcccattaataaggggtgccaataacgaactaaaagagaaaggtatagacgtttcccttgcgctggacgcttacaaaaaggccacagctaaaacttttgagattttggcgcttattgcgggagacggggactacctgccgttggtaagggaacttcaaactatgagcgtgcctattgatgtgatgctgttaagctgggattttgaatgcgtcaatggagatgtaaccatgacctcccaggatcttttggaagaagtgaaataccctattcaaatggccaatgtgatcgatgatcggttgaatctaaaaaaccccgttattttgggactttttgagccccggcaaatggagactccaaatattcaaccgggttttcaggcggtaagcccggttcctgttgctgtggcacagcccattagcccgtttcccactccaatttctcccctgccggcccagccggtcgtcaatagcttttcaaagcgaaaagccctgacagaagttgaaatggcgcaggagcgtatttctaccatattatctcttaatggtaccggcggctggataagggatgtggaatacaacaacttttattttttttactccgatgtaattaataaaaagcccgaagaattggcggcgggtatgaccttgcagtttcgtttgagattcgacaggaaaaagactgaacaaaaggataatggcgaacccagctatagggcaatcggaccgatttacgtggttgactag

SEQ ID NO: 43570 - protein, 307 aa, Unknown
  Obtained from environmental sample
  misc_feature (1)..(307): Xaa is any amino acid
MHAFISKEVSQRLDVDEEDCKVVEAHYFRGRSIKSGNEKAIVGERFFEDALTKEGVNLHYLPLIRGANNELKEKGIDVSLALDAYKKATAKTFEILALIAGDGDYLPLVRELQTMSVPIDVMLLSWDFECVNGDVTMTSQDLLEEVKYPIQMANVIDDRLNLKNPVILGLFEPRQMETPNIQPGFQAVSPVPVAVAQPISPFPTPISPLPAQPVVNSFSKRKALTEVEMAQERISTILSLNGTGGWIRDVEYNNFYFFYSDVINKKPEELAAGMTLQFRLRFDRKKTEQKDNGEPSYRAIGPIYVVD

SEQ ID NO: 43571 - DNA, 435 bp, Unknown
  Obtained from environmental sample
  misc_feature (1)..(435): n is a, c, g, or t
gtgattatcgcggtcgattttgacgggacgtgcgtggcgcacgaatacccaaaggtgggcaaggacattggggcagcgccggtgctgaaatggctcgtagaacaggggcaccaaattattttgtggacgatgcgaggcgatcctaaaggtgaccttaaagacgcaacagactggtttgcaaaaaatggcatacctctattcggcgtgaatattaatccagaccagtatgcgtgggcaaagtcgccaaaggcatacgcgaatatttacatcgacgacgcggcgcttggctgccccttggtcactcctatagaaaacgggcgcgtttctgaccgttcttatgtagattgggtgcgcgtgagggaaatgctggaagatatttttagcggcgctggcgctatcggggctacaaagctaataggcgtaggaggcgattaa

SEQ ID NO: 43572 - protein, 144 aa, Unknown
  Obtained from environmental sample
  misc_feature (1)..(144): Xaa is any amino acid
MIIAVDFDGTCVAHEYPKVGKDIGAAPVLKWLVEQGHQIILWTMRGDPKGDLKDATDWFAKNGIPLFGVNINPDQYAWAKSPKAYANIYIDDAALGCPLVTPIENGRVSDRSYVDWVRVREMLEDIFSGAGAIGATKLIGVGGD

SEQ ID NO: 43573 - DNA, 492 bp, Unknown
  Obtained from environmental sample
  misc_feature (1)..(492): n is a, c, g, or t
ttgcggacaaaaatatgcacaatgacgcgcttgaggcgattagaaagggcaattttttttaacaccgaagacccgaccatttattatttaaccggcgttttccgccgcgtccgccgcccaaatcttttggtgggattctcatcaaacgcggaaaaagaaaaggttaggttatttaaacttgccgaaaattcttatttacgggcgttggaacttgacgccacatacgcaaaaccaatgtacggtcttggaatattgtatgtatttgaacttgacagacccttggacgctattccgtatctggagcgttatctgaaaataaatgtgtcggatgtttccgctatgtttgttcttgcaagagcgtattattccacgggaaaatattcggacgcgcttgaatgttacgatagaataataaataaaacaaaagataaaaatattaaagaagaggcttttaaaaataaggatattattcaggggatgatatatgactga

SEQ ID NO: 43574 - protein, 163 aa, Unknown
  Obtained from environmental sample
  DOMAIN (111)...(144): Tetratricopeptide repeat
  misc_feature (1)..(163): Xaa is any amino acid
MRTKICTMTRLRRLERAIFFNTEDPTIYYLTGVFRRVRRPNLLVGFSSNAEKEKVRLFKLAENSYLRALELDATYAKPMYGLGILYVFELDRPLDAIPYLERYLKINVSDVSAMFVLARAYYSTGKYSDALECYDRIINKTKDKNIKEEAFKNKDIIQGMIYD

SEQ ID NO: 43575 - DNA, 2172 bp, Unknown
  Obtained from environmental sample
  misc_feature (1)..(2172): n is a, c, g, or t
atgatgatcgccattgtggcagtcatagcgggcggaatcgcggtaattgagttaatgcgggcttccgatattagcctgagattaagcctccgcggaatgaattatttagccagagagcaagcccagtactggcaaggaaggggagaaggctatataaagcagttaaccggaattgcggacataatgggcgaatttgaaatactgcccgcacaggaccggagggatcagtatgacaatatgctgaaagctaccttgaataacaatcccaccttcgcccgaatattttccatctggaaaccgaacgccatggacggcatggacagcagttatataagccgtccgggttcaactccgacggggcagtacgccatgacatggggcagggataccggtccgattgaagtaaagcccaacctcatcattaatgagattaacgcgtggatgaacggcccaaacgcgctcaagacccggattgaaaaccccacgccttttaaaaataacggaaaagacacctttattatcagaattggagttcccataaccagaagcaccagcagtgaagtagtcggacacttatgtgttcttatagacatcgctccaatgcaggcagggatagaaaaaaccattaaaagtcacgaagaaatatcggcaatggttctttattcgggtaacggaatgataatgggacatttggttccggagcgggtgggaaagatgctggctgatgtggatacgatatacggcgattatataaaagaagcggacaaagccgtgcgcgaggggaaggaatttcaatgcagtagctattcaccggttctaaaagcggatatgaaaataattttgattcccttccagataggcgattccgacatgtactggacaataatgacagcgacatcagaaacgtacattatgaaagaagttgacgcgattaccagatttaccgtcattcttgcggtaatagccattgttatagcggctgtaattgtgtactttgtccttaacagcacaacaaagccaatcatcaatgtagcggacaccctcaaggacatttcagagggcgaaggcgatctgacgcggagtattgccgtcacttccaaagacgaaattggcgaccttgctttgtacttcaataaaacgctcggaaaaatcaaagaccttgtacttgttattaaaaagcaagcaggattattgaaagatataggcaacgaccttgccaacaatatgaccgaaaccgccgcggcgattaaccaaatcaccgccaacattcagagcatcaaaggcagagtcataaaccagagcgcaagcgtaaccgaaaccaacgcgacaatggaacaagttatcgcgaacatcaacaaactaaacggccatgtagaaaaccagagcagaaatgtttcccaggcgtcatccgccattgaggagatggtagccaatataagttctgtcaccagcacgctggtcaacaacgcagtcaatgtaaattcattaaaagaagcttccgaagtaggacgggccggattgcaggaagtggcaacgaacattcaggaaatatcccgcgagtctgaaggcttgctggagattaacgcggtaatggaaaacatcgcaagccagaccaacctgctttcgatgaacgccgcgatagaagccgcgcacgccggggaagcggggaagggttttgccgtagtcgccgatgaaatccgcaaactggccgaatcgtccggcgaacaatccaaaacgattagcacggtactgaaaaaaatagctgaatcaatcaataaaataacaagttccaccgacaacgtgcttgccagattcgagttgattgactcaggagtaaagaccgtttcgcagcaggaagaaaacatccgtaacgcgatggaggaacagggacaaggaagcaaacaggttcttcaaagcgcaagcagtttgagcggactgacccaacaggtaaaaagcggttcggaggaaatgcttaacggcagtcaggaagtaatgcatgaaagccagaaccttgaagaagtaacgcaggaaataaccggcggtatgaacgagatggcgtcaggcgcggatcangtgaatgtcgcggtacacaatgttaatgagctgaccaacagaacccgtgaaggcattaacagtttattgaaagaagtttcacgcttcagggtagagtaa

SEQ ID NO: 43576 - protein, 723 aa, Unknown
  Obtained from environmental sample
  DOMAIN (459)...(679): Methyl-accepting chemotaxis protein (MCP) signaling domain
  misc_feature (1)..(723): Xaa is any amino acid
MMIAIVAVIAGGIAVIELMRASDISLRLSLRGMNYLAREQAQYWQGRGEGYIKQLTGIADIMGEFEILPAQDRRDQYDNMLKATLNNNPTFARIFSIWKPNAMDGMDSSYISRPGSTPTGQYAMTWGRDTGPIEVKPNLIINEINAWMNGPNALKTRIENPTPFKNNGKDTFIIRIGVPITRSTSSEVVGHLCVLIDIAPMQAGIEKTIKSHEEISAMVLYSGNGMIMGHLVPERVGKMLADVDTIYGDYIKEADKAVREGKEFQCSSYSPVLKADMKIILIPFQIGDSDMYWTIMTATSETYIMKEVDAITRFTVILAVIAIVIAAVIVYFVLNSTTKPIINVADTLKDISEGEGDLTRSIAVTSKDEIGDLALYFNKTLGKIKDLVLVIKKQAGLLKDIGNDLANNMTETAAAINQITANIQSIKGRVINQSASVTETNATMEQVIANINKLNGHVENQSRNVSQASSAIEEMVANISSVTSTLVNNAVNVNSLKEASEVGRAGLQEVATNIQEISRESEGLLEINAVMENIASQTNLLSMNAAIEAAHAGEAGKGFAVVADEIRKLAESSGEQSKTISTVLKKIAESINKITSSTDNVLARFELIDSGVKTVSQQEENIRNAMEEQGQGSKQVLQSASSLSGLTQQVKSGSEEMLNGSQEVMHESQNLEEVTQEITGGMNEMASGADXVNVAVHNVNELTNRTREGINSLLKEVSRFRVE

SEQ ID NO: 43577 - DNA, 360 bp, Unknown
  Obtained from environmental sample
  misc_feature (1)..(360): n is a, c, g, or t
ttgcttccttgtccctgttcctccatcgcgttacggatgttttcttcctgctgcgaaacggtctttactcctgagtcaatcaactcgaatctggcaagcacgttgtcggtggaacttgttattttattgattgattcagctatttttttcagtaccgtgctaatcgttttggattgttcgccggacgattcggccagtttgcggatttcatcggcgactacggcaaaacccttccccgcttccccggcgtgcgcggcttctatcgcggcgttcatcgaaagcaggttggtctggcttgcgatgttttccattaccgcgttaatctccagcaagccttcagactcgcgggatatttcctga

SEQ ID NO: 43578 - protein, 119 aa, Unknown
  Obtained from environmental sample
  misc_feature (1)..(119): Xaa is any amino acid
MLPCPCSSIALRMFSSCCETVFTPESINSNLASTLSVELVILLIDSAIFFSTVLIVLDCSPDDSASLRISSATTAKPFPASPACAASIAAFIESRLVWLAMFSITALISSKPSDSRDIS

SEQ ID NO: 43579 - DNA, 1299 bp, Unknown
  Obtained from environmental sample
  misc_feature (1)..(1299): n is a, c, g, or t
atgacgccaaaacaggtagaaaatctgttcaacgaatacacgcactttaacatggaagccaaccgtacaaccgaaggcgcaggacttggaatgaccattacgcgaaatttagttgagctgatgaacggacaaattcatattaaaagcgcggttggcgagggaacaacagtaaccgtgcgtttgccgcaaaaaacagccggtatcggcgtacgcgaaataataggcaaagtaatgtcagaaagccttaaacaatttaagcttggcaatgttatccatctaaaaaaatcgcaggttagccatgaatatatgccttatggcagcgttctaattgttgacgatgtcgaaactaatttatatgtggcaaaaggacttatgtccccgtacggccttaagatcgagcttgctacaagcggatttgaagcgattgaaaaggtaaaaaacggcaacgtttatgacattatttttatggaccacatgatgcctaaattagacggcattgaaacaacaaaaattatcagggaaacaggatattcgcagcccatagttgccttgacagctaacgcccttaccggccaggcggaagtgtttttgaaaaacggtttcgatgattttatttccaagccaattgacattcgtcagttgaatgttacgttaattaaacatatccgcaataaacaatcgccggaagtgcttgaagccgcgcaaaagaaaaaagccgaatttgataaaaaacaggtttcagtccacggagtacaacaaattgacccgcagttggcgggtatcttcgcgcgggatgccgaaaaagccattcatgtattggatactgtattgcagaaaaattttaacaccgaaagcgacatacaactgtacattattaatgttcacgcaatgaaaagcgctctcgccaacatcggtgaaacggagctttcagcctccgcgttaaagctggagcaggcgggcagggaaaaagatttaaacctgatgtcaacggaaacaaaaaatttcatggaagcgctgcaagccgttatcaataaaataaaacccaaagacgacaacgatgcggatatcgaagatacacaggaagctcttgcttatttacgcgagaaactaacggacatcaagaacgcatgcgatgcgtatgacaaaaagtcggtaaaaaacaccctaaacgaactaaaagaaaaaatatggtcacataaaaccaaagaactgatgaactccatagccgatcatctgctgcacagcgaattcgacgaagtttccagccttgccgacagttacattaagtcaatagagtaa

SEQ ID NO: 43580 - protein, 432 aa, Unknown
  Obtained from environmental sample
  DOMAIN (1)...(64): Histidine kinase-, DNA gyrase B-, and HSP90-like ATPase
  misc_feature (1)..(432): Xaa is any amino acid
MTPKQVENLFNEYTHFNMEANRTTEGAGLGMTITRNLVELMNGQIHIKSAVGEGTTVTVRLPQKTAGIGVREIIGKVMSESLKQFKLGNVIHLKKSQVSHEYMPYGSVLIVDDVETNLYVAKGLMSPYGLKIELATSGFEAIEKVKNGNVYDIIFMDHMMPKLDGIETTKIIRETGYSQPIVALTANALTGQAEVFLKNGFDDFISKPIDIRQLNVTLIKHIRNKQSPEVLEAAQKKKAEFDKKQVSVHGVQQIDPQLAGIFARDAEKAIHVLDTVLQKNFNTESDIQLYIINVHAMKSALANIGETELSASALKLEQAGREKDLNLMSTETKNFMEALQAVINKIKPKDDNDADIEDTQEALAYLREKLTDIKNACDAYDKKSVKNTLNELKEKIWSHKTKELMNSIADHLLHSEFDEVSSLADSYIKSIE

SEQ ID NO: 43581 - DNA, 654 bp, Unknown
  Obtained from environmental sample
  misc_feature (1)..(654): n is a, c, g, or t
atgagcgatcatctgcttttatctgacaccgaagcagaaaatttcatgctaaacacgaaacatgaaaaaagtgaatatctcacaaaacagcttattacttacatcggcaacaaacgggctcttttggattttatcggaaacggaataaaaatagtacaaaaaaggctgcaaaaagataaattgaaaatgtttgacgttttcagcggctcgggaattgtcgccagatattttaaacaatattcagagcttcttgttgtaaatgatttagaaaaatattcaacggtaattaatgaatgttatttatcaaatgaaaatgaacttaacctgttcgcactgcggaaatattattttgaaattacggaagaaattaataaaaatccccaaaaagggataatttccaagttatacgccccaatgaatgatgaagaaataaatcctgatgaaagggtgttttttacatcaagaaacgctgtgtatattgataccgncagacaaataattgaaaagaatattccgcaaaaagaacaaaaatattttttagcgccattattatcagaagcatcaatacatgccaatacatcgggagttttcaaagtttttacaaaaataagaaaacggaatcggtcaatttgncgccctgataaagacgcttaa

SEQ ID NO: 43582 - protein, 217 aa, Unknown
  Obtained from environmental sample
  misc_feature (1)..(217): Xaa is any amino acid
MSDHLLLSDTEAENFMLNTKHEKSEYLTKQLITYIGNKRALLDFIGNGIKIVQKRLQKDKLKMFDVFSGSGIVARYFKQYSELLVVNDLEKYSTVINECYLSNENELNLFALRKYYFEITEEINKNPQKGIISKLYAPMNDEEINPDERVFFTSRNAVYIDTXRQIIEKNIPQKEQKYFLAPLLSEASIHANTSGVFKVFTKIRKRNRSIXRPDKDA

SEQ ID NO: 43583 - DNA, 1017 bp, Unknown
  Obtained from environmental sample
  misc_feature (1)..(1017): n is a, c, g, or t
ttgacctttcgaagcatctatacggcgtggccgacttggcttatgtgttatatattgagcccccggattatcgaaggcctcaaacggctcaagatcgggcagaccattcgggaagacggaccggcaaatcatttaaaaaaagccggtacccccaccatgggtgggagcttgatcattttagtcgtagtgatttccatgttgttttggcaggatctgggcagccaaaaggtgtggcttaccatgggcgcttttgtcgcttttggaatagtcggctttgtggatgactatcttaaagtaactaaacataattccgacgggcttccgggttgggttaggttatgcagtgaatttgtgattgccctggtaataatgcttattctctattttacaggggatgagggatccacttatctttacattccctttttcaaaaatccagtcattgatctgggggtcctctggataccctttggggtgcttttgattgtaggtgaatccaacgcggtgaatttttctgacggtctcgatggccttttggcgggattactgattatggtttttatcacccttaccatattgacctatctttcaggccgtgccgattattcggcctatttgggaattccctatatacccggggccggggaacttacggtcttttgccttgcggcggtcggggcctgtgtgggttttctctggttcaattcccaccccgcagaagtctttatgggtgatgtggggagtctgtcccttgggggagttatcgcggtgatttccctgattattaagaaagaaattttgattctgattatcggaggggtttttgttctggagattgcctcggtgattatccaggtggtttcatttaagttaagagggaaaagggttttcaaaatggcgcctattcatcaccattttgagttatccggctgggccgagaccaaggtggtaatccgcttttggatcctgggaggactcttcgcgatcatcgccttatcaacgttaaaaatacagtaa

SEQ ID NO: 43584 - protein, 338 aa, Unknown
  Obtained from environmental sample
  DOMAIN (77)...(268): Glycosyl transferase family 4
  misc_feature (1)..(338): Xaa is any amino acid
MTFRSIYTAWPTWLMCYILSPRIIEGLKRLKIGQTIREDGPANHLKKAGTPTMGGSLIILVVVISMLFWQDLGSQKVWLTMGAFVAFGIVGFVDDYLKVTKHNSDGLPGWVRLCSEFVIALVIMLILYFTGDEGSTYLYIPFFKNPVIDLGVLWIPFGVLLIVGESNAVNFSDGLDGLLAGLLIMVFITLTILTYLSGRADYSAYLGIPYIPGAGELTVFCLAAVGACVGFLWFNSHPAEVFMGDVGSLSLGGVIAVISLIIKKEILILIIGGVFVLEIASVIIQVVSFKLRGKRVFKMAPIHHHFELSGWAETKVVIRFWILGGLFAIIALSTLKIQ

SEQ ID NO: 43585 - DNA, 363 bp, Unknown
  Obtained from environmental sample
  misc_feature (1)..(363): n is a, c, g, or t
atgtataagctgcggctaccgtttcccagttacgaaaggattgatgaaacacagtttatggtggttaaaaaggacggaaggcgagagccttttgaccgcgtaaaacttgagaagggcattgagcgggctttggaaaaaagaccgttctcgcagatgcagattgaaagccttgtcaacgagattgaagatgctacggcgatcttaagcaagggcagccgcgaaattgccagcacggaaataggggatcaggtattaaagaggcttgaagcgatagacaaggtcgcctatatacgcttcgcctcggtgtacaaacattttgaagatttggatgaatttataaaggagataaagacagtatcttga

SEQ ID NO: 43586 - protein, 120 aa, Unknown
  Obtained from environmental sample
  DOMAIN (19)...(111): ATP cone domain
  misc_feature (1)..(120): Xaa is any amino acid
MYKLRLPFPSYERIDETQFMVVKKDGRREPFDRVKLEKGIERALEKRPFSQMQIESLVNEIEDATAILSKGSREIASTEIGDQVLKRLEAIDKVAYIRFASVYKHFEDLDEFIKEIKTVS

SEQ ID NO: 43587 - DNA, 714 bp, Unknown
  Obtained from environmental sample
  misc_feature (1)..(714): n is a, c, g, or t
atgaccaagatagaaaaacaaaaaatagcggacttactggatattacgcaagattattattcctcaggttataaaagcgaaaagagggaatatcattttgaagatgacacgccttccgttaaaagcggcgtaattaatattgatagcggagccgaaagcatagaaaaaatcgcgggagaaatacgggcttgttataattgcgggctcggcaagacaagaaccaacgccgcgcccggagagggagtgttacagccgcttgtcctggtcataggagaggggccgggcgcggacgaagacgcgcagggacggccctttgtaggcaaggcaggccagcttctggacaagatgctcggcgctataaatctttcacgtaacacaaattgttttatcgccaatgtggtaaagtgcagaccgcccaataaccgcgacccatacccggaagaaaccatagcctgcgcgcattttcttgaacggcagattgccctgttaaaaccaaagttcatactaatagtcggaagaatcgcgatgcagtcactgttaaaaacaaccgagccgattggcaaaaagcgcggacaaattacggaattgactgtgggagacataacttatccgctccttatcacataccatccctccgccattttgcgcaacatagcgttaaaacgccccgcatgggaagatttaaaacttctcgctcaaaactggatgaattag

SEQ ID NO: 43588 - protein, 237 aa, Unknown
  Obtained from environmental sample
  DOMAIN (78)...(233): Uracil DNA glycosylase superfamily
  misc_feature (1)..(237): Xaa is any amino acid
MTKIEKQKIADLLDITQDYYSSGYKSEKREYHFEDDTPSVKSGVINIDSGAESIEKIAGEIRACYNCGLGKTRTNAAPGEGVLQPLVLVIGEGPGADEDAQGRPFVGKAGQLLDKMLGAINLSRNTNCFIANVVKCRPPNNRDPYPEETIACAHFLERQIALLKPKFILIVGRIAMQSLLKTTEPIGKKRGQITELTVGDITYPLLITYHPSAILRNIALKRPAWEDLKLLAQNWMN

SEQ ID NO: 43589 - DNA, 2232 bp, Unknown
  Obtained from environmental sample
  misc_feature (1)..(2232): n is a, c, g, or t
atggatgatctttttgctgaacccgcaaacaatgaaggcaaaggacaaagtcaagggcagagcccacttgccgacagaatgcgcccccgcattctcgaagacgtcatcggtcaggatcacattgttggtcccggacggctgctgcgtcgggcaatacaggctgaccgcctctcctcggttattttttacggcccgccgggtacgggtaaaaccagtctggcgcgggttatcgccaatactaccagagcggcttttgaaagcctcaacgcggtactgtccggcgtaaaaaacatacgcgaggccattgaccgttccgatgagcggttccggttgtacagcaagcgcaccattttatttgttgacgaagtacaccgctggaacaaggcccagcaggacgccctgctgccctgggtggaaaacggcacggttatcctcgtgggggcgactacggaaaatcccttttttgaggtaaaccgcgccctggtcagccgcagccgcatcttccagcttaaaccgctgggcgcgcaggatttaatggaaaccgccccgccgtactcttgcggacgaagagcggggttacggcaaatggaacgttcaattgaaagaaggcgctatgaaacaccttgtgaaatcgcgggcggagacgcgcgcagtttgttaaacgcaattgaactggcggttgaaacaagcgtaaatccatggcctccggctgccggagcggaaatacgcatttcaatggaagccgctgaagaaagcatccagcgccgcgcgttattgtacgacagggacggcgattatcattttgacactatcagcgcatttataaaaagcgtgcgcggaagcgatcccgatgcggctttgtactggcttgcgaaaatggtgcgcgcgggagaagacccgaaatttattttcagacgcatgataattcttgcaagcgaagatgtcggtcttgcagaccctcatgcgctttctgtggttatttcctgcgcccaggcttttgaacgcatcggctttcctgagggaaatttcccgctttctcatgcctgtctgtacctcgctactgccccaaaatccaacaccaccctcgcctattttgacgcgcaaaaggaaattgaacgtgaagacgcggaagtacccaatcatctgaaggacgcaagccgcgatgccgaaggtttcggacacggagaaggttatgtctatcctcacgcctaccgtgatcattgggcggctcagcagtatctgcccaattcacttagaggcagaactttttatattccttcgtcaatcggctatgaagggaaaatacgcgaagaagttttacggaaacgcgaactgcaggcggctattgttttaggagataattctgaaactacaggcgaacttttatcatggtcggcagcggcaaaaggcagggaaggctggtttaaacgccttgaatcggggcgaagctcactcttactaaacgatcgtaatgcgatcttttcagccgcttctccttcaaggcaggctcgcgttcttattccgctggctaatgatggtctcctgctctgggaaagccttcgccgctgccctgaaggtttatccgccgctattgtaaacaaccataccgcaaaagaagcgcttgagcgttatgcttctgtacttgacgaaaccgataagccgctaattgcggtaacagaagaaatactacctgatgaacaacagagcgaagaatggttttcctgctctcaatttgaccatatcttactgcgcagcgcacgattatctgcggctcccggaatacttgcggacaaggcataccctcttttggtaaagggcggaaatctggtattgttgtcttctccgccatgtttaggagagcgtatttcccgtatcctaacggatgaatgtgaaagacaggatttagcatcattgcttgagcatgcggaaaaaacattttttgagaaaacaaccggagccggtttttgggactcttcagaactggaaacggtgtttgcggggaaaaatttttccgtaaaacttataacaattgaacaaaaagaagaacgcttgatcactgaaaaggacattgcttcatggttcaatattgatcaatcccgttggggttcatttatggtaaaaaaccttgaaaaatcagttttttctaaaattgaagaagcccttttactgagaattgcanaaggacctgttctttggcggtggaaaagtattctattaacagcggttaaatga

SEQ ID NO: 43590 - protein, 743 aa, Unknown
  Obtained from environmental sample
  DOMAIN (59)...(229): ATPase family associated with various cellular activities (AAA)
  misc_feature (1)..(743): Xaa is any amino acid
MDDLFAEPANNEGKGQSQGQSPLADRMRPRILEDVIGQDHIVGPGRLLRRAIQADRLSSVIFYGPPGTGKTSLARVIANTTRAAFESLNAVLSGVKNIREAIDRSDERFRLYSKRTILFVDEVHRWNKAQQDALLPWVENGTVILVGATTENPFFEVNRALVSRSRIFQLKPLGAQDLMETAPPYSCGRRAGLRQMERSIERRRYETPCEIAGGDARSLLNAIELAVETSVNPWPPAAGAEIRISMEAAEESIQRRALLYDRDGDYHFDTISAFIKSVRGSDPDAALYWLAKMVRAGEDPKFIFRRMIILASEDVGLADPHALSVVISCAQAFERIGFPEGNFPLSHACLYLATAPKSNTTLAYFDAQKEIEREDAEVPNHLKDASRDAEGFGHGEGYVYPHAYRDHWAAQQYLPNSLRGRTFYIPSSIGYEGKIREEVLRKRELQAAIVLGDNSETTGELLSWSAAAKGREGWFKRLESGRSSLLLNDRNAIFSAASPSRQARVLIPLANDGLLLWESLRRCPEGLSAAIVNNHTAKEALERYASVLDETDKPLIAVTEEILPDEQQSEEWFSCSQFDHILLRSARLSAAPGILADKAYPLLVKGGNLVLLSSPPCLGERISRILTDECERQDLASLLEHAEKTFFEKTTGAGFWDSSELETVFAGKNFSVKLITIEQKEERLITEKDIASWFNIDQSRWGSFMVKNLEKSVFSKIEEALLLRIAXGPVLWRWKSILLTAVK

SEQ ID NO: 43591 - DNA, 402 bp, Unknown
  Obtained from environmental sample
  misc_feature (1)..(402): n is a, c, g, or t
atggcgcccgctgagaccgaatttggcgcgccctggggaggctacggcgttaatataggcggcacctcgacggcgatcggttcaggaagagggaatacggagattattctggaacaactgctgatccttggggaaaccggattcgcggcgcagttatgcgataaactggtttacaaggggtttaccgactggtttctgcccagcaaagacgaactggaccttatatacaagaaccttagacagaaaaatttggccaggtttggagccaagaagagttactggtcatcgtcacaggccactgatgagtgcgcgtggtatcagcgttttgacgatggcatacagttcaactacggcaattacaagtataatcagtttgatgtgcgggctatacgggctttttaa

SEQ ID NO: 43592 - protein, 133 aa, Unknown
  Obtained from environmental sample
  misc_feature (1)..(133): Xaa is any amino acid
MAPAETEFGAPWGGYGVNIGGTSTAIGSGRGNTEIILEQLLILGETGFAAQLCDKLVYKGFTDWFLPSKDELDLIYKNLRQKNLARFGAKKSYWSSSQATDECAWYQRFDDGIQFNYGNYKYNQFDVRAIRAF

SEQ ID NO: 43593 - DNA, 1659 bp, Unknown
  Obtained from environmental sample
  misc_feature (1)..(1659): n is a, c, g, or t
atgaacaatgaacatccggctttattgggggacgaggcggttgcgttaggggcaattcatgcgggaataagcgcggcttacggttatccgggaacgccctcgacggagatacttcaatacctcattgacgaatatgagaagggggggccaatagcccgctggtgttccaacgagaagaccgcgcttgaggcggggcttggcgtttcattcgccgggcggcggactatagtcaccatgaagcacgtcgggctgaatgtggcatctgatccctttatcaacgcggctcttttgggcattaaaggcgggtttgttgtcgccgttgccgacgatccgggcatgcacagttcccagaacgaacaggattcccgcttctacgcggcgttcgcgatggttccctgccttgagccgcgcagccagcaggaagcctatgatatgacgcgcgaggcgtttgaggtttccgagcgttttcaggttccggtattactgcgcctttctacccgtctttcccacgcgcgcgccgcgattaccacgcgggacgctgatccgcaaaaacctgtttcaaaaaccatggaaaaaaaccgctggatgctgctccccgcctttgcccgcaagaactacgcctctcttatcgaaaaacaaaaggagctgagggagtggtcggccaagcatccggcaaataaacttgaacttgcgggaaattccgatttggctgtaattacctcaggccttggcgggaattactacgaggaaaacctcgccgatttaaccgttacacgaaacggaaagccgccgtcaaggctgcatattggcgcgtacccccttgtcgaagaaaagatacgcttgctgtgttccgcttccaaaaaagtcatggttatagaggaaggccagccttttatagaggaaaaactccggggcatcctgccgcagtcaatagaaatcatcggaaggctgggccaaatggtcgaagggaagaaaattccacgcacaggcgaactcgaccccgacaatgtgcgcttaagtctgggcctgcctccgcgcccctcagtcacagttaccggctttgagcccgcctctcttccggcgcgtccgccgcagctctgcaagggctgcccccacgcggacagttatgaaaccatcaagaaggtggtggaaagcctggatccgaggccgaaccatcccgacgtgggaataaactcggacatcggctgttattcgctcggcgcggctcctccgtaccaggttccggaaagcattgtctgcatgggcgcgtcggtgggcatggccaaaggcgcggccgacgccgggctgccatatagtattgcggtaatcggcgattccacatttatccattccggcataaccgcccttattgacacagtggcgtctgacacccctatgaccttaatcatacttgacaactccatcgtggcaatgacaggctgccagccgaccatgattccctcggaaaagctccgcggtctgctcctcggctgcggtgtaaagccggaacacctgctggaactggaagcgagaaagcagcttgtcgatgaaaacgccgcgcggcttaaaaaagaaatcgaataccggggcctttcggtggtggtattcaaacgcgagtgtctgggagcggcgaggaaatcgcggaaatccgcaaagtga

SEQ ID NO: 43594 - protein, 552 aa, Unknown
  Obtained from environmental sample
  DOMAIN (16)...(232): Pyruvate flavodoxin/ferredoxin oxidoreductase, thiamine diP-binding domain
  misc_feature (1)..(552): Xaa is any amino acid
MNNEHPALLGDEAVALGAIHAGISAAYGYPGTPSTEILQYLIDEYEKGGPIARWCSNEKTALEAGLGVSFAGRRTIVTMKHVGLNVASDPFINAALLGIKGGFVVAVADDPGMHSSQNEQDSRFYAAFAMVPCLEPRSQQEAYDMTREAFEVSERFQVPVLLRLSTRLSHARAAITTRDADPQKPVSKTMEKNRWMLLPAFARKNYASLIEKQKELREWSAKHPANKLELAGNSDLAVITSGLGGNYYEENLADLTVTRNGKPPSRLHIGAYPLVEEKIRLLCSASKKVMVIEEGQPFIEEKLRGILPQSIEIIGRLGQMVEGKKIPRTGELDPDNVRLSLGLPPRPSVTVTGFEPASLPARPPQLCKGCPHADSYETIKKVVESLDPRPNHPDVGINSDIGCYSLGAAPPYQVPESIVCMGASVGMAKGAADAGLPYSIAVIGDSTFIHSGITALIDTVASDTPMTLIILDNSIVAMTGCQPTMIPSEKLRGLLLGCGVKPEHLLELEARKQLVDENAARLKKEIEYRGLSVVVFKRECLGAARKSRKSAK

SEQ ID NO: 43595 - DNA, 1590 bp, Unknown
  Obtained from environmental sample
  misc_feature (1)..(1590): n is a, c, g, or t
atgggatacctatcagttcacctcatagacacgccggggcacgtggatttttcctacgaggtctcccgatctttggccgcgtgcgagggggcgatcttggtggttgacgcctcgcaggggatagaggcgcagacgctgaccaacatctacttggctctcgacaacgacctcgccattatcgcggtgatgaacaaggttgatctgccgtcggcgcgtcccgacgagatacgccgtcagataagcgaactcttgggcgttgccccggagaccgtcctctcatgcagcgcgaagacgggcgagggagtatccgcattgctggagcgagtaatcacagatgtcccgccgcctgccggcaatccctcctcgccgctcaaggcgctgatattcgactcgaagttcgactccttccgcggcgcggtggcctacgtgcgcgtcgccgacggatcgctctgcaaagggcaagcgatcaggttcttcgagacaggccgcgagtacgacgtcgacgaagtgggattcttccgtatggggcgtgtttcctccccaaccctccgcgccggggaggtgggctacgtcatcgcaaacatcaaaaccgtctccgacatcagcatcggcgacacgataaccacgcgcaacaacggcgcctcggagcctatccccggatacaaacaggtgaagccgatggtcttcagcggaatataccccgttgacaagggagagtacgaagacctccgcaccgcgctggaaaaactgcgcctcaacgactcctccatcacctacgaaccggagacctccacagcgctgggcttcggattccgcgccgggttcctcggcctgctgcacatggagatcgtccaagagcgcctactgcgcgagttcaacgtcaatatcatcacaacgggttcaaacgtggagtacgagatacacttgaagaacggcgagacgctctacatagacagccccgccgccctgccgtccggacaggagaccgaatacatctgcgaacccatatcgcgagtgcagctcatcacgcccaccgagtacgtgggcacaataatgaaactctgcgacgagaaacgcggcaagctcgtcaacatggagtatctggaaacgacgcgcgtctgcctgaactaccacctgccgctcgcggagctgatcatagacttcttcgacaggctgaaaggctgttccaagggctacgcctctatggactacgaattctccggttatcaacgcgacgatttgataaagttggacatactgataaacggcgcccccgtagacgccttctccacgatcatccaccgcgacaactcctactcctacggccagatgatcacgtcgaagttgaaggagctgatcccgcgccagcagttcgaggtggcgatccaagccgccatcggcagcaaagtaatagcgcgcaccacggtaaaagcctaccgcaaagacgtaaccgccaagtgctacggcggcgacatctcgcgtaagcggaagctgttggacaagcagaaagagggcaaaaagcgaatgaagcaaataggaaacgtagaagtgccccaagaggcgttcttagcggtattgagtagagactaa

SEQ ID NO: 43596 - protein, 529 aa, Unknown
  Obtained from environmental sample
  DOMAIN (138)...(208): Elongation factor Tu domain 2
  misc_feature (1)..(529): Xaa is any amino acid
MGYLSVHLIDTPGHVDFSYEVSRSLAACEGAILVVDASQGIEAQTLTNIYLALDNDLAIIAVMNKVDLPSARPDEIRRQISELLGVAPETVLSCSAKTGEGVSALLERVITDVPPPAGNPSSPLKALIFDSKFDSFRGAVAYVRVADGSLCKGQAIRFFETGREYDVDEVGFFRMGRVSSPTLRAGEVGYVIANIKTVSDISIGDTITTRNNGASEPIPGYKQVKPMVFSGIYPVDKGEYEDLRTALEKLRLNDSSITYEPETSTALGFGFRAGFLGLLHMEIVQERLLREFNVNIITTGSNVEYEIHLKNGETLYIDSPAALPSGQETEYICEPISRVQLITPTEYVGTIMKLCDEKRGKLVNMEYLETTRVCLNYHLPLAELIIDFFDRLKGCSKGYASMDYEFSGYQRDDLIKLDILINGAPVDAFSTIIHRDNSYSYGQMITSKLKELIPRQQFEVAIQAAIGSKVIARTTVKAYRKDVTAKCYGGDISRKRKLLDKQKEGKKRMKQIGNVEVPQEAFLAVLSRD

SEQ ID NO: 43597 - DNA, 411 bp, Unknown
  Obtained from environmental sample
  misc_feature (1)..(411): n is a, c, g, or t
atgagcgctaataccacgcttactgaacatacaaaacagagaaccgatagttatgacgctgtgattcttcccggcggaatgcccggcacttcaaacctcgcggcttcaaaagagacgggctcgctggttaaaaaaatggcggcggccggaaaaacaatctgcgccatctgcgccgctcccgctcttgtcctcgccccccttggcctgctggccgggaaaaattttacctgctacccgggaatggaagaaaaagtgaatgatggtaaatggtcggacagccgcgttgtggttgacggcaatgtcatcacaagccggggcgcgggaactgcgggggagtttgccgcagcgattattgaaaaattactggacaaagccgccgcgaaaaaaatagcggacgctgttttgctgtaa

SEQ ID NO: 43598 - protein, 136 aa, Unknown
  Obtained from environmental sample
  DOMAIN (3)...(122): DJ-1/PfpI family
  misc_feature (1)..(136): Xaa is any amino acid
MSANTTLTEHTKQRTDSYDAVILPGGMPGTSNLAASKETGSLVKKMAAAGKTICAICAAPALVLAPLGLLAGKNFTCYPGMEEKVNDGKWSDSRVVVDGNVITSRGAGTAGEFAAAIIEKLLDKAAAKKIADAVLL

SEQ ID NO: 43599 - DNA, 420 bp, Unknown
  Obtained from environmental sample
  misc_feature (1)..(420): n is a, c, g, or t
atgaacgccgatgagactatcgctttttacaatacgctcagaaaaaaccgcgatgatacatccggattaacagaaaaagaaaaagaagagataatttttcgcgacatctgcccaatgttaaaaataattacagacggcgaattattcccgattattgttgtcaaactgggcggttatggcgcaatagttatcgcgggcggcaatgtttaccgtgaaactacatttactatcattccccgaaacacggtaggcgcgggagacgctttttgcgccgccttcatttccgcgtggctgcgggataaatcgctttccgagtgcgccgcgcttgggaacaaagtcgcgcgggaaatccttgaagttccgggaacacatatcaaaagtacaaaattaaaatcgttcgcaaagtttttacagaaatag

SEQ ID NO: 43600 - protein, 139 aa, Unknown
  Obtained from environmental sample
  misc_feature (1)..(139): Xaa is any amino acid
MNADETIAFYNTLRKNRDDTSGLTEKEKEEIIFRDICPMLKIITDGELFPIIVVKLGGYGAIVIAGGNVYRETTFTIIPRNTVGAGDAFCAAFISAWLRDKSLSECAALGNKVAREILEVPGTHIKSTKLKSFAKFLQK

SEQ ID NO: 43601 - DNA, 759 bp, Unknown
  Obtained from environmental sample
  misc_feature (1)..(759): n is a, c, g, or t
gtgcccaataccatcaaagacatcatcccccgctaccaggcaatgaaaggcaaaaaggtcgaacgccgcttcggctgggactgccacggcctgcccgtcgagaacctcatcgaaaaagacctgggcctgaattccaaaacggaaatcgaacaatacggcatagcgaaattcaacgaagcctgccgcgcatccgtactgcgttatgtgcaggaatggcgcaacaccataacccgcctgggccgctgggtggattttgacaacgactataaaaccatggaaccccattacatggaaacgatatggtgggtaatgaagtccctccacgaaaaaggcctgttatacgaaggccactacatactcccctactgcccccgctgcgccacagtcctctccaaccacgaactgaacctcggcggatacagggatgtgcatgatccggcgattaccgtaaaatttaaggttaaagggaacaaggaacagggaacagggaatggggagtggggagtagggagtggggatgtttactttctggcgtggactaccacaccctggacattgccctcaaacctggccctcgtcctcggacccgacatagactacgtactagttgaagatcttgctgttccgaacctcgaaccccgaaccccgaannccttgaaccccgatactacatcctggccgaagcgcgcctccccgcttactacaaatcccccgccgaatataaaatcatctggcgcaaaaaaggaagcgaactgttag

SEQ ID NO: 43602 - protein, 252 aa, Unknown
  Obtained from environmental sample
  DOMAIN (1)...(252): tRNA synthetases class I (I, L, M and V)
  misc_feature (1)..(252): Xaa is any amino acid
MPNTIKDIIPRYQAMKGKKVERRFGWDCHGLPVENLIEKDLGLNSKTEIEQYGIAKFNEACRASVLRYVQEWRNTITRLGRWVDFDNDYKTMEPHYMETIWWVMKSLHEKGLLYEGHYILPYCPRCATVLSNHELNLGGYRDVHDPAITVKFKVKGNKEQGTGNGEWGVGSGDVYFLAWTTTPWTLPSNLALVLGPDIDYVLVEDLAVPNLEPRTPXXLNPDTTSWPKRASPLTTNPPPNIKSSGAKKEANC

SEQ ID NO: 43603 - DNA, 978 bp, Unknown
  Obtained from environmental sample
  misc_feature (1)..(978): n is a, c, g, or t
ttgcgaaccggcgtgtctgtccgacgtttttctaaaaaagatatagacgacatatcgctgagtttaagcgtttcaaacgtagactttgtggagataggggcaatagaaatttccgacaatgacaagaaaaacatgcccatttaccggaatctcgaaagcatctcgaatgaaatacctaaaccgcgcaatccgaatcaaatgtacgcggctttttacagaggcccggacactccgataaccgatattccaaattggaatgaatcttattgcgaggcgttgcgggtggtgctgcgatactcggagcttaaaaaatctttggacttttgtacggagctctctaaaaagaattataaagtatttatacagccgatggtaacggcgcgctactcaaacgacgaactgcgtttgattattgacgccgcaaacgatatgtcggcccacgcgctgtattttgtggacagttacggttatatggcaaaacaagatatcgagcgttatttcgctttgtttgataaaggtctgaacgcctcaataaagatcgggtttcacgcacacaacaacatgaatttggcgttttccaacgcgatagcgttcattaatcaaaattcagacagagagattatcgtggattcctgctgcctgggcatgggtcagggggccggaaatctccagaccgaaatcataaccgattatttgaataaatatcacggcgcctcatataactacgacgccgttcttgacgcgtgcgaggtcatagacaaatattggaaaccgggtctgtggggatattcgttgacacgcctccttccggcgataaataatacggcgtataaattttccacggcgtttagggagaagtataagctttcttttgcggagatacataatatattgaaaaatattccagagaagtacaggcatcgttatacgccggacggggcgagagagttgttgaagatgttcgggaaggatgtctga

SEQ ID NO: 43604 - protein, 325 aa, Unknown
  Obtained from environmental sample
  misc_feature (1)..(325): Xaa is any amino acid
MRTGVSVRRFSKKDIDDISLSLSVSNVDFVEIGAIEISDNDKKNMPIYRNLESISNEIPKPRNPNQMYAAFYRGPDTPITDIPNWNESYCEALRVVLRYSELKKSLDFCTELSKKNYKVFIQPMVTARYSNDELRLIIDAANDMSAHALYFVDSYGYMAKQDIERYFALFDKGLNASIKIGFHAHNNMNLAFSNAIAFINQNSDREIIVDSCCLGMGQGAGNLQTEIITDYLNKYHGASYNYDAVLDACEVIDKYWKPGLWGYSLTRLLPAINNTAYKFSTAFREKYKLSFAEIHNILKNIPEKYRHRYTPDGARELLKMFGKDV

SEQ ID NO: 43605 - DNA, 309 bp, Unknown
  Obtained from environmental sample
  misc_feature (1)..(309): n is a, c, g, or t
atgagctatttggccatagatttgggggcgggaagcgggcgcgccattgctgggcgcattgacgggaatcgccttcaattagaagaaatactgcgcttcgacaattcccctgtgcggcttgggaacacaatatattgggacttcctctccctttttgcgaatgtcaaaaggggcatcgcccttgcagtgaaaaagggccatgacctaaatgggataggcgtggacacttggggcgtggattttggcctgttggacagcttgggcaacctgctgggcaaccgcggtgacataccgcgacagccgcactga

SEQ ID NO: 43606 - protein, 102 aa, Unknown
  Obtained from environmental sample
  misc_feature (1)..(102): Xaa is any amino acid
MSYLAIDLGAGSGRAIAGRIDGNRLQLEEILRFDNSPVRLGNTIYWDFLSLFANVKRGIALAVKKGHDLNGIGVDTWGVDFGLLDSLGNLLGNRGDIPRQPH

SEQ ID NO: 43607 - DNA, 570 bp, Unknown
  Obtained from environmental sample
  misc_feature (1)..(570): n is a, c, g, or t
gtgcagcagcggcaatctttcttgcgggtggaagaaaacaccgctcttgtgtcgggtacgggaacatggctgccgcgcttgactagggaacaggtggcgatgtgcgaaatctccacgggcaaccacatcgaggggccgaagccatctatggaaagcacttttcatttgggcgtcttgcgccagcgacaagacgtgaatgtggtgctgcacgttcaatcccaatacgcgaccatcatcgcctgtatgaaggaaaagccagccgacttcaacgtgacagcagaagtgccatgctattgcggcagggagataccagtgataccctacttccgccctggctcgccggaactagccaaaactgtcatggaggccatgcagggccacgattgcatattgctcagcaagcacggccaagtggtgtgcgggaaagattttgacgacgctttccaaaaggcggtgttctttgagatggcttgccgcatcatcgtaggcgcgggcaaggacaactatctgacgctatccaatgacgaactaaacgacttggacatttacgtgctgggcaaaaaacaatga

SEQ ID NO: 43608 - protein, 189 aa, Unknown
  Obtained from environmental sample
  DOMAIN (2)...(174): Class II Aldolase and Adducin N-terminal domain
  misc_feature (1)..(189): Xaa is any amino acid
MQQRQSFLRVEENTALVSGTGTWLPRLTREQVAMCEISTGNHIEGPKPSMESTFHLGVLRQRQDVNVVLHVQSQYATIIACMKEKPADFNVTAEVPCYCGREIPVIPYFRPGSPELAKTVMEAMQGHDCILLSKHGQVVCGKDFDDAFQKAVFFEMACRIIVGAGKDNYLTLSNDELNDLDIYVLGKKQ

SEQ ID NO: 43609 - DNA, 1953 bp, Unknown
  Obtained from environmental sample
  misc_feature (1)..(1953): n is a, c, g, or t
atggcgaatacaaactcggtaacgtggaaatacgcccgcgtccgcggccaatactcggcgcttcattttttcggcaaaggggagccttatcttttgtggggcttaattccgttagaaaggcatttgttaacaactgaagcgtccgattaccccgttttcctgatgggcgccgacaacctgggcagggatctcttttcccgcatagtctacggttcgcgcgtctcgctgacaataggctttgtggcgacagccatatcgctcgctcttgcgggattagcgggcggtctttcgggatttttcggcggcatcacggactggactataatgagagcgtcggaatttttaatgttaatcccaaccctctacctgatactgttcctgcgctcattaatggcgtctaacatggatcccggacagtcctacatgatgatcacgctgatcctgtcccttgtcggctggcccagctccgcgcgcacgatacgcggcatggttcacgcgataaagcgcgaagaatttgtgttaaacgcaaaactggaaatgatcccctccgttgtaataattttcaggcacattattccgcagatagcgagccttttaattgtaagcgtagcgttaagcatacccggttttataatgacggaaacagtcctttcatatttgggattaggcataacagaccccgccgtaagctggggctcgctaatcaaacgcgatctttccacgattgcgaaccttcgcgcctttccgtggctgttaagcccggtttggttcttattgggcgtaaccctcgcctttaattttatcggagacgccctgcgcgacttctacgatccgtaccatataggcatgacaggaagcggaaaatggaaccttaaaaaattgttccgaaaaatcttccgctcccgctctcatactcccgacgcccaactttcaactccggactcaccgcaatccactactaactatcaactacccactaataacttcctcctgtctatccgcgatcttacggtaactttcaaagtccagcgcggcagagattttatcgctattcaggcggtacgcggggtttctttcaacctgaaaaaaggggagactttgggcattgttggagagagcggttcgggcaagagcgtaagcactctggcggttccgggattactgcccaagaacgcaaaaattaccggttccattctctatgagggggaggaacttaccgggcttgataccgaaggactgcgcaaatacaggggcaaaaaaatcgggatgatctttcaggagccggggcgctcttatgatccgcttcagaacatgggaaatgttttttgggagactttcaggaacagcgagcctgaaattaccaaagaggaggctgaaaagcgggccgttgctcttctggaagaaaccggccttgataacggcttagagcgcctttccaactttccgcaccagttttcgggcgggcagttgcagcgtataggcattgccctcgctctggcgcagggctgcgagttattaatcgcggacgagccgactactgcgcttgaccttacaatacaaaaacaaataacggaactcttaaaaaccctgcgaagaaaaagaaagctatcaattatatttatcagccacgacattgatctggtggcggaaatttccgaccgcatcatggtgatgtacggcggctttgagatggaatcggcggacgcgaaagaaattacaaccaacgcgcgccactcgtacacaaaggcgcttcttgccgcctctccccaattcggaagccattattccaaagagcgccttatttccattccaggaaaagtcacagacccatctgccccggaacccggctgccccttcgccccgcgctgcacggaagcgacggctgagtgcgcgaaagcggtcccgccgttgcaagtaaaagacgggcatgaattaaggtgctgcaggaagtaa

SEQ ID NO: 43610 - protein, 650 aa, Unknown
  Obtained from environmental sample
  DOMAIN (564)...(630): Oligopeptide/dipeptide transporter, C-terminal region
  misc_feature (1)..(650): Xaa is any amino acid
MANTNSVTWKYARVRGQYSALHFFGKGEPYLLWGLIPLERHLLTTEASDYPVFLMGADNLGRDLFSRIVYGSRVSLTIGFVATAISLALAGLAGGLSGFFGGITDWTIMRASEFLMLIPTLYLILFLRSLMASNMDPGQSYMMITLILSLVGWPSSARTIRGMVHAIKREEFVLNAKLEMIPSVVIIFRHIIPQIASLLIVSVALSIPGFIMTETVLSYLGLGITDPAVSWGSLIKRDLSTIANLRAFPWLLSPVWFLLGVTLAFNFIGDALRDFYDPYHIGMTGSGKWNLKKLFRKIFRSRSHTPDAQLSTPDSPQSTTNYQLPTNNFLLSIRDLTVTFKVQRGRDFIAIQAVRGVSFNLKKGETLGIVGESGSGKSVSTLAVPGLLPKNAKITGSILYEGEELTGLDTEGLRKYRGKKIGMIFQEPGRSYDPLQNMGNVFWETFRNSEPEITKEEAEKRAVALLEETGLDNGLERLSNFPHQFSGGQLQRIGIALALAQGCELLIADEPTTALDLTIQKQITELLKTLRRKRKLSIIFISHDIDLVAEISDRIMVMYGGFEMESADAKEITTNARHSYTKALLAASPQFGSHYSKERLISIPGKVTDPSAPEPGCPFAPRCTEATAECAKAVPPLQVKDGHELRCCRK

SEQ ID NO: 43611 - DNA, 438 bp, Unknown
  Obtained from environmental sample
  misc_feature (1)..(438): n is a, c, g, or t
gtgtacgagtggcgcgcgttggttgtaatttctttcgcgtccgccgattccatctcaaagccgccgtacatcaccatgatgcggtcggaaatttccgccaccagatcaatgtcgtggctgataaatataattgatagctttctttttcttcgcagggtttttaagagttccgttatttgtttttgtattgtaaggtcaagcgcagtagtcggctcgtccgcgattaataactcgcagccctgcgccagagcgagggcaatgcctatacgctgcaactgcccgcccgaaaactggtgcggaaagttggaaaggcgctctaagccgttatcaaggccggtttcttccagaagagcaacggcccgcttttcagcctcctctttggtaatttcaggctcgctgttcctgaaagtctcccaaaaaacatttcccatgttctga

SEQ ID NO: 43612 - protein, 145 aa, Unknown
  Obtained from environmental sample
  misc_feature (1)..(145): Xaa is any amino acid
MYEWRALVVISFASADSISKPPYITMMRSEISATRSMSWLINIIDSFLFLRRVFKSSVICFCIVRSSAVVGSSAINNSQPCARARAMPIRCNCPPENWCGKLERRSKPLSRPVSSRRATARFSASSLVISGSLFLKVSQKTFPMF

SEQ ID NO: 43613 - DNA, 315 bp, Unknown
  Obtained from environmental sample
  misc_feature (1)..(315): n is a, c, g, or t
atggcgactgaaaatattttaatgtactgcgtgaaaaaaggcggcgacaggcaggctctccatgagaggataaggcttcactccgttgaggcggcaaaaaaaataaaactgcaaggcggggataatgatttaatagcccgcattttagcggactcatcttttggaatgaccgaaaaagagatgaataacttgctttccgccgaacaatttacaggcagggcaaaagaacaaacggaagaatttttatctgaagttaaaaatgttttgaataataacaaagaacttttaggagtagatgtcaagataacggtataa

SEQ ID NO: 43614 - protein, 104 aa, Unknown
  Obtained from environmental sample
  misc_feature (1)..(104): Xaa is any amino acid
MATENILMYCVKKGGDRQALHERIRLHSVEAAKKIKLQGGDNDLIARILADSSFGMTEKEMNNLLSAEQFTGRAKEQTEEFLSEVKNVLNNNKELLGVDVKITV

SEQ ID NO: 43615 - DNA, 888 bp, Unknown
  Obtained from environmental sample
  misc_feature (1)..(888): n is a, c, g, or t
ttgaaatattgtaaaaataaagtaaatatgactgtttttaacctgatcgtatggattgtagtatacagcgtttgccttgtccatatatcattttttacggctatatatataagtcataaaaacaaactggaactgtactatttaattgttttattaaatatattcttattagcggttataataatgcttgcgctaataattaaatttgataaactaatattaatttttgttaactgcatattaactttatatattactctgcctttgtacggttattacttattcggcattaataaaaaatacaataagaatatatttatattagtcccgctggaagccataatagagaatattttaataatcaaagacattttaactttattgtatatttccagggttgttttttattttttattgataattcccattttcatagaaaaaaaagaatacgaaaaagattcattggaatttaacatgcaaaagataacgaaaataaccgccaccacattcttggcgtttatgattttgttcattccgttctctaaatatctctttgaaataaccaatgtgtcttcgctgtggtgggccgcctttacattgtcttatcagataccgggacttttgtattgcaagaaacgcctgttcagcaaaggcgctttatttaacaaacagggaatctcgtcattgacaaaaagggaaaacgaggtcgcgcttgccatttgcaacgggttgaaatacgaggaaatagcggaaaaactgtgcgttaccctgtcggcggtaaaaaaacattcgtacacaatttatcaaaaattgaacataaacaacaaccgcgaactgatgcagatattcatggacgccgataaaaacgatacaaacgacaaaaaatga

SEQ ID NO: 43616 - protein, 295 aa, Unknown
  Obtained from environmental sample
  DOMAIN (226)...(283): Bacterial regulatory proteins, luxR family
  misc_feature (1)..(295): Xaa is any amino acid
MKYCKNKVNMTVFNLIVWIVVYSVCLVHISFFTAIYISHKNKLELYYLIVLLNIFLLAVIIMLALIIKFDKLILIFVNCILTLYITLPLYGYYLFGINKKYNKNIFILVPLEAIIENILIIKDILTLLYISRVVFYFLLIIPIFIEKKEYEKDSLEFNMQKITKITATTFLAFMILFIPFSKYLFEITNVSSLWWAAFTLSYQIPGLLYCKKRLFSKGALFNKQGISSLTKRENEVALAICNGLKYEEIAEKLCVTLSAVKKHSYTIYQKLNINNNRELMQIFMDADKNDTNDKK

SEQ ID NO: 43617 - DNA, 933 bp, Unknown
  Obtained from environmental sample
  misc_feature (1)..(933): n is a, c, g, or t
ttggcggcgctactacacaatttcgtaaaacttgcatacaatttacatatcatgttagaaaatctgtccccccgtgaacgggaagtttttgacttattgcttgaaggtctctcacaaaaagaaatagccaataaattaaatatcagccactccacattggattttcaccgtaccaatttgtacaggaaactgggtgttcatagtatcaaagagctttttgccaaatactcaaccaatggcaaagctgccccctcagaactggaagcggtgctccctgctccagggacaaaaaaacataagaaattaaggttgttgcttcccaccggaatagcgcttggcataataatacttgctttttccgcgttgtttatagggaaatttgttataaagccatttcgcaagccaaaaggggaaataataccggctcataatctgggattttacccccacgctgactcaaatgactggaaaggggaatctaccacagaagtctttataagctcggaagaaattgacggagtggagattaacagcgttctcaatataaaaacaaatctggtaaaattagaaaacagcgacattatttatgcgacggcgattacccaaaaacatgatgtaattcaacgattgaggcaggcaaacggaatacgatttaaggcgaggggagacggaaaaccatggtctgtagaatttcatacaatagagtcaactaaagaaagaagatttgcttgttatacatacacaatagaaactatccgtgatcaggttattgttgctgatgtaccattttcaagtttatatctgcctgaatggtgggatcaatattatttcgattttaattataaaacaataaaaatgttggctattaccgcaactttatttcaaggatacggttcgtctacattacaaatattcgactttgaaatttactga

SEQ ID NO: 43618 - protein, 310 aa, Unknown
  Obtained from environmental sample
  DOMAIN (12)...(64): Sigma-70, region 4
  misc_feature (1)..(310): Xaa is any amino acid
MAALLHNFVKLAYNLHIMLENLSPREREVFDLLLEGLSQKEIANKLNISHSTLDFHRTNLYRKLGVHSIKELFAKYSTNGKAAPSELEAVLPAPGTKKHKKLRLLLPTGIALGIIILAFSALFIGKFVIKPFRKPKGEIIPAHNLGFYPHADSNDWKGESTTEVFISSEEIDGVEINSVLNIKTNLVKLENSDIIYATAITQKHDVIQRLRQANGIRFKARGDGKPWSVEFHTIESTKERRFACYTYTIETIRDQVIVADVPFSSLYLPEWWDQYYFDFNYKTIKMLAITATLFQGYGSSTLQIFDFEIY

SEQ ID NO: 43619 - DNA, 666 bp, Unknown
  Obtained from environmental sample
  misc_feature (1)..(666): n is a, c, g, or t
ttgcttgacagtgaaatattaagccgcgttgatcacacgctgttgaagatggccgcctcatgggaagagatcaaaaccctctgcgatgaggcggttcgtttcaaaacggcgtccgtatgcataccgccggcgtatgtgaaacctgttttcaaagaatttggcaaaggcctggtcatctgcacggtgatcggatttcccttggggtatacttatacctccgttaagattaatgaaaccggcatcgcgctggaaaacggcgctggtgagattgacatggtaataaacgcgggcgatgtgaaaaacggcaattatgattcggttctgaacgaaataaaagccataaagaaaacatgcggtgaaaaagttctcaaggttattattgagacctgttacctgagcgaagaagaaaaaatacgcctctgcgccattgtaaccgacgcgggggcggatttcatcaaaacctcgacaggcttcgggacggccggcgcgaccattgccgacgtaaaactgttcagacagcacatcgggccgaaagttaaaattaaggccgccggcggcataaaaacgcgcgaggatcttgaagcgtttattcaggcgggggcagaccgcatcggcacaagttccgcggtaaaattgctttccggcggcattgcggctggatattga

SEQ ID NO: 43620 - protein, 221 aa, Unknown
  Obtained from environmental sample
  DOMAIN (5)...(215): DeoC/LacD family aldolase
  misc_feature (1)..(221): Xaa is any amino acid
MLDSEILSRVDHTLLKMAASWEEIKTLCDEAVRFKTASVCIPPAYVKPVFKEFGKGLVICTVIGFPLGYTYTSVKINETGIALENGAGEIDMVINAGDVKNGNYDSVLNEIKAIKKTCGEKVLKVIIETCYLSEEEKIRLCAIVTDAGADFIKTSTGFGTAGATIADVKLFRQHIGPKVKIKAAGGIKTREDLEAFIQAGADRIGTSSAVKLLSGGIAAGY

SEQ ID NO: 43621 - DNA, 750 bp, Unknown
  Obtained from environmental sample
  misc_feature (1)..(750): n is a, c, g, or t
gtgtactcggtttcggttatgccctgtaccgcgaaaaaatgggaaactcaccgcaatgatgacatgaagagcgccgggaaattcctcggtattgacgcaggctacgatgtggacatttcgattaccacccgcgagcttgcccgtatgataaaacaggcgggtattgacatactgagtctttctgatgaggaagcggacagccccctggggccgtataccggcgcgggtacgattttcggggtgacaggcggagttatggaagctgcggttcgcagcgcctacttccttgtcaacaacaaggagcttccgaatgtggagttcaagccggtacgcggccttgacggcgtaaagtccgctgaagttgattttggagtgcccattccgaacggcagcggaaccaaaatccgcatagccgtcgcccaccagatgggaaacatcgccgcggtgctggatcaaatcaaggaagccagagctgcggggaaggaacccccatatcactttgtggaggttatggcctgcaggggtggatgcgtggcgggaggcggccagccttacggcgctacagatgaagtccgcggcaagcgcgcaaagggtctttaccttgacgatgaaaaatccccgtaccgatgctcgcatcaaaacccctgcatcacccaggtatacaaggaattccttgatgagccaaacggccataaagcgcatgaactcctgcacaccaaatatacggaacggaaactgtatataaagtag

SEQ ID NO: 43622 - protein, 249 aa, Unknown
  Obtained from environmental sample
  DOMAIN (186)...(245): Iron hydrogenase small subunit
  misc_feature (1)..(249): Xaa is any amino acid
MYSVSVMPCTAKKWETHRNDDMKSAGKFLGIDAGYDVDISITTRELARMIKQAGIDILSLSDEEADSPLGPYTGAGTIFGVTGGVMEAAVRSAYFLVNNKELPNVEFKPVRGLDGVKSAEVDFGVPIPNGSGTKIRIAVAHQMGNIAAVLDQIKEARAAGKEPPYHFVEVMACRGGCVAGGGQPYGATDEVRGKRAKGLYLDDEKSPYRCSHQNPCITQVYKEFLDEPNGHKAHELLHTKYTERKLYIK

SEQ ID NO: 43623 - DNA, 702 bp, Unknown
  Obtained from environmental sample
  misc_feature (1)..(702): n is a, c, g, or t
atggacgccgatattgttgtttcgctgaaccatttcaaaggccacgaaggagttggttttggcggtgctctaaaaaatatcggcatgggctctggcagccgcgccggtaaaatggccatgcacaacgaaggcaagccagtagtgacaagcgatgcgtgtgtcggctgtaaaatatgcgcgcgcttttgcgcccaggacgctattaaattttcggaaagcaaggcttccgttaaagcctccattgaccacaacaaatgcgtaggctgcggacgctgtatcggcgcttgcagtaaaaacgcaatttacagcaagtgggattcaagcaatgccgcattaagctataaaatcgctgaatatgccaaagcggtactggacgggcggcctaatttccacatcagcgttgtaaaccaggtttccccttactgcgactgtcacagtgaaaacgatgcggcgattgtgcccgacattggcatcttcgctagttttgaccccgttgccctggatcaggcctgcatcgatgcggtaaacgccgcccccgcaatatccggcagtattatttccgacagacagaaaaagtccagcaccgcaaacagcgatcatttcacagttattcatcctacaactgactggcgcggacagcttagccacgccgaaaaaattggattgggaaccagaaaatacgaactggttacagttaaatag

SEQ ID NO: 43624 - protein, 233 aa, Unknown
  Obtained from environmental sample
  DOMAIN (46)...(69): 4Fe-4S binding domain
  misc_feature (1)..(233): Xaa is any amino acid
MDADIVVSLNHFKGHEGVGFGGALKNIGMGSGSRAGKMAMHNEGKPVVTSDACVGCKICARFCAQDAIKFSESKASVKASIDHNKCVGCGRCIGACSKNAIYSKWDSSNAALSYKIAEYAKAVLDGRPNFHISVVNQVSPYCDCHSENDAAIVPDIGIFASFDPVALDQACIDAVNAAPAISGSIISDRQKKSSTANSDHFTVIHPTTDWRGQLSHAEKIGLGTRKYELVTVK

SEQ ID NO: 43625 - DNA, 546 bp, Unknown
  Obtained from environmental sample
  misc_feature (1)..(546): n is a, c, g, or t
atgaaacgtttatttgtattccccgcgtggatattgattttttcactcacaattctttcgggaggatgtcgacggatagaatccggtcagacaagacccgcaaaagcaaacggtaaaatcaatgttacctctgtaatatttccttcgtatgattttgtccgcgcaattgccggagacagggtgaacctgctaatgctattgcctcccggttctgaaagccattcctatgagcctacgccccagaacataatcgccataaaaaacagcaacttgttcatctatccgggtggagaaaattctgcttgggtagaaagaatactcgactcaattggcaatctttctgaaaacatgatagtcctcaatatgcttgatttggttgacgctgtggaagaagaaatcgtggaaggcatggaggaggaagagggggaagaagaaccggcctatgacgagcacgtctggacttcgccacagaacgcnaaaaccattgtcgccgcaattaccgaagccctctgtgaactggacagcgccaacgcgggatttttttag

SEQ ID NO: 43626 - protein, 181 aa, Unknown
  Obtained from environmental sample
  SIGNAL (1)...(20)
  DOMAIN (11)...(181): Periplasmic solute binding protein family
  misc_feature (1)..(181): Xaa is any amino acid
MKRLFVFPAWILIFSLTILSGGCRRIESGQTRPAKANGKINVTSVIFPSYDFVRAIAGDRVNLLMLLPPGSESHSYEPTPQNIIAIKNSNLFIYPGGENSAWVERILDSIGNLSENMIVLNMLDLVDAVEEEIVEGMEEEEGEEEPAYDEHVWTSPQNAKTIVAAITEALCELDSANAGFF

SEQ ID NO: 43627 - DNA, 603 bp, Unknown
  Obtained from environmental sample
  misc_feature (1)..(603): n is a, c, g, or t
ttgatttggttgacgctgtggaagaagaaatcgtggaaggcatggaggaggaagagggggaagaagaaccggcctatgacgagcacgtctggacttcgccacagaacgcnaaaaccattgtcgccgcaattaccgaagccctctgtgaactggacagcgccaacgcgggatttttttagggcaaaaacgcggctgccctattctgcacagttggacgaactggacgcttcctttaaggctgtcgtggacggcgcgaaaaggaaaaccatcattttcggcgaccgcttccccttccgttatttggccgatgcctatgggcttgagtacttcgccgcctttcccggctgttccaccgacaccgaaccaagcgcggccactgtggcttttttaatcaacaaggtcagaagcgaaaaactccctgtgattttccatatcgagctttcaaacgaaaaaatggccgataccataagcgaggccacgggggcaaagaagctccttttgcactcgtgccacaatttgaccaaaaacgattttgaaaaaggcattacctatctggatgtccaaaaggccaatgtggtaaatttaaaagaggctttgtggtaa

SEQ ID NO: 43628 - protein, 200 aa, Unknown
  Obtained from environmental sample
  misc_feature (1)..(200): Xaa is any amino acid
MIWLTLWKKKSWKAWRRKRGKKNRPMTSTSGLRHRTXKPLSPQLPKPSVNWTAPTRDFFRAKTRLPYSAQLDELDASFKAVVDGAKRKTIIFGDRFPFRYLADAYGLEYFAAFPGCSTDTEPSAATVAFLINKVRSEKLPVIFHIELSNEKMADTISEATGAKKLLLHSCHNLTKNDFEKGITYLDVQKANVVNLKEALW

SEQ ID NO: 43629 - DNA, 762 bp, Unknown
  Obtained from environmental sample
  misc_feature (1)..(762): n is a, c, g, or t
ttgataaaatatatacaggataaaactcaactgctttataatgaaagggttttagacagcgtcagtatagactatacaatcgggcagccgcgcgacgatggaaaatttccggttgacattactattaccacgaaagacacatggaatattgtcgccattccaagaccaagatatagttccaataccggttttgacataacgctaaaagcgcgggattataattttttaggaacaatgagtcctttaagaattgatcttggatattcttatgacgaaaataaaaacaactcttttttctttatgtttgattccaatattccatttatggcctacggccttaactggaatataaatttttataatgattttacttatcgtcatgatacggaacagccgatttacaacagaaataccacaggattatcagtagaactaccggttggttttactaccgttaccgccggaataagcgaatcatttattgtaaacgaagaaaacgcgaatatatacaagcctgagtacggaaattttcaagacggtttttatatgtcaactaacccgtatatatcatggaaaataccattaggaataaacgcgggcatttttggcgaggttgtttttactcctggtgtttccgccgtcttccctcatgaatttgcaagatggccgttagatgatataagaaaaggacccattcttgttttaaagcaaaatctcggttttaaccggatagactggatggaaacttcagaaagggattag

SEQ ID NO: 43630 - protein, 253 aa, Unknown
  Obtained from environmental sample
  misc_feature (1)..(253): Xaa is any amino acid
MIKYIQDKTQLLYNERVLDSVSIDYTIGQPRDDGKFPVDITITTKDTWNIVAIPRPRYSSNTGFDITLKARDYNFLGTMSPLRIDLGYSYDENKNNSFFFMFDSNIPFMAYGLNWNINFYNDFTYRHDTEQPIYNRNTTGLSVELPVGFTTVTAGISESFIVNEENANIYKPEYGNFQDGFYMSTNPYISWKIPLGINAGIFGEVVFTPGVSAVFPHEFARWPLDDIRKGPILVLKQNLGFNRIDWMETSERD

SEQ ID NO: 43631 - DNA, 1431 bp, Unknown
  Obtained from environmental sample
  misc_feature (1)..(1431): n is a, c, g, or t
atgacagaatcggcacgagagcggctggcccacgttggtccacattaccacagaggcggtagaggtgacggcgaacttcagacactttcaggaaacatcacaatcagtcccgcatcgccaaacaaaggcacggaattaacagctacctacagcggaagcgaaacagtttcttaccaatggaaacttaacggaagcgcagtaagcgcgtcccctgccaacaagtacacgccaaccgcaggcggaacctgttccgtaaccgtaagcgcggaaggctaccaccccaaaaccgcgaccgtagacgtaaacgaccccgacctttctacattaaccggaacaatcacaatttcaggaggctcgacagtcggcacaccgcttaccgcaacttacagcggaagcgaaacggttacataccaatggaaaaaagacggcagtaatgtcggaacaaactccccaagttacaccccgactgcggaaggcagctacaccgtaaccgtaaccgcgacaggctacaactccaaaacaagcgcgcctgttactgtaaccgcaggcggcggtggcggctcaggcggcgacccaacacaatggacagaagtatcagatagcaaattcgacacagacgacatcatagcaatcgcctatggcaacagcaagtttgtcgcaggcggagttaatggcagaatggcgtattcagcggacggcgtaacatggacagccgttgcggacagtacattcggcacaagcggcatcttcgcaatcgcctatggcaacggtaaatttgtcgctggcggagaaaatggcaaaatggcgtattcagcggacggcgtaatatggacagccatatcggacagcatgttcgaccttagcatcggcgcaatcgcctatggcaataacaagtttgttgctggcggtacttacggcgaaatggcgtattcagcggacggcgtaacatggacagccgtatcggaattcctcacaggcaacatccacgcaatcgcctatggcaacggtaagtttgtcgctgtcactagctgggacggcgaaatggcgtattcagcggacggcgttatatggacaatggtaacggacagcaccttcggcccaagcgaaatcgaaacaatcgcctatggaaacaacaagtttgtcgcaggcggcgacagcggcaaaatggcgacatcaccggacggcgtaacatggacagccgtatcggacagcccattcacacagtacatcggaaaaatcgcatatggcaataacaagtttgtcggaggcaccttctggggcgaaatggcgtattctacggacggagtaaagtggacagccgttgcggacagcacattcggcacaaacgctatctacgcaatcgactatggcaacaacaagtttgtcgcaggcggcgaggacggcaaaatggcgtattcaacagacaattaa

SEQ ID NO: 43632 - protein, 476 aa, Unknown
  Obtained from environmental sample
  misc_feature (1)..(476): Xaa is any amino acid
MTESARERLAHVGPHYHRGGRGDGELQTLSGNITISPASPNKGTELTATYSGSETVSYQWKLNGSAVSASPANKYTPTAGGTCSVTVSAEGYHPKTATVDVNDPDLSTLTGTITISGGSTVGTPLTATYSGSETVTYQWKKDGSNVGTNSPSYTPTAEGSYTVTVTATGYNSKTSAPVTVTAGGGGGSGGDPTQWTEVSDSKFDTDDIIAIAYGNSKFVAGGVNGRMAYSADGVTWTAVADSTFGTSGIFAIAYGNGKFVAGGENGKMAYSADGVIWTAISDSMFDLSIGAIAYGNNKFVAGGTYGEMAYSADGVTWTAVSEFLTGNIHAIAYGNGKFVAVTSWDGEMAYSADGVIWTMVTDSTFGPSEIETIAYGNNKFVAGGDSGKMATSPDGVTWTAVSDSPFTQYIGKIAYGNNKFVGGTFWGEMAYSTDGVKWTAVADSTFGTNAIYAIDYGNNKFVAGGEDGKMAYSTDN

SEQ ID NO: 43633 - DNA, 1284 bp, Unknown
  Obtained from environmental sample
  misc_feature (1)..(1284): n is a, c, g, or t
atgaaaacagaatccgaattacttgaactttacgcacagacgcataagaccggaaaagttgataaaaatgagcttctttcagagattgaacggttggaatttatttatcaattatttggaaaatttaattatcttgatttcggcgctctgtttatatcggaagaaaataatcccgatgaagctatagatataattattaatacgtattatccttacgagttttgtattggcgtagatttcaaagttccgtatcttattaaattaattaagaacaatttttatataatgtcggaatactataaaagaagagatatgtatataatggtagcgatgcatcatttaacaaaatccgttttattttttgaccgtcttcatataaagaaatccataaaaaagcatctttcanaatacgaattaagggtaaacgcggagtttgataaaattgtagataaatgcgttgaaagtcatgatgataaatggttaacagaaccgcttgttaacgcgattaaagaaattcaccgtttagacgatcccgacgcaacttttatttcttttggtttatacagcgacggcaaacttgtagccggtgaattcggaacaaaagtcggcagaatatacagcagttattctggctatcatgaagaaagcaattcaggaacagtacaaatgattttaacggcgcaataccttgagaagaccggctatgctttttgggatttaggcatgtctatggattacaagaaaactttcggcgcaaaagtaagaaatcttgaggattttatgatcctgtggagaaagtactcaactcaagccatcggtatgaattcagaaatagaaaaatatcctatacaaaaacagaatttaacagaggaacaattattatggttattaagaaacgcctataaatatttttatattgaagatttacaggaatatttgcttgatgattttcattacgtttcaccgaatgtttttgaagagataacatcaaaagaacaatatcttgaatacttaaaaaacgagttaaaaactattcaagaagctgatccgccggccaatgaactttttatggaaatggtttacgattctcatttaagcaagccatatttatatatgaagcaaattgaaaacgattttctttttgccgcggaggtgaaggacggaaaactttcccgtattgatttatgcgcgcctgaatcatattcaattaaaagaaaatcggatatggaaattttgaatgaagaggaacaagccttgccgcagaataaggactccggcgtctag

SEQ ID NO: 43634 - protein, 427 aa, Unknown
  Obtained from environmental sample
  DOMAIN (81)...(257): Leucyl/phenylalanyl-tRNA protein transferase
  misc_feature (1)..(427): Xaa is any amino acid
MKTESELLELYAQTHKTGKVDKNELLSEIERLEFIYQLFGKFNYLDFGALFISEENNPDEAIDIIINTYYPYEFCIGVDFKVPYLIKLIKNNFYIMSEYYKRRDMYIMVAMHHLTKSVLFFDRLHIKKSIKKHLSXYELRVNAEFDKIVDKCVESHDDKWLTEPLVNAIKEIHRLDDPDATFISFGLYSDGKLVAGEFGTKVGRIYSSYSGYHEESNSGTVQMILTAQYLEKTGYAFWDLGMSMDYKKTFGAKVRNLEDFMILWRKYSTQAIGMNSEIEKYPIQKQNLTEEQLLWLLRNAYKYFYIEDLQEYLLDDFHYVSPNVFEEITSKEQYLEYLKNELKTIQEADPPANELFMEMVYDSHLSKPYLYMKQIENDFLFAAEVKDGKLSRIDLCAPESYSIKRKSDMEILNEEEQALPQNKDSGV

SEQ ID NO: 43635 - DNA, 651 bp, Unknown
  Obtained from environmental sample
  misc_feature (1)..(651): n is a, c, g, or t
gtgcagagaattgtagcagaagaagtttatactccgcaaatgtttgaagacactcattcaattactacaaattcagaaaatgcggcgagggtgtggagaggtattcaaaaaaatgctggcaaaaatatcgcagctatggtgcaagcggcgtatctctccgaattgccggaaatggaggtttcgctgtgggaatatacaaagaaaatttttgtagattcagaaaatgcgcaaaatacgcttgaaccgcacacgcactcggtttttcaaactgcgaacaaggttagaaaagaagcacacgatatgaaaggatttgtgcgttttcaaaaagcggaaaatgatttgatggtggcggtgattgagcctacctataatattgtgaatttgctcgcagaacattttgcaaacagatttccgaatatgcaatggatgattatagatattaaaagagggcttggtattcattatgatggcagagagatttacgaagtatgcggcaatgctgcggaaattcccaaaataaatgacgaattttccgctctttggaagggctattataaatctgccgatataaaggagagaaaaaatccacggctccaaaggcgatgtttgcctgtgaaatactggaagcatttacaggggagggggaaatag

SEQ ID NO: 43636 - protein, 216 aa, Unknown
  Obtained from environmental sample
  misc_feature (1)..(216): Xaa is any amino acid
MQRIVAEEVYTPQMFEDTHSITTNSENAARVWRGIQKNAGKNIAAMVQAAYLSELPEMEVSLWEYTKKIFVDSENAQNTLEPHTHSVFQTANKVRKEAHDMKGFVRFQKAENDLMVAVIEPTYNIVNLLAEHFANRFPNMQWMIIDIKRGLGIHYDGREIYEVCGNAAEIPKINDEFSALWKGYYKSADIKERKNPRLQRRCLPVKYWKHLQGRGK

SEQ ID NO: 43637 - DNA, 993 bp, Unknown
  Obtained from environmental sample
  misc_feature (1)..(993): n is a, c, g, or t
atgccctgcctatcctgcaacgaccttcgggtctcgttccgtattcaaaagaagagcgcctacgccgtgcggggcgtctcgttctccgtcggcgaccgccggacgctggggatcgtcggcgagtcgggctgcggcaagagcgttacggcggcggcgataatgcggctcgtccctaccccgccggggaagatcgagtccgggtctatacgcttcgatggaaaagacctcttagccattcccgaaaaacagatgtgcggggtgcgcggacggcggatatccatggtgttccaagaccccatgacctcgctcaacccggtcttcacctgcggctaccagaccgcggagccgctgatcctccacaagggcatggacaaacacgccgcggcggagttctccatggaactcttctcggaggtcggtatcgccgagcccaaacgcgtcttctccagctacccgcacaacctgagcggcgggatgcggcaacgcgtaatgatagcaatggcgctggcctgctcgcccaaattgctgatagcggacgaaccgactacggccctggacgtaaccgtccaagcgcggctgctggaactgctgaagaaactgcaagacaccaaggacatgagtatgatactcatcacccacaacttgggtattgtggcgggtatggcgcacgacgtgatagtgatgtacgccggggagatcgtggagtccgcgccggcgcagacgctattcgattcgccgcggcacccgtacaccgagtgtctattgaagacaatcccatccatagaaaaacgcagcgaacggctgacggtaatcccggggacggtgccgacgccgcttgaggtaccggaggggtgcccgtttcaccctaggtgcccgaaggcgaaagacgtgtgcaagaaagagcatcctatactgcattgcgttgacggcgatgttactaatagcgataacagtaacggcgggcattatgtaagatgtcattttatcgaataa

SEQ ID NO: 43638 - protein, 330 aa, Unknown
  Obtained from environmental sample
  DOMAIN (234)...(298): Oligopeptide/dipeptide transporter, C-terminal region
  misc_feature (1)..(330): Xaa is any amino acid
MPCLSCNDLRVSFRIQKKSAYAVRGVSFSVGDRRTLGIVGESGCGKSVTAAAIMRLVPTPPGKIESGSIRFDGKDLLAIPEKQMCGVRGRRISMVFQDPMTSLNPVFTCGYQTAEPLILHKGMDKHAAAEFSMELFSEVGIAEPKRVFSSYPHNLSGGMRQRVMIAMALACSPKLLIADEPTTALDVTVQARLLELLKKLQDTKDMSMILITHNLGIVAGMAHDVIVMYAGEIVESAPAQTLFDSPRHPYTECLLKTIPSIEKRSERLTVIPGTVPTPLEVPEGCPFHPRCPKAKDVCKKEHPILHCVDGDVTNSDNSNGGHYVRCHFIE

SEQ ID NO: 43639 - DNA, 441 bp, Unknown
  Obtained from environmental sample
  misc_feature (1)..(441): n is a, c, g, or t
gtgcgccatacccgccacaatacccaagttgtgggtgatgagtatcatactcatgtccttggtgtcttgcagtttcttcagcagttccagcagccgcgcttggacggttacgtccagggccgtagtcggttcgtccgctatcagcaatttgggcgagcaggccagcgccattgctatcattacgcgttgccgcatcccgccgctcaggttgtgcgggtagctggagaagacgcgtttgggctcggcgataccgacctccgagaagagttccatggagaactccgccgcggcgtgtttgtccatgcccttgtggaggatcagcggctccgcggtctggtagccgcaggtgaagaccgggttgagcgaggtcatggggtcttggaacaccatggatatccgccgtccgcgcaccccgcacatctgtttttcgggaatggctaa

SEQ ID NO: 43640 - protein, 146 aa, Unknown
  Obtained from environmental sample
  misc_feature (1)..(146): Xaa is any amino acid
MRHTRHNTQVVGDEYHTHVLGVLQFLQQFQQPRLDGYVQGRSRFVRYQQFGRAGQRHCYHYALPHPAAQVVRVAGEDAFGLGDTDLREEFHGELRRGVFVHALVEDQRLRGLVAAGEDRVERGHGVLEHHGYPPSAHPAHLFFGNG

SEQ ID NO: 43641 - DNA, 588 bp, Unknown
  Obtained from environmental sample
  misc_feature (1)..(588): n is a, c, g, or t
gtgcggggtgcgcggacggcggatatccatggtgttccaagaccccatgacctcgctcaacccggtcttcacctgcggctaccagaccgcggagccgctgatcctccacaagggcatggacaaacacgccgcggcggagttctccatggaactcttctcggaggtcggtatcgccgagcccaaacgcgtcttctccagctacccgcacaacctgagcggcgggatgcggcaacgcgtaatgatagcaatggcgctggcctgctcgcccaaattgctgatagcggacgaaccgactacggccctggacgtaaccgtccaagcgcggctgctggaactgctgaagaaactgcaagacaccaaggacatgagtatgatactcatcacccacaacttgggtattgtggcgggtatggcgcacgacgtgatagtgatgtacgccggggagatcgtggagtccgcgccggcgcagacgctattcgattcgccgcggcacccgtacaccgagtgtctattgaagacaatcccatccatagaaaaacgcagcgaacggctgacggtaatcccggggacggtgccgacgccgcttga

SEQ ID NO: 43642 - protein, 195 aa, Unknown
  Obtained from environmental sample
  misc_feature (1)..(195): Xaa is any amino acid
MRGARTADIHGVPRPHDLAQPGLHLRLPDRGAADPPQGHGQTRRGGVLHGTLLGGRYRRAQTRLLQLPAQPERRDAATRNDSNGAGLLAQIADSGRTDYGPGRNRPSAAAGTAEETARHQGHEYDTHHPQLGYCGGYGARRDSDVRRGDRGVRAGADAIRFAAAPVHRVSIEDNPIHRKTQRTADGNPGDGADAA

SEQ ID NO: 43643 - DNA, 333 bp, Unknown
  Obtained from environmental sample
  misc_feature (1)..(333): n is a, c, g, or t
atggatgggattgtcttcaatagacactcggtgtacgggtgccgcggcgaatcgaatagcgtctgcgccggcgcggactccacgatctccccggcgtacatcactatcacgtcgtgcgccatacccgccacaatacccaagttgtgggtgatgagtatcatactcatgtccttggtgtcttgcagtttcttcagcagttccagcagccgcgcttggacggttacgtccagggccgtagtcggttcgtccgctatcagcaatttgggcgagcaggccagcgccattgctatcattacgcgttgccgcatcccgccgctcaggttgtgcgggtag

SEQ ID NO: 43644 - protein, 110 aa, Unknown
  Obtained from environmental sample
  misc_feature (1)..(110): Xaa is any amino acid
MDGIVFNRHSVYGCRGESNSVCAGADSTISPAYITITSCAIPATIPKLWVMSIILMSLVSCSFFSSSSSRAWTVTSRAVVGSSAISNLGEQASAIAIITRCRIPPLRLCG

SEQ ID NO: 43645 - DNA, 702 bp, Unknown
  Obtained from environmental sample
  misc_feature (1)..(702): n is a, c, g, or t
atgggccaatcaaaaccaaagtgggatgaaattttttccgctcttgaaaaatggcgtaaggaaataattaccgaaaaaggatcggaagacccttccgtaaccacagtagcgcagcaatatcgccgggacccgtgggctgtgctggtttctacgattttaagtttgcgtacaaaagatgaagtaactatggcagcgtctaagcggcttttggaaaaggccggcgctcctgaagaattaaaagcgatgaaagcggaaaaaatagagaaattaatttatcctgtcgggttttaccggaacaaagcggcttcgcttaaaaaaatcgcttctatcttgcttgaacaatacaacggcaaagtgcctgcgtcaatggaagcgttactcgatcttcctggtgtgggaagaaaaacagcgaacctggtgcttactgaagccttcgatctgcccggcatctgcgttgatgtccatgtccaccgcatatccaaccgttgtggctggctgcgtaccgaaaatcggtacggtacaaaaacgccggaagaaaccgaaatgacgctgcgcgagatactgcccaaaaaatactggaaagggataaacgcccttttggtactctacggacaaaacctctgccgccccgtcagcccctggtgctcccgctgtgtaatcaaagcccattgtaaacgcatagacgtgggaaaaagcagataa

SEQ ID NO: 43646 - protein, 233 aa, Unknown
  Obtained from environmental sample
  DOMAIN (114)...(143): Helix-hairpin-helix motif
  misc_feature (1)..(233): Xaa is any amino acid
MGQSKPKWDEIFSALEKWRKEIITEKGSEDPSVTTVAQQYRRDPWAVLVSTILSLRTKDEVTMAASKRLLEKAGAPEELKAMKAEKIEKLIYPVGFYRNKAASLKKIASILLEQYNGKVPASMEALLDLPGVGRKTANLVLTEAFDLPGICVDVHVHRISNRCGWLRTENRYGTKTPEETEMTLREILPKKYWKGINALLVLYGQNLCRPVSPWCSRCVIKAHCKRIDVGKSR

SEQ ID NO: 43647 - DNA, 477 bp, Unknown
  Obtained from environmental sample
  misc_feature (1)..(477): n is a, c, g, or t
atgataaaaacaggtcttggtttcgacatacatagattaaaaaaaggacgccgctttcttcttggcggcgttgagattccattttcaaaaggtgaagacggacattctgacggggacgttctttcacacgctgtatgcgacgctttgctgggagcttgcgctctgggcgacatcggcgaattatttccgccttccgattccgcatataaagacgccgattccatggaacttttgcgtaatgtttttatgcgtgtaaaaaattccggctggaaactgattaaccttgattgcgtaataatttgtgaaaagccgaaagttcttcccttccgtgagcttatccgtgattcgctctcaaaagcgcttgaagtttctcttgattgtgtttttgttaaaggtaaaacggcggaaggacttggttccgtaggcaggggcaaagcggttgaagttttggctcagtgtctggttgagaaaaattaa

SEQ ID NO: 43648 - protein, 158 aa, Unknown
  Obtained from environmental sample
  DOMAIN (2)...(158): YgbB family
  misc_feature (1)..(158): Xaa is any amino acid
MIKTGLGFDIHRLKKGRRFLLGGVEIPFSKGEDGHSDGDVLSHAVCDALLGACALGDIGELFPPSDSAYKDADSMELLRNVFMRVKNSGWKLINLDCVIICEKPKVLPFRELIRDSLSKALEVSLDCVFVKGKTAEGLGSVGRGKAVEVLAQCLVEKN

SEQ ID NO: 43649 - DNA, 966 bp, Unknown
  Obtained from environmental sample
  misc_feature (1)..(966): n is a, c, g, or t
gtgcacacttacaaaaaaggtgtgtacgaaacaaattatccaataattgacatgcagacactcacccaaaatttcaaaaatgctgttgtattgatttgtgcgccgagatacaacaatgaaatatgtacagaactcatcaaaaatggctttgcgcctcactcaatcattcaatttccagctacttccgtgcctggggaaacccctcaaagttttaatagccacctagaaggctacgaatgggcatacaatttttttgaagatgaactttcccgcgaatgtgtgcttgaaaggatgaagaattatttgctgggcgaactgccgcgccccaacacgacctgcgacatgtactacgaagatggcttcatctcattgtcggaagatgaggtatttgtggattgtggcgtgtggtatggggatacggttgtacagttcatcgagaaaatgaaaaccgttggcaaagcctacaaaaaaatctatgcctttgagcctagcgagtcaaaccgcgctgcggccgccaagcatctgtcgtcctatagcaacgtggagattgtgccaaagggagtatggagcagcgaaacggaactgtcctttgttgacgccacggcaggcaatgtatcccatgcaggcaacgcgtcccattttgcaatggcgcgatttcaagaaacagaaacaaaaatggatagtgtagtccatgtcacatctttggatcggtttttcgatgcacgaaggaaggaaggaatgcccacgttcatcaaaatggacatagagggcgccgaaaaagaggcactgctgggggcgtcgggcataatcagacgcaagaagcccaaactgtcaatatgcgcctaccacaagcccgaagacatattcgaactgccgcagacgataaaggggatcagggacgactacagattcgcgctgagacaacattacgacggggcctatgacacagtgctgtacgcagtgtaa

SEQ ID NO: 43650 - protein, 321 aa, Unknown
  Obtained from environmental sample
  misc_feature (1)..(321): Xaa is any amino acid
MHTYKKGVYETNYPIIDMQTLTQNFKNAVVLICAPRYNNEICTELIKNGFAPHSIIQFPATSVPGETPQSFNSHLEGYEWAYNFFEDELSRECVLERMKNYLLGELPRPNTTCDMYYEDGFISLSEDEVFVDCGVWYGDTVVQFIEKMKTVGKAYKKIYAFEPSESNRAAAAKHLSSYSNVEIVPKGVWSSETELSFVDATAGNVSHAGNASHFAMARFQETETKMDSVVHVTSLDRFFDARRKEGMPTFIKMDIEGAEKEALLGASGIIRRKKPKLSICAYHKPEDIFELPQTIKGIRDDYRFALRQHYDGAYDTVLYAV

SEQ ID NO: 43651 - DNA, 936 bp, Unknown
  Obtained from environmental sample
  misc_feature (1)..(936): n is a, c, g, or t
atgaccaaagttatgatatacacgcaatgctacaacgccgaaaatacagtggcccgcaccattgaaagtgtgctttcccaaactcatggggacttcctgtatcatgtggttgacaatggttcgacagattcgaccagggacatcatcaaatcatttgccgaccgcgataagaggatcaaagccgtggccaatgctgcgaacaacgtctgggagcctggcaatatttatttcgagtttctggatggatgtgacgccgactctttcttctgcatgctagattccgatgacgattacaaaccaactttccttgaatgcatgttggcattcatcagggacaatcggttggacctagccgcctgcggtagcgatttcctcagcaacaccaatgggtcgtttttgtccgccagggcgttggagcatgatttgattctcgaaggggagtcctttggtacgcagttccccgtttaccatcagttcatgcgcacatactggggcaagctctatcgcgtttcactgctgcgtaattgggccgccgacatcaatggttacgcaagctatggcgctgacacgctccttgcccagggcgccttcggtcgcgcaacgcgggtgggcatactcgccggcaccctgcacaactattacgtcagcacccaatccgcatcatacaacttcgacgccagacgcatccgaggcgaccgattgcttttcgatgcggccaaggctttcctgatagcaaaggtcggtcacataagtcccaacaacgatcattttttatatagcgtatatctgaatgccatcagagacacgcttaacgttttggctctggcacaaatctccgagagcgaaaaaatggagcacgtcctatacctaaagggtgaaatggatgaaatccaaaggtactttgccgcattgccagctcagcccccttccacctga

SEQ ID NO: 43652 - protein, 311 aa, Unknown
  Obtained from environmental sample
  DOMAIN (5)...(177): Glycosyl transferase family 2
  misc_feature (1)..(311): Xaa is any amino acid
MTKVMIYTQCYNAENTVARTIESVLSQTHGDFLYHVVDNGSTDSTRDIIKSFADRDKRIKAVANAANNVWEPGNIYFEFLDGCDADSFFCMLDSDDDYKPTFLECMLAFIRDNRLDLAACGSDFLSNTNGSFLSARALEHDLILEGESFGTQFPVYHQFMRTYWGKLYRVSLLRNWAADINGYASYGADTLLAQGAFGRATRVGILAGTLHNYYVSTQSASYNFDARRIRGDRLLFDAAKAFLIAKVGHISPNNDHFLYSVYLNAIRDTLNVLALAQISESEKMEHVLYLKGEMDEIQRYFAALPAQPPST

SEQ ID NO: 43653 - DNA, 573 bp, Unknown
  Obtained from environmental sample
  misc_feature (1)..(573): n is a, c, g, or t
gtgctcggtggctatgttccggatcagctccatgatgagcacggttttgccaacacccgcgccgccgaaaagccctatcttgccgcccttggcatacggggctataagatcgatgacctttatgccggtttcaaaaacttcggtagccggtttctgatcggcaaagtccggtgcactgcgatgaatggatgcgtactgtttggcagtgaaagaccctttgtcgtcgatggatttgcctgtaacgttgaacatccttccaaggatttcgtcgcccaccggaacctgaatcgcgtgacctgtgtcgcttacttccatgccgcgcgaaaggccttctgttgcttccatggcaacgcagcggacacggttgtcccctatgtgttgcaaaacctccagcacgaccttcctgtcgccgtcggatctgcgatccgttatcacttccagggcgttaagaattcccggaatggattccgtgccgcctgttgcgctgaaactaacgtccacgacgggaccgacaacctggatgatagaacctacatttgccatttttttccttcttttttccatctactttaa

SEQ ID NO: 43654 - protein, 190 aa, Unknown
  Obtained from environmental sample
  misc_feature (1)..(190): Xaa is any amino acid
MLGGYVPDQLHDEHGFANTRAAEKPYLAALGIRGYKIDDLYAGFKNFGSRFLIGKVRCTAMNGCVLFGSERPFVVDGFACNVEHPSKDFVAHRNLNRVTCVAYFHAARKAFCCFHGNAADTVVPYVLQNLQHDLPVAVGSAIRYHFQGVKNSRNGFRAACCAETNVHDGTDNLDDRTYICHFFPSFFHLL

SEQ ID NO: 43655 - DNA, 885 bp, Unknown
  Obtained from environmental sample
  misc_feature (1)..(885): n is a, c, g, or t
atggcgaatttaagggatgttcgcctcaggatgcgggccattgggcaaaccctgcaggtaacaaaggcgatgaacttaatctcgaccgccaaactgcgcaaaggccgcaggattttgctggatgttgagcctttctttaccagaatccagaaatccatgtttgacatactagccggagcgccgctggataaaagcatataccttgcttcatccgggaaggataaggattcccacaccgcgataatcgtgataacaagcgacaagggccttgccggcggttacaacgcgaatattttcaggcaggtaaattcgctctgcgagaaggtaaagaacccaatcctgattctggttggctcggtcggttacaggtacttcatccattcgcgctggcttgtcatggaaaatttttccttcaagtccagactgcctgaactggatgaggcgaaggaaatcgcgcagtatattatttcccaataccaatgggggctgtttagtgaagtccatctggtatatacgcatatgtacagttccattaagcttgttccaagagaaaggcaattgctgccccttaaccctgaaagcatgcaggaagaatttgaaaagctcgggggtaagcggcagaaactcagttttgaatactggccatccaaagaagcggtctttgacgcccttgttcccatgtatgtaaaagggatcatttacggctcccttgtggaagcatatgtaagcgaacaaagcgcccgtatgtccgcaatggacgaagcaagcaaaaacgctgaagatatgctcggcgatttgcagattaactataaccgcgccaggcaggcgggcattacccaggaaatgacagaaattgtcggcggcgcggaagcgctgagcgattaa

SEQ ID NO: 43656 - protein, 294 aa, Unknown
  Obtained from environmental sample
  DOMAIN (2)...(292): ATP synthase
  misc_feature (1)..(294): Xaa is any amino acid
MANLRDVRLRMRAIGQTLQVTKAMNLISTAKLRKGRRILLDVEPFFTRIQKSMFDILAGAPLDKSIYLASSGKDKDSHTAIIVITSDKGLAGGYNANIFRQVNSLCEKVKNPILILVGSVGYRYFIHSRWLVMENFSFKSRLPELDEAKEIAQYIISQYQWGLFSEVHLVYTHMYSSIKLVPRERQLLPLNPESMQEEFEKLGGKRQKLSFEYWPSKEAVFDALVPMYVKGIIYGSLVEAYVSEQSARMSAMDEASKNAEDMLGDLQINYNRARQAGITQEMTEIVGGAEALSD

SEQ ID NO: 43657 - DNA, 621 bp, Unknown
  Obtained from environmental sample
  misc_feature (1)..(621): n is a, c, g, or t
ttggaaagggcggcaaaactctcagaggcgcggggaagcggttccattaccgccctgccaattgtagaaacccaggctggggatatttcgtcttatattccaaccaacgtaatttccataaccgacggccagatctttttggacacggagctttttaattcaggtttccgcccggccattgacgtgggcctctcggtcagccgcgtgggaggctccgcgcagttcaaagcgattcgcaaaatagcgggcaggctcaggctggatttggcgcagtaccgggagatggcggcctttgcccagttcggaagcgatttggacaaggcgacgcagacaaaactggcccagggggaacggcttatggaagtcctcaagcagtcccagttttctccttatagcacggccaagcagtacgttatcctctttacggccgtaaacggccatcttatggatgtggcaacaaaagacatcccctcctttataaagggtttcctggaatatctttcaagaaacaacgaacaaattctgtcgcaactggacaaaagcggcgaatccagcgttgatgcagatcaggtaataaccgaagccattgaaaactacaaacacattaaccaccaggtgtaa

SEQ ID NO: 43658 - protein, 206 aa, Unknown
  Obtained from environmental sample
  DOMAIN (79)...(183): ATP synthase alpha/beta chain, C terminal domain
  misc_feature (1)..(206): Xaa is any amino acid
MERAAKLSEARGSGSITALPIVETQAGDISSYIPTNVISITDGQIFLDTELFNSGFRPAIDVGLSVSRVGGSAQFKAIRKIAGRLRLDLAQYREMAAFAQFGSDLDKATQTKLAQGERLMEVLKQSQFSPYSTAKQYVILFTAVNGHLMDVATKDIPSFIKGFLEYLSRNNEQILSQLDKSGESSVDADQVITEAIENYKHINHQV

SEQ ID NO: 43659 - DNA, 588 bp, Unknown
  Obtained from environmental sample
  misc_feature (1)..(588): n is a, c, g, or t
ttggagaatgcgattctacgaacattgctaattataaaagggatagtcttatgcatgccaaaggaacataggatgaatacttccattgagcgtgtgaaagcaataaatcaacaattaatcgtgttgcttcagactatggtgtccctaacgaaatataaccatttattgtcaaccaccactggcaatagcacggcagattatgcttacaacgagcatggctctatggcttctatgccgcatttgcaggcgatggattgggatttcatggaaaggctgtcccatatcacgagaggcacaacaaaggcgtattacagctatgacggaagcgggcagagagcacgcaaggtggtagaaaagaacaatgttgttgaggaaaggctgtatctgggtggatttgaaatatttaggaaaaaagtaaacgggaagattgacgccgaaagggaaactttgcacataatggatgacacaaaaagaatagctatcgcggagactttgactgtaaacaacggggttgttattaataatcctacctctgtacaaaaatatcagttaagcaacaacatagaatccgccctcgtgccgatctga

SEQ ID NO: 43660 - protein, 195 aa, Unknown
  Obtained from environmental sample
  misc_feature (1)..(195): Xaa is any amino acid
MENAILRTLLIIKGIVLCMPKEHRMNTSIERVKAINQQLIVLLQTMVSLTKYNHLLSTTTGNSTADYAYNEHGSMASMPHLQAMDWDFMERLSHITRGTTKAYYSYDGSGQRARKVVEKNNVVEERLYLGGFEIFRKKVNGKIDAERETLHIMDDTKRIAIAETLTVNNGVVINNPTSVQKYQLSNNIESALVPI

SEQ ID NO: 43661 - DNA, 828 bp, Unknown
  Obtained from environmental sample
  misc_feature (1)..(828): n is a, c, g, or t
atgagtaaggaggaggaatttgtgatgtctggtaataattattatgatgtaacagaatggtctgtaggcaatccgtacatggatattggtgaggtaatcaacagtatcatttcagatattaagagcaggcaaacagataaggatatgcatgatggcggtaagcccggtgcggttatctatatacctccaggcgattatcatcttctaactcaggtacatattgatatcagctaccttaaaattatgggatccggtcatggttttacatcttcgagtattcgcttcaatacgcctgaaaatgacttgttgaactggcatgaagtatggccagggggaagccgaataatagtaaacatttccgccaatgcaggggatgatgaaaatgtcggcgccgcattttttatcaatagagatggcgaccctcggataagttctgtagaatttgctgatttttgtattgatggtttgcattttgtggacgatggtaaaggtggagcaaattccgagaatacatatacaaatggaaaaacaggtatctatgtagcatgccctggagattcattccgatttaccggaatgggacttgtgtatctggagcatggaattactttttattatgcagatgcgcttgatattcacgataattttattgcagaatgcggaaactgtgtagaactccgaggatcagggcaagcatcgaanattactgataatttgatgggagccggttataagggctatacaatttttgctgaaaattttggcggtcttttagtgacagcgaacaatattttccccacgaggtgcaagcagcatcccattttgtag

SEQ ID NO: 43662 - protein, 275 aa, Unknown
  Obtained from environmental sample
  misc_feature (1)..(275): Xaa is any amino acid
MSKEEEFVMSGNNYYDVTEWSVGNPYMDIGEVINSIISDIKSRQTDKDMHDGGKPGAVIYIPPGDYHLLTQVHIDISYLKIMGSGHGFTSSSIRFNTPENDLLNWHEVWPGGSRIIVNISANAGDDENVGAAFFINRDGDPRISSVEFADFCIDGLHFVDDGKGGANSENTYTNGKTGIYVACPGDSFRFTGMGLVYLEHGITFYYADALDIHDNFIAECGNCVELRGSGQASXITDNLMGAGYKGYTIFAENFGGLLVTANNIFPTRCKQHPIL

SEQ ID NO: 43663 - DNA, 300 bp, Unknown
  Obtained from environmental sample
  misc_feature (1)..(300): n is a, c, g, or t
atgaagttaaacgacgacggaaagacagtgcgggcgatggacgttcttgttcctcggttaggtgaaattatcggcggctcacagcgtgaagatagtttagataaacttgttaaccgcatgaatgaacttggtttaaaacaggaagattatcattggtatcttgatcttcgccgttacgggtcagtgcctcattcggggttcggtcttgggtttgaaagacttattcagtatgtttcaggcatggcgaatatccgtgatgttattccctatccgcgcgcggtggggcaggctgaattctaa

SEQ ID NO: 43664 - protein, 99 aa, Unknown
  Obtained from environmental sample
  misc_feature (1)..(99): Xaa is any amino acid
MKLNDDGKTVRAMDVLVPRLGEIIGGSQREDSLDKLVNRMNELGLKQEDYHWYLDLRRYGSVPHSGFGLGFERLIQYVSGMANIRDVIPYPRAVGQAEF

SEQ ID NO: 43665 - DNA, 1038 bp, Unknown
  Obtained from environmental sample
  misc_feature (1)..(1038): n is a, c, g, or t
atgtttcctttaatcaaagaacttcttaattccgagcctaacggacaggagatttgcgtaaaaggttgggtcagaaccaagcgtgaaatgaaaaaccttgtctttgtggaagtaaacgacggttcctgctttaggggtatccagtgtacttttgacagaggagcggggattgacgaacagacggaagcttctctcgcttctctttctacgggcgcttccgttaaaatcggcgggaagctgataccttcgcccgcttcagggcaggcggtggaagttgccgctgtgtctttgcatattttcggcgacgcccctgccgaagccgtcggcgatacgcaggcttacccgcttcaaaaaaaacggcactctttggaatttctccgtgagattgcgcaccttcgcccccgtacaaatacttttggagcggtagcccgtcttagaagccgattggcgttcgctattcatcaatattttcaggagagggattttcattaccttcatacgccgatcatcacggcaggagattgcgaaggcgcaggagcgatgtttcaggtaacgacgctcgatcttgaagccgccgccaaacaatttgcagggaaagcgaataacggacagacggaagcgatagattactccaaagattttttcggcaagaaaacatttttaacggtttcaggtcagcttgaaggggaaacctacgcgacggcagtctcacgcatttatactttcggtccgactttccgagcggagaactcaaacacagtccgccaccttgcggaattctggatggtagaacccgaagtcgcttttgccgaattaaaagacgatatggagttagcggaagattttttgaaatatgtttttgatgtcgctttgaacgaatgcgccgatgaacttgatttttttgacgcccatgtcgagaagggaataatagaaaatttgcagcaggttgcggaagcgaaatttgcgcatatcacttatacggatgccgttaaagaattggaaaaagcagttgccgcaaagagcgatattttgaattaa

SEQ ID NO: 43666 - protein, 345 aa, Unknown
  Obtained from environmental sample
  DOMAIN (122)...(340): tRNA synthetases class II (D, K and N)
  misc_feature (1)..(345): Xaa is any amino acid
MFPLIKELLNSEPNGQEICVKGWVRTKREMKNLVFVEVNDGSCFRGIQCTFDRGAGIDEQTEASLASLSTGASVKIGGKLIPSPASGQAVEVAAVSLHIFGDAPAEAVGDTQAYPLQKKRHSLEFLREIAHLRPRTNTFGAVARLRSRLAFAIHQYFQERDFHYLHTPIITAGDCEGAGAMFQVTTLDLEAAAKQFAGKANNGQTEAIDYSKDFFGKKTFLTVSGQLEGETYATAVSRIYTFGPTFRAENSNTVRHLAEFWMVEPEVAFAELKDDMELAEDFLKYVFDVALNECADELDFFDAHVEKGIIENLQQVAEAKFAHITYTDAVKELEKAVAAKSDILN

SEQ ID NO: 43667 - DNA, 1527 bp, Unknown
  Obtained from environmental sample
  misc_feature (1)..(1527): n is a, c, g, or t
gtggagcggctaggtccgcagcagtttccgataacggcggccggtctttcgagtttagacttcagggtgcacaagatagatccgttgcacacggcgttcggcgactttccgtccgcgcaaattgagattagcgagacgtccatgccccccgggcccggcgaggagccgtcctcattggactccgattacggcaagaggcgctacgggtactcctccgagacagtgaagattgagaagcacatacggatgctaggcagcccgcattattccggggttgtggaccttggcaaggggggcgggggcaaaattaacagcgtagacctaaagccgatgttcaccgccatcagcggcaaggagaagccggggacgtatctcgtgggtttcaggcaacttgacgggtcgcagaagcgttactacgcgaaggtgagcgtgacggatttgtgcctaagcgcggtggaatcgaaggcgaagagcaacaaggtgatgtttgcggttacgagttattcgagtgacaaaccggtgtccgacgcggcgataaggatagacggtctaatagacggtgatatggtaacgctcgctcagggcaaaaccggatcggacggttttttctcctttgagcacactaaggcgacattggggaagttgaatagttcgacggtgcggagggttgtggtctccaagggcgacgacgtgttggttatcaataccgagaacaatcgggacggcacgttggacatcttttcgaacaatcactggcggaaatccgacgaggggtggcttaattggcccgatcgcagcgagaattttacgtcggagaaggcggagatacgcgggttcgtgcgtaccgagcgccccatctaccgtccgggggacagcgtcttcataaaggggtacgtgagggaactgctctacggcgccatcaacctgcctgccggcgggggcgagtacttcgttaaggtgagcaacccgtctgacgtttactttacgcagagggtcacgctgaatgagttcggcgcctttcatttgaaggttgggccgccgtctgacgaaaccgcgcccacggggacgtacgaagtattgctgtataagcgcgttaggggcgatggcgagcagtttattacccgcacggattttttggttgacgcctaccgtattccgcgttttgaggttcgggtgagcggtgccgaccgcgttcccaacgacgggccggcgctggtgcgcgccttggcgacgtactacgccggcgggcgtctcgtggagagggacgtcgcttggaaggtgacgtcgtacccttacgaccataggccccgcgggtttgccaactacatactgtcgagcgacagccgctacggcgcgtctcaggagcccgccagacagagcgtgcttgaggagaatgggaaaactgacgtgaacggcagcgccaccatcacgctcaacccgcaggcggcgacggcggggaacccgactaagtacgtggttgaggcgactgtaccgacgcggattgcagactcggccattctgtcatga

SEQ ID NO: 43668 - protein, 508 aa, Unknown
  Obtained from environmental sample
  DOMAIN (144)...(449): Alpha-2-macroglobulin family N-terminal region
  misc_feature (1)..(508): Xaa is any amino acid
MERLGPQQFPITAAGLSSLDFRVHKIDPLHTAFGDFPSAQIEISETSMPPGPGEEPSSLDSDYGKRRYGYSSETVKIEKHIRMLGSPHYSGVVDLGKGGGGKINSVDLKPMFTAISGKEKPGTYLVGFRQLDGSQKRYYAKVSVTDLCLSAVESKAKSNKVMFAVTSYSSDKPVSDAAIRIDGLIDGDMVTLAQGKTGSDGFFSFEHTKATLGKLNSSTVRRVVVSKGDDVLVINTENNRDGTLDIFSNNHWRKSDEGWLNWPDRSENFTSEKAEIRGFVRTERPIYRPGDSVFIKGYVRELLYGAINLPAGGGEYFVKVSNPSDVYFTQRVTLNEFGAFHLKVGPPSDETAPTGTYEVLLYKRVRGDGEQFITRTDFLVDAYRIPRFEVRVSGADRVPNDGPALVRALATYYAGGRLVERDVAWKVTSYPYDHRPRGFANYILSSDSRYGASQEPARQSVLEENGKTDVNGSATITLNPQAATAGNPTKYVVEATVPTRIADSAILS

SEQ ID NO: 43669 - DNA, 1815 bp, Unknown
  Obtained from environmental sample
  misc_feature (1)..(1815): n is a, c, g, or t
gtgaccataaacctccgcgacatacagggcaaggcgcgtccgggcgaggtcgcgctgtggctggttgacgaggcggtgctgtctctgcgcaaggagcacagtttagacccgctcgaagcgtttttgaaagaggtggatacgcacgtcagtataatggatagccggaacattatcataggcgacctattggcgtctgaaaatccgggcggcgacggcggcgacgaggaggacgatggtctggggaagatcaccccgcgcaagaatttcaaggtggtgccgtattggaatccctctataaaggttgacaaaaacggaatcgctgttgtgaagattaagatgtccgacgacctgacgaacttcgcggtgcgcgcgatggcggtgagcgggccggacaggttcggcatggccaagtcgcgggtgtctgtgcgcttgccggtaacggttcagccggcgctgccgcgtttcgtgcgtttgggcgacaaattgcgggcgggcggtattgcccgcgtggtggagggcggcggcggcgcggcgacgtttatgataaccgccaaagggttgtctataaaaaatacccccgataagcagatacagctcgactcggtaaggccgatgcaactctatgcggatctcacggtagagatgcagccgttcaagcgcggaagattgctgttggactcggcgtcggtaaaaatggcggtaaagagaagcaccgacaacgccggagacgcctttgaggtcaagataccggtgctgcctgacaggcaattcatggaggagacgcaattctcccagattagcaaggggggaaatttctcatggcaggccttgcccgcgccggcgaggcccaacactatcaccggaaacttgtttataagcgagaatcaatacctgcccaagatcatctccgccacggcgagcctcatacgcttcccgtacgtttgctcggagcaggtggtgtcgcaatcgtacccgtctatcgtctacaagggcatgtgggagaaatacggcgtcgaaccgcccgatatgtcggtaactgagggcgtggcgagggcgatggcctatttgaagacgactcagcatagcgacggcctgttcggctactggcccggcactaccggatacgtctacctcacggcatacgtggtagatttcttgacggaggtgaacacggcaaacaagacgctggaaaaaccgttcccgttcgaccaaaatatgtaccgttccgccatagaggctctaaagcgctcgttgcgcagcgactacagccgcttcgtcggcggttattctgcatacgagagaagctgcgcgctgatggcgctcgccaggagcggccataccgacataggctacacgcgcgaacttgccgccgcggcgaacgagttggacgtatccggcaaggccaacgtgttcaaagtcgtctctgagaaagaaaacgtcttgggcaagcagtacgccgcgctggaagaccaactttggaagtcggcgatattcttggatcgcaagggcaaagaggccttcggcggatttcagaaggtcggtgtgccggtgggggcgagaatgcacgtgagcgacgtcgccgcgctcgcgtcgttcgtgagcgccatgtcctcttcgccgaaaaccaagtcgaacccgagaacgcagctcttagcccaagaactcgcgaacatgggcacggacgacggctggggcagcacctacgcgaacagtttgtcgctcttggctttgcgcgatttcattgacagcaaagaacaaggcgcggcggaaaataccttcaaactcaaacaaggcgacggtgattcaaaagtttga

SEQ ID NO: 43670 - protein, 604 aa, Unknown
  Obtained from environmental sample
  misc_feature (1)..(604): Xaa is any amino acid
MTINLRDIQGKARPGEVALWLVDEAVLSLRKEHSLDPLEAFLKEVDTHVSIMDSRNIIIGDLLASENPGGDGGDEEDDGLGKITPRKNFKVVPYWNPSIKVDKNGIAVVKIKMSDDLTNFAVRAMAVSGPDRFGMAKSRVSVRLPVTVQPALPRFVRLGDKLRAGGIARVVEGGGGAATFMITAKGLSIKNTPDKQIQLDSVRPMQLYADLTVEMQPFKRGRLLLDSASVKMAVKRSTDNAGDAFEVKIPVLPDRQFMEETQFSQISKGGNFSWQALPAPARPNTITGNLFISENQYLPKIISATASLIRFPYVCSEQVVSQSYPSIVYKGMWEKYGVEPPDMSVTEGVARAMAYLKTTQHSDGLFGYWPGTTGYVYLTAYVVDFLTEVNTANKTLEKPFPFDQNMYRSAIEALKRSLRSDYSRFVGGYSAYERSCALMALARSGHTDIGYTRELAAAANELDVSGKANVFKVVSEKENVLGKQYAALEDQLWKSAIFLDRKGKEAFGGFQKVGVPVGARMHVSDVAALASFVSAMSSSPKTKSNPRTQLLAQELANMGTDDGWGSTYANSLSLLALRDFIDSKEQGAAENTFKLKQGDGDSKV

SEQ ID NO: 43671 - DNA, 414 bp, Unknown
  Obtained from environmental sample
  misc_feature (1)..(414): n is a, c, g, or t
ttgaaaatccacgctgttgtcggcatgcgaaccaccattgatgatgttcatcattggaataggcagcgtgttggcgttcgtaccgccgatatagcggaacagcggttggttggtaaactcggccgccgcatgcgcacaagccaacgaaacgcccaaaatcgcgtttgcgcccaaacggcctttgttcggcgtgccgtccaactcaatcataattcggtcgatgtcgttttgttcggtcacatctgtgcccatcaaggcctcgcaaatttcggtattcacgttttcaacggctttcaaaacgcctttgcccaagaatttggacttatcgccgtcgcgaagttctacggcttcgtgaacgcctgtggatgctcccgaaggaacagcagcacggccaaaatagccgctttcggttaa

SEQ ID NO: 43672 - protein, 137 aa, Unknown
  Obtained from environmental sample
  misc_feature (1)..(137): Xaa is any amino acid
MKIHAVVGMRTTIDDVHHWNRQRVGVRTADIAEQRLVGKLGRRMRTSQRNAQNRVCAQTAFVRRAVQLNHNSVDVVLFGHICAHQGLANFGIHVFNGFQNAFAQEFGLIAVAKFYGFVNACGCSRRNSSTAKIAAFG

SEQ ID NO: 43673 - DNA, 780 bp, Unknown
  Obtained from environmental sample
  misc_feature (1)..(780): n is a, c, g, or t
ttgggcaaaggcgttttgaaagccgttgaaaacgtgaataccgaaatttgcgaggccttgatgggcacagatgtgaccgaacaaaacgacatcgaccgaattatgattgagttggacggcacgccgaacaaaggccgtttgggcgcaaacgcgattttgggcgtttcgttggcttgtgcgcatgcggcggccgagtttaccaaccaaccgctgttccgctatatcggcggtacgaacgccaacacgctgcctattccaatgatgaacatcatcaatggtggttcgcatgccgacaacagcgtggattttcaagagttcatgattatgccggtgggcgcatcttcatttgccaaagcgttcagaatgggtgcggaagtttttcatacgttgaaaaacgtgctgcacaaacaaggcatgagtacggccgttggcgacgaaggcggttttgcgcctaacctgaaatcgaacgaagatgcactgaaagtgattatggaggccatcgaaaaagccggctacaaaccgggtgaagatatttttatcggtttagaccctgcatcgtccgaattttatttggaagacgaaaaagtatatcatctcaaaaaatcgaccggcgaaaaactgacttcgcaacaaatggcagacttttgggccgattggcacaaacgctacccgattatctcgctcgaagacggtatggccgaagacgattgggacggctggaaatacttgaccgacaaaatcggaaaaacctgcatttggtgggcgatgatttgtttgtga

SEQ ID NO: 43674 - protein, 259 aa, Unknown
  Obtained from environmental sample
  DOMAIN (1)...(75): Enolase, N-terminal domain
  misc_feature (1)..(259): Xaa is any amino acid
MGKGVLKAVENVNTEICEALMGTDVTEQNDIDRIMIELDGTPNKGRLGANAILGVSLACAHAAAEFTNQPLFRYIGGTNANTLPIPMMNIINGGSHADNSVDFQEFMIMPVGASSFAKAFRMGAEVFHTLKNVLHKQGMSTAVGDEGGFAPNLKSNEDALKVIMEAIEKAGYKPGEDIFIGLDPASSEFYLEDEKVYHLKKSTGEKLTSQQMADFWADWHKRYPIISLEDGMAEDDWDGWKYLTDKIGKTCIWWAMICL

SEQ ID NO: 43675 - DNA, 1026 bp, Unknown
  Obtained from environmental sample
  misc_feature (1)..(1026): n is a, c, g, or t
gtggttcttctttcggctaacaccaaaggcgaagaattggaaaaactgaaaaatctttggccttccgccgtttgcgtgctttcaggcgtacaaggcggaaaggagaatcttcttgccgctatcggaaacgtaaacgcatgcctgacaataaacggcatatccggagcgggcggccttgaaccgtctcttgcagcgatagaatcaggctctgatcttgcgctcgcaaacaaagaaacgctggtcatggcggcccctctcgttttccgcctcgcgaaagaaaaaaacgtaaaaataattcccgttgattctgaacattcggcaattttccgcctgatacaggctcacgcgggcggcgaaaaagaaacggtaagcgaaataattttaaccgcttcgggcggcccttttagaaaaatggggcttaatgacttgaaaaaagtcaccgcgaaagatgcgctttcccaccccacatggaaaatgggtcctaaaataacgattgattccgcttcaatggcaaacaaagggcttgaaattatcgaagcgtgcgcactttttgacatgcctcaggaaaaaatcaaggtggtaatacatcctcaaagcatcgtacattccatggtaaaactctgtaacggcgcgatttacgcccagctttccaaaccggatatgcgaaaccccattcatgacgcgcttttttggccgaagacggcgccattggtcatggaagcgataaattttgattctcttacccttgaatttgaaaagccggataatcaaaaatttcccatgcttgaccttgcgcgcaaaagcgcaagtctcggcggcctttacccttgcgtttacaacgcggtaaatgaagaagcggttaccgcgtttttacagaataaaatcgggtttcttgacataccaaacataacaaaaaatgttctggatcaggattggcctggcggctgtacccagaaaaaagaaatccttaatacggacgctttagcgcggaaaaaggctgttttctatatcaataaaaatatataa

SEQ ID NO: 43676 - protein, 341 aa, Unknown
  Obtained from environmental sample
  DOMAIN (2)...(84): 1-deoxy-D-xylulose 5-phosphate reductoisomerase
  misc_feature (1)..(341): Xaa is any amino acid
MVLLSANTKGEELEKLKNLWPSAVCVLSGVQGGKENLLAAIGNVNACLTINGISGAGGLEPSLAAIESGSDLALANKETLVMAAPLVFRLAKEKNVKIIPVDSEHSAIFRLIQAHAGGEKETVSEIILTASGGPFRKMGLNDLKKVTAKDALSHPTWKMGPKITIDSASMANKGLEIIEACALFDMPQEKIKVVIHPQSIVHSMVKLCNGAIYAQLSKPDMRNPIHDALFWPKTAPLVMEAINFDSLTLEFEKPDNQKFPMLDLARKSASLGGLYPCVYNAVNEEAVTAFLQNKIGFLDIPNITKNVLDQDWPGGCTQKKEILNTDALARKKAVFYINKNI

SEQ ID NO: 43677 - DNA, 1023 bp, Unknown
  Obtained from environmental sample
  misc_feature (1)..(1023): n is a, c, g, or t
atgaaagcgatttatatttccaataccgtttggttttctacggaatctatcagccagttggtttggtcgtttgtgtatatcatgggcgttttctggatgaacccgatggcgactttcggtatgctgctcgttatgggaaactacgcatggcgtttctggcagccgattatcaatcttgccaacatttacaatacgtttattacagcaatggcgtaccttgaccgtatcttcgacacaatagcggaacctataacaattcaggatattcccaacgccgtagaatttccgtttgtgcggggacacgtcgagtttaagaatgtaagtttcagctatgacggaacacgcaaggtgctgaataatgtcagttttaacggacatccgggacaaagcatcgccattgtaggacctacgggagccggaaaaacaacgatagtaaatctgctctctcgtttttacaatattgaagacggacaagtatttattgacggtcaggatataatgaaagttacattacattcgttaagaagccagatgggaataatgctgcaggacagttttttattcacgggaacaattgccgacaacatccgttacggaaaacttaacgccaccgacgaagaaatccgcgccgccgcgaaacttatcggcgctaaccaatttatagaaaaattacccgaaggatataatacccgcataatagagcgcggaagcggcatctccgccggcgaaagacagcttttggcttttacgcgcacccttatttccaacccgagaatacttattcttgacgaagcgacaagcagtatcgacacaggcacggaacagcttgtgcaagagggaatacaaacattgatgaaaggacgcacttcttttatcatcgcccacaggctttccacgatacgcaactgcacgcagataatgtatgtaaacgacggacaaattgcagaaagcggcacgcatgaggaacttatggctaaacgcggaaggtactacgagctttgtttggctcagtaccagcaatag

SEQ ID NO: 43678 - protein, 340 aa, Unknown
  Obtained from environmental sample
  DOMAIN (128)...(312): ABC transporter
  misc_feature (1)..(340): Xaa is any amino acid
MKAIYISNTVWFSTESISQLVWSFVYIMGVFWMNPMATFGMLLVMGNYAWRFWQPIINLANIYNTFITAMAYLDRIFDTIAEPITIQDIPNAVEFPFVRGHVEFKNVSFSYDGTRKVLNNVSFNGHPGQSIAIVGPTGAGKTTIVNLLSRFYNIEDGQVFIDGQDIMKVTLHSLRSQMGIMLQDSFLFTGTIADNIRYGKLNATDEEIRAAAKLIGANQFIEKLPEGYNTRIIERGSGISAGERQLLAFTRTLISNPRILILDEATSSIDTGTEQLVQEGIQTLMKGRTSFIIAHRLSTIRNCTQIMYVNDGQIAESGTHEELMAKRGRYYELCLAQYQQ

SEQ ID NO: 43679 - DNA, 753 bp, Unknown
  Obtained from environmental sample
  misc_feature (1)..(753): n is a, c, g, or t
atgagcttcttcagcaaaaagcgtgaacaaaaaacatccaaagagaaaaaccgctacgacatggacgaataccttgacgaaaaggtaagtctttttaacgtaaagcgtgttctcggttatcttataaaagcaaaaggtcatttaagactttcgctgattttcagtatccttgcctcggtttccggtcttataggaccgctgtttattaaaacggcgctggacgaagccgtcccaaacaaagatatgcgtcaactgctcctaatgggcgtataccttacggcgtccatcattgtaagcgtcgcattaagcgctgtgcgtaacatacttgtagcgaaggcgggagcgggcattatccatgatataagacaagatttgttttcgcacctgcaaaaattgtctttcagtttttttgattcccgcccgcacggaaaaatatttgtgcgtgtcgtcccctatgtaaacagcgtatcggacgcgctttccaacggaatcatcaactttgtaatagaagtgcttaacatcttctttattatcttttttatgtacaaagttgacccgcaccttgcgacagttacggttgtcgggcttccccttctcgcaatttttatctggacaatcaaaccggctcagcgcagagcttggcaggctgtttcaaataaaggatcaaacataaacgcttatgtgcaggaatccatagacggcgtaaaagtaacgcaggctttgacaggcaggataaaaatcttgaaatactga

SEQ ID NO: 43680 - protein, 250 aa, Unknown
  Obtained from environmental sample
  misc_feature (1)..(250): Xaa is any amino acid
MSFFSKKREQKTSKEKNRYDMDEYLDEKVSLFNVKRVLGYLIKAKGHLRLSLIFSILASVSGLIGPLFIKTALDEAVPNKDMRQLLLMGVYLTASIIVSVALSAVRNILVAKAGAGIIHDIRQDLFSHLQKLSFSFFDSRPHGKIFVRVVPYVNSVSDALSNGIINFVIEVLNIFFIIFFMYKVDPHLATVTVVGLPLLAIFIWTIKPAQRRAWQAVSNKGSNINAYVQESIDGVKVTQALTGRIKILKY

SEQ ID NO: 43681 - DNA, 1152 bp, Unknown
  Obtained from environmental sample
  misc_feature (1)..(1152): n is a, c, g, or t
ttgggttatgagacagcccgcaagctgctggatgaaatgggttatggttatgttgtttttgacgatcatcattttaagaatgatcttcagtttaacgacgcggtggatatgctaaagcgtttgcaggcgcaggcaaaggagcgcaaactcggctttggggtgaagataaccaacacctttccggtacaaatcaaacggaacgaattgccggggaacgagatgtacatgtcgggacgccctctgtttcctttgtcgatcaatgtggcaaaaaaaatgtcgcgggcatttgacggcgagcttcccatttcctattcagggggcgcggattactttaacctgagggaaatccttgaaaccggtataaggccggtaaccgtggcaaccacaatccttaaacccggcggttatgagcgtctgctccagcttgccgaactggcggcggagacgataaacgatatatccgtcgccgcgcccatcaatgtaaatgccctgagcgtttttgcggaatcgctgccaacaaaaatcagataccgcaaagagtaccgccaaatcggtttacggaagaccgaaagcgccctgcccctgttcgattgcgccaaggctccctgcatggatggcggctccgaaggagccgccggctgtcccattcaccagcgtatacccgaatacctctccgctgtcgcttccggtaattatgacgaggctttcaaaattatcgcggttgacaatacggccccctcaattaccggaacgatctgcgatcaccagtgccagtatatgtgtacgcgtcaggattatgaggatcccctgcaaataagaagggccaagctgcttgccgccgacaaggcgcagaaagcgtttacttcttccctgcaaagtcccaaaataaaaacaaataaatccgcggctgttatcggcgcgggcccggcaggtatcgccgcggcttgtttcctgcggcgtaacggagtgcctgtgacggtgtatgaaaagcgggataaacccttcggcattgtgcgttatgtgattccgttattcagaattcgggaggaagcgataaaccgcgattttcagatggcggaaaaactgggcgtggaattcctttttaaccagcctgaagattattctcttgccaaactgcaaaaaagcccatga

SEQ ID NO: 43682 - protein, 383 aa, Unknown
  Obtained from environmental sample
  misc_feature (1)..(383): Xaa is any amino acid
MGYETARKLLDEMGYGYVVFDDHHFKNDLQFNDAVDMLKRLQAQAKERKLGFGVKITNTFPVQIKRNELPGNEMYMSGRPLFPLSINVAKKMSRAFDGELPISYSGGADYFNLREILETGIRPVTVATTILKPGGYERLLQLAELAAETINDISVAAPINVNALSVFAESLPTKIRYRKEYRQIGLRKTESALPLFDCAKAPCMDGGSEGAAGCPIHQRIPEYLSAVASGNYDEAFKIIAVDNTAPSITGTICDHQCQYMCTRQDYEDPLQIRRAKLLAADKAQKAFTSSLQSPKIKTNKSAAVIGAGPAGIAAACFLRRNGVPVTVYEKRDKPFGIVRYVIPLFRIREEAINRDFQMAEKLGVEFLFNQPEDYSLAKLQKSP

SEQ ID NO: 43683 - DNA, 312 bp, Unknown
  Obtained from environmental sample
  misc_feature (1)..(312): n is a, c, g, or t
atgggaaagaaaggtacggaaaggcatattcacacgaaggagttcaaagccgaggcggtagcattggccgagaaaaaagaaaagccggtaagccgtatcgcggcggatctgggaatcaacgagaacatgctgcgccggtggatgcaggctttccgggagtcggcgggaagcggcctgcaagcgttcccaggccacgggcggccaaaggacgcggagcttgcccgcctgcggaaagagaacaaagcgctcagggaggccaatgaaattttaaaaaaagcggcggtcatcttcgcgcaaggggaaccccaataa

SEQ ID NO: 43684 - protein, 103 aa, Unknown
  Obtained from environmental sample
  DOMAIN (8)...(90): Transposase
  misc_feature (1)..(103): Xaa is any amino acid
MGKKGTERHIHTKEFKAEAVALAEKKEKPVSRIAADLGINENMLRRWMQAFRESAGSGLQAFPGHGRPKDAELARLRKENKALREANEILKKAAVIFAQGEPQ

SEQ ID NO: 43685 - DNA, 684 bp, Unknown
  Obtained from environmental sample
  misc_feature (1)..(684): n is a, c, g, or t
atggacgcgatacgtcaaattaaaaaagactacgacatacccgtcataggcggaaacgtcgctaccaaagagggaacaaaaaaattaatcgctgcgggagcggatgcggtaaagatcggcataggaccgggttctatctgcacaacacgaattgtcgcaggtatcggcgttcctcagtttaccgccgttttggattgcgccgaagaagcgtcaaaatcaaagattccggtaatcgcggacggcggcattaagttttcaggagacataacaaaagcgataggcgcgggagcgagcgttgtaatgataggcaacttgttcgcgggattaaaagaagcgccgggaaacgagattatctttgacggaaggatttacaaagaataccgaggaatgggcagtatgggcgcgatagcggacggcgcgggagaccgttaccaaatcggcaaagatgaagaacctgtaccggaggggattgaggggcgggttccattcaagggggaacttcgcacttacatgaaccagcttgtcgcgggattgcgaaaaggcatgggttactgcggctgtaagagcattgcggaacttaataaatataagaagtttattaagataacggcggcaggtttaagggaaagccacccgcacgacattacaataacgcaggaagcgccaaattactcgcgatcttga

SEQ ID NO: 43686 - protein, 227 aa, Unknown
  Obtained from environmental sample
  DOMAIN (1)...(213): IMP dehydrogenase / GMP reductase domain
  misc_feature (1)..(227): Xaa is any amino acid
MDAIRQIKKDYDIPVIGGNVATKEGTKKLIAAGADAVKIGIGPGSICTTRIVAGIGVPQFTAVLDCAEEASKSKIPVIADGGIKFSGDITKAIGAGASVVMIGNLFAGLKEAPGNEIIFDGRIYKEYRGMGSMGAIADGAGDRYQIGKDEEPVPEGIEGRVPFKGELRTYMNQLVAGLRKGMGYCGCKSIAELNKYKKFIKITAAGLRESHPHDITITQEAPNYSRS

SEQ ID NO: 43687 - DNA, 966 bp, Unknown
  Obtained from environmental sample
  misc_feature (1)..(966): n is a, c, g, or t
ttgctgaagccataccgggaaaaaaatatttatacgcggaaagaacttttggcctatgtagctgctaacgctcaaaaaaccgaagggcagggtagcctggttttcttcccaatggaagatttcaggataattgaccccttcattaactcaggtgaactaaagtntcaggcgatgagttcggggatgctcagaatcgaccaggtagacaaaacccctgtcccgctagcgtttggagacaccatgatccgcgtactcccggcgggaagttacataatcgacttaacctacagaaacgggtacaaggaaacacgcacagtagagcttcgcagaaaggaaagccgttgggtgatttttagctataccgtgccgtatttggcggggaatttttccgctttgtatagtggaaggctccctcagggcgggattaacgtttccgagcttaaccccgccaactaccagaaagtagaccgggaggcgatggaaggcatgggaatggctccctattatgtggcttttctaggcggggaaaaattctacagggatggcgaatacgacaaggcaatcgcggaatacagccgctgcatttcccttaaagccgattatgccgacgcttacgcttcacgcggcaacgcctaccggaaaaaaggcgatgtgaacagggcaatagaagattatagcaaggctatcggtctgaaaagctcttttgcggaagtttacaattaccgcggttttttgtatgcccaaaggggagattatagaagggccgtcgaggactacacccaggccatccgttacaagggcgattacgccgacgcttatttcaaccgtgcccatgcctatggagagcttggaaactgggatctgtccatcgccgactacacccaggtaataaagcttgaacccaaaaactgggctgcctacaaccagcgaggcaaagcaggaacaacaaggactcggccgatctga

SEQ ID NO: 43688 - protein, 321 aa, Unknown
  Obtained from environmental sample
  DOMAIN (202)...(235): Tetratricopeptide repeat
  misc_feature (1)..(321): Xaa is any amino acid
MLKPYREKNIYTRKELLAYVAANAQKTEGQGSLVFFPMEDFRIIDPFINSGELKXQAMSSGMLRIDQVDKTPVPLAFGDTMIRVLPAGSYIIDLTYRNGYKETRTVELRRKESRWVIFSYTVPYLAGNFSALYSGRLPQGGINVSELNPANYQKVDREAMEGMGMAPYYVAFLGGEKFYRDGEYDKAIAEYSRCISLKADYADAYASRGNAYRKKGDVNRAIEDYSKAIGLKSSFAEVYNYRGFLYAQRGDYRRAVEDYTQAIRYKGDYADAYFNRAHAYGELGNWDLSIADYTQVIKLEPKNWAAYNQRGKAGTTRTRPI

SEQ ID NO: 43689 - DNA, 363 bp, Unknown
  Obtained from environmental sample
  misc_feature (1)..(363): n is a, c, g, or t
ttgccgcacgctttacaaagtatttcaaggagaaaagcaatggaaccaaacaaaaaagaagtaatcttaaatgatgaacaacaagccgccgcgtattgcgataaaaacgcggtgattgcggcaggcgcgggttcgggaaaaaccatggtactcgccagacgttttgcctggctgataaccgagagaaattgccgcgtaagggagattctaacccttacctttaccaggaaagccgccgcgcagatgtaccggcggattcacctgatgttagctgaaattgccaccgcagattccggcataaaaggaaaactggcgcgggaagcccttgaggaattttgcccaggcgaaaattcaaccccttga

SEQ ID NO: 43690 - protein, 120 aa, Unknown
  Obtained from environmental sample
  misc_feature (1)..(120): Xaa is any amino acid
MPHALQSISRRKAMEPNKKEVILNDEQQAAAYCDKNAVIAAGAGSGKTMVLARRFAWLITERNCRVREILTLTFTRKAAAQMYRRIHLMLAEIATADSGIKGKLAREALEEFCPGENSTP

SEQ ID NO: 43691 - DNA, 648 bp, Unknown
  Obtained from environmental sample
  misc_feature (1)..(648): n is a, c, g, or t
atgcaggtcaaggcgatctttgaggcctcctacaaactcgctgcgaggggcatcgacgtaagacccgaaattatgatcccgattgtaatgaacgcctcggagttgaaactgatcgcttacgggaagaaaatccagggctccaattatgtcggcattgtggaaattgaggaaacccttaggaatgataagagcgccaaggaagttgagtacaaaatcggcaccatgattgagcttccggcggccgcgctcggggcgggagaaattgccaagtacggacgtttcttcagttttggcacaaacgacctgactcagactaccctgggtatttcccgtgatgattttaccgcgtttatgcccgattacaccaaatttgaccttattcaaggaaatccgttcagcacccttgaccctcgggtaaaggaactgatcgcccttgcgacgtacaggggacggcttacaaggccggatctaagctgcggattatgcggcgaacacggtgcgaatcccgccaatgtaaagttctgcatggaagcgggtcttaattatgtgtcctgttctccgtattcggtgccaatcgccctgctggcggtggctcaagttgagatagacaggaatcaggtggaaagtaaagagactaagaagaaatag

SEQ ID NO: 43692 - protein, 215 aa, Unknown
  Obtained from environmental sample
  DOMAIN (1)...(202): PEP-utilising enzyme, TIM barrel domain
  misc_feature (1)..(215): Xaa is any amino acid
MQVKAIFEASYKLAARGIDVRPEIMIPIVMNASELKLIAYGKKIQGSNYVGIVEIEETLRNDKSAKEVEYKIGTMIELPAAALGAGEIAKYGRFFSFGTNDLTQTTLGISRDDFTAFMPDYTKFDLIQGNPFSTLDPRVKELIALATYRGRLTRPDLSCGLCGEHGANPANVKFCMEAGLNYVSCSPYSVPIALLAVAQVEIDRNQVESKETKKK

SEQ ID NO: 43693 - DNA, 669 bp, Unknown
  Obtained from environmental sample
  misc_feature (1)..(669): n is a, c, g, or t
atgcttgaggagctgacaattagaaattttgccctggtcgattccatttccctctccttccggcccggttttaacgtgcttacaggcgagaccggcgcgggcaaatctattattgtcggatccctcgggtttcttatgggcgcaaaaaccgaaacagacgttatacgatcaggctgtgaggaggcgagcgtttcagccattatatcaataggcaagggaaacaacggcgcttttgaatggcttagaagccgtgaaatcaacagcgaagaggatactgtcattgtccgccggaatattaaaacatcgggcaagggatcaatttacatacaggaaacgctggtgacaagaacggatcttgcgggttttatgaccctgcttttcgaccttcacgggcagcatgaccacgggtcactgctgagaaaggaaaaccaccgccgcttcctggactcttttgcaggcattgaggaagaagctcttgcctacaacagggtttttaccgggcttgccgaaaagcgcaaaacgctggaagcgtcattcagctcccagaaagacagggaggcaaggctggaaattctgcgctatgccgtggatgaaatctccgccgcggcccttcgcagcggggaactgcgcgatcttgaaaatgaggcgcagatgnctctcgggttttga

SEQ ID NO: 43694 - protein, 222 aa, Unknown
  Obtained from environmental sample
  DOMAIN (1)...(162): RecF/RecN/SMC N terminal domain
  misc_feature (1)..(222): Xaa is any amino acid
MLEELTIRNFALVDSISLSFRPGFNVLTGETGAGKSIIVGSLGFLMGAKTETDVIRSGCEEASVSAIISIGKGNNGAFEWLRSREINSEEDTVIVRRNIKTSGKGSIYIQETLVTRTDLAGFMTLLFDLHGQHDHGSLLRKENHRRFLDSFAGIEEEALAYNRVFTGLAEKRKTLEASFSSQKDREARLEILRYAVDEISAAALRSGELRDLENEAQMXLGF

SEQ ID NO: 43695 - DNA, 1344 bp, Unknown
  Obtained from environmental sample
  misc_feature (1)..(1344): n is a, c, g, or t
ttgcaggcattgaggaagaagctcttgcctacaacagggtttttaccgggcttgccgaaaagcgcaaaacgctggaagcgtcattcagctcccagaaagacagggaggcaaggctggaaattctgcgctatgccgtggatgaaatctccgccgcggcccttcgcagcggggaactgcgcgatcttgaaaatgaggcgcagatgnctctcgggttttgaaaaactcgccgctcatataaacggcgcctcggattccttttttgacggagaagcctcattggtaagccttgcccgccgcagtcggatcgccatggacagcgcggcgtcaattgatacgtcattgtccgtgttacaaaaacgcattgaagatatgtattacgaagcggaggatatcgcgggcgaattgcgttcatatcgcgacagcttaacgtatgatccccgccgtcagcaggcgatcgacgagcggcttgccctgttgtacaaacttaagcgcaaatactgcgaggccacgcgaagcgcggccaccgtgcgaagcgcggccactgcggttggcgattcggtttccgttgaggacgccatactcgcttaccgcgcctcggcggaagccgagatagaagccttatccaacattgaggaaaaccgggagaatctcaaggccgcgatagccgagctggaaaaagacatcgcttgcaaagccgccgttctgcgccaaaaaaggacggctgccgccggagccctgggacagtggatctcaggaattctcaaacggcttggaatgcccaatgcacggttttccccttcaataaccccaaaaacccaagcagggactccccaaggaatcctcaagagccaaaccgttgtctgcggtccctggggagcggaagaagtcgagtttcttatttccgcgaacacaggcgagccgcttaaagatctttccagaatagcgtcggggggggagctttcccgcgtgatgcttgcgataaagacggcgcttttgtccgaagaaaaaaatgaaacagaaggcgttgagacccttgtttttgacgagattgacacgggaattgggggggaagtcgcgttaaaagtaggtgaatacctgactaaaatcggcaaatttaaacaaattttttgtgtaacacatcttgccagtatcgccgtaagagccgataatcattttaaggtggaaaaaagaacggaaggcggcagaacttatacaggaatcgggcctttaaacgctgacggccgcaggaaagagattgcgagaatgctcgcgggggacgcgggggacgccgcgcttgcccacgcggacgatcttatgaaaaaatacggtaaacggagcggttaa

SEQ ID NO: 43696 - protein, 447 aa, Unknown
  Obtained from environmental sample
  misc_feature (1)..(447): Xaa is any amino acid
MQALRKKLLPTTGFLPGLPKSAKRWKRHSAPRKTGRQGWKFCAMPWMKSPPRPFAAGNCAILKMRRRXLSGFEKLAAHINGASDSFFDGEASLVSLARRSRIAMDSAASIDTSLSVLQKRIEDMYYEAEDIAGELRSYRDSLTYDPRRQQAIDERLALLYKLKRKYCEATRSAATVRSAATAVGDSVSVEDAILAYRASAEAEIEALSNIEENRENLKAAIAELEKDIACKAAVLRQKRTAAAGALGQWISGILKRLGMPNARFSPSITPKTQAGTPQGILKSQTVVCGPWGAEEVEFLISANTGEPLKDLSRIASGGELSRVMLAIKTALLSEEKNETEGVETLVFDEIDTGIGGEVALKVGEYLTKIGKFKQIFCVTHLASIAVRADNHFKVEKRTEGGRTYTGIGPLNADGRRKEIARMLAGDAGDAALAHADDLMKKYGKRSG

SEQ ID NO: 43697 - DNA, 462 bp, Unknown
  Obtained from environmental sample
  misc_feature (1)..(462): n is a, c, g, or t
atggcaaaaattagcgaccatgatcggcaattatacgatgagaaagtaaaaacatatataacaatgaccaaagcgttattggatatcgaaaaaaaactccttgtggaatccaaaaaagaaacgccggaagccgcccttcaaaagctgactcttgccgatgaaatgctcaaccttacttccaattatatcgctgttaacggaatttcgcaggttgttttaaaatcaaaaaacgaggaagtcctgaacgacgccagaaagtcgctttataaatccgttatttatcttgaggatgccgtcagtaattacattgacgttcctttttccgattatgaaaacaaattaaatttgctggaatcttttgacgagaaccagcgatactttttgataagaaagatggggcttgccatagaccttttggaatacgcatacggggacaattcaaaatggagatggacattgtag

SEQ ID NO: 43698 - protein, 153 aa, Unknown
  Obtained from environmental sample
  misc_feature (1)..(153): Xaa is any amino acid
MAKISDHDRQLYDEKVKTYITMTKALLDIEKKLLVESKKETPEAALQKLTLADEMLNLTSNYIAVNGISQVVLKSKNEEVLNDARKSLYKSVIYLEDAVSNYIDVPFSDYENKLNLLESFDENQRYFLIRKMGLAIDLLEYAYGDNSKWRWTL

SEQ ID NO: 43699 - DNA, 702 bp, Unknown
  Obtained from environmental sample
  misc_feature (1)..(702): n is a, c, g, or t
ttgatggccgagcctcaaccgaatacagtaatactgaaagaaaaaataccgtactctctttttttcgggctggccagtatatcaatttctctgattctcggcatttcctcaggcgcgttaatggcaagaaaaaaaggtaaatcttttgacaagataggcacggtcttcattgtatttatgatagccgtaccggccgtcatttatcaccttctaatccagctttacgtaacgcagtgggcaaagcttccaatgctgttcaatgaaaggcgtcctgaaacctggatacttcctaccatatcgctgtcaatatcgggcattgcttcctactccatgtggatgcgccggtacatggtagacgaaataaacaaagactatgtcaaacttgccaccgcaaagggtcagacaagccagagaatcatgatcaggcatgtgttcagaaattcttttgtgccggtaattcaatacataccgtcctcaatattatataccatcgcgggttcgatatatgtagaatcgctttactctatacccggcatgggcgggcttttggtgcaggcaatccaaaggcaggacaatcccctcgtgcaggtgcttgttttaatttactcaagcctgggcgtattcgggcttatgctgggagatatagcaatgacaattgttgatccacgcattaaattcgccaaaaggaaagaggcgcgctga

SEQ ID NO: 43700 - protein, 233 aa, Unknown
  Obtained from environmental sample
  DOMAIN (16)...(226): Binding-protein-dependent transport system inner membrane component
  misc_feature (1)..(233): Xaa is any amino acid
MMAEPQPNTVILKEKIPYSLFFGLASISISLILGISSGALMARKKGKSFDKIGTVFIVFMIAVPAVIYHLLIQLYVTQWAKLPMLFNERRPETWILPTISLSISGIASYSMWMRRYMVDEINKDYVKLATAKGQTSQRIMIRHVFRNSFVPVIQYIPSSILYTIAGSIYVESLYSIPGMGGLLVQAIQRQDNPLVQVLVLIYSSLGVFGLMLGDIAMTIVDPRIKFAKRKEAR

SEQ ID NO: 43701 - DNA, 717 bp, Unknown
  Obtained from environmental sample
  misc_feature (1)..(717): n is a, c, g, or t
atgtcattcttccttggcagaaaaaaattcaacgatctaacggaaaacatttccgaacaaatacagaagctccctgacaatgagcttttcgcgcctgtggaatacgatcctacaggcgcagagcgtggcggttactccaactattcctactggcgttccacgttcaggatgtttttgaaaaaccgtatggccttcaccctcctggccgtaatgtttattttgattctgttctctgtcatccagccgtatcttcccaatcagaaggatccaataacgatatataacgacccggcaaccggcattcagtacagaaatatccctcccggagacctgttctttttcggatcgaacaacatcgggcaggatctctgggcgcgcatttggagcggcacgcggacatcgctttttatcgcctttacagtggcgttttgggaaatgtttatcggcattgtgatcggcgcgctgtggggttatgtacaggcgcttgaccgcccgattaccgaaatttataacgtcctggacaatattcccactacgatagtgatgattttatttacctacattatgagaccgggaatgtggacgataatcatcgccctttgcctaacacgctggatgggcatggcgcggtttatcangaaccagatcatcatcatccgcgacagggaatacaatctggcttcacgctgtcttggcacaacacgtacagggtggtaa

SEQ ID NO: 43702 - protein, 238 aa, Unknown
  Obtained from environmental sample
  misc_feature (1)..(238): Xaa is any amino acid
MSFFLGRKKFNDLTENISEQIQKLPDNELFAPVEYDPTGAERGGYSNYSYWRSTFRMFLKNRMAFTLLAVMFILILFSVIQPYLPNQKDPITIYNDPATGIQYRNIPPGDLFFFGSNNIGQDLWARIWSGTRTSLFIAFTVAFWEMFIGIVIGALWGYVQALDRPITEIYNVLDNIPTTIVMILFTYIMRPGMWTIIIALCLTRWMGMARFIXNQIIIIRDREYNLASRCLGTTRTGW

SEQ ID NO: 43703 - DNA, 1164 bp, Unknown
  Obtained from environmental sample
  misc_feature (1)..(1164): n is a, c, g, or t
atgagcagagaaaaccgtttagtattggatagaggaatgaataggtcaatacttggcgagtttattgaacaagttgatgtccgcaattctgataatgttttgggagaagattctgttataggaatttccacacaaaagaattttatttttacaaaggctgacttgtcaggtgtaagtctgacctcatataagaaagtacctgtaaattgttttgtttacgttcctgatacttcacgacgtggcgataaaatggctttggcttataatagaactgaaaatatttatttagtatctgctatttatacggtttttaggataaaagaagatagcaataattctattatatcggaatatttgtttttatatttcaaccgtcccgaatttgacaggtacgcacgatttcattcatggggaagcgcacgggaagttttttcatgggatgatatgtgtaatattgaaattgatctgccaccagtgtcaatacaacaaaaatatgttgatgtgtataatgctttgcttgccaatcttcatgcttatgaaaacagtttagaatatttaaatacggcaattgcggcaaatattgaagaatttaaacattctgctccacgagttccggtaggaaaattgcttgatgaaattgatgcccgtaatcgtgatggaaaaatcatcaatgtgcaaggaatcaatataaataaagaatttatgccatctgtcgccaatcttagtgagacagatttaacaaagtataaagtggttaataacaatccatttgcttatagtgcaatgcagacaggtcgtgatgaatgtatccgaatagcccttttccacgtgagtgagcctttaattatttctcctgcctattcagtattgcaagtaaaagataaatctgcgattgcagaatatattatgctgtggtttagccgaagtgaaagtgatcgttatgggtggttcataagtgacagcagtatacgagccagtttggatttagtcaatttctttgaaattgagattcctttgccatcaatttcgcaacaagaagcagttgtaaatttttacaatgcacgggatttaatactgcgaaacatagcggcattggataatatgttgaaagatatatgcccggttttggtgaagggtgcgttgggggaggcggtaagttattga

SEQ ID NO: 43704 - protein, 387 aa, Unknown
  Obtained from environmental sample
  misc_feature (1)..(387): Xaa is any amino acid
MSRENRLVLDRGMNRSILGEFIEQVDVRNSDNVLGEDSVIGISTQKNFIFTKADLSGVSLTSYKKVPVNCFVYVPDTSRRGDKMALAYNRTENIYLVSAIYTVFRIKEDSNNSIISEYLFLYFNRPEFDRYARFHSWGSAREVFSWDDMCNIEIDLPPVSIQQKYVDVYNALLANLHAYENSLEYLNTAIAANIEEFKHSAPRVPVGKLLDEIDARNRDGKIINVQGININKEFMPSVANLSETDLTKYKVVNNNPFAYSAMQTGRDECIRIALFHVSEPLIISPAYSVLQVKDKSAIAEYIMLWFSRSESDRYGWFISDSSIRASLDLVNFFEIEIPLPSISQQEAVVNFYNARDLILRNIAALDNMLKDICPVLVKGALGEAVSY

SEQ ID NO: 43705 - DNA, 618 bp, Unknown
  Obtained from environmental sample
  misc_feature (1)..(618): n is a, c, g, or t
gtggggatggaaagctacttttgccggaaagaagacattattccgggcagcggttcgggcaaaatactctttggcttggacggaactgttagcgcttggacttacgacaatggaggttctcagttgcaggttgacccgcacaatggctccagcatgatgaatataactttaaatgttggcagccctggcgattggagaggcataacacagttcgatagcccttcaagcgttcaaagccttggtcaaaacggctatccaacaggtaaattggttgaagtaaccatagatgaatttggactaatagaaggtacgttctcaaacggaaccaacaagaaaatagcccagattatggtgatagactttgcaaacccaggtggcttgctagacttgagcgacagcgtttacacaacctctgcaaattccggcgacccaatttggggaatgccgaatcagcaaagctcctcaaaaataaaacccggagcagttgaaatgtccaacgtggatttgtctgctgaattcaccaacatgataaccactcaaagaggctatcaggcaaacagccgcgtaataacggttagcgacacaatgctggaagaattggtgaacttgaagagatag

SEQ ID NO: 43706 - protein, 205 aa, Unknown
  Obtained from environmental sample
  DOMAIN (165)...(203): Domain of unknown function (DUF1078)
  misc_feature (1)..(205): Xaa is any amino acid
MGMESYFCRKEDIIPGSGSGKILFGLDGTVSAWTYDNGGSQLQVDPHNGSSMMNITLNVGSPGDWRGITQFDSPSSVQSLGQNGYPTGKLVEVTIDEFGLIEGTFSNGTNKKIAQIMVIDFANPGGLLDLSDSVYTTSANSGDPIWGMPNQQSSSKIKPGAVEMSNVDLSAEFTNMITTQRGYQANSRVITVSDTMLEELVNLKR

SEQ ID NO: 43707 - DNA, 1233 bp, Unknown
  Obtained from environmental sample
  misc_feature (1)..(1233): n is a, c, g, or t
atgaataaatccctcctcttactcctcgctttatttgtggcaaattgttctaataacaacaacaaagagccagttatcaaagaaccaattatcaaaggaattgaatttgttccggaaatgcttgggcttacgcccggttccaccgttgcagaagtcaattttgcctggtattcgggcagcggcgaaaattcctttgtgcgtgtttttgagaatgacgcgcttatttcaacagaaaaaggaatatcgggcgtggcatctgagggcaaatattttcacaaagcaacggcaaaaaatttaaaaccgaacacagaatatgcttatagtgtatcaaacgacagcagcaattggagcgtggaatacaaatacaaaactccgcgaacagaaacgttcaagtttgccgtgataggagacccgcagctcaccacaggcgagcaagacggctcaagcaaatggttcagctccgacaaaagcgtagccgagggctggaaaaccacagttgagaaaattaatgcggcaaatgtaaatttcattttaagcactggggaccaggttgatggaggctctaacgaanaagaatatgaaaatctctttgcgccacccgcgcttaaaagcataccccttgctccatctgtaggcaaccacgataggcatcaaattttccgttaccattttaatttaccaaacgagcaaaatttctcagaggaaaactttggcaattatttttatctatacaacaatattctctttgttgccttgaacacttctgcctgggttgcaagcgtagaagaggcaaagccttacatagaaagttttgatgcaactcttgccgctgccaaagccatgtacagcgggaagtacaaatggctcatagtccagcaccacaagtccactaggagtgttgcaagccatttgacagataaggatattcagcattatatggatgcaggttttgaaaaacttatggaaaagcacaatgtgacttttgttttggctggtcacgaccacgtatatgccagaaataatttgggcgacatatattatataactttcacaacagcaagcggattaaaatattatgagctgcacaacaacgcagatagcctaaatttgccacctatgtatgctcaaaacaaaatacccggatatgcaatttttgaagttaatgaaactggcatttccgcatctgtttatgaagttgataaagacgagccaattgataagtttggattgtaa

SEQ ID NO: 43708 - protein, 410 aa, Unknown
  Obtained from environmental sample
  SIGNAL (1)...(21)
  DOMAIN (130)...(337): Calcineurin-like phosphoesterase
  misc_feature (1)..(410): Xaa is any amino acid
MNKSLLLLLALFVANCSNNNNKEPVIKEPIIKGIEFVPEMLGLTPGSTVAEVNFAWYSGSGENSFVRVFENDALISTEKGISGVASEGKYFHKATAKNLKPNTEYAYSVSNDSSNWSVEYKYKTPRTETFKFAVIGDPQLTTGEQDGSSKWFSSDKSVAEGWKTTVEKINAANVNFILSTGDQVDGGSNEXEYENLFAPPALKSIPLAPSVGNHDRHQIFRYHFNLPNEQNFSEENFGNYFYLYNNILFVALNTSAWVASVEEAKPYIESFDATLAAAKAMYSGKYKWLIVQHHKSTRSVASHLTDKDIQHYMDAGFEKLMEKHNVTFVLAGHDHVYARNNLGDIYYITFTTASGLKYYELHNNADSLNLPPMYAQNKIPGYAIFEVNETGISASVYEVDKDEPIDKFGL

SEQ ID NO: 43709 - DNA, 1122 bp, Unknown
  Obtained from environmental sample
  misc_feature (1)..(1122): n is a, c, g, or t
gtgaaaccggcaattgaaaccaaaacgaggagggaggctgcgcccgccgtagaattgtgcggcataagcaaagtgtatcccggtgcagttaaaaaagccaacagcaacataagcctggaacttcgcaggggggagatactttgtatagctggtgaaaacggcgcgggcaagacaaccctgatgaagatacttgacggcattgaaacgcccagcgaaggcaatatccgcgttaacggcaatgatgtaataatcgcttccccgcttgccgcccgaaatctagggatcgggatggttcaccagaactttatgctgtttcccgaatacactgtcgctgaaaacatcgtcatgggcatggaaccgcgcaagtggaaatttttatttgacaacgcggaagccagggcaaaagccgcaaaggtgatcgacgcccaccatttttcaattacgcctgacgcactcgtgaaaagcctcagcattggggaaatgcagcaggtagaaatttgccgcctcctttaccggaacgcggacattatcatccttgatgagccaacttcggtgcttaccgagaacgaaaccgccgcgcttttcaaaaccatgaaggcattggcggccgcgggaaaatccatttttctcataacgcacaaactgcatgaaatcaaagccattgccgacagggttgccgtactcaggcgcggtgaattggctgggattcgtgaaacgaaagatatagatgagtatgagattgcccgtttaatgattggcgaaaataaaattagttttaacagggaaaacaggaagaaaccagaccgcaaacctgttattatttttgacaatgttacagtgcttaggcaggggcaacagcgtcccttattgaataaagtttcattcgaggcgcgatccggtgaaatagtcggcttcgccggagtggggggcaacgggcttggcgtgcttgaggcggttcttggcggtttcctccatcccgcggcgggaaaaattacccataacggaaaggatatttcccgcttgggtatacgccgcctccgcaggcaggggcttgcatacgtaccggccaacaggcagcaggtaggaagctccctgaacgcaacagtcgatgaaaatttatga

SEQ ID NO: 43710 - protein, 373 aa, Unknown
  Obtained from environmental sample
  DOMAIN (44)...(231): ABC transporter
  misc_feature (1)..(373): Xaa is any amino acid
MKPAIETKTRREAAPAVELCGISKVYPGAVKKANSNISLELRRGEILCIAGENGAGKTTLMKILDGIETPSEGNIRVNGNDVIIASPLAARNLGIGMVHQNFMLFPEYTVAENIVMGMEPRKWKFLFDNAEARAKAAKVIDAHHFSITPDALVKSLSIGEMQQVEICRLLYRNADIIILDEPTSVLTENETAALFKTMKALAAAGKSIFLITHKLHEIKAIADRVAVLRRGELAGIRETKDIDEYEIARLMIGENKISFNRENRKKPDRKPVIIFDNVTVLRQGQQRPLLNKVSFEARSGEIVGFAGVGGNGLGVLEAVLGGFLHPAAGKITHNGKDISRLGIRRLRRQGLAYVPANRQQVGSSLNATVDENL

SEQ ID NO: 43711 - DNA, 324 bp, Unknown
  Obtained from environmental sample
  misc_feature (1)..(324): n is a, c, g, or t
ttggttttagcgcgggaaattgaccagttcagggactattttgttttttccgaaccgacctggagcctggatattatcgccagtagttttatctggtctgaaatcgccgccttgcgcgaaaaaggcgcggcgataatactaatatccaccaatcttgacgagattctcgcccttgccgaccggattatcgtaatgttccgcggcagcgcgattgcggaattcgataatttttttgataacgctattaaagaaaaaatcggcaggtgtatgcaggggcttttgccaaataatgaagatgagaaccacaatgaatccccaaactga

SEQ ID NO: 43712 - protein, 107 aa, Unknown
  Obtained from environmental sample
  misc_feature (1)..(107): Xaa is any amino acid
MVLAREIDQFRDYFVFSEPTWSLDIIASSFIWSEIAALREKGAAIILISTNLDEILALADRIIVMFRGSAIAEFDNFFDNAIKEKIGRCMQGLLPNNEDENHNESPN

SEQ ID NO: 43713 - DNA, 1572 bp, Unknown
  Obtained from environmental sample
  misc_feature (1)..(1572): n is a, c, g, or t
atgatcgcccaatgcgacactgcccaaaaagcggataaattgtttaacgatttgaaagcccactggaacgccctgctggggcagtatcaggttgactcccccgatgaaaaactcaaccgcatggttaatatctggaatcagtatcagtgcatggtgacgtttaacatgtcgcgttccgcgtcttattttgaatcgggcatcggcaggggcatgggcttccgcgattcgaatcaggacttgctcggctttgtgcatcagattcccgcgcgggcgcgtgagcgtatcattgaccttgccgccacgatgatggaagacggcggcgcgtatcatcagtaccagccccttaccaaaatgggcaatcatgaactgggttcgaattttaacgatgacccgctgtggatgattcttgccgtcgccgcttatatgaaagaaaccggcgattttgcgatactggacgagcgcgtcccctacgaaaacgatgaaagcaaatccgccacgttacttgaccacatgaagcgggcgtttaaccacgtttgcacgaaaaaggggccgcacggcctgccgctcattggccgcgccgactggaacgactgcctgaacctcaactgtttttcggcgacgccgggacaatccttccagactactacctccaaagacggcaaagtcgccgagtcggtaatgattgccgccatgtttgcttttatcgggcctgagtacgcggcgatgtgccgcataaagggcgacaacgccgaagcgcagcgcgccgaatctgaaattgccgttatgcgtaaaacggttatggaacatggttttgacggcgagtggtttttgcgcgcctacgatgatttcggcaaaaaactcggcggcaaggaatgtgaggaaagcaaaatcttcatcgagccgcagggcttcgcggtgttggcgggcttgggcaaagagcagggcgcggacattaaaaccctggacagcgtggacaagtatctcaacacgaagcacggtctggtgctgaacaaccccgctttcacccggtattatatccagtacggcgaaatctcaacctatccgccgggctacaaagaaaacgcgggcatattctgccacaacaacgcgtggatcatctgcgcggaagccgagacgggcaggggagacaaggcgtttgagtattattcaaaaatcgcccccgcctaccgcgaagaaatatccgacctgcaccgcacggaaccctatgtatacgcccagatgatagccggcaaagacgccgcccgccacggcgaagccaaaaactcatggctgaccggaaccgccgcctggaactttgtagcggtatcgcagtacatactcggcatcaagccccaatatgacggcctgaaaatcgacccctccattcccaaagactgggccggtttcaaactgacgcgcgtattccgcggcgcgacgtataacattacggtcaaaaaccccaacaaagtctccaaaggcgtgaccaagctggtggtagacggcgcggaaatagcgggcaatgtagttcccccgtttgccggcggaacgcacgaggttgaggtggtgttgtaa

SEQ ID NO: 43714 - protein, 523 aa, Unknown
  Obtained from environmental sample
  misc_feature (1)..(523): Xaa is any amino acid
MIAQCDTAQKADKLFNDLKAHWNALLGQYQVDSPDEKLNRMVNIWNQYQCMVTFNMSRSASYFESGIGRGMGFRDSNQDLLGFVHQIPARARERIIDLAATMMEDGGAYHQYQPLTKMGNHELGSNFNDDPLWMILAVAAYMKETGDFAILDERVPYENDESKSATLLDHMKRAFNHVCTKKGPHGLPLIGRADWNDCLNLNCFSATPGQSFQTTTSKDGKVAESVMIAAMFAFIGPEYAAMCRIKGDNAEAQRAESEIAVMRKTVMEHGFDGEWFLRAYDDFGKKLGGKECEESKIFIEPQGFAVLAGLGKEQGADIKTLDSVDKYLNTKHGLVLNNPAFTRYYIQYGEISTYPPGYKENAGIFCHNNAWIICAEAETGRGDKAFEYYSKIAPAYREEISDLHRTEPYVYAQMIAGKDAARHGEAKNSWLTGTAAWNFVAVSQYILGIKPQYDGLKIDPSIPKDWAGFKLTRVFRGATYNITVKNPNKVSKGVTKLVVDGAEIAGNVVPPFAGGTHEVEVVL

SEQ ID NO: 43715 - DNA, 756 bp, Unknown
  Obtained from environmental sample
  misc_feature (1)..(756): n is a, c, g, or t
ttgtccagtaagaagttaaaaatgtcatcttgggaaaaacccnggcgtagccggagaaaatataaaacaaggattttgaaaataaatccaaaaaaggggtcttttatgaagaagagagcattgatgggccttgtattgctcgtaatcgtagggacaagcgcagtcttcgcgcagcagccgacaatggacaagctgaagtttgctagggccgctggtggcagcacccccgttcagttggcccaggcggcaaataaacagataagcggcgaggtggtcattccaggtagttacaacggcgaacccacggtcgtcaataatttcagtgattgtagtcaaattaccagcgtcataatcctcgaaggcgcagtaagaatcgacacggcggcgttcgttcgtagtggcctaagaagcattaccatccccgcaagcgtgactggggctgaccatagagcgtttgcggattgcaataatcttaccagcgtcactttccatggagcgaatgttactggtggctccaccgtattccccggcgatttagcagccaagtacaaagccggaggtgcgggaacctacacgcggcaagccggaagcaacacctggacaaagcaaggcggcagcttctcgcttaacggcacctggacgcgcagctctgacggaatgcaaattaccattgccgacaacggacaaaacataaccattaccggcaataaacccaacaacggcggaaggcttaacgacacctacgcaaagcggtag

SEQ ID NO: 43716 - protein, 251 aa, Unknown
  Obtained from environmental sample
  misc_feature (1)..(251): Xaa is any amino acid
MSSKKLKMSSWEKPXRSRRKYKTRILKINPKKGSFMKKRALMGLVLLVIVGTSAVFAQQPTMDKLKFARAAGGSTPVQLAQAANKQISGEVVIPGSYNGEPTVVNNFSDCSQITSVIILEGAVRIDTAAFVRSGLRSITIPASVTGADHRAFADCNNLTSVTFHGANVTGGSTVFPGDLAAKYKAGGAGTYTRQAGSNTWTKQGGSFSLNGTWTRSSDGMQITIADNGQNITITGNKPNNGGRLNDTYAKR

SEQ ID NO: 43717 - DNA, 603 bp, Unknown
  Obtained from environmental sample
  misc_feature (1)..(603): n is a, c, g, or t
atggtgtatgcttacgtcagggtcagtacagacaggcaaacggtcgcaaatcagcgttttgaaatcgagcgtttttgttcggaaaacaaaatatccatcgatcagtggattgaagaaacaatcagcggaacccaattgccggaaaaacgcctattggggctgctgcttgaaaaggcaaaaacaggagacataatcattagctccgaattgtcaaggctgggcaggaatatgtttatgattatgtcgatattataccatttattgataagtggcgtgaaaatctggacaattaaggacaattacaggctgggagacagcattcaggacaaaattcttgcttttgcctttggattggccgccgaaatagagcgaaacctcatctcccaaaggacgaaagaggcacttgcccgcaagcgggcggaaggcattgtgctgggcaggcccaaagggagaaagtccgacaggctcaaacttacagggcatgaggcggaaatacagtcgatgatagacgataaaatatcaaaaaccgccattgcccataaattcggcgtgtgcagacagacggtcagctcgtttttgaaaaactccagaagcgcagcataa

SEQ ID NO: 43718 - protein, 200 aa, Unknown
  Obtained from environmental sample
  DOMAIN (2)...(144): Resolvase, N terminal domain
  misc_feature (1)..(200): Xaa is any amino acid
MVYAYVRVSTDRQTVANQRFEIERFCSENKISIDQWIEETISGTQLPEKRLLGLLLEKAKTGDIIISSELSRLGRNMFMIMSILYHLLISGVKIWTIKDNYRLGDSIQDKILAFAFGLAAEIERNLISQRTKEALARKRAEGIVLGRPKGRKSDRLKLTGHEAEIQSMIDDKISKTAIAHKFGVCRQTVSSFLKNSRSAA

SEQ ID NO: 43719 - DNA, 2409 bp, Unknown
  Obtained from environmental sample
  misc_feature (1)..(2409): n is a, c, g, or t
atggacgagccgaaaacaagtcctatgcttgaacagtacaggcgcataaaaaaacaacaggaaggaaacattctttttttccgtcttggcgatttttatgaaatgtttgcgcaagacgccgtggaagtttcggcgttattaaatcttacgcttacaagccgtaacgggcttccgatgtgcggcgtcccgtatcatgcggcaaaatcctatattgcaagattattaaaactcggaaaaaaaatcgccatctgcgaacagcttaccgctcccggaaaacaaaaagttattgagcgcgacgtagttgaaattataactccgggaacaaccgtagacgatgatttccttgacaagggaagctcaaattatctttgctgtcttgcttccggcaggatagggaatgagctttctttttcatacatcgatctttcaacgggagattttttctctaccagtttctcaagcgaaggtatacttcgccaggaacttgaaagattatccgtaaaagaactgctgattcaggaatcgcttttggaagaacaaaaagaaatagcgtccgcaatttacgaccgcccgtccgtcgtgttgaaccgctgggcggattggttttttgatcccgctcaggcaaaatcaaggctggaaaaacaattcggagtggcaaacttaaaaagtttcggcatggaggcaaattcgcctgaaataatttccgctggagcgctattagactaccttgattcaacgtcaaaaagcatactgagtcacataagaacattgaaagtgtacagcgacagcgaatatttaggcatagacgagtcaagccagcgcaatcttgaacttttatgcaaccagcgcgacggcgacgtacgtttttcccttttggaagttatggacgaaacgcgctgcgccatgggacgcaggctgttaaaacggcgtatccttcaccccttgcgcgacttaaacgcgatacaggcccgccttgatatggtggaaaacctgtaccgcgatcagggaaagcttggctctttgcgcgagtttttgggaaaaactcccgacttggaaaggctctgttcaaggcttgcgatggacagggcgcacggcagagacatgcttgcggttaaaaacgcgatcttcagttttcattcaattatgaagcttgggtttgaaaaggatatgcgttttgaaagcgcaggctttcaaaaggacaattttgactcgctttctcaaatttatgaactgcttgaaaagggaatatgcgaagatcccgccgttgtattgagcgaaggcaatttgattaaggacggttttaacgccgaacttgaccaattccgttctttgcgggacaagggcagacagttcatcgaggattatcttaacgaagagcgcgaggctaccgggattcaaagtttaaaaatcaggtacaacaggttaatagggtatttttttgaagtaaccaaagcccatctaacaaaagtacccaaacattttatacgccgccagggcataacgggcggcgaaagatattcgacggaaaggcttgccgaactggaatcggaaattaacggcgcgtcggacaaggttgtggaacttgaaaaaaaacttttccttgaaatccgcgatcaggttaagttgtatcttgccctgctatccgccgccgcccgcaggcttgcggagattgatgctgcccagtcattggcaaaagccgcgagcgtaaggggctggacgcgccctgaattaaatgaaaccggtaatcttgaaataattgaaggccgccaccctgtagtggaagcccatctcgggcgcggcgaatacattcccaacgatataattttaaatacgcaagagaacggcatttcattcgcgatgataacgggccccaacatggcaggaaaatccacttatttgcgttccgccgcgttaattacgattatggctcaaacaggaagttttgttcccgcaagggaagcgcgcatcggcatctgcgaccgaatttattgcagggtaggcgcttccgacaatcttgcaaggggggagtcaacattccttgtagaaatgaacgagacggcttttattttaaacacagccacggaaaagagccttgtcatcatggacgaagtgggcagggggaccggcaccaacgacggtctttcgattgcgtgggcagtaagcgaagagttattgaaccggataggctgcagaacgctttttgcaacccattttcacgaactctcgattttatcccacccccgccttgccaaccgttccatggaagtgctggacaaagacggaaaaatcatcttcctgcgaaaactgaaagaaggccccgccgccgaatcatacggaatccacgtagcccggctcgccggtttatcggaaagcgtcctcggcagggcggagcagatcatggctttataa

SEQ ID NO: 43720 - protein, 802 aa, Unknown
  Obtained from environmental sample
  DOMAIN (121)...(255): MutS domain II
  misc_feature (1)..(802): Xaa is any amino acid
MDEPKTSPMLEQYRRIKKQQEGNILFFRLGDFYEMFAQDAVEVSALLNLTLTSRNGLPMCGVPYHAAKSYIARLLKLGKKIAICEQLTAPGKQKVIERDVVEIITPGTTVDDDFLDKGSSNYLCCLASGRIGNELSFSYIDLSTGDFFSTSFSSEGILRQELERLSVKELLIQESLLEEQKEIASAIYDRPSVVLNRWADWFFDPAQAKSRLEKQFGVANLKSFGMEANSPEIISAGALLDYLDSTSKSILSHIRTLKVYSDSEYLGIDESSQRNLELLCNQRDGDVRFSLLEVMDETRCAMGRRLLKRRILHPLRDLNAIQARLDMVENLYRDQGKLGSLREFLGKTPDLERLCSRLAMDRAHGRDMLAVKNAIFSFHSIMKLGFEKDMRFESAGFQKDNFDSLSQIYELLEKGICEDPAVVLSEGNLIKDGFNAELDQFRSLRDKGRQFIEDYLNEEREATGIQSLKIRYNRLIGYFFEVTKAHLTKVPKHFIRRQGITGGERYSTERLAELESEINGASDKVVELEKKLFLEIRDQVKLYLALLSAAARRLAEIDAAQSLAKAASVRGWTRPELNETGNLEIIEGRHPVVEAHLGRGEYIPNDIILNTQENGISFAMITGPNMAGKSTYLRSAALITIMAQTGSFVPAREARIGICDRIYCRVGASDNLARGESTFLVEMNETAFILNTATEKSLVIMDEVGRGTGTNDGLSIAWAVSEELLNRIGCRTLFATHFHELSILSHPRLANRSMEVLDKDGKIIFLRKLKEGPAAESYGIHVARLAGLSESVLGRAEQIMAL

SEQ ID NO: 43721 - DNA, 870 bp, Unknown
  Obtained from environmental sample
  misc_feature (1)..(870): n is a, c, g, or t
ttggggcttccccgcttcggcgatgaatccgggtacggctttggttccattaaccttggggctgtctttccaacaaaatacggggtgttcggaggttctctccgctttctgcgaagccctttcgattcttttcctgtggaaacttccatcatgggcaatatcaacgccgcaaaagagctctatccggggatgaacgtcggagcagggtttaatatcggttacaatacgggcaataatttgaccgtttccggggatctcgggtttcgttacaatatgggaaatctggggccctttgagaattttacttgggcgttcacggcaagaagccttgggaaaagctggattccgccaaggtttacccccgccgggggagtggcttttgattttgtccaccttcggggagcggaaggtaaggtggatcccctgcggatgactcttgcggcggacctcatgcttcccagcgtccggaacctggccggcaagctgggactttctgttctcattggcgaaatcatcaacatatcaacctctactcagtataatttgaaagaaaccatggacggtaacactccttcccccattccttccatcgggattggagttatctggaaactaaaatccggcaagccgaaaattatcggcggcacgctgtcttcagacggagagctggcggtgaatttggcggccaaaccgttgtacaacggaatatgggcagccggcgcgggagttacatggactgtaggcgtggcggataaaaagccgcctgtaataagcgttgattaccctcaagcagtctggatttctccgaataacgaccgcaagtccgattacctggaagtacccataacgattcaggatgaagttatatag

SEQ ID NO: 43722 - protein, 289 aa, Unknown
  Obtained from environmental sample
  misc_feature (1)..(289): Xaa is any amino acid
MGLPRFGDESGYGFGSINLGAVFPTKYGVFGGSLRFLRSPFDSFPVETSIMGNINAAKELYPGMNVGAGFNIGYNTGNNLTVSGDLGFRYNMGNLGPFENFTWAFTARSLGKSWIPPRFTPAGGVAFDFVHLRGAEGKVDPLRMTLAADLMLPSVRNLAGKLGLSVLIGEIINISTSTQYNLKETMDGNTPSPIPSIGIGVIWKLKSGKPKIIGGTLSSDGELAVNLAAKPLYNGIWAAGAGVTWTVGVADKKPPVISVDYPQAVWISPNNDRKSDYLEVPITIQDEVI

SEQ ID NO: 43723 - DNA, 1182 bp, Unknown
  Obtained from environmental sample
  misc_feature (1)..(1182): n is a, c, g, or t
atgaaacagatcggcggcgtaataaagcgttttttcgataaaagtaattttaagcccagcgttcttgccgacaatgcggtggtattgatcttcgtggtcattaccctgacggcggttccgatttcaaaaattcccattcccgaaataatacaggagatactctcccgcatagggcggaactgctttctggttttcagccttctgctccccataatggctgggatggggatcaactttggcatggttcttggagcaatggcagggcaaatcgggcttatctttgcggtagactggaacattgtaggcgttcccggcttgatctttgcgagccttattgctgtgccaatcgctgcttgccttggctggctggctggacaggttctgaaccgcgcccgtggccgggaaatggttaccggctatgtactgggttttttcatggacggtttttatcagttcattgtgctttatctaatgggccggccttcaatatgggctgtcgaagttgcgggaaaatgggcagccctcattccaattcattcagcaagaatcgtattaagccggggttacggcatacgtaacacccttaatatggactctatgcgcatgtcccttgaccgcttaattccattgaaaattgccggagtcaatattcctattgccaattacctggttataagccttttgtgcctctttatcatctggttccggaaaacaaagctcggccaggatatgcgggctgtggggcagaaccagacggttgcccatgcttcgggcattcccgtggatcgtaccagaattctggcgataataatttccacgatcctcgcgagcctggggcagattatatttctgcaaaacatgggaaacatggcgacttacaacgcgcacaggcagacgggtttcttcgcggcagcggcgatcctggttggcggcgcttccatttcaaaggccagcatcaccaacgtatttataggaaccacattgctgcatctgatgtatatagttgttcctcgggcaggtaccaacctcttcggttccgcgcagatcggcgagtatttccgggacgcctttagctatgcgattattgctcttgctctggtgatccacgcctggcgcaagcgagccaatgccgaagctgcccgcagcagccttcgcggcgcttctgtatccgaagaggaatag

SEQ ID NO: 43724 - protein, 393 aa, Unknown
  Obtained from environmental sample
  DOMAIN (49)...(366): Branched-chain amino acid transport system / permease component
  misc_feature (1)..(393): Xaa is any amino acid
MKQIGGVIKRFFDKSNFKPSVLADNAVVLIFVVITLTAVPISKIPIPEIIQEILSRIGRNCFLVFSLLLPIMAGMGINFGMVLGAMAGQIGLIFAVDWNIVGVPGLIFASLIAVPIAACLGWLAGQVLNRARGREMVTGYVLGFFMDGFYQFIVLYLMGRPSIWAVEVAGKWAALIPIHSARIVLSRGYGIRNTLNMDSMRMSLDRLIPLKIAGVNIPIANYLVISLLCLFIIWFRKTKLGQDMRAVGQNQTVAHASGIPVDRTRILAIIISTILASLGQIIFLQNMGNMATYNAHRQTGFFAAAAILVGGASISKASITNVFIGTTLLHLMYIVVPRAGTNLFGSAQIGEYFRDAFSYAIIALALVIHAWRKRANAEAARSSLRGASVSEEE

SEQ ID NO: 43725 - DNA, 339 bp, Unknown
  Obtained from environmental sample
  misc_feature (1)..(339): n is a, c, g, or t
gtggaaatgccgtacatcggggtgatcatttcctcgatttatggtgcgctgggcatactcacgtaccagcagagctttggatttatacagctctataatgcgccgctttacatggcctttcccgctgtggcagccatactcctgggcggcgcttcggtaaacaaagcttcaatcctcaatgtggtggtgggaaccttcctctttcaaagcatactcacaatgacaccttcggttatcaacaatatattacaaactgatatgtctgaagtaatcaggattctcatctccaacgggatgattatttacgctctgacccggaagacgaaggtaacaaaatga

SEQ ID NO: 43726 - protein, 112 aa, Unknown
  Obtained from environmental sample
  misc_feature (1)..(112): Xaa is any amino acid
MEMPYIGVIISSIYGALGILTYQQSFGFIQLYNAPLYMAFPAVAAILLGGASVNKASILNVVVGTFLFQSILTMTPSVINNILQTDMSEVIRILISNGMIIYALTRKTKVTK

SEQ ID NO: 43727 - DNA, 486 bp, Unknown
  Obtained from environmental sample
  misc_feature (1)..(486): n is a, c, g, or t
atggcagacgaccacaggcggcacgacatttcagacgggacatgggagctgctgcggccccatctcaaggggcgcaagggcacctggggcggcaacgcgaaagacaaccgcaggttcataaacggcgtcctctggatactgcggacgggggcgccgtggcgcgacctgccgcccggctacggcgactggaagaacacccaccgccgcttctgccgctggcgcgacgccggcgagtgggagaggctgctggagattctgatgcaggagccggactacgagtggctgatgatagacgcgacgcacgtcaaggtgcatcagcacggcaccggtgccagggggggcagccaggaggtcggccgtacaaaagggggcccaacacaaaggtacatctggccgtggattcgcatggtatgccggtcagagtcattgttacggctggcaacgtcgctgactgcacacaggctggccggcttgttgagggcatag

SEQ ID NO: 43728 - protein, 161 aa, Unknown
  Obtained from environmental sample
  misc_feature (1)..(161): Xaa is any amino acid
MADDHRRHDISDGTWELLRPHLKGRKGTWGGNAKDNRRFINGVLWILRTGAPWRDLPPGYGDWKNTHRRFCRWRDAGEWERLLEILMQEPDYEWLMIDATHVKVHQHGTGARGGSQEVGRTKGGPTQRYIWPWIRMVCRSESLLRLATSLTAHRLAGLLRA

SEQ ID NO: 43729 - DNA, 723 bp, Unknown
  Obtained from environmental sample
  misc_feature (1)..(723): n is a, c, g, or t
atgggagctgctgcggccccatctcaaggggcgcaagggcacctggggcggcaacgcgaaagacaaccgcaggttcataaacggcgtcctctggatactgcggacgggggcgccgtggcgcgacctgccgcccggctacggcgactggaagaacacccaccgccgcttctgccgctggcgcgacgccggcgagtgggagaggctgctggagattctgatgcaggagccggactacgagtggctgatgatagacgcgacgcacgtcaaggtgcatcagcacggcaccggtgccagggggggcagccaggaggtcggccgtacaaaagggggcccaacacaaaggtacatctggccgtggattcgcatggtatgccggtcagagtcattgttacggctggcaacgtcgctgactgcacacaggctggccggcttgttgagggcatagaggcggaggccctgatagcggacaggggctacgacgccgacgcgatagtcgagatggcgaaggcggcgggcatggtgcccgtgataccgcccaaggcgaacaggaaggagcagcgaaggtacgacgagtacatctaccgcctccggcacctcgtggagaacgccttcgcggagatgaagcggtggaggggcatagccacgcggtacgccaagaacgcggcctcgtacctggcggccgtccatttccgctgcatcatgatgtgggcgaaaatctattga

SEQ ID NO: 43730 - protein, 240 aa, Unknown
  Obtained from environmental sample
  DOMAIN (78)...(237): Transposase DDE domain
  misc_feature (1)..(240): Xaa is any amino acid
MGAAAAPSQGAQGHLGRQRERQPQVHKRRPLDTADGGAVARPAARLRRLEEHPPPLLPLARRRRVGEAAGDSDAGAGLRVADDRRDARQGASARHRCQGGQPGGRPYKRGPNTKVHLAVDSHGMPVRVIVTAGNVADCTQAGRLVEGIEAEALIADRGYDADAIVEMAKAAGMVPVIPPKANRKEQRRYDEYIYRLRHLVENAFAEMKRWRGIATRYAKNAASYLAAVHFRCIMMWAKIY

SEQ ID NO: 43731 - DNA, 372 bp, Unknown
  Obtained from environmental sample
  misc_feature (1)..(372): n is a, c, g, or t
ttggcggagggggatagcatggccacggcgggcaagctcacgagggtcggtctggccaagcacttggtggacaggctgggctacacgaaaaaggacgcgaccctgcttgtgaacacatttttcaggagcatgaccgaggcgctcaggtccggcgagggtgtcgagctgcgcggctttggcagcttcagggtgcggagcagggcgccgaggatgggtcgcaacccaaggaacggccagccagtccacgtgcccgggaagcaggtggtgtatttcaaaattggcaaggagatgcgggacaagctggtcgggcccaaagagggcggcgaggggcaagctccgatggagccggaagcgcatacgacggaagtatga

SEQ ID NO: 43732 - protein, 123 aa, Unknown
  Obtained from environmental sample
  DOMAIN (13)...(102): Bacterial DNA-binding protein
  misc_feature (1)..(123): Xaa is any amino acid
MAEGDSMATAGKLTRVGLAKHLVDRLGYTKKDATLLVNTFFRSMTEALRSGEGVELRGFGSFRVRSRAPRMGRNPRNGQPVHVPGKQVVYFKIGKEMRDKLVGPKEGGEGQAPMEPEAHTTEV

SEQ ID NO: 43733 - DNA, 471 bp, Unknown
  Obtained from environmental sample
  misc_feature (1)..(471): n is a, c, g, or t
atggagggcaggccggtcgcctacgtggacgagaccgggatagacacgtggctgcagcgcgagcacgggtggtcggagcgcggtgtcccgctggtggggagggtgcctggccgcaaatacgagaggacagggatcgtcgccgccctgtgcgggggcgaaatcatcgccccgtgccagtacgaggacaccatggactccgcccttttcgaggagtggttcgcccaggagctcctgccggccctgcaggagcggtccgtcatcgtgatggacaacgcggcgttccacaggaaggcaatgctccgcagactcgcggatggcgcggggcacacgctgctgttcctgccgccgtactcgccggagctgaacccgatagagcgcttctggggctggctgaagaggcacctgcgaaaaatcctcccggaacacccgtccttcgatgaggcgctctgttccgcttttcaagtgcgttga

SEQ ID NO: 43734 - protein, 156 aa, Unknown
  Obtained from environmental sample
  misc_feature (1)..(156): Xaa is any amino acid
MEGRPVAYVDETGIDTWLQREHGWSERGVPLVGRVPGRKYERTGIVAALCGGEIIAPCQYEDTMDSALFEEWFAQELLPALQERSVIVMDNAAFHRKAMLRRLADGAGHTLLFLPPYSPELNPIERFWGWLKRHLRKILPEHPSFDEALCSAFQVR

SEQ ID NO: 43735 - DNA, 324 bp, Unknown
  Obtained from environmental sample
  misc_feature (1)..(324): n is a, c, g, or t
atggatgttaacaatgaaaccgtaaatcaggttatcactcaatatatttccgatgtgaaagcggtattacccatcgacaaagtttatctgtacggttcctatataaatggaaccgctcaatgggacagcgatgttgacctctgttttttttcagacagttttaccacgcgggacatcatgcaggtaataggacggctttatgagttaaaacgccgttataacaaatatatttgcctggagcctaacgcgttccccttgtcagagttggacaatgacaatccctttgtaaaagaaatcctgcgaaccgggcgggaaataacatag

SEQ ID NO: 43736 - protein, 107 aa, Unknown
  Obtained from environmental sample
  DOMAIN (8)...(106): Nucleotidyltransferase domain
  misc_feature (1)..(107): Xaa is any amino acid
MDVNNETVNQVITQYISDVKAVLPIDKVYLYGSYINGTAQWDSDVDLCFFSDSFTTRDIMQVIGRLYELKRRYNKYICLEPNAFPLSELDNDNPFVKEILRTGREIT

SEQ ID NO: 43737 - DNA, 345 bp, Unknown
  Obtained from environmental sample
  misc_feature (1)..(345): n is a, c, g, or t
atggcgttaacagaggaagaaaagtatcaatattggctttcttatgctcaaaacgacatggattcagcggaggttatgttacaaagcggacgatggttttatacagttttcatgtgtcagcaagccattgagaaactggtaaagggcttatacatcctttacgttgacgataatgtgagcgatgcccatgcggtgttatttgatactctttcacagttctatttgcgaagcaggtatcctgattatacctccgcgttggcatcacttacaacaagcgaaacggcgcaatccatttatagaaaaagtaaaggagcctttcaatggatgttaacaatgaaaccgtaa

SEQ ID NO: 43738 - protein, 114 aa, Unknown
  Obtained from environmental sample
  DOMAIN (9)...(112): HEPN domain
  misc_feature (1)..(114): Xaa is any amino acid
MALTEEEKYQYWLSYAQNDMDSAEVMLQSGRWFYTVFMCQQAIEKLVKGLYILYVDDNVSDAHAVLFDTLSQFYLRSRYPDYTSALASLTTSETAQSIYRKSKGAFQWMLTMKP

SEQ ID NO: 43739 - DNA, 927 bp, Unknown
  Obtained from environmental sample
  misc_feature (1)..(927): n is a, c, g, or t
atgaatttgtttgcggacaagataaaaaaattctttggtgcgcggcggggcctttctgaggaagtgtttgaggatctggcggatcttcttgtagaaggcgatttcggtgccaggggggcttttgcccttacggaaaaactgaaggaagaatgtggcagggaaaaagcaagctcaggcgaagaagcgaaaaaaattctggtgaggcttttgacggagattttgttgaaagcctgcacagcaagacaaaatatcgaagaaggagagcttcacgaggggaaaccgttggttattatcctgctattgggggtaaacggcgtggggaaaaccactaccgcggcgaagctggctgagcgctacaggacgctggaaaaacgccgaccaattctggccgccgcggatacattccgcgccgccgcgattgatcagctaaaaatacacggcgagcgtctgggcttaagggttgtcgcccaccagcacggaggcgatcccgcggccgtcgtgtatgacgcgatagaagcctcgtcttccagggaagccgccggcagcggcgccataaatggcggcagggttgtcatcgccgataccgccggaaggatgcacacgaaatcagcgctggtggaggaactgcgaaaaatcgacaggattgtcgaatcaaaagcatccggggcgcgttatgtgaaatacctggtgctggacgccaccaccggcagaaatgccctgtcacaggccgagattttcagcggggccgtttccccgcaggcggcgatactgaccaagtacgattccacggcaaagggaggggtggtcttctcccttgcgtcagttttacatttacccgtggcttatctttgcacgggcgaaaaatacggggatatacagactttcgatccccataattttgcgagggaatttgcgggaattacctga

SEQ ID NO: 43740 - protein, 308 aa, Unknown
  Obtained from environmental sample
  DOMAIN (94)...(306): SRP54-type protein, GTPase domain
  misc_feature (1)..(308): Xaa is any amino acid
MNLFADKIKKFFGARRGLSEEVFEDLADLLVEGDFGARGAFALTEKLKEECGREKASSGEEAKKILVRLLTEILLKACTARQNIEEGELHEGKPLVIILLLGVNGVGKTTTAAKLAERYRTLEKRRPILAAADTFRAAAIDQLKIHGERLGLRVVAHQHGGDPAAVVYDAIEASSSREAAGSGAINGGRVVIADTAGRMHTKSALVEELRKIDRIVESKASGARYVKYLVLDATTGRNALSQAEIFSGAVSPQAAILTKYDSTAKGGVVFSLASVLHLPVAYLCTGEKYGDIQTFDPHNFAREFAGIT

SEQ ID NO: 43741 - DNA, 306 bp, Unknown
  Obtained from environmental sample
  misc_feature (1)..(306): n is a, c, g, or t
gtgagggcaatgcgctggattggctttgtagccggacgctatgtttcaaaaggccgaaggaattctccaacgccggtattttccgtgctgggaatcgcaacgggggttcttgcccttacggttatcatcgccgtgatgaacggttttcagcttggctttatcgagagcattttagagatgtcttcctgccatgtaaggattgaaggcttaaagccggatgccggaattttaaatgagctgcgcgtgttaccggatgtcctttctgttcttccctttgaggaaataaacgtttctcggccaatctga

SEQ ID NO: 43742 - protein, 101 aa, Unknown
  Obtained from environmental sample
  misc_feature (1)..(101): Xaa is any amino acid
MRAMRWIGFVAGRYVSKGRRNSPTPVFSVLGIATGVLALTVIIAVMNGFQLGFIESILEMSSCHVRIEGLKPDAGILNELRVLPDVLSVLPFEEINVSRPI

SEQ ID NO: 43743 - DNA, 1644 bp, Unknown
  Obtained from environmental sample
  misc_feature (1)..(1644): n is a, c, g, or t
atgagtgagatcatgaggccgattccctttccggaattgatacattgggtgaagagcgagtataataaccacggttcggttttcggcatacgaaaagaaaaatttttccgttccgtgaatcccaatgtcattgagatgtttggaacgaaaataagatctcccatcggtcccgccgcgggtcccaattcgcagcttgcccaaaacatcctcgccgcctttctcgcgggcgcgcgttttatggaactcaagaccgtgcaggccatggacggggaggaactgcgaaaatgcgtggcgcggccctgcatcaacgccgtcgacgagggctacaacgtggaatggtcaaccgagctgaccgtgccggaggcgcgtgaggagtatattaaagcgtggtttttatgccatatattcgccaaagaatttgaaattgacgatgccgcgaatgtgattttcaacatgagcgtcggctacagttacgagggaattaaatcggaaaagatcgattcgtatattgaagggatgagaaacgccaaaaacaccgagacatggaagcattgttacgattacatcgaggctgtcatcgcctcatttgagcgatttaccaaagaggatctggacgcgatttcgccggttgtttcaaacagcataaccctttcgacgcttcacggctgccctaaggaagagatagggaaaatcgcctcgtatctcattacccaaaaaggcctgcacacatacattaaatgcaatccaactctgctcgggtatgagacagcgcgcaagctgtttgaggaaatgggctaccggtatattgtttttgacgatcatcattttaaaaatgatcttcagtttaacgacgcggtggacatgctgaagcgtttgcaggcgcaggcaaaggaacataaactcgcctttggggtgaagcttaccaacacctttccggtgcagatcaaacggaacgaactgccggggaacgaaatgtacatgtcgggacgcgcgctttttcccctgtcgatcaatgcggcaaagaaactgtcgcgggcgtttgacggcgggcttcccatttcctactcggggggcgcggattacttcaacctgagggaaatccttgagacaggcataaggccggtaacggtggcgaccacgatcctcaaacctggcggctatgagcgcctgttccagcttgccgaactggcggaggaaacgattaacgatatatccgtcgccgcgcccatcaatgtaaacgccctgagcgtttttgcggattctcttcctaacctggcacgctaccgtaaggaataccgtcgaactggttcgcggaaacccccactccccactccccactccccactccctattcccctgttcgactgcgcgaaagcgccgtgtgcggacggaggctgccccattcaccagcgcatacccgaataccttgccgctgtcgcggagggtaaatatgacgaggctttcaaaataatagccgctgacaatacggccccctcgattaccgggactatctgcgatcaccagtgccagtacaagtgcacgcgtcaggactatgaggaccccttgcaaataagaagggccaagctcgttgccgccgacaaggctcaagcctcgttttttcttccctgcaaagctccaaaataa

SEQ ID NO: 43744 - protein, 547 aa, Unknown
  Obtained from environmental sample
  misc_feature (1)..(547): Xaa is any amino acid
MSEIMRPIPFPELIHWVKSEYNNHGSVFGIRKEKFFRSVNPNVIEMFGTKIRSPIGPAAGPNSQLAQNILAAFLAGARFMELKTVQAMDGEELRKCVARPCINAVDEGYNVEWSTELTVPEAREEYIKAWFLCHIFAKEFEIDDAANVIFNMSVGYSYEGIKSEKIDSYIEGMRNAKNTETWKHCYDYIEAVIASFERFTKEDLDAISPVVSNSITLSTLHGCPKEEIGKIASYLITQKGLHTYIKCNPTLLGYETARKLFEEMGYRYIVFDDHHFKNDLQFNDAVDMLKRLQAQAKEHKLAFGVKLTNTFPVQIKRNELPGNEMYMSGRALFPLSINAAKKLSRAFDGGLPISYSGGADYFNLREILETGIRPVTVATTILKPGGYERLFQLAELAEETINDISVAAPINVNALSVFADSLPNLARYRKEYRRTGSRKPPLPTPHSPLPIPLFDCAKAPCADGGCPIHQRIPEYLAAVAEGKYDEAFKIIAADNTAPSITGTICDHQCQYKCTRQDYEDPLQIRRAKLVAADKAQASFFLPCKAPK

SEQ ID NO: 43745 - DNA, 666 bp, Unknown
  Obtained from environmental sample
  misc_feature (1)..(666): n is a, c, g, or t
atggacaacgctaataaacagaaacagatggaatccgtctacaagattctctccgaagaatttaagaagaaccgcacccccatagttgacctgattgacgtccagaccggcgatccatttaaagtgttggtcgccaccatcctcagcgctaggacgaaagacgagaccaccgccgcggcgtcgcgtaagctttttgagcgtgttatgtgtttgaatgatattgataacttgacggaaaaagagttgtcaaaactgatattccccgtcggtttctacaaggtcaaggcacatcatctaaagcaactccccgccgtcattcgcgaacaattcggcggtgaaatcccacaagatgtagacgaactgaccaagctcccgggcgttgggcgcaaaaccgcgaacttggtggtagccgtagcgtttaaaaaaccggcggtctgcgtagacgtccacgttcaccgtataatgaacaggctgggatacatcaacacaaagacgccgctgcaaacggaaatggaactgcgaaagatactgccgcagagattttggacgaccttcaactcatacttcgtatcattcggacaacatagatgttcgcccatcaaaccaaagtgcgacgggtgccctatacgcaaatattgcggttatggcatagataaggttaattga

SEQ ID NO: 43746 - protein, 221 aa, Unknown
  Obtained from environmental sample
  DOMAIN (109)...(138): Helix-hairpin-helix motif
  misc_feature (1)..(221): Xaa is any amino acid
MDNANKQKQMESVYKILSEEFKKNRTPIVDLIDVQTGDPFKVLVATILSARTKDETTAAASRKLFERVMCLNDIDNLTEKELSKLIFPVGFYKVKAHHLKQLPAVIREQFGGEIPQDVDELTKLPGVGRKTANLVVAVAFKKPAVCVDVHVHRIMNRLGYINTKTPLQTEMELRKILPQRFWTTFNSYFVSFGQHRCSPIKPKCDGCPIRKYCGYGIDKVN

SEQ ID NO: 43747 - DNA, 996 bp, Unknown
  Obtained from environmental sample
  misc_feature (1)..(996): n is a, c, g, or t
ttgatggccgagatctgcagaagcggccccgacgcaatagaggccgtgcaggcggagcactacaacatagttttcatggatcacatgatgcccggaatggacggcttagaggcgacaaaacgcatcagggctatccgtggccgcggcgactattacagaaaactgcctattatcgccctcaccgcaaacgcggtagccggagcgcgcgaaatgtttctgagcgagggcctgaacgactttatctcaaaacccatagacatcgcgaagctgaaagccatcctcgataagtggataccgcaagagttgcgcaaatcgccgaccgaggtgatcgcgtccggctctgagaacggcgacgacgatatagacgtgcggaagattaaaatagacggcgtggacgtagaaaaaggcctggcaatctcaggcggcaaggggacgcactacatccgcactataaccatgttctacgaagacggcttcgagaagattaaagaaatacgaaactgcatggagataggcgacatgcagctctacgccacgcacgttcacggcctcaaaagcgcctcggcaagcataggagcggcgtcggtctccgaagaggcgaaggcgctggagacggcgtggaaagagaacaaccagatatacataaacgaacacaacgcgaaattcctgatgaacttggaggcgctgttgcacaacatcggcaaactcttggacgatatagaagccatgaagaaaaagaccggcggcggacacgtcgacacggaaatgttgaaggttgaattgaccaaattaaaagcggcaatggaaagcttcgactcggaaactatcgacagcgccactaacacgctcatagagtacgagcaagcggaacacttcggggagatgattaagaatatcctgcaaaacgtgcttatcggggagtacgacgaggcgattaacttgattgacaggcttttggagaagctgggtgttgaggtggagcttaggaaggattaa

SEQ ID NO: 43748 - protein, 331 aa, Unknown
  Obtained from environmental sample
  DOMAIN (1)...(95): Response regulator receiver domain
  misc_feature (1)..(331): Xaa is any amino acid
MMAEICRSGPDAIEAVQAEHYNIVFMDHMMPGMDGLEATKRIRAIRGRGDYYRKLPIIALTANAVAGAREMFLSEGLNDFISKPIDIAKLKAILDKWIPQELRKSPTEVIASGSENGDDDIDVRKIKIDGVDVEKGLAISGGKGTHYIRTITMFYEDGFEKIKEIRNCMEIGDMQLYATHVHGLKSASASIGAASVSEEAKALETAWKENNQIYINEHNAKFLMNLEALLHNIGKLLDDIEAMKKKTGGGHVDTEMLKVELTKLKAAMESFDSETIDSATNTLIEYEQAEHFGEMIKNILQNVLIGEYDEAINLIDRLLEKLGVEVELRKD

SEQ ID NO: 43749 - DNA, 1323 bp, Unknown
  Obtained from environmental sample
  misc_feature (1)..(1323): n is a, c, g, or t
gtgccttgtctgcactccatagccaagccccttaaacccggcgaaagcgacaacggcaaatggccctgcgaacctgatgttgaaaagaaatttataagccatttccccgatacctacgaaatttggtcctacggatccggctatggcggaaacgcccttcttgggaaaaagtgcctcgcgcttcgtatcgcttcggtactggccagggacgaaggctggcttgcggaacacatgctgattctcaaaattaccaaccccgcaggcgaagttaaatacatagccggcgccctgccttcggcctgcggcaagacaaaccttgccatgcttgtccccaccttgcccggctggaaagtggaaaccatcggcgacgacatcgcctggatgaaatttaaagacgacggccgcctctatgcgattaacccggaagcgggcttcttcggcgtagcccccggaaccagcgatcattcaaactataacgccatgcagtcaatcaaggaaaactcgattttcaccaactgcggccttaccgaagacggcgacatttggtgggaagggataggccacggcgcgtccggcaagacgatcattgactggcatggcaaagagaaacccgccccccagaccgacaaagctgttaagggcgaggaaatcgcccacgccaacgcccgctttaccgcgccggcaaaacaatgcccttgtatagccgctgaatgggaagaccccaaaggcgtgcccatcagcgcgttcctcttcggcgggcggcgggccagcaccattcccctggtaaaccagagcaagagctggatccacggcgtgttcatgggctcgattaccggttcggagattaccgccgcggcccttgaccctcaagaaggaaagcgtaggcgcgatccttttgccatgctgccattctgcggctaccacatgggcgactactttaagcactggatgnaagttggcaaaaaaataccggaagcaggccgtccaaaaatcttctttgtaaactggttccgcaaaaaagacggaaagtttgcatggccaggttatggcgaaaattcccgcgttctcaaatggatttttgagcaatgcgatggttcaggcaaatcggttgacactcaaataggtttaatgccagatccagcttctttcgacaaaccagatagcgtttctgaagatacattgaaagaaattctttctgtagatgtagaaggctggaaaaaggaaattgctgatattaaagaaaagcattatcccaaatttggcaacaagctcccaaaagaacttcaagaagagcttgccgctattgaaaagagactaggttaa

SEQ ID NO: 43750 - protein, 440 aa, Unknown
  Obtained from environmental sample
  DOMAIN (1)...(439): Phosphoenolpyruvate carboxykinase
  misc_feature (1)..(440): Xaa is any amino acid
MPCLHSIAKPLKPGESDNGKWPCEPDVEKKFISHFPDTYEIWSYGSGYGGNALLGKKCLALRIASVLARDEGWLAEHMLILKITNPAGEVKYIAGALPSACGKTNLAMLVPTLPGWKVETIGDDIAWMKFKDDGRLYAINPEAGFFGVAPGTSDHSNYNAMQSIKENSIFTNCGLTEDGDIWWEGIGHGASGKTIIDWHGKEKPAPQTDKAVKGEEIAHANARFTAPAKQCPCIAAEWEDPKGVPISAFLFGGRRASTIPLVNQSKSWIHGVFMGSITGSEITAAALDPQEGKRRRDPFAMLPFCGYHMGDYFKHWMXVGKKIPEAGRPKIFFVNWFRKKDGKFAWPGYGENSRVLKWIFEQCDGSGKSVDTQIGLMPDPASFDKPDSVSEDTLKEILSVDVEGWKKEIADIKEKHYPKFGNKLPKELQEELAAIEKRLG

SEQ ID NO: 43751 - DNA, 600 bp, Unknown
  Obtained from environmental sample
  misc_feature (1)..(600): n is a, c, g, or t
ttgctcaaaaatccatttgagaacgcgggaattttcgccataacctggccatgcaaactttccgtcttttttgcggaaccagtttacaaagaagatttttggacggcctgcttccggtatttttttgccaacttncatccagtgcttaaagtagtcgcccatgtggtagccgcagaatggcagcatggcaaaaggatcgcgcctacgctttccttcttgagggtcaagggccgcggcggtaatctccgaaccggtaatcgagcccatgaacacgccgtggatccagctcttgctctggtttaccaggggaatggtgctggcccgccgcccgccgaagaggaacgcgctgatgggcacgcctttggggtcttcccattcagcggctatacaagggcattgttttgccggcgcggtaaagcgggcgttggcgtgggcgatttcctcgcccttaacagctttgtcggtctggggggcgggtttctctttgccatgccagtcaatgatcgtcttgccggacgcgccgtggcctatcccttcccaccaaatgtcgccgtcttcggtaaggccgcagttggtgaaaatcgagttttccttgattga

SEQ ID NO: 43752 - protein, 199 aa, Unknown
  Obtained from environmental sample
  misc_feature (1)..(199): Xaa is any amino acid
MLKNPFENAGIFAITWPCKLSVFFAEPVYKEDFWTACFRYFFANXHPVLKVVAHVVAAEWQHGKRIAPTLSFLRVKGRGGNLRTGNRAHEHAVDPALALVYQGNGAGPPPAEEERADGHAFGVFPFSGYTRALFCRRGKAGVGVGDFLALNSFVGLGGGFLFAMPVNDRLAGRAVAYPFPPNVAVFGKAAVGENRVFLD

SEQ ID NO: 43753 - DNA, 351 bp, Unknown
  Obtained from environmental sample
  misc_feature (1)..(351): n is a, c, g, or t
gtgcgaacctgggccgtggcaaacagttacaacatgagcgctggacagaaaggaagcagcgggaacggcagcgatcagcagccggttactatggtaagttggtatgattccatcgtatggtgcaacgccctgactgaatactggaacgcaaaaaccggcgcaacactggcaacggtatacaatagcggtggcagccctatccgggacgccaataatacatcggcattgaacggggtaacgcccagcgtaaccgcgaggggtttccgcctgccaacgagcaatgaatgggaactggctacgcggtggcgcaacgatgataccaatacggcggacggatacagcgatccctga

SEQ ID NO: 43754 - protein, 116 aa, Unknown
  Obtained from environmental sample
  misc_feature (1)..(116): Xaa is any amino acid
MRTWAVANSYNMSAGQKGSSGNGSDQQPVTMVSWYDSIVWCNALTEYWNAKTGATLATVYNSGGSPIRDANNTSALNGVTPSVTARGFRLPTSNEWELATRWRNDDTNTADGYSDP

SEQ ID NO: 43755 - DNA, 1434 bp, Unknown
  Obtained from environmental sample
  misc_feature (1)..(1434): n is a, c, g, or t
gtgacggtgtatcaaaccagcggaacagcggtagtgaaaagcaaagtgaccaatgctctgggactctatgacatgagcggaaatgtctgggaaaggtgttttgatatagttaatctcagaggtggcagttatcaccccaatgaaaacgctacttacattcgtcttgataatttcgtttcatatagacgggaaagcaaggacggaaatgttggtttccgcattgcgcgtaccggttataaggcgggtgaaattataccgccaaatgcacacttggttacctttgatacagacggcggcgctcctgtcccggatcagcaaaccgtaagggagggcggccttgttaccagaccggcaacaaaccccgcaaaagccgattatacttttgacaactggtataaagactctggttttactacactgtgggactttgataccgaaaccgttactactgacacaaccatttacgccaagtataatctcaataaatacactgttacatttaacgcggacggcggcaccccagtcccggatcagcaatccatagaacacggcggcttggttaccagaccgacaacaaaccccgcaaaagccaattatacctttgacaactggtataaggaccctggttttacgacactgtgggactttgaaacggaaaccgtaaccgctgacacaaccatttacgcaaagttcaacttgaacaattacacagttacctttaacgcaaataatggtacctctaatactacccagactgtgactcatggtaatatggtatccaaaccattaaacccaacaaatactggatatggaacatttgaaaattggtacactaatgcagaacgaaccggtagcccattcaactttacgaccaccacgataactggcgacattacgctttatgccaaatggaacgctacatatgaacttggagccaccggacctggcggcgggaaaatcttctaccgtaatgaagtagggtttaccatgacagatgataattcaatagctcattaccttgaagcagccctttcggatataacaacagcatctacattgcttagatggggaaacacatcacctggtgctgatcttccacgtactaattcagtcattggttcgggtaggaataacaccgccattatccttgcctttgatgcaaatgcacctgcatctaaagcttgcagaggaggttataatgcaggcggtagcaaaacagattggttcctacccagtagagatgaacttgatgaactttataaacaaagaagcctttttaccggatggggaactagtggtaatgcattaacttactggtcttcatcagcgacatacacttcatcggcgaaggcacgtgaatttaacactagcccaagtttctatgatgaggacagaacgaaagcacactcagtccgcgcaatccgtgctttttaa

SEQ ID NO: 43756 - protein, 477 aa, Unknown
  Obtained from environmental sample
  misc_feature (1)..(477): Xaa is any amino acid
MTVYQTSGTAVVKSKVTNALGLYDMSGNVWERCFDIVNLRGGSYHPNENATYIRLDNFVSYRRESKDGNVGFRIARTGYKAGEIIPPNAHLVTFDTDGGAPVPDQQTVREGGLVTRPATNPAKADYTFDNWYKDSGFTTLWDFDTETVTTDTTIYAKYNLNKYTVTFNADGGTPVPDQQSIEHGGLVTRPTTNPAKANYTFDNWYKDPGFTTLWDFETETVTADTTIYAKFNLNNYTVTFNANNGTSNTTQTVTHGNMVSKPLNPTNTGYGTFENWYTNAERTGSPFNFTTTTITGDITLYAKWNATYELGATGPGGGKIFYRNEVGFTMTDDNSIAHYLEAALSDITTASTLLRWGNTSPGADLPRTNSVIGSGRNNTAIILAFDANAPASKACRGGYNAGGSKTDWFLPSRDELDELYKQRSLFTGWGTSGNALTYWSSSATYTSSAKAREFNTSPSFYDEDRTKAHSVRAIRAF

SEQ ID NO: 43757 - DNA, 504 bp, Unknown
  Obtained from environmental sample
  misc_feature (1)..(504): n is a, c, g, or t
gtgctttgtctttcaggcagaagcatgggaaacggcagggatacaacgatcagcaacattgtatgggtcgatccggaaactttttccccagtgcatacggcggcaatagcaaaagaaatcgaaacgctcaatggtatgctgaaagcgcaaggtntgcgttacgtccttgtcgggccaggccgctggggaaccagggattattctcttggcattcccgtaaactttccgcaaatttcattttcccgcgttatcgtagaaaccaatctgcccaattttaatgttgaatcatctctgggaagccatttttttcacaatgttaccagtatgaatatcgggtatttgtcagtatcgcctgggcacgaaaaggatcatgttgactgggaatggcttaagtcgcttcattgcgaaaagaaaacgcagttttgcagatggagcaaaacagaggagccgcttgatattgttatggacgggcgtattgcaaatacggtgatttataagcgttga

SEQ ID NO: 43758 - protein, 167 aa, Unknown
  Obtained from environmental sample
  misc_feature (1)..(167): Xaa is any amino acid
MLCLSGRSMGNGRDTTISNIVWVDPETFSPVHTAAIAKEIETLNGMLKAQGXRYVLVGPGRWGTRDYSLGIPVNFPQISFSRVIVETNLPNFNVESSLGSHFFHNVTSMNIGYLSVSPGHEKDHVDWEWLKSLHCEKKTQFCRWSKTEEPLDIVMDGRIANTVIYKR

SEQ ID NO: 43759 - DNA, 951 bp, Unknown
  Obtained from environmental sample
  misc_feature (1)..(951): n is a, c, g, or t
ttgagggatatgcttttggtgccgttttcgggggtctacgatacctacgttattccaaattcaagtcctgattttgaaaagcgactggcggaactgtgcgacgcggtacggctggtttacgcaagcctgtatttcgagtcgtcccgtcagtattttgatgccgcctcgtataaaatcgaagaagaaaggatggcgataatcattcaggaattcgcggggacaagaaacggcaggtggtattatccgattatttccggaattgcccaatcgtataactactatcctttttcttaccttaaacctgatgacggtctgtgcgtagccgggattgggcatggttgttatgttgtttcaggcggagcggcgtacaggttttcgccaaagtacccaaaggttgacgcaacggtatcgggctccaggatagacagcacccagcgcagtttttacgcgcttgatatggaagatcgcgctttggatcttttggaaggagatgaagtaacgttgaaatgccttgacataagcgaagcggaaagcaacgaagacttcgccatgacggcaagcacgtttaacagggaggacgacaggcttgagcctggaatcggcaggcccggcctcagggtcattaattttgccccaatactaaaatatgatctgtttcctttagccgaggttcttgacgctgtactaaatattgcttcaaagagcatgggcctgcctgtcgagattgaattcgcggtcagcaggcacaaagaaaaactgattttttatctcttgcaggtaaagcctcttatccaaaacaccggaaggcaggagaccaacatagacttacaggatattgacaagtgctttgtctttcaggcagaagcatgggaaacggcagggatacaacgatcagcaacattgtatgggtcgatccggaaactttttccccagtgcatacggcggcaatag

SEQ ID NO: 43760 - protein, 316 aa, Unknown
  Obtained from environmental sample
  misc_feature (1)..(316): Xaa is any amino acid
MRDMLLVPFSGVYDTYVIPNSSPDFEKRLAELCDAVRLVYASLYFESSRQYFDAASYKIEEERMAIIIQEFAGTRNGRWYYPIISGIAQSYNYYPFSYLKPDDGLCVAGIGHGCYVVSGGAAYRFSPKYPKVDATVSGSRIDSTQRSFYALDMEDRALDLLEGDEVTLKCLDISEAESNEDFAMTASTFNREDDRLEPGIGRPGLRVINFAPILKYDLFPLAEVLDAVLNIASKSMGLPVEIEFAVSRHKEKLIFYLLQVKPLIQNTGRQETNIDLQDIDKCFVFQAEAWETAGIQRSATLYGSIRKLFPQCIRRQ

SEQ ID NO: 43761 - DNA, 990 bp, Unknown
  Obtained from environmental sample
  misc_feature (1)..(990): n is a, c, g, or t
ttggccgccgcggtcctgacgctggcggtagtcggcgttttcgcgttcagagcgggacgcggttattgcaatacgttatgccccgtcggcgcttttntgagcctctttgcaaaattctctccgtacgcgcagcctatcgataaggaaaagtgcaacagttgcggtctntgcgctaaaaactgcaaagcgggttgtatagaccccgtcaaaaaggagattgacatgctgcggtgcgtctcctgctgtaattgtttggaggtgtgcccgagcggtgcgatatcgcttacgttaagtaatcccttttgcgcaaaaaaatcaattttaaacatgaagcccgaaccggccaagttggcaaacgacggcctcgcccgccgcggtttcatctccggcgcggccctattggcgatgggcttattaaccagtaccgcggcccgcacgttcgacggcggcctcactccgcttgaagataagaaagccccggcccgttccaaccccataatcccgcccggcgccgacaacgcgagaagtttcggcaaacattgcacgggctgtcaactttgcgtatcgatttgtccaaaccaagtattgcgcccgtcaaacaaaatatcggatctcttacacccgcgcctctcatacgaacgcggctactgccgtcccgagtgcgtaaagtgctcggaagtttgcccgtccggcgcgatacgccccatcaccgcagccgaaaaatccgccacgcaaatcggcgtagcggtatggaataaagacctctgcataatcaacaaagacaaagtaaactgcacgctatgctcgcgcaaatgcccgaccggagctataaccatgataccgcaagacgcggccgacataatgtcgcccaaaatcccgatggtagacacaaaccgctgcataggctgcggagcgtgcgaacacctatgccccgtaagaccgtacagcgcgataacagtcagcggtattgaatcgcatagaacggtttaa

SEQ ID NO: 43762 - protein, 329 aa, Unknown
  Obtained from environmental sample
  DOMAIN (249)...(278): 4Fe-4S binding domain
  misc_feature (1)..(329): Xaa is any amino acid
MAAAVLTLAVVGVFAFRAGRGYCNTLCPVGAFXSLFAKFSPYAQPIDKEKCNSCGLCAKNCKAGCIDPVKKEIDMLRCVSCCNCLEVCPSGAISLTLSNPFCAKKSILNMKPEPAKLANDGLARRGFISGAALLAMGLLTSTAARTFDGGLTPLEDKKAPARSNPIIPPGADNARSFGKHCTGCQLCVSICPNQVLRPSNKISDLLHPRLSYERGYCRPECVKCSEVCPSGAIRPITAAEKSATQIGVAVWNKDLCIINKDKVNCTLCSRKCPTGAITMIPQDAADIMSPKIPMVDTNRCIGCGACEHLCPVRPYSAITVSGIESHRTV

SEQ ID NO: 43763 - DNA, 1413 bp, Unknown
  Obtained from environmental sample
  misc_feature (1)..(1413): n is a, c, g, or t
ttgcctaacaggctgttagatttagtacggttaagacaagatgacggaatctatgaaaaaatacaatttgagagaatagacagacagcgattcgagacaataacaggagagtattggaagcagttgcgcgagctgattgacggagctttgcgcaacgcggcggaaaaaatgagcgggttcaccggcgcgggcgatgtagatttaataattttaaccggcggtcacagcaactggtacggcgtcagcgaatttcttaagggagaaaaatttgcaaactgcgagcccatagattttacaaaaatcaggaataacccgtcggcgcggcttttacaggaatctagtccacaggaaaccgttgcgcttggtctggtgaaaatggatgaagctaaaaagaaatggttttatttaaactcggccaagggaaaagcggctcagagtttatctgaatgccgggaacgcgctgctaaatataagaagtgcattgccgcaagtggtttttctacattcggcttgaaatctgacagctcagtagccgtgactagaaatggttggaaaggctggagcgaaaccgggacatatcggggttttaccgctgttgccggaggtttaaattatacagtcggcttggcgggcggtacggctgtcgtggtaaagcgaggtagtttatttggtggttggggaaggcccgtgatctggcgtgatattaccgctgttaccgtaggtaattctcatacagtcggtttgaaaaaaaacggcacggttgtcgcagtcggggataataaaaaaggtcaatgcgacatcgggggctggcaggacattatcgcggttgccgtaggtgatactcatacggtcggcttgatagcggatggtacggttgtcgcggttggaatgaatgattgtggtcagtgcgacaccggggactggcgggacattgttgcgattgctgcgggaaaagatcatacagtcggcttgaaagcggacggcacggttatcactgttggggcagattactgttgtagtcagtgcgacaaagaggactggcgggacattgtcgcaattaccatatatagcatatatacagttggcttgaaagcggatggcacggttgtcggggttggaatagatgactggcgggacattgtcgcgattgctgtgggagaagatcatttagtcggcttgaaagcggacggtactgttgtcacggatggggataatgaatatggccagtgccgcaccgaggactggcgagacattgtcgcgattgccgcaggttattgtcatacagtcggcttgaaagcagacggtacggttgtcgctgttggggataatagatatggtcaatgcgacacaggaagctggaaagatattggtcccaatttctggacgaatataggtcccgcttccggtgagtag

SEQ ID NO: 43764 - protein, 470 aa, Unknown
  Obtained from environmental sample
  misc_feature (1)..(470): Xaa is any amino acid
MPNRLLDLVRLRQDDGIYEKIQFERIDRQRFETITGEYWKQLRELIDGALRNAAEKMSGFTGAGDVDLIILTGGHSNWYGVSEFLKGEKFANCEPIDFTKIRNNPSARLLQESSPQETVALGLVKMDEAKKKWFYLNSAKGKAAQSLSECRERAAKYKKCIAASGFSTFGLKSDSSVAVTRNGWKGWSETGTYRGFTAVAGGLNYTVGLAGGTAVVVKRGSLFGGWGRPVIWRDITAVTVGNSHTVGLKKNGTVVAVGDNKKGQCDIGGWQDIIAVAVGDTHTVGLIADGTVVAVGMNDCGQCDTGDWRDIVAIAAGKDHTVGLKADGTVITVGADYCCSQCDKEDWRDIVAITIYSIYTVGLKADGTVVGVGIDDWRDIVAIAVGEDHLVGLKADGTVVTDGDNEYGQCRTEDWRDIVAIAAGYCHTVGLKADGTVVAVGDNRYGQCDTGSWKDIGPNFWTNIGPASGE

SEQ ID NO: 43765 - DNA, 480 bp, Unknown
  Obtained from environmental sample
  misc_feature (1)..(480): n is a, c, g, or t
ttgcaggaagacattgagaacaggagcgtggcgctgactacgaaagccacaaaaataaccgcgcagacgctggcaaagctgatgcgggcggcggtgcggaagatgaaggagcctaaaagcgaaatcaaaccgggcaggcagtcgatgaagcagcttgcgaaggacggttccctgtccagcgtcgagattacaaacgacaacatcaaggcgttcgacccggtggcgcgcaagtatgggatcagctacgacttaaaacgcgactcgacgtccgatcccccgcgttgggtggtgttcttccgcgcgaaggacgccgacgccatgaccgccgcgtttacagagtttgccgcgaagatggtcaagcgcgagagcgaaaacgaaaggccgtccacccgcgaaatgatgaggaatctgcgggagaaaatcgcccacgcagtcagggacaagacgaagcacaagcacagggaggggccggagctatga

SEQ ID NO: 43766 - protein, 159 aa, Unknown
  Obtained from environmental sample
  misc_feature (1)..(159): Xaa is any amino acid
MQEDIENRSVALTTKATKITAQTLAKLMRAAVRKMKEPKSEIKPGRQSMKQLAKDGSLSSVEITNDNIKAFDPVARKYGISYDLKRDSTSDPPRWVVFFRAKDADAMTAAFTEFAAKMVKRESENERPSTREMMRNLREKIAHAVRDKTKHKHREGPEL

SEQ ID NO: 43767 - DNA, 546 bp, Unknown
  Obtained from environmental sample
  misc_feature (1)..(546): n is a, c, g, or t
ttgggtggtgttcttccgcgcgaaggacgccgacgccatgaccgccgcgtttacagagtttgccgcgaagatggtcaagcgcgagagcgaaaacgaaaggccgtccacccgcgaaatgatgaggaatctgcgggagaaaatcgcccacgcagtcagggacaagacgaagcacaagcacagggaggggccggagctatgacaaaaatcacgcccgctctcaaaaaatatgttttgcctaaccttccatacgcgctgatcttttggttcgccaacaagctgggcatggcctatcggctggcgtccggcagggatttcctgcaaaaattcatacacagcatggcgacgcttcatgcggcgatggcaaagccgttgccgtcattcgtgccgtttgacctgatggtcggtctggcgggcgcggctgtcgtatacgccatcgtctatgtcaaaaagaaaaacgcgaaaaaatacaggaaaaataccgaatacggaagccgcagatggggcaaagcggacgacatcaagcctttcatggacgccaacccctga

SEQ ID NO: 43768 - protein, 181 aa, Unknown
  Obtained from environmental sample
  misc_feature (1)..(181): Xaa is any amino acid
MGGVLPREGRRRHDRRVYRVCREDGQARERKRKAVHPRNDEESAGENRPRSQGQDEAQAQGGAGAMTKITPALKKYVLPNLPYALIFWFANKLGMAYRLASGRDFLQKFIHSMATLHAAMAKPLPSFVPFDLMVGLAGAAVVYAIVYVKKKNAKKYRKNTEYGSRRWGKADDIKPFMDANP

SEQ ID NO: 43769 - DNA, 1485 bp, Unknown
  Obtained from environmental sample
  misc_feature (1)..(1485): n is a, c, g, or t
ttgatggcgaggatccaacgtcaattagggtacggcctgggcatgagcgttaccaaacgctttatcgacatgatgaacggcgagattaccgttaaaagcaagccgggaaaaggcacagagtttaaaatacgaataccgcagggttatgtcgattcggctgtattgggcaaggaaggtgcaaataatctgcagaaattatgcgccgaaagagaagcaaaagatagcgacaacgaaattgtcagagaatatatgccctacggcaaagtattggttgtagacgatatggagccgaatctttatgttacaaacatggttcttgctccctatggactgacaatatctaccgccaaaagcggacaagaggcgattgataaagttaaaagcggcattacatacgatattatttttatggaccattatatgccggaaatggatggagtagaagcgacaaagataatgcgcgatcttgggtacaagcaccctattgttgcgttgaccgctaacgctttggtcggacaagccaagatttttttggaaaacggctttaacgggtttctttccaaacctattgatacgcgccagctcaattcaacgctaaacaaatttgttcgtgacaaataccctgtcgaagttgtagaagccgcccggaagatgaaaaaaccggaagacgaaggcgactccgaactgccggatttaagcaaattaaaagctctgattgtggacgattttatgccgaattcgagcttaacggcgggcttgctggaagagtataaaatgcaggcagattgtctgttaagcgggcaggaagcgattgataaaattaaaagcggagaaccgtacgatattgtttttatggatatactgatgccggtaatggacggcatagaagcgaccagggcaatacgctccctcggcactgaatacgcggacaccgtgccgattatagcccttacggcaatgccggacggcgatgccgccggccaggaaaaaacgcttttggacagcggttttcagaaggttatatacaaacctttcacccttgaaacggtagatacctttattaaagactggatgagcgataaaataaagaactgtataataccacccggaaaaaaggagaaaatcatggaaatagacatacccggagtagaaaacgaaaaggtaaagaagatttacggcacaaaatttaacatctatttggatgttttgcgttcatatctggacgttgtgcccaaatcccttgaagagatgagccaggttaccaaggaaacattgtcgagttacgttaccagcgtacacggcgtaaaaagcgtcagcgacttcatcggcgcggaagaagcgcggaaaatggcccttgaactggagatgctgggcagggccggagacctttccggcgtacaggcaaaaaacggggcgttcattcaatacgcgaaagatcttatagtcaatgtagaaaaatatctggcgaagacggacgcaaaatag

SEQ ID NO: 43770 - protein, 494 aa, Unknown
  Obtained from environmental sample
  DOMAIN (235)...(355): Response regulator receiver domain
  misc_feature (1)..(494): Xaa is any amino acid
MMARIQRQLGYGLGMSVTKRFIDMMNGEITVKSKPGKGTEFKIRIPQGYVDSAVLGKEGANNLQKLCAEREAKDSDNEIVREYMPYGKVLVVDDMEPNLYVTNMVLAPYGLTISTAKSGQEAIDKVKSGITYDIIFMDHYMPEMDGVEATKIMRDLGYKHPIVALTANALVGQAKIFLENGFNGFLSKPIDTRQLNSTLNKFVRDKYPVEVVEAARKMKKPEDEGDSELPDLSKLKALIVDDFMPNSSLTAGLLEEYKMQADCLLSGQEAIDKIKSGEPYDIVFMDILMPVMDGIEATRAIRSLGTEYADTVPIIALTAMPDGDAAGQEKTLLDSGFQKVIYKPFTLETVDTFIKDWMSDKIKNCIIPPGKKEKIMEIDIPGVENEKVKKIYGTKFNIYLDVLRSYLDVVPKSLEEMSQVTKETLSSYVTSVHGVKSVSDFIGAEEARKMALELEMLGRAGDLSGVQAKNGAFIQYAKDLIVNVEKYLAKTDAK

SEQ ID NO: 43771 - DNA, 1542 bp, Unknown
  Obtained from environmental sample
  misc_feature (1)..(1542): n is a, c, g, or t
atgcgcgttcagggtaacatgaatattgtaggtatagcgtttgatgacgacggcgttaaacaagttgaaatcgctgtgtaccgcggaacagacggaaagggcgaagaattagtccgcgtaaaggcgtcgggaaccgattattggtcttatttccttgacacatcagacggtgaaatatggctggacggagattataccgttaaagcgtgggcgaccgacataaatgatctttcaggtattgcggatgtttacactaccggacaaaaagtccctccgaaaaagaaaaaagtcgccgttgtttactggcggctggacagaaaaaaacctgacgctgttattacaagccacagtgtcggcgcgcttgtttcgggaaatatcaagttaggcggcactctttacgacggcaacggcattgcgtctttcagttattcggttgacggcggacaaaaatatattcccgcaaaattcaaagttaataaaaccggcaacggcacttgggatatcaatcttaatacaaaacagtttgaagacggtcctgtcgttatctggtttaaaacagttgacggtaacgacagcgttggaaccgccgctcacctgttattcgtaaataacatcggtcccgacgtaaaagtcgtatatcccgagccgaatactacgttaaacggcgtatttaatatcgccggttacgcgaaacatcccgtaggattaaaatccataacatggaaagcgggcaattctcaaggcgaatttgaactgcttcccggaaaccagtggtggtcggcgcccgtagacgcgcgcgcgtttaagggaaactcaatcgaagttgaagttaaagcggttgacgtttcaggtaacgtcaccatagcaaaacaaaaatataaattcgatcccgcttcggatttaccggttgtaaaattaacattgccggtaccgggcgttcttcacagcgatttaggtcttatagtaaaaggagaagcgacagacgacgacggcgtcgcttctgttctctattcgctggacggggctcccgcggtggaaatacagtgcaacggatatttccaattctatattcccactccaaacgaagggactcatacccttgacgtttgggctaaagatacttcaggcgttgcgggaaacaaaacacaggtaaaaggtataattgtttcaaacggcgtaatacaacccggcatagcttcagttacatatcccgaaggaagaaataaaaagaccgatccttttaatacaggtatgaaaataaaacctgttcctcaaatgacgatgcttctctcttacaactcaggaagcgcgcccgcgtcagccacagttacattcggcgatctacaacctacgcaggtcagattaacgggcacaaaagacgtgtttaccgcagcagtaccggttcccaccgatcttcccgaaggacttttggaaattaaattattgggaacagaccgtcagggcagggaatttaagtacagcgaatttgcttatgtagtctcgccagcggcgatgattcgtctaatcctatctcatttgtaa

SEQ ID NO: 43772 - protein, 513 aa, Unknown
  Obtained from environmental sample
  misc_feature (1)..(513): Xaa is any amino acid
MRVQGNMNIVGIAFDDDGVKQVEIAVYRGTDGKGEELVRVKASGTDYWSYFLDTSDGEIWLDGDYTVKAWATDINDLSGIADVYTTGQKVPPKKKKVAVVYWRLDRKKPDAVITSHSVGALVSGNIKLGGTLYDGNGIASFSYSVDGGQKYIPAKFKVNKTGNGTWDINLNTKQFEDGPVVIWFKTVDGNDSVGTAAHLLFVNNIGPDVKVVYPEPNTTLNGVFNIAGYAKHPVGLKSITWKAGNSQGEFELLPGNQWWSAPVDARAFKGNSIEVEVKAVDVSGNVTIAKQKYKFDPASDLPVVKLTLPVPGVLHSDLGLIVKGEATDDDGVASVLYSLDGAPAVEIQCNGYFQFYIPTPNEGTHTLDVWAKDTSGVAGNKTQVKGIIVSNGVIQPGIASVTYPEGRNKKTDPFNTGMKIKPVPQMTMLLSYNSGSAPASATVTFGDLQPTQVRLTGTKDVFTAAVPVPTDLPEGLLEIKLLGTDRQGREFKYSEFAYVVSPAAMIRLILSHL

SEQ ID NO: 43773 - DNA, 543 bp, Unknown
  Obtained from environmental sample
  misc_feature (1)..(543): n is a, c, g, or t
atgggcgatacatggcaaagacttcttaccgtcgcggaaatagcggctctgcgccctcctgttaacacaaacattactaaatctgttgatctttcagccgccaatgacggttcaatcaacatacagataagagcgtcgggcgattccgacagcactattgtggacttttccgtgctaaaagacactaaagctcccgcggcgaccactatcgtgccggtatcggaagccaaagtaaacggaacaatacgcatggcgttcgcggttgaggaacttggcgttgttcaatcaatttcttaccgcagaagcgcgacagccgcgcctagagaagtttataacgacaaccaatggaacggcgattatctgccgcgtttctttgaagtgcttatggactcgcttcaaatgccgcttgataataatatgcgctttacatttacggataaagcgggcaactcaagcgaagttagcgcgtggtcatttataatcgatcagcaaatggacattccgactgtacaaataattcttccgcaggaagatgaagtttaa

SEQ ID NO: 43774 - protein, 180 aa, Unknown
  Obtained from environmental sample
  misc_feature (1)..(180): Xaa is any amino acid
MGDTWQRLLTVAEIAALRPPVNTNITKSVDLSAANDGSINIQIRASGDSDSTIVDFSVLKDTKAPAATTIVPVSEAKVNGTIRMAFAVEELGVVQSISYRRSATAAPREVYNDNQWNGDYLPRFFEVLMDSLQMPLDNNMRFTFTDKAGNSSEVSAWSFIIDQQMDIPTVQIILPQEDEV

SEQ ID NO: 43775 - DNA, 990 bp, Unknown
  Obtained from environmental sample
  misc_feature (1)..(990): n is a, c, g, or t
atgacagattggccgagcccgcaccgtaaaggtctgggggagtatgcgttcgcggggtgccacgcgctctcgtcggttactctgtctcccgcactcgccgagataggagagggagcgtttaaagactgcgtcagcctgaaaagcatagctgtccctgccgcgacgaaaaaaatcggcaggaacgcgttctataactgccgctcgttaaaaagcatttccgttcataaggacaaccccgtctattgctccgaaaacggcgtattgttcagcaaagaccgcacaattctgatagcttatccgacgggcaaacccgacgagagctacgtcgtccccgacgccgtgagcgcgctcggcgaatacgcgttcacccgcaacagaagcgttaaacatatcacgttgccgaaaagccttaaaagaatcggcgacgaggagttcaaaggttgcgtcaatttggagggcattacgcttttcggcgacataaccgacataggcgcgggcgcgtttgaggactgcaacgggcttaaaaacataataatgcccggccgcattaaaaaaataaaagacaacacgtttaaaaactgcaaaaatctgacgatggtgatcattccggacggcgtcgcctcgatcggttggggcgcgtttgacggttgcgagaaattggtcgcggttaacctgcccgacagcgtaagggagatcgcgtggaacgcgtggaacggttgcgtctcgcttgaaaacgtaatgctgtccgacgcgatatcggtaatcggcggggggacttttaacggttgcaaaaaacttgccgaaatcgacatcccctcgtccgtattaaagatcgaaaaaagcgctttcgagggttgcgacagccttaaaaccgccaacatcggcgtcgccaaagcggagatcacgattgattcggacgcgtttccgccgcatacaaaaatcgtatacagtccagactgtttggaatcgtggcacgagtgtgcgatttaa

SEQ ID NO: 43776 - protein, 329 aa, Unknown
  Obtained from environmental sample
  misc_feature (1)..(329): Xaa is any amino acid
MTDWPSPHRKGLGEYAFAGCHALSSVTLSPALAEIGEGAFKDCVSLKSIAVPAATKKIGRNAFYNCRSLKSISVHKDNPVYCSENGVLFSKDRTILIAYPTGKPDESYVVPDAVSALGEYAFTRNRSVKHITLPKSLKRIGDEEFKGCVNLEGITLFGDITDIGAGAFEDCNGLKNIIMPGRIKKIKDNTFKNCKNLTMVIIPDGVASIGWGAFDGCEKLVAVNLPDSVREIAWNAWNGCVSLENVMLSDAISVIGGGTFNGCKKLAEIDIPSSVLKIEKSAFEGCDSLKTANIGVAKAEITIDSDAFPPHTKIVYSPDCLESWHECAI

SEQ ID NO: 43777 - DNA, 651 bp, Unknown
  Obtained from environmental sample
  misc_feature (1)..(651): n is a, c, g, or t
atgcacgttcttgttgtgatgacggacatgacaaattattgcgaagcgatgagggaagtttcttcaattcggggagaagtgccgagccgtaaaggataccccggctatttatattccgatcttgcttcgctttatgaaagagccgggaaaataacaggctccacaggctcaatcacccagataccaattctttccatgccaaacgatgatatcagccatccaatccccgatctttcaggatacatcacagaaggacaaatcgttcttgaccgggagcttttccagcgtggtatttatccgcctgtcgcaggacttccgagcctttcacgtcttatgaaagacggaataggcaaaggcatgacaagggaagatcacaaggacatagcaagccagctttttgcggcttacgcaaaggtgaaacaaatacgcaatctcgcctcaattatcggcgaagaagaattatccgctaccgacaaacagtatttgaaattcggagagaaatttgagcagacattccttacacaaagcgaacaggataaccgagaaatcgcgcgtactctggatattggctggaaggttcttaaggaaattccgcgcgaagatttgttacgtgtcaagcaggaatatatcgaaaaatatatgaataaataa

SEQ ID NO: 43778 - protein, 216 aa, Unknown
  Obtained from environmental sample
  DOMAIN (1)...(109): ATP synthase alpha/beta family, nucleotide-binding domain
  misc_feature (1)..(216): Xaa is any amino acid
MHVLVVMTDMTNYCEAMREVSSIRGEVPSRKGYPGYLYSDLASLYERAGKITGSTGSITQIPILSMPNDDISHPIPDLSGYITEGQIVLDRELFQRGIYPPVAGLPSLSRLMKDGIGKGMTREDHKDIASQLFAAYAKVKQIRNLASIIGEEELSATDKQYLKFGEKFEQTFLTQSEQDNREIARTLDIGWKVLKEIPREDLLRVKQEYIEKYMNK

SEQ ID NO: 43779 - DNA, 822 bp, Unknown
  Obtained from environmental sample
  misc_feature (1)..(822): n is a, c, g, or t
atgaagaacgatttggaaacgcttgagcggagctactcgcaccagggaaactttatgagaggtattgaatacaagggtctaaaccgcatcgaagggccggtggttgttacctccagaagcaggaacgtcggctttaacgaagtggtggcgattttcgacaaagataagggccgcaggcttggccgggtagtggacttgagcgaagattatacggcggttcaggttttcggaagcaccaccggtctttccgccgatcacagccgcgttgagtttctaggggagccgatgaggctccgcgtggggcccgggctattgggcagaatttttaacggcctgggggaacctgtcgacggttacggggatattttttcctcaaactgcctggacataaacgggcttcccattaacccctatgcccgcacttatccccgtgactttattcaaaccggcatatccgcaatcgacggcatgaacactcttatcagaggtcagaaacttcccatcttttccggcaacggccttcctcacaaccggctggccgcgcagatcgagcgtcacgcaaaaatcctgcatggctcttccggcgattcttcggatgcagatcaggagcgctttgttatcgtcttttgcgcgatgggggtcaagtacgatatcacccgcttcttcctcgatgattttgaaagctctggcgttctggccaacgtcgaggtctttctgtctatggctgacgcgactacccttgagcgcttgtcgatacgcggtgcgcccttactgccgccgaataccttgcttttgaaaaaaacatgcacgttcttgttgtga

SEQ ID NO: 43780 - protein, 273 aa, Unknown
  Obtained from environmental sample
  DOMAIN (27)...(93): ATP synthase alpha/beta family, beta-barrel domain
  misc_feature (1)..(273): Xaa is any amino acid
MKNDLETLERSYSHQGNFMRGIEYKGLNRIEGPVVVTSRSRNVGFNEVVAIFDKDKGRRLGRVVDLSEDYTAVQVFGSTTGLSADHSRVEFLGEPMRLRVGPGLLGRIFNGLGEPVDGYGDIFSSNCLDINGLPINPYARTYPRDFIQTGISAIDGMNTLIRGQKLPIFSGNGLPHNRLAAQIERHAKILHGSSGDSSDADQERFVIVFCAMGVKYDITRFFLDDFESSGVLANVEVFLSMADATTLERLSIRGAPLLPPNTLLLKKTCTFLL

SEQ ID NO: 43781 - DNA, 432 bp, Unknown
  Obtained from environmental sample
  misc_feature (1)..(432): n is a, c, g, or t
gtggaaaccaacgcgattttagtccgcgagaaactccctcccgacgaggttattcgttatatgttgacggccaggcagaaaagccagtgggaaaaattcttcctttaccttgatctggaagccatgctctcccgcgacgcgtaccggaggcgccagtacaccgccgaatccgaggaaggccgccaaaggatgatagcccgttaccggcaggatctgcaaaattccgtgattgacggggatatttcgcttgtccccatgaattttaccattgagcgtactacctacaacgggcagacggggacggtaaccgtgctggaatatttcagggttggtacttatacggagaagaaacgctacacctggtatctggaacgaaaagacgatatttggactattgtagattattcggttgttaatttgggaacggaataa

SEQ ID NO: 43782 - protein, 143 aa, Unknown
  Obtained from environmental sample
  misc_feature (1)..(143): Xaa is any amino acid
METNAILVREKLPPDEVIRYMLTARQKSQWEKFFLYLDLEAMLSRDAYRRRQYTAESEEGRQRMIARYRQDLQNSVIDGDISLVPMNFTIERTTYNGQTGTVTVLEYFRVGTYTEKKRYTWYLERKDDIWTIVDYSVVNLGTE

SEQ ID NO: 43783 - DNA, 435 bp, Unknown
  Obtained from environmental sample
  misc_feature (1)..(435): n is a, c, g, or t
ttggaactggaaataattagacgcaagggaaatcccaaaatcgtaacggaagacggaaagatgaaaatgtatgttcgccctgattccacaaacgcgaaaaggcaggaattccttgacaaatggtacagtaaaattctgaaagactcatcccttccggtcattgaagaatgggaagggcgaataggcgtaaaggtaaataaactctttgtaagaaaaatgaaaacgtgctgggggagctgcaacagtacaagacagactttaaggctgaattcagaactggcaaaaagaaagcgagagtgtcttgaatacgtgattgttcacgaaatgctccacatcattgaaaagagccacaaccgcaagttttacagccttctgaacaaatatctgcccgaatggaaaattattcgaaaaaagatgaatgtcggagagctataa

SEQ ID NO: 43784 - protein, 144 aa, Unknown
  Obtained from environmental sample
  DOMAIN (10)...(142): Protein of unknown function DUF45
  misc_feature (1)..(144): Xaa is any amino acid
MELEIIRRKGNPKIVTEDGKMKMYVRPDSTNAKRQEFLDKWYSKILKDSSLPVIEEWEGRIGVKVNKLFVRKMKTCWGSCNSTRQTLRLNSELAKRKRECLEYVIVHEMLHIIEKSHNRKFYSLLNKYLPEWKIIRKKMNVGEL

SEQ ID NO: 43785 - DNA, 630 bp, Unknown
  Obtained from environmental sample
  misc_feature (1)..(630): n is a, c, g, or t
atgaaaaattttgtttttatttgcgcttttgtttctgttttttcgtcgtgttcaaaaacgccggatcagaaaataattctccgctatttccacgcgtcggaattgtacgcgctggggagatttgcggaaactatcgaagtccttaacggagagaaaaaatttccgccgtctctgttattaagggcaaaggcggaatttttttccggggatgttgataaagcggaaaaaacctgccgcagactgttgaaaaaacagccctcgttttatgagggaaaattgtaccttgcgagaattctgcgcgaaaagggcgattccgatgcggcggtaaaggtgactgagtcgctgttagctgattatccgcaggatatacgcgccctgcggtttgcggcggaacttgccggagagtcaagaaaatacgacgaggcggtgatttttctgaacaaggctgcggaactttccgcggaaagcgcccttgtttttctggacagggcgcgattgcgctgggtcgcgggaaaagggcaggaggctctggaggatttaagccgggcgaaggccatgctcccgtgggatactccgctgttacgtgtaattaataatcttgaaagaaccataaaggaggttatgaaatga

SEQ ID NO: 43786 - protein, 209 aa, Unknown
  Obtained from environmental sample
  SIGNAL (1)...(18)
  misc_feature (1)..(209): Xaa is any amino acid
MKNFVFICAFVSVFSSCSKTPDQKIILRYFHASELYALGRFAETIEVLNGEKKFPPSLLLRAKAEFFSGDVDKAEKTCRRLLKKQPSFYEGKLYLARILREKGDSDAAVKVTESLLADYPQDIRALRFAAELAGESRKYDEAVIFLNKAAELSAESALVFLDRARLRWVAGKGQEALEDLSRAKAMLPWDTPLLRVINNLERTIKEVMK

SEQ ID NO: 43787 - DNA, 1125 bp, Unknown
  Obtained from environmental sample
  misc_feature (1)..(1125): n is a, c, g, or t
gtggacaatggcagtaatataagcgcatatctatggtctgacggagatatgtattttggtaatttccttggtaataaattccatggttatagtatatacattgcctctcaaggggaaaccattaattattgcccaaaaaccaggtattacgtgggtaactattcaaatagtcaaaaaaacggaacaggcacttgctacgacgcgtcgggggcgcttatatactatggcgagtttaaagatggtaaacctgccggcacatatcctacaaccggtacttattcttcgtataagtttcaaacaataagttatacaaacggagacaaatatataggcgagacatataaagggaaaaaacatggctatggcgtatatgtttggaatgacgaaagtatgtggataggcggctggaaagacggagaaagagcggggaaaggaattgatatagcgtcggacggcagcttgcttcccggttactgggatgtcgaagcgcgttatgacacggcagttgcttctgcttcagagccgcccgccaaatccatatcatccggctcttccggatcatcttcaaactcgtctgcagcatccatgtcatcatcaggttttacttttaatgcggatggtacatcgacatttagtatgccgggatatgaatcgacggttaattctgttacaggttatggaactacaacttcaacgtgtcctgtttgtctcggagcaaagcaaatagaacaattgaaccccaattatggaatgatggtagctgatgctattagatatggctggcacggttattcacaatttatgtatataaagcaaaattgcgggttttgtcatggattgggtactgtaactacaagcggttatgttgataccagtcctaaatcttcgggcagttccggaagcggttcatattcaagcggttcaagcggcagttcttattcttctgcgtcttcatcttccggcagaagcaaacacgcgttatgcaatggaaccggtcaagtgttttcagcctattccgctgattatacagggaatgctcttaagaagtattgcgatatttgtgaaggaatgtattatccacattatcataagaaatgtccgggttgtaccaatggatacaattaa

SEQ ID NO: 43788 - protein, 374 aa, Unknown
  Obtained from environmental sample
  DOMAIN (109)...(131): MORN repeat
  misc_feature (1)..(374): Xaa is any amino acid
MDNGSNISAYLWSDGDMYFGNFLGNKFHGYSIYIASQGETINYCPKTRYYVGNYSNSQKNGTGTCYDASGALIYYGEFKDGKPAGTYPTTGTYSSYKFQTISYTNGDKYIGETYKGKKHGYGVYVWNDESMWIGGWKDGERAGKGIDIASDGSLLPGYWDVEARYDTAVASASEPPAKSISSGSSGSSSNSSAASMSSSGFTFNADGTSTFSMPGYESTVNSVTGYGTTTSTCPVCLGAKQIEQLNPNYGMMVADAIRYGWHGYSQFMYIKQNCGFCHGLGTVTTSGYVDTSPKSSGSSGSGSYSSGSSGSSYSSASSSSGRSKHALCNGTGQVFSAYSADYTGNALKKYCDICEGMYYPHYHKKCPGCTNGYN

SEQ ID NO: 43789 - DNA, 318 bp, Unknown
  Obtained from environmental sample
  misc_feature (1)..(318): n is a, c, g, or t
ttgaatattgggatactctatctctatatccgccaactggttattaccgattcccagcatttggcaatgacggtctctaacgtggagtcgatctggacgcttgaaaacggactgacggataatttctgtaaacgttaccaactgactgacagggaaaaagacattgttgaagttatgatgcgcggaaaaagcaacaaggaaattgccgatactctgttaatttcaatcaggacagtaggcgcgtatcttcaaaatgtctacaagaaaaccggcgcgctgaaccgctttgccctttattcgctgataaaaggggagtag

SEQ ID NO: 43790 - protein, 105 aa, Unknown
  Obtained from environmental sample
  DOMAIN (45)...(102): Bacterial regulatory proteins, luxR family
  misc_feature (1)..(105): Xaa is any amino acid
MNIGILYLYIRQLVITDSQHLAMTVSNVESIWTLENGLTDNFCKRYQLTDREKDIVEVMMRGKSNKEIADTLLISIRTVGAYLQNVYKKTGALNRFALYSLIKGE

SEQ ID NO: 43791 - DNA, 474 bp, Unknown
  Obtained from environmental sample
  misc_feature (1)..(474): n is a, c, g, or t
gtggcgaacaacaaagattggaagaaaacttattttagcgaaggcggcgcggcggcggattttaccgacgccgaaattgattcgatgttctcccgggttctggctcaggcttgcgccgaactgggaaaaatatcttccgtactgcttatcccgcctgacgtaacccgtttccattcgcaggccggcttccttaccggaatcgcctacagggaactgaccaaagccgggatcgcggtcaaggtgcttcccgctttgggaacccacgtccccctaacatcagccgaatgcgaacggatgtttccggacgtgccgcggtcgttgtttctcgtgcatgactggcgcaacgacgtggtcgagcttgcccgcattgaccgcagatggatagaaaaaaccaccgcgggcgcggtcagctatgactggccggttcaggtaaacaagatactgcgggacggcggatctcgtgccgaattctga

SEQ ID NO: 43792 - protein, 157 aa, Unknown
  Obtained from environmental sample
  misc_feature (1)..(157): Xaa is any amino acid
MANNKDWKKTYFSEGGAAADFTDAEIDSMFSRVLAQACAELGKISSVLLIPPDVTRFHSQAGFLTGIAYRELTKAGIAVKVLPALGTHVPLTSAECERMFPDVPRSLFLVHDWRNDVVELARIDRRWIEKTTAGAVSYDWPVQVNKILRDGGSRAEF

SEQ ID NO: 43793 - DNA, 1197 bp, Unknown
  Obtained from environmental sample
  misc_feature (1)..(1197): n is a, c, g, or t
gtggccaatatcggagcgcagggggaactcaaaaaatcggatatcctggaacgggccggaccaagggagatgatttacttttcccccgcccatgtgcacgccgggattgtaagctgcggcgggctgtgtccgggcataaatgacgtgatccgcgctgtagtacgctgcctgtggtaccgctacggggtaacgcggatttcgggtatacgctacggctataaaggttttctgcccgagtcccaatatccggtaaaaaccctgaacccggacactgttgacgatatacacaagttaggcggcactttcctgggcagcgcgcggggcggcggcaaggaagtcgtaaaaatcgtcgacgcgatggaaaagctcaacctcaatgtactgttcacaatcggcggtgacggcacccagagaggaaccctggatattgccgaagaagtgaaaaaacggcagcttaaaatcgccctcatcggcattcctaaaactgttgataatgacttctcaattatagaccggtcctttggcttccagacagcaattgaaaaagcgaccgaggtagtttcggcggcccacatggaggcatgctcggcgatgaacggcatcggcctggtaaaattgatgggacgcgagtccggatttatcgccgcctgtacagcgctggcaagccacgaggtaaatttcgtgcttatccccgaagtgccttttaacctggaaggctataacggattcctccaccaccttgaagaacgccttaaaaagcgcaaacacgccgtgatcatcgtcgcggaaggggcaatgcaggaacagcttctgaccgagaagaaaaccgacgccggcggcaacctgaaactggccgacgtaggcccctatatcagggacaggatcatcaagtactttgacgagaaaaaaattgatatcagccttaagtacatcgatccaagttatatgatacggtcggccccggcaaatcccgcggactccatttactgcgagcgccttggaaacgcggcggcgcacgcggcgatggcggggaaaaccaaggtgataatagggcttgtaaacaacaagtatgtgcatgtgccaatcaaggcggccattgccagcagacgccatgtcgatcccgaagggaacctctggcgcgatacgcttgacgctacccaccagcccgcgctgatggtgaacaagttcgaaaaataa

SEQ ID NO: 43794 - protein, 398 aa, Unknown
  Obtained from environmental sample
  DOMAIN (35)...(301): Phosphofructokinase
  misc_feature (1)..(398): Xaa is any amino acid
MANIGAQGELKKSDILERAGPREMIYFSPAHVHAGIVSCGGLCPGINDVIRAVVRCLWYRYGVTRISGIRYGYKGFLPESQYPVKTLNPDTVDDIHKLGGTFLGSARGGGKEVVKIVDAMEKLNLNVLFTIGGDGTQRGTLDIAEEVKKRQLKIALIGIPKTVDNDFSIIDRSFGFQTAIEKATEVVSAAHMEACSAMNGIGLVKLMGRESGFIAACTALASHEVNFVLIPEVPFNLEGYNGFLHHLEERLKKRKHAVIIVAEGAMQEQLLTEKKTDAGGNLKLADVGPYIRDRIIKYFDEKKIDISLKYIDPSYMIRSAPANPADSIYCERLGNAAAHAAMAGKTKVIIGLVNNKYVHVPIKAAIASRRHVDPEGNLWRDTLDATHQPALMVNKFEK

SEQ ID NO: 43795 - DNA, 489 bp, Unknown
  Obtained from environmental sample
  misc_feature (1)..(489): n is a, c, g, or t
ttgacgtcttttttacaatgcaaagaagaaggacttgattatgagcttgttatcgttggttcgagaaataacttccgatccggagataaaaaaacttcaaggcgtcttgacagtctggaaaggcacggaattattttttcaggttatataagcgatgccgaaaaatggaaactccttgcggaaagcgttcttttggtacagccttccctgtatgaaggattcggctaccctcctcttgaagccatgctctcgggaactcaagcgctcatttcggatataagcgtctttaaagaagtttattcggattttcccgtgcggttcttcaaagcgggagaccgacgcgacctgcatgataaattaacggaaattctatcgggtaaaaatccgcagactgtatatcttaacgatacgcagataaaaaagtatacttttgaaaagaccgtttcaattattttaaaggaattggaatccggcaggaatacccaatga

SEQ ID NO: 43796 - protein, 162 aa, Unknown
  Obtained from environmental sample
  DOMAIN (3)...(141): Glycosyl transferases group 1
  misc_feature (1)..(162): Xaa is any amino acid
MTSFLQCKEEGLDYELVIVGSRNNFRSGDKKTSRRLDSLERHGIIFSGYISDAEKWKLLAESVLLVQPSLYEGFGYPPLEAMLSGTQALISDISVFKEVYSDFPVRFFKAGDRRDLHDKLTEILSGKNPQTVYLNDTQIKKYTFEKTVSIILKELESGRNTQ

SEQ ID NO: 43797 - DNA, 1626 bp, Unknown
  Obtained from environmental sample
  misc_feature (1)..(1626): n is a, c, g, or t
gtggcccgcatactctccgagaagcgcaagatggactcgcccgaaggcgtcaccatcttagccagcgcggtgatagacgacatgctcggcatagtcgcgctaacggcggtgacgggccttatagcgtcgtccggcggggcggacgcggcggcggcgctcggcggagagtcggcgcacccggttctcaacgtaggcaaatcgatcgcggtctggctcttattcactacgcttggaatactcttcgccggacagctggcgagggcgataaagaaattcaagtcggtgacgtacatatccatcgtggcgctgggcttggcgctcattttggcgggcgtcttccaaaaggccggcctcgccatgatcatcggcgcgtacgtcgtggggctctcgctctccaagaccgaccttactgacacggtgcgcgacgcgctcgaagtggtgaacagcttcttcgtgccggtcttcttcgtggtcatgggaatgatggtcaacgtgaaggccgtgatgtccaaggacgtgctgctcttcggcgccgcgctgtcggcggccatgatagccgccaaggtgatcgggtgcggattccctacgctcttcttcaacttcaaccgcctgggcgctctgcgcataggcatgggcatggtcccccgcggcgaggtctccttcatcatcgccggcatcgggctctcctccggcgtgctcgaccagagcatgttcggcgccggagtgctcatggttctcgcctgcgccgttgtctccccgcccatagtctccacgctcttcagcagccacaaaaagggcgtcagaaaagaactgtacgtcagacagacggtgtccacgcccatagccgtgccgacccacgaactgacaggcctcctggaactgcgcctggtgcaggccttccgcgccgagggcttcttcatccacgccatctcactcgacagccacaacaccgtttaccacctgcgaaaaaacgccatccacatcaccctccacagcggatacagcagcttggaattcgagtcggacaaaaaggacgtgatcttagtaaaggccataacccacgaaacgctgctgcatataaacaacgcggtgaccggcgtgaaagacctgataaaaccggagaaaatgctcgaagacgttacagactccaagccgcgcacagactcgaaattcaaagaggccctctccccgttctgcatcataccgtcgctaaaagcctcctcgaagcaggaggttgtggagaagctcgtgggaatgctgcacgaacacggcctgataaacaaagagcacgacgacgcggtgaccgccgtgatggaacgcgaagcctccatgagcaccggaatgcagcacggcgtagccatgccgcacgccagaaccgacgccgtcgaccaaataacactggcggtaggactgtcgcgcaccggaatcaacttcgactcgctcgacggggagccgtctaaaatattcgtgctgatactgtcgcccgaaagcacggaaagcccgcatatacaggttttggctaacatatcggcgttgcttaatagcgaggagatgagagagaagttgttggcttgtaataatcaggaggagatacataagttttttatggggggacttgggaactaa

SEQ ID NO: 43798 - protein, 541 aa, Unknown
  Obtained from environmental sample
  DOMAIN (1)...(257): Sodium/hydrogen exchanger family
  misc_feature (1)..(541): Xaa is any amino acid
MARILSEKRKMDSPEGVTILASAVIDDMLGIVALTAVTGLIASSGGADAAAALGGESAHPVLNVGKSIAVWLLFTTLGILFAGQLARAIKKFKSVTYISIVALGLALILAGVFQKAGLAMIIGAYVVGLSLSKTDLTDTVRDALEVVNSFFVPVFFVVMGMMVNVKAVMSKDVLLFGAALSAAMIAAKVIGCGFPTLFFNFNRLGALRIGMGMVPRGEVSFIIAGIGLSSGVLDQSMFGAGVLMVLACAVVSPPIVSTLFSSHKKGVRKELYVRQTVSTPIAVPTHELTGLLELRLVQAFRAEGFFIHAISLDSHNTVYHLRKNAIHITLHSGYSSLEFESDKKDVILVKAITHETLLHINNAVTGVKDLIKPEKMLEDVTDSKPRTDSKFKEALSPFCIIPSLKASSKQEVVEKLVGMLHEHGLINKEHDDAVTAVMEREASMSTGMQHGVAMPHARTDAVDQITLAVGLSRTGINFDSLDGEPSKIFVLILSPESTESPHIQVLANISALLNSEEMREKLLACNNQEEIHKFFMGGLGN

SEQ ID NO: 43799 - DNA, 708 bp, Unknown
  Obtained from environmental sample
  misc_feature (1)..(708): n is a, c, g, or t
gtggatgaagaagccctcggcgcggaaggcctgcaccaggcgcagttccaggaggcctgtcagttcgtgggtcggcacggctatgggcgtggacaccgtctgtctgacgtacagttcttttctgacgccctttttgtggctgctgaagagcgtggagactatgggcggggagacaacggcgcaggcgagaaccatgagcactccggcgccgaacatgctctggtcgagcacgccggaggagagcccgatgccggcgatgatgaaggagacctcgccgcgggggaccatgcccatgcctatgcgcagagcgcccaggcggttgaagttgaagaagagcgtagggaatccgcacccgatcaccttggcggctatcatggccgccgacagcgcggcgccgaagagcagcacgtccttggacatcacggccttcacgttgaccatcattcccatgaccacgaagaagaccggcacgaagaagctgttcaccacttcgagcgcgtcgcgcaccgtgtcagtaaggtcggtcttggagagcgagagccccacgacgtacgcgccgatgatcatggcgaggccggccttttggaagacgcccgccaaaatgagcgccaagcccagcgccacgatggatatgtacgtcaccgacttgaatttctttatcgccctcgccagctgtccggcgaagagtattccaagcgtagtgaataa

SEQ ID NO: 43800 - protein, 235 aa, Unknown
  Obtained from environmental sample
  misc_feature (1)..(235): Xaa is any amino acid
MDEEALGAEGLHQAQFQEACQFVGRHGYGRGHRLSDVQFFSDALFVAAEERGDYGRGDNGAGENHEHSGAEHALVEHAGGEPDAGDDEGDLAAGDHAHAYAQSAQAVEVEEERRESAPDHLGGYHGRRQRGAEEQHVLGHHGLHVDHHSHDHEEDRHEEAVHHFERVAHRVSKVGLGEREPHDVRADDHGEAGLLEDARQNERQAQRHDGYVRHRLEFLYRPRQLSGEEYSKRSE

SEQ ID NO: 43801 - DNA, 888 bp, Unknown
  Obtained from environmental sample
  misc_feature (1)..(888): n is a, c, g, or t
gtgcggattccctacgctcttcttcaacttcaaccgcctgggcgctctgcgcataggcatgggcatggtcccccgcggcgaggtctccttcatcatcgccggcatcgggctctcctccggcgtgctcgaccagagcatgttcggcgccggagtgctcatggttctcgcctgcgccgttgtctccccgcccatagtctccacgctcttcagcagccacaaaaagggcgtcagaaaagaactgtacgtcagacagacggtgtccacgcccatagccgtgccgacccacgaactgacaggcctcctggaactgcgcctggtgcaggccttccgcgccgagggcttcttcatccacgccatctcactcgacagccacaacaccgtttaccacctgcgaaaaaacgccatccacatcaccctccacagcggatacagcagcttggaattcgagtcggacaaaaaggacgtgatcttagtaaaggccataacccacgaaacgctgctgcatataaacaacgcggtgaccggcgtgaaagacctgataaaaccggagaaaatgctcgaagacgttacagactccaagccgcgcacagactcgaaattcaaagaggccctctccccgttctgcatcataccgtcgctaaaagcctcctcgaagcaggaggttgtggagaagctcgtgggaatgctgcacgaacacggcctgataaacaaagagcacgacgacgcggtgaccgccgtgatggaacgcgaagcctccatgagcaccggaatgcagcacggcgtagccatgccgcacgccagaaccgacgccgtcgaccaaataacactggcggtaggactgtcgcgcaccggaatcaacttcgactcgctcgacggggagccgtctaa

SEQ ID NO: 43802 - protein, 295 aa, Unknown
  Obtained from environmental sample
  misc_feature (1)..(295): Xaa is any amino acid
MRIPYALLQLQPPGRSAHRHGHGPPRRGLLHHRRHRALLRRARPEHVRRRSAHGSRLRRCLPAHSLHALQQPQKGRQKRTVRQTDGVHAHSRADPRTDRPPGTAPGAGLPRRGLLHPRHLTRQPQHRLPPAKKRHPHHPPQRIQQLGIRVGQKGRDLSKGHNPRNAAAYKQRGDRRERPDKTGENARRRYRLQAAHRLEIQRGPLPVLHHTVAKSLLEAGGCGEARGNAARTRPDKQRARRRGDRRDGTRSLHEHRNAARRSHAARQNRRRRPNNTGGRTVAHRNQLRLARRGAV

SEQ ID NO: 43803 - DNA, 420 bp, Unknown
  Obtained from environmental sample
  misc_feature (1)..(420): n is a, c, g, or t
atggaaattgaattaaggcttgaagaagaaaaagactataaaacagtagaaaatataaccagagaagcattttggaataattatgttcccggttgtgatgaacatttacttgctcataatttaaggaaaacaaatgtatttataaaggaattagattttgtagcactatataataacaaaattgtcggaaatattatgtatgctaaaagcacaattaaaaacaataatttagaatatactgtattaacatttggcccattaagcgtattgcctgaatatcagaataaaggaattggcggaaaattgataaatcataccatagaattatcaaaagaaatgggatataaaggcataataatatatggagaccctgaatattataaaaaattcggattaaagaatcaaaagaatataaaataa

SEQ ID NO: 43804 - protein, 139 aa, Unknown
  Obtained from environmental sample
  DOMAIN (53)...(133): Acetyltransferase (GNAT) family
  misc_feature (1)..(139): Xaa is any amino acid
MEIELRLEEEKDYKTVENITREAFWNNYVPGCDEHLLAHNLRKTNVFIKELDFVALYNNKIVGNIMYAKSTIKNNNLEYTVLTFGPLSVLPEYQNKGIGGKLINHTIELSKEMGYKGIIIYGDPEYYKKFGLKNQKNIK

SEQ ID NO: 43805 - DNA, 360 bp, Unknown
  Obtained from environmental sample
  misc_feature (1)..(360): n is a, c, g, or t
gtgcgaagtaaaggcgaaagtgtaccgctggagaggaagggcgaaggtggttcattgcaagacctctccagttacaagatactggataaaaagacggcgaagaatttcgctcacttaacggtcaaccattcaatggggcaatacagcgcgggaaacggcgttgacactaacggcatagagaatttttggtcaattctcaagaggatgcattacggtacgtatcacagcatgagcgagaagcacctccagaactacgtgaataagtgcgcgttcagagcgaatcaccgaggagacgccggagagttcgagaagttgctgaaacaaaccctgatcgccgggatggataaaagagcggcctag

SEQ ID NO: 43806 - protein, 119 aa, Unknown
  Obtained from environmental sample
  misc_feature (1)..(119): Xaa is any amino acid
MRSKGESVPLERKGEGGSLQDLSSYKILDKKTAKNFAHLTVNHSMGQYSAGNGVDTNGIENFWSILKRMHYGTYHSMSEKHLQNYVNKCAFRANHRGDAGEFEKLLKQTLIAGMDKRAA

SEQ ID NO: 43807 - DNA, 843 bp, Unknown
  Obtained from environmental sample
  misc_feature (1)..(843): n is a, c, g, or t
ttgatcagatcggccgagcggcacgagacattggttatagggtatctaaacggttttaaggaggctgtgggcggcggtttctggtttgagcctttcgccgacagggaagacaaattacgttccaattactatgtgttctttgataaatcaacaggcaggatacgttttgacgataccttcgattcggatgaatacgattatcacggcaagagctggtatcgggagttaattggcgggataacagaagcataccaggtggcgtggactaaaccgtatgtcgacgactcgggctcgttcagtcttatgacgacggccggcgcgggcatatatcttcaaaacaagctgataggcgtttccacaatagactgggaaatagataaagtaatcacggaattgaccgcgataaaacctacaaaaaacagttttattttattgtgcgcgcctgaacatgattatgtaatttccagtacgcgcgccaacattgataccggcgcttcaataaaaagccttccctgggatataaacgccgattcttttgcgttagacgacattcaatatctgcgcttcgggcgttacatggataacggctggctgttatcggtgcaaattccaaaaatcgagatttttgacgaggtggaagagcagaacaaccgttattccctgctcatagcgtttgcggcggtcgttatgatcggactcgcgtattacctcatttcanaatttgtcaacgatccgatacagcggctgacggaggatgtctcgcggcttgcgcttggcaatctggatacgcgcattgaaataaaatcaaatgatgaattgggcctgctggcccaggccttttaa

SEQ ID NO: 43808 - protein, 280 aa, Unknown
  Obtained from environmental sample
  DOMAIN (220)...(280): HAMP domain
  misc_feature (1)..(280): Xaa is any amino acid
MIRSAERHETLVIGYLNGFKEAVGGGFWFEPFADREDKLRSNYYVFFDKSTGRIRFDDTFDSDEYDYHGKSWYRELIGGITEAYQVAWTKPYVDDSGSFSLMTTAGAGIYLQNKLIGVSTIDWEIDKVITELTAIKPTKNSFILLCAPEHDYVISSTRANIDTGASIKSLPWDINADSFALDDIQYLRFGRYMDNGWLLSVQIPKIEIFDEVEEQNNRYSLLIAFAAVVMIGLAYYLISXFVNDPIQRLTEDVSRLALGNLDTRIEIKSNDELGLLAQAF

SEQ ID NO: 43809 - DNA, 1263 bp, Unknown
  Obtained from environmental sample
  misc_feature (1)..(1263): n is a, c, g, or t
atgatgaattgggcctgctggcccaggccttttaataaaatgacttccgacctgaaaaaatccattgatgaaagcgcccgcgagcgcgcggaaaaagaacggattggcgccgagcttggcgtggcggcggcgatacaggccagtatgcttcccaatatttttccgcccttcccggaaagaaccgaatttgatctgtacgcctccatgattccggcaaaggaggttggcggtgatttttatgatttctatttaattgacaaggacaatctggcggtggttatcgcggatgtttcaggcaagggcgttcccgccgcgttattcatgataattacgaaaaccatgatcaaggacagcagtccgggtaacagcctgaaagatatttttgaaactgtaaataaaaaattatgtgaaggcaatgaagcggatatgttcgttacggcgtttatgggtatttacaatattcccagcggaagatttgtgtttgtcaacgcggggcataatccgccgcttataaaaaaacacggaagcggttatgagtttctggaaacggaacccggttatgttctggcatggatgaagaactcgcaatacaaggaaaaagaaatcagccttgaaccgggcgatgttctgtatttatatacggacggcgtaactgaggcgatgaaccggcggaaggaacttttcggcgataagcggctgtttgacgcgctgaacgcaaacaggaacgctccgcttaaagatctgctgccggccatcaagagggaagttgataaattcgaggatggaacagagcaggccgacgatattaccatgcttgccctgaagataaacagcgagagttccggtgaagagccggaagacatgatgaaaaaactggaacttgaagcaaaccttgaaaatctgaataaggcgcttgcctttgtcaatacggagttggaacaacacgaatgtcccgaggatatacagggaaaaatagaaattgccgtggaagaaatttttataaatatcgcgaattacgcctacagcccgggtaatggagacgctgtcatatttatttccgttaccgacgaaatagtaatccggtttgaagatacgggcaaaccttataacccccttgagaagcccgagccggatttggacaaaccactgatggagcgtgacataggcggtttgggcgttttccttgtaaagaagctgatggacaatgttgaatatagccgggttgggaataagaatgtgctggtgatgacaaaaacaaaatag

SEQ ID NO: 43810 - protein, 420 aa, Unknown
  Obtained from environmental sample
  DOMAIN (86)...(277): Stage II sporulation protein E (SpoIIE)
  misc_feature (1)..(420): Xaa is any amino acid
MMNWACWPRPFNKMTSDLKKSIDESARERAEKERIGAELGVAAAIQASMLPNIFPPFPERTEFDLYASMIPAKEVGGDFYDFYLIDKDNLAVVIADVSGKGVPAALFMIITKTMIKDSSPGNSLKDIFETVNKKLCEGNEADMFVTAFMGIYNIPSGRFVFVNAGHNPPLIKKHGSGYEFLETEPGYVLAWMKNSQYKEKEISLEPGDVLYLYTDGVTEAMNRRKELFGDKRLFDALNANRNAPLKDLLPAIKREVDKFEDGTEQADDITMLALKINSESSGEEPEDMMKKLELEANLENLNKALAFVNTELEQHECPEDIQGKIEIAVEEIFINIANYAYSPGNGDAVIFISVTDEIVIRFEDTGKPYNPLEKPEPDLDKPLMERDIGGLGVFLVKKLMDNVEYSRVGNKNVLVMTKTK

SEQ ID NO: 43811 - DNA, 1695 bp, Unknown
  Obtained from environmental sample
  misc_feature (1)..(1695): n is a, c, g, or t
atggcaattgacccgctcaatcccctgattatacaaagcgataagaccctgcttttggatgtccattctgtgcgtgccgaggacgccagggctgcgattttgcctttttctgagcttgaaaaatcgccggaacatatccacacataccacataacccctctttcgctctggaacgccgccagcgccgggtttacaccggccaatgtggcacaggttttgaacgagtacacgcgctacaacattccctcaggcattacagagagtttcgcggacaccatgtccagatacggaaaaatccgcatcgttgccgctgtcgaaggaaagacggattttctctttttaaccgcacaggacaaagccgtgctggccgaaatcggcgcgtcaaaagccctgggaaagtaccttgaaaaaacttcttcggggttcacccttaagctcgttgacaggggaagcgtcaaacgggagctgatccgcataggctggcctgtaaaggacgaagctccctttgtagacggggaggccctggaattgagccttagggaaaccagcgcatcttccctgccttttgtcaaaagggattaccaaatggaagccgccagggcggtgctgggcgacggcgggccgggtaccggctacggggtggtggtgctgccatgcggctcgggcaagaccatcgtcggcatgatcatcatggccatgctaaagaccaacacgctgatactgacgacaaacgtggcggccgtccaccaatggatggaagagcttctggacaagaccgacttaaaaagcgaagagattgccgagtacaccgggaactcaaaatccgtcgcccccgttaccgtggctacctatcagatcatcacctggaggccggacaaggattcggagtttccgcactttaagcttttcagggagcgtccctgggggcttatcatttacgacgaggttcaccttctgcccgcgccggtgttccgcgtaacggcggagctgcaggctgtaaggcggctagggctcaccgccacgctggtcagggaagacggcgaggaggacgcggttttcagccttgtggggcccaagcgctacgatgtgccgtggaaggacttggagaaacaggngtggatcgccggggctttctgcactgaaatccgcatcgacatgcctgagaatttaaaaataccttacgcgatagctacccggcgcgagaagtaccgcattgcaagcgaaaatcccctgaaaaacgaagcggtcgttcaattgatcgataaccaccgggacgatcagattcttgtgataggccagtacatcagccagctggaaagccttgcccgccttctaaaagcgccccttataaccggcaaagcgcctaacaacgaaagagaacgcatctacggtgcgttcaggagaggggaagtaagggtcattgtcgtgagcaaggtggccaattttgccattgatttgccggacgcttcaatggcgattcaggtgtccggttcctttgggtcgcgccaggaagaagcccagcgcctgggccgcatccttcgccccaaggacaggaactcgtggttttacacactggtttcacgctatactgtggaggaggaatttgccgccaaccgccagcaatttctggcggaacagggctacaagtattctatccagcactggacagcggatgaaatggaggcggtcgtatga

SEQ ID NO: 43812 - protein, 564 aa, Unknown
  Obtained from environmental sample
  DOMAIN (192)...(350): DEAD/DEAH box helicase
  misc_feature (1)..(564): Xaa is any amino acid
MAIDPLNPLIIQSDKTLLLDVHSVRAEDARAAILPFSELEKSPEHIHTYHITPLSLWNAASAGFTPANVAQVLNEYTRYNIPSGITESFADTMSRYGKIRIVAAVEGKTDFLFLTAQDKAVLAEIGASKALGKYLEKTSSGFTLKLVDRGSVKRELIRIGWPVKDEAPFVDGEALELSLRETSASSLPFVKRDYQMEAARAVLGDGGPGTGYGVVVLPCGSGKTIVGMIIMAMLKTNTLILTTNVAAVHQWMEELLDKTDLKSEEIAEYTGNSKSVAPVTVATYQIITWRPDKDSEFPHFKLFRERPWGLIIYDEVHLLPAPVFRVTAELQAVRRLGLTATLVREDGEEDAVFSLVGPKRYDVPWKDLEKQXWIAGAFCTEIRIDMPENLKIPYAIATRREKYRIASENPLKNEAVVQLIDNHRDDQILVIGQYISQLESLARLLKAPLITGKAPNNERERIYGAFRRGEVRVIVVSKVANFAIDLPDASMAIQVSGSFGSRQEEAQRLGRILRPKDRNSWFYTLVSRYTVEEEFAANRQQFLAEQGYKYSIQHWTADEMEAVV

SEQ ID NO: 43813 - DNA, 732 bp, Unknown
  Obtained from environmental sample
  misc_feature (1)..(732): n is a, c, g, or t
gtgtatacacagtcgcggcaggtacgcgaagaaattgggattatctttcagcaaccgagccttgacgagaacctcagcgtagaggaaaacatccgcttccacgcctgcctttacggtatgtgtggctaccgcccctcttttaagctgatgcctgtggcataccgtaaaaaagtactggaactggcagatatggtcggccttgccgatgtgttagggaagccagtcaagaaactttcaggcggaatgcagcgaaaactggaaattatccgcagcctcattcacacgccacgggtactctttcttgacgagccgactcaggggcttgacgcggtaagccgtcgtggtctgtgggaatacattaacgagacgcgcagccgttacgggacaaccgtttttcttacgacgcattacattgacgaggccgagaatgtggacactgtgtgccttatcaataacggaaaaatcgcgtcttgttgtcctcccgctgaattgaaacgaagcttactgcggcatgaacttattttagatgccgacgacaggacggcgctgacaaacgagctttccgcgcttggccttcagtattcgctgaacgggcatatcgttgttccttacagtgaatctccgcaggaaattatttcgcgaataaaaacaaaattgaccgtattaaaaatacacgaaccttcgcttgaagacgcgtatattgagtttttaacaaagcagaaggagatatag

SEQ ID NO: 43814 - protein, 243 aa, Unknown
  Obtained from environmental sample
  DOMAIN (3)...(153): ABC transporter
  misc_feature (1)..(243): Xaa is any amino acid
MYTQSRQVREEIGIIFQQPSLDENLSVEENIRFHACLYGMCGYRPSFKLMPVAYRKKVLELADMVGLADVLGKPVKKLSGGMQRKLEIIRSLIHTPRVLFLDEPTQGLDAVSRRGLWEYINETRSRYGTTVFLTTHYIDEAENVDTVCLINNGKIASCCPPAELKRSLLRHELILDADDRTALTNELSALGLQYSLNGHIVVPYSESPQEIISRIKTKLTVLKIHEPSLEDAYIEFLTKQKEI

SEQ ID NO: 43815 - DNA, 342 bp, Unknown
  Obtained from environmental sample
  misc_feature (1)..(342): n is a, c, g, or t
gtgcacataacatatgttgaatgggttctttgcatagcggaagagaaaacgaaaagggcgatgaccatgaataaaccggtcattgccgtcgggaacctgaccaagcggtacaagggtgcgggaaaacctggggtggacagtatcagtttttccgttggcgaaggggaattctttgccttcctggggcccaagggcgccggaaaaaagacaacgatctctatcctgaccacaacgctttccaaaacttccggggaacttcaaatggccgggattcgatgtgtatacacagtcgcggcaggtacgcgaagaaattgggattatctttcagcaaccgagccttga

SEQ ID NO: 43816 - protein, 113 aa, Unknown
  Obtained from environmental sample
  misc_feature (1)..(113): Xaa is any amino acid
MHITYVEWVLCIAEEKTKRAMTMNKPVIAVGNLTKRYKGAGKPGVDSISFSVGEGEFFAFLGPKGAGKKTTISILTTTLSKTSGELQMAGIRCVYTVAAGTRRNWDYLSATEP

SEQ ID NO: 43817 - DNA, 864 bp, Unknown
  Obtained from environmental sample
  misc_feature (1)..(864): n is a, c, g, or t
atgaaccatctggaaacctgcggtctggtaaaaatggattttctgggactcaagacgctggacgttatcaaacacaccgaagaaattatccgccgcaggggaggggaattcgctaacttcaaagtggaaaacgcccccgaaaatgatgaggcgactttcaaaatgttaggtgaaggacagagttttgaaatctttcagtttgaatctgacggaatgcgcaatattcttaaacaggtaaaacccggcaaaattgaagaccttatcgcgttgaacgcgctgtaccgtcccggccctatggcttttatcccccagtttgttgagtcaaaaaccggacggcaggctatccattatcccgatccccgtctggaagacgtgctcaaagaaacatacggcgtcattgtatatcaggaacaggttatgcaggtggcacggattatcgccggttacagtttgggacaggccgatatactccgacgggcaatgggaaaaaagaaaaaagaaattattgacgcggaaaaaattaattttcttgaaggcgcggagcggcagggctattcaaaaaccaaagccggtcaaatttatgatatactggttccttttgccggttacggctttaacaaaagtcacgcggcggcgtattcggtgatcgcttaccacaccgcctatcttaaagccaattttcccgcggaatttatggcagccaatcttaccaatgagattcacagtactaataaggaaaaattatctgaatgtattgacgaggcccgcagaatgggcattgccattgatccgcccgatgttaaccattccgaaaactttttaccattgtggacgggcgtatcatttacggacttttggggataa

SEQ ID NO: 43818 - protein, 287 aa, Unknown
  Obtained from environmental sample
  DOMAIN (1)...(184): Bacterial DNA polymerase III alpha subunit
  misc_feature (1)..(287): Xaa is any amino acid
MNHLETCGLVKMDFLGLKTLDVIKHTEEIIRRRGGEFANFKVENAPENDEATFKMLGEGQSFEIFQFESDGMRNILKQVKPGKIEDLIALNALYRPGPMAFIPQFVESKTGRQAIHYPDPRLEDVLKETYGVIVYQEQVMQVARIIAGYSLGQADILRRAMGKKKKEIIDAEKINFLEGAERQGYSKTKAGQIYDILVPFAGYGFNKSHAAAYSVIAYHTAYLKANFPAEFMAANLTNEIHSTNKEKLSECIDEARRMGIAIDPPDVNHSENFLPLWTGVSFTDFWG

SEQ ID NO: 43819 - DNA, 708 bp, Unknown
  Obtained from environmental sample
  misc_feature (1)..(708): n is a, c, g, or t
atgaaagataatacatcgccaggcttttcctgtaagtcaatactttttgacgcttttaagtattcgatacccgtactgcttggctatttaaccctcggcattgcttttggcttagttgctacagggactggttatccgtggtggcttgccttttcaatgagcctgtggatgtatgccggagcgggacagtttttcgccattgggctttttgctgcggggacgaccatctgggaagcctgcctaatacagctcgtactgaatatccggcatgcggcgtatagcttttccatgctgaataaattttccgcctcttttaagccttaccttattttttccctgagcgatgaaaccttcgcccttttttcatccatggcagatttgccggaagaaaaaaagcgtctttttatggcatatgtcgccgttttggatcaatcttactgggtggggggtacgcttttgggtgccatcgcaggagccgttatcccctttgacatgaaggggataagttttgccctaaccgccctttttgtggttctaatgatggagcaaataaagagggtaaagaaggcccggcgtgtttattgtttcgaccgatgccgccctgctgggggtatacttcttgccgggtgcgatctcccttctggccgcccttgctttggcgcttgtactttcggccatagtagagcgcaactgtcttcgtgcgagtga

SEQ ID NO: 43820 - protein, 235 aa, Unknown
  Obtained from environmental sample
  DOMAIN (23)...(162): AzlC protein
  misc_feature (1)..(235): Xaa is any amino acid
MKDNTSPGFSCKSILFDAFKYSIPVLLGYLTLGIAFGLVATGTGYPWWLAFSMSLWMYAGAGQFFAIGLFAAGTTIWEACLIQLVLNIRHAAYSFSMLNKFSASFKPYLIFSLSDETFALFSSMADLPEEKKRLFMAYVAVLDQSYWVGGTLLGAIAGAVIPFDMKGISFALTALFVVLMMEQIKRVKKARRVYCFDRCRPAGGILLAGCDLPSGRPCFGACTFGHSRAQLSSCE

SEQ ID NO: 43821 - DNA, 894 bp, Unknown
  Obtained from environmental sample
  misc_feature (1)..(894): n is a, c, g, or t
atgaagatcccctttggcatagcccaaataggcaaggctttccgcaacgagattgtcaccaagaactttattttccgcacctgcgaatttgagcagatggaaatgcagttttttgtaaagccgggcagcgacgacaaatggttcaacgaatggagaaaacggcgctgggcctattacgaaaagctgggggtcaaaatggatcatctccgctggcaccagcacggtccggacgaactggcccattacgcaaaggacgcatacgacatcgaatacctgtttcccatgggctggagggaactggaaggcgtgcataaccgtacaaattacgatcttaaccgccatacccaattctccggcaaagatatgcagtatatcgaccaggacaataacaacgaacgctacatcccctacatcattgaaacttcagcgggccttacacggaatgtgctgatgatcctctgcgacgcctacgatgaagaatatgtcccttctgaaaaaaagtcgggcagttccgaaggaactgcaagcggaaccgtaggttccgccgacgattggcggactgtgctgcgtttccatccgagcctcgctcctgtcactgtcgcggtactacccctaatgaaaaaagacggccttgcggaactggcacaggacatacgccgcgatttaaaagaagattttgcgaccgattacgatcagtcgggggccatcggccgccgctaccgtcggcaggacgaggcgggtacgcctttctgcgtaaccgttgactaccagtccaaagacgacggcactgtcaccctgaggttccgggattccatggaacaagtcagggtaccgaaatcggaactctcaacgcggctgcgccaggagataaaggaatacaagagggttaagtaa

SEQ ID NO: 43822 - protein, 297 aa, Unknown
  Obtained from environmental sample
  DOMAIN (199)...(289): Anticodon binding domain
  misc_feature (1)..(297): Xaa is any amino acid
MKIPFGIAQIGKAFRNEIVTKNFIFRTCEFEQMEMQFFVKPGSDDKWFNEWRKRRWAYYEKLGVKMDHLRWHQHGPDELAHYAKDAYDIEYLFPMGWRELEGVHNRTNYDLNRHTQFSGKDMQYIDQDNNNERYIPYIIETSAGLTRNVLMILCDAYDEEYVPSEKKSGSSEGTASGTVGSADDWRTVLRFHPSLAPVTVAVLPLMKKDGLAELAQDIRRDLKEDFATDYDQSGAIGRRYRRQDEAGTPFCVTVDYQSKDDGTVTLRFRDSMEQVRVPKSELSTRLRQEIKEYKRVK

SEQ ID NO: 43823 - DNA, 1164 bp, Unknown
  Obtained from environmental sample
  misc_feature (1)..(1164): n is a, c, g, or t
gtggcttctgtgtctattcgcctaaaaacaatttttatcctaattgcgacagtagtggttattaccgtctccacgctgggtataagcctgtttgtcagccaataccgttttaatgaaactgtccaaaccactcttcaattcatgagcagaatcgcatcgggattgttaacatccgaaattggaagacttaaagaagaagtcaaatttaccgcagagcaaataagaaaatacgacctaagtatcctagaaaaccaaatggaacaggactctccctatttaacgctttcagtgcttacccgggaaggcgtcatcctgcatgcgggagatcccgatgccaggccgctttcaggaggcagggaaaatgcctatatccaacgggcatttggcggggaaactattttttcaactaccacttatagtccgtcggggaagcttataacaagaattctgacgcccattgatgatgatcatatccttgtcgccacgcttcccggattgtatttatccaactttctttctccctataaagtatgggaaacgggtaacatttttgtcattgaccatgaaggggtagccgtcgccgtaaaccagtatgattaccgggtacaggaacggcataactatattgactggggaaaaagggatagagcataccagaagatgggtgcggttttccagtacattattgaaaacaaggagggcattaagcaatacccctataacgggtccgagcggtactgcgcctttgataccgtctacgggaccgacaactggtctgtattgataagcgccccgttttcggaaagcccccttacccatatcaggcagatgctctttatctgcgccgcgataattatggccctgggggtaatcacggcgctgctggccgccaacagcatttcggccccttatgaaaaaatgacagaactgagaagcaccgccgaagccgcgtccgcttcaaaaacccgcttcctcgcgaatatgagccatgaaatgcgaacgccgcttaacgccattatcgggctttcggaactggaactgggatcagcgaaactgcagggggaatcttttaccaatgtcgaaaaaatctatacggcgggcatgacgcttctggggatcataaatgatctttggacaatccaaaaagaatccgactcgcgataa

SEQ ID NO: 43824 - protein, 387 aa, Unknown
  Obtained from environmental sample
  SIGNAL (1)...(27)
  DOMAIN (320)...(386): His Kinase A (phosphoacceptor) domain
  misc_feature (1)..(387): Xaa is any amino acid
MASVSIRLKTIFILIATVVVITVSTLGISLFVSQYRFNETVQTTLQFMSRIASGLLTSEIGRLKEEVKFTAEQIRKYDLSILENQMEQDSPYLTLSVLTREGVILHAGDPDARPLSGGRENAYIQRAFGGETIFSTTTYSPSGKLITRILTPIDDDHILVATLPGLYLSNFLSPYKVWETGNIFVIDHEGVAVAVNQYDYRVQERHNYIDWGKRDRAYQKMGAVFQYIIENKEGIKQYPYNGSERYCAFDTVYGTDNWSVLISAPFSESPLTHIRQMLFICAAIIMALGVITALLAANSISAPYEKMTELRSTAEAASASKTRFLANMSHEMRTPLNAIIGLSELELGSAKLQGESFTNVEKIYTAGMTLLGIINDLWTIQKESDSR

SEQ ID NO: 43825 - DNA, 564 bp, Unknown
  Obtained from environmental sample
  misc_feature (1)..(564): n is a, c, g, or t
gtgggcgtgcgtcccaatacctcgctcctgaacggaatagcgaagattgaccgcggcatcatcgtaaacggaaaatcggaaacaagcgctcaggacatttacgccgcgggcgactgtacccaaacgcttgacgtgtcaagcggtcaaaataaagtcatggcgcttttgccaaacgcctatatgcagggcgagtgcgccggaataaacatggcggggggcggtgataatggcggcgcacgtttcgacagggcgatacccatgaacgccatcggattcttaggtctgcacatcattacggcgggcaactacgacggacaggtatatgtcgaaggcaatacttccggtaccggcgaagccgcttataaacgcctgttttacagcgataataagttgaacgggtatatccttattggcaacgtggaaaaagcggggatttatacaaaccttatccgcgagcgcgttccgcttaacaccatcgacttcgcgctcgtctgtgaaaaaccggggcttatggcgtttactaaagaagccagaatggaaaaactgggaaaagcggcctcctaa

SEQ ID NO: 43826 - protein, 187 aa, Unknown
  Obtained from environmental sample
  misc_feature (1)..(187): Xaa is any amino acid
MGVRPNTSLLNGIAKIDRGIIVNGKSETSAQDIYAAGDCTQTLDVSSGQNKVMALLPNAYMQGECAGINMAGGGDNGGARFDRAIPMNAIGFLGLHIITAGNYDGQVYVEGNTSGTGEAAYKRLFYSDNKLNGYILIGNVEKAGIYTNLIRERVPLNTIDFALVCEKPGLMAFTKEARMEKLGKAAS

SEQ ID NO: 43827 - DNA, 1146 bp, Unknown
  Obtained from environmental sample
  misc_feature (1)..(1146): n is a, c, g, or t
atgacggcttatttggttttacagaacggcatcgtaatgaaaggcaattctttcggcagccagggcgaaattaccgggagaagtggtgtttgccaccggtatgaccggctatctggaaaccctgacccgaccagttattacgggcagattgtcctgcaaacttttccccttatcggaaattacggcgttatcccgcccgattttgaaagcgccaatgtaggggcaagagcgtatattgtcaaacatccgtgcaaaaacccgtcaaacttccggtgtgaaggcgctcttgacgattttttaaaaaaacgcggtattacaggattatacggaattgatacaagggcgcttacaagaatcattcgggaaaacggcgttatgaacggaaaaattacggcggcgcctcccacaccggcggacattgcggaaataaaagcatactcaattaaaaacgcggtcgccgccgtgtcatcaaagtcggttacaaaattgctcccttctacaggctcagggagcaaccttctcccaagctcagggagcgcttgtgcagtggtcgctgagcctgtcgaagcgacggattcaaagagcgattctccacatgcgtcgaagcggcgagtggcgctgttggatttcggcgcaaagcgagggatagctaacgcgctggcggcgcggggctgcgaggtgtggacattccctcatgacacaagcgcgcgggaaatattgaaaatcaaaccggatgggatcatgctcagtaacggtcccggagacccggcggaaagcgccaataacggaattatcgagacgctccgtattctgcaaaagagcggggttacaattttcggcatatgcctgggacatcaactgctggcgctggcaaacggctattcaacccgcaaactaaaattcggacacagaggggcaaatcaaccggttaaagaattggctaccgggcgcgtgtacatcaccagtcaaaatcacggatacgctgttgttgcagataacggttcttttgtaaacgtaaacgacggcacttgcgaaggacttgattacggaaaatcattttccgtacagtttcaccccgaagcgtgcggcggtccgttggatacgtcatttttgtttgaccgatttatagaaaggatgaataaatga

SEQ ID NO: 43828 - protein, 381 aa, Unknown
  Obtained from environmental sample
  DOMAIN (205)...(360): Peptidase C26
  misc_feature (1)..(381): Xaa is any amino acid
MTAYLVLQNGIVMKGNSFGSQGEITGRSGVCHRYDRLSGNPDPTSYYGQIVLQTFPLIGNYGVIPPDFESANVGARAYIVKHPCKNPSNFRCEGALDDFLKKRGITGLYGIDTRALTRIIRENGVMNGKITAAPPTPADIAEIKAYSIKNAVAAVSSKSVTKLLPSTGSGSNLLPSSGSACAVVAEPVEATDSKSDSPHASKRRVALLDFGAKRGIANALAARGCEVWTFPHDTSAREILKIKPDGIMLSNGPGDPAESANNGIIETLRILQKSGVTIFGICLGHQLLALANGYSTRKLKFGHRGANQPVKELATGRVYITSQNHGYAVVADNGSFVNVNDGTCEGLDYGKSFSVQFHPEACGGPLDTSFLFDRFIERMNK

SEQ ID NO: 43829 - DNA, 1086 bp, Unknown
  Obtained from environmental sample
  misc_feature (1)..(1086): n is a, c, g, or t
ttggaccgagctaaacgaccgcttctacgccgacttagagttcggcaccggcggtcttcgcggcgtgatcggcggcggttacaaccgcatgaacccgttcaccgtccgcagggcgacccaggggctggccaattacgtctccaaagccgtgccttcgggcgcttcggctgtgatcgcctacgactcccgcaacttctccgacctcttcgcgctgcaggcggcgctgtcttctgcgccaacgggatcaaggcctacctgttcacgagtctgcgccccacgccggaactctcgtttgcagtgaggcggctcaaagcgtccgttgggatcgtagttaccgccagccacaacccgccggagtacaacgggtacaaggcctactggaacgacggcgcgcaagtagtccccccgcacgacaaggccatcataaaagaggtgttctccgtcggcgacgcgatcaaggtaatggataaggacgaggccgtaaaggccgggttattggtgatgattgacaaagagatagaccgcccgtttatcgatatggtgaaaaactgcgcgatccgccccaacctgctcaaagagggcggcaaggatataaaggtggtatacacccccttgcacggcaccggcgccgttccggtagacaccgctctcaaagagatgggcgtcaacgtcacgttcgttgaggagcagcgctcgccggacggaaacttccccacggtgagctaccccaaccccgaggaagcctccgctatgagattggcccttgagctgggcgagaaaatcggagccgacttagtgctgggcaccgaccccgacgccgaccgccttggcatagccgctcccgacggcggcagcctaaagcttgtaaccggaaatcagctgggctcgcttttggccgactacgtcttcagcgcccgcaaagagatggggacgatgcccgccaagccgatacttatcaagaccatagtcaccacggaactgcagcgcctgatcgccgatagctacggagcgctctgtatggatgtgctgacaggtttcaagtatatatgcgagaagatgcgcgagttcgagtcgcctctccgataa

SEQ ID NO: 43830 - protein, 361 aa, Unknown
  Obtained from environmental sample
  DOMAIN (175)...(285): Phosphoglucomutase/phosphomannomutase, alpha/beta/alpha domain II
  misc_feature (1)..(361): Xaa is any amino acid
MDRAKRPLLRRLRVRHRRSSRRDRRRLQPHEPVHRPQGDPGAGQLRLQSRAFGRFGCDRLRLPQLLRPLRAAGGAVFCANGIKAYLFTSLRPTPELSFAVRRLKASVGIVVTASHNPPEYNGYKAYWNDGAQVVPPHDKAIIKEVFSVGDAIKVMDKDEAVKAGLLVMIDKEIDRPFIDMVKNCAIRPNLLKEGGKDIKVVYTPLHGTGAVPVDTALKEMGVNVTFVEEQRSPDGNFPTVSYPNPEEASAMRLALELGEKIGADLVLGTDPDADRLGIAAPDGGSLKLVTGNQLGSLLADYVFSARKEMGTMPAKPILIKTIVTTELQRLIADSYGALCMDVLTGFKYICEKMREFESPLR

SEQ ID NO: 43831 - DNA, 402 bp, Unknown
  Obtained from environmental sample
  misc_feature (1)..(402): n is a, c, g, or t
atggacacatccgaattgacccaaaaggccaaagactacatccgtctcgaacaggccccccacttccgctctcaagtggaggaactgctcaagaaggaggattggaccgagctaaacgaccgcttctacgccgacttagagttcggcaccggcggtcttcgcggcgtgatcggcggcggttacaaccgcatgaacccgttcaccgtccgcagggcgacccaggggctggccaattacgtctccaaagccgtgccttcgggcgcttcggctgtgatcgcctacgactcccgcaacttctccgacctcttcgcgctgcaggcggcgctgtcttctgcgccaacgggatcaaggcctacctgttcacgagtctgcgccccacgccggaactctcgtttgcagtga

SEQ ID NO: 43832 - protein, 133 aa, Unknown
  Obtained from environmental sample
  misc_feature (1)..(133): Xaa is any amino acid
MDTSELTQKAKDYIRLEQAPHFRSQVEELLKKEDWTELNDRFYADLEFGTGGLRGVIGGGYNRMNPFTVRRATQGLANYVSKAVPSGASAVIAYDSRNFSDLFALQAALSSAPTGSRPTCSRVCAPRRNSRLQ

SEQ ID NO: 43833 - DNA, 1338 bp, Unknown
  Obtained from environmental sample
  misc_feature (1)..(1338): n is a, c, g, or t
atgcagtggacttttacattgcgtcgtaccgcgcgtttttccaacggcgatcccgtgcgcgcggaagattttcgcgccgcgtggctttctctcattgaacccaataaagaatctccttattcgagtttttttgacgttatcgagggggcgcgtgaataccgtaacggcgctttaaaagataaagataaagtcggaataaaagcggttgatcaaagaacgcttgttataaaactcggctcccccgcgtctttttttccgagaatgctttgccatcattcattcagcccgatacacccttcaatgttagataaaacggaatggtctccgtataaagccggaaaaaactggactccgcctgtttctaacggaccgtatcaaattgtttctatggataaaaaaagtattgttatgcaaaaatcagggcagtattgggattcaaacagagttgcgttaaaaaaaataattattaaatttacggaaacgggagatcaagccgcgcatctttggaattcaggcgaggcgcgctggatttcaggcgaggtaaacacggaagcgctgacggatcgctcaggtattcaagtgaatgttatgtttgccacgcattattattttattcgcagcgcggaaaaaccctggaacgattacagaattcgcagggcgatgattcttgttcttccctgggatgaaatacgcggcagttattttcttcccgcagaaacgttgattttcccgatttcagggtatcctgacgttgagggaatatcggaaaccaattacgaagaagctcaaaagttaatgaatgaagccggatacaaaaacggcgcgggaatgcccgctcttattattcgcataacgccgtcccgcgatgcggagcgcgtcggttcaattatggctaacgcatggaaagaaaaattgggtatgaatgtgcgcgtagaagaaattcctttcggcaaatactttgaaaccatgaaggggacagggtacacagtaggttcaacgacatggataggggattttgccgatccttacgctttcttgcagatgttcaggcgcgattcaaatttaaatgacgcgcggttagacgatgcggactatgaggcgttaatagaacaatctatggtagaggaagggaaaacccgtttggaaactctggcgaaggcggaaaaacttttattggacaggggagtagttctgccgatttttttcagtcccgcgttaaatattgtcgataaaggagagttggacggatggtatcctaacgcgttggacattcatccgtttaaatacattgcttttaaatcattacgacctctgcccggcgtcgcgttaataaaatga

SEQ ID NO: 43834 - protein, 445 aa, Unknown
  Obtained from environmental sample
  DOMAIN (2)...(357): Bacterial extracellular solute-binding proteins, family 5 Middle
  misc_feature (1)..(445): Xaa is any amino acid
MQWTFTLRRTARFSNGDPVRAEDFRAAWLSLIEPNKESPYSSFFDVIEGAREYRNGALKDKDKVGIKAVDQRTLVIKLGSPASFFPRMLCHHSFSPIHPSMLDKTEWSPYKAGKNWTPPVSNGPYQIVSMDKKSIVMQKSGQYWDSNRVALKKIIIKFTETGDQAAHLWNSGEARWISGEVNTEALTDRSGIQVNVMFATHYYFIRSAEKPWNDYRIRRAMILVLPWDEIRGSYFLPAETLIFPISGYPDVEGISETNYEEAQKLMNEAGYKNGAGMPALIIRITPSRDAERVGSIMANAWKEKLGMNVRVEEIPFGKYFETMKGTGYTVGSTTWIGDFADPYAFLQMFRRDSNLNDARLDDADYEALIEQSMVEEGKTRLETLAKAEKLLLDRGVVLPIFFSPALNIVDKGELDGWYPNALDIHPFKYIAFKSLRPLPGVALIK

SEQ ID NO: 43835 - DNA, 1542 bp, Unknown
  Obtained from environmental sample
  misc_feature (1)..(1542): n is a, c, g, or t
gtgatcgcgagatacgaggacagacgggacaataagcaggtttggctcaaaatatcagtggtcgataccggaaaaggaattaagccggaagatcgggataaactattcggtgagtttgtcaaagtggatgtaatgaaaaaccagggcatagaaggaacagggctgggacttgccattaccaaacgcctctgtgttgcgatgggcgggaacattacggtggaaagcgaatatggtaaaggcagtacatttacggtgattatcccccaggatttagaatcggaaacgcccttcgccatggtggaagaagcgggaaaaaagaaggtactggtttatgaaagcagagctgtctacgccaaatcaatatgctggactttggaaaacctgaatgttccctatactttggtgacgagtcaggatgattttgccgctgctttgtatctggaagaatggttttatattttttcaggatacggtctttatgaaaaaattaggccaataatggaacgcggatttttttacaatgacaagaaaccgccgcttgccctcatggttgaatggggaacagaggcttacataggcggcgtgcggtttgtgtccattccggtgcaatccctatcaattgccaataccctcaacggcaaggcggacagcaagggttattatgataatgacggaaaccccagcgcaattcgcttcacatttccggatgcacggttgctggtggtagatgatatcgccacaaacctcaaagtagccgagggccttcttagcccctacatggtatcggtggacatatgccttagcggtttgctggccatagaactggtaaaacgcgcagctatggagaagcgcgattacgacattgtgctcatggatcacttgatgcccgaaatggacggtattgagactactgcggctatccgtgcatgggaaaaaggacagctggaaaatgacgttacgcgcaaacaggttcccatagtcgcgttaaccgctaatgctgttgtagggatgcgggaaatgtttatcgaaaacgggtttaacgattttattgccaaacccatagacgtatcaaaattggatgaaatgcttagccgttggataccgaaagagaaaagagcagatagcaaagaacaaataacaaatgaagaacaaataataaataacaaagaacaaagaacaaagctcgttatccagggtgttgatacagcaaaaggtatcgccatgaccggcgggaaagaagaacgctatcgttctttgcttgctatgttatgcaaggatgtggaagaaagactgccgctgctacagaaaaccgatgaagctgatttgtcttcggcggacatcctgtccgcattgatgacccagttccacgccctgaaaggcgcgtccgcgaaccttggagcggagagagtttcagcagaagcagctactctggaggccgccggcaaagctggagatacagtgcttattgggaaacaactgcctgtttttattgaattgcttacagcgtttgtaaaagatgctaaggatgcgctacgcctgtaa

SEQ ID NO: 43836 - protein, 513 aa, Unknown
  Obtained from environmental sample
  DOMAIN (418)...(510): Hpt domain
  misc_feature (1)..(513): Xaa is any amino acid
MIARYEDRRDNKQVWLKISVVDTGKGIKPEDRDKLFGEFVKVDVMKNQGIEGTGLGLAITKRLCVAMGGNITVESEYGKGSTFTVIIPQDLESETPFAMVEEAGKKKVLVYESRAVYAKSICWTLENLNVPYTLVTSQDDFAAALYLEEWFYIFSGYGLYEKIRPIMERGFFYNDKKPPLALMVEWGTEAYIGGVRFVSIPVQSLSIANTLNGKADSKGYYDNDGNPSAIRFTFPDARLLVVDDIATNLKVAEGLLSPYMVSVDICLSGLLAIELVKRAAMEKRDYDIVLMDHLMPEMDGIETTAAIRAWEKGQLENDVTRKQVPIVALTANAVVGMREMFIENGFNDFIAKPIDVSKLDEMLSRWIPKEKRADSKEQITNEEQIINNKEQRTKLVIQGVDTAKGIAMTGGKEERYRSLLAMLCKDVEERLPLLQKTDEADLSSADILSALMTQFHALKGASANLGAERVSAEAATLEAAGKAGDTVLIGKQLPVFIELLTAFVKDAKDALRL

SEQ ID NO: 43837 - DNA, 810 bp, Unknown
  Obtained from environmental sample
  misc_feature (1)..(810): n is a, c, g, or t
ttggttttgaacatagacaaagatcacaaagaattgccagaattggaaaatctttttgcagagtttgccgcaaatgttcgcaaagtgaatggaactttgatagtgaacggctcgcatccacttgctttgaaattagcagacgaaaaaacaatattatttggaattgaagattacaaaccaaacggtatttcttcggaatttaaaatttcttgcaatggagaaagtgcggatttttatttgccattgcccggcaaacacaacgcagaaaatgctgctgccgcaaccgctgcttgcagagttgcaggggtatctttaaaagaatgtgctgaggctcttaaaagttggaaaggcattcaccgccgtagccaaatttacaactgcaaaaacggaattactatggttgacgactacgcacacaatccagcaaagatagcggcgagcattcgctcctgccaagattttgcaaagggaaaagttttcgcttggtttcagccgcacggttttggtccaacaaaatttttaaaagacgatttggtaaaagagattgccgaagttttgcgtccaagcgatgaaatgtggttcagttccatatattacgcaggcggcacagcagaccgcagttttgattcggatattctttcagatgctttgaaggaaaaaggttgcaatgcaaattttatttcaaatagggatgaatgcttaaaggaaataataagcaaagcaaaatccggcgatgttattttgctgatgggggctagagaccccagtttgtcggagttctctaagtgggtaaatgccagcttgctctaa

SEQ ID NO: 43838 - protein, 269 aa, Unknown
  Obtained from environmental sample
  DOMAIN (118)...(209): Mur ligase family, glutamate ligase domain
  misc_feature (1)..(269): Xaa is any amino acid
MVLNIDKDHKELPELENLFAEFAANVRKVNGTLIVNGSHPLALKLADEKTILFGIEDYKPNGISSEFKISCNGESADFYLPLPGKHNAENAAAATAACRVAGVSLKECAEALKSWKGIHRRSQIYNCKNGITMVDDYAHNPAKIAASIRSCQDFAKGKVFAWFQPHGFGPTKFLKDDLVKEIAEVLRPSDEMWFSSIYYAGGTADRSFDSDILSDALKEKGCNANFISNRDECLKEIISKAKSGDVILLMGARDPSLSEFSKWVNASLL

SEQ ID NO: 43839 - DNA, 1236 bp, Unknown
  Obtained from environmental sample
  misc_feature (1)..(1236): n is a, c, g, or t
ttgggttttaaactagaaaaatttttctacattagcccctatatgaaggtcttggacaaaaatggcgagagccttaacctcatggctttgaattttgggcctagccataatgccacccacgggtgtttgcgctatcttgccgcattggatggcgaaaccattgttgcatccgttggggaaataggctatttgcacaggggttttgagaaaatggcagagcagggaacctggcaaatggtgctgccatatacagaccgcttaaattactgctccgcaattttgaacaatgttggctatgcaaaggctgtggaaaaaatgcttggggtggaaattcccgaaagagcaaaggtcattcgcgttatagttagcgagctttccaggatttttgaccattttgtttgcgttgccgctgcctgcgtggatttgggcgctttaacgaatttttggtacttttttgactctagagaagaaggcttggtgctttgggaaaagctaacgggcgcaaggctcacaaattcttatgcccgcataggaggcttgtatagagatacctatagcggttttgaagccgatgttgaaaagctgcttaaaatgtgcgaggagtctttgagagatgttcacaaacttttggataacaaccgcatattcttagaccgtacctccggcataggtgcaattagcccagagagagctttggcttggggctggacaggaccttgcctgcgggcaacaggtgccgcttttgacttgcgcaaaaacgaaccgtattacgactacgaaacctatgactgggaaatagtcacaggaaccaaaggcgatgtttacgaccgcttaatggttaggcttgcagaaagcgaagaatccataaaaataatcaggcaagccataagacgcttgcaacctggccccataaacatagacaaccccaaaataagagtaccagaacgcgaaagggtttatcaagatatggaagccttgatagggaatttcaaaactgtggcagagggcattcgcattcccgctggcgagttttacgattcatctgaggcggcaaacggagaactcggctttacacttatttccagcggtgagggaaaaccttggagaattaaggttcgccctccttgcttcactcagttcgccgcttttcacgagcttgtggagggtggtcaaattgcagattccattgcagtgctttccagcataaatataattgcgggagaattggatagatga

SEQ ID NO: 43840 - protein, 411 aa, Unknown
  Obtained from environmental sample
  DOMAIN (141)...(411): Respiratory-chain NADH dehydrogenase, 49 Kd subunit
  misc_feature (1)..(411): Xaa is any amino acid
MGFKLEKFFYISPYMKVLDKNGESLNLMALNFGPSHNATHGCLRYLAALDGETIVASVGEIGYLHRGFEKMAEQGTWQMVLPYTDRLNYCSAILNNVGYAKAVEKMLGVEIPERAKVIRVIVSELSRIFDHFVCVAAACVDLGALTNFWYFFDSREEGLVLWEKLTGARLTNSYARIGGLYRDTYSGFEADVEKLLKMCEESLRDVHKLLDNNRIFLDRTSGIGAISPERALAWGWTGPCLRATGAAFDLRKNEPYYDYETYDWEIVTGTKGDVYDRLMVRLAESEESIKIIRQAIRRLQPGPINIDNPKIRVPERERVYQDMEALIGNFKTVAEGIRIPAGEFYDSSEAANGELGFTLISSGEGKPWRIKVRPPCFTQFAAFHELVEGGQIADSIAVLSSINIIAGELDR

SEQ ID NO: 43841 - DNA, 729 bp, Unknown
  Obtained from environmental sample
  misc_feature (1)..(729): n is a, c, g, or t
atgtcccgcgacgttaaagcaaaactgaacagttcaggcgatattgaatattttgaataccgggggaaaaatgcgtccctggtcgaattggttttctcgctgccgagggatggccgtatgtcaggctgggctctttgcgtggagcttgcacagccgaacccgacgcccgtgggtaacgcttcgacgccgaagcctctgcttctggcaatggcctacggccctgctggaaaacaagggcttgaggcattgcatttatccgcccttgactcaattatcccggaagaaggggacaggcttgcccccggtccaattacagagtttgcatatccacgggaaacgcgaataaagaccccggtctttgcccttgattgcgaagcctggatttttgaggaagatgccgaagcggcccaggcccttatagacagggaatttctggttttgcgacgttaccagaattcgcccggatggaaggaagcgtggatccggttttacagggcaatttaccgcgattcatttgaaaggcttacggacattgcttttcaggtggaacgcaagattaacgttcctccgctggaaaaccgggactttgccaaccaggcgctaaagtgggttcaatcatttagctacgaacgggatttatttggcagtgattttataaacctcgtcagctccgccaccgaagcagaggcgactgcgacaacagggcaatgctttgggcgatcattttaa

SEQ ID NO: 43842 - protein, 242 aa, Unknown
  Obtained from environmental sample
  misc_feature (1)..(242): Xaa is any amino acid
MSRDVKAKLNSSGDIEYFEYRGKNASLVELVFSLPRDGRMSGWALCVELAQPNPTPVGNASTPKPLLLAMAYGPAGKQGLEALHLSALDSIIPEEGDRLAPGPITEFAYPRETRIKTPVFALDCEAWIFEEDAEAAQALIDREFLVLRRYQNSPGWKEAWIRFYRAIYRDSFERLTDIAFQVERKINVPPLENRDFANQALKWVQSFSYERDLFGSDFINLVSSATEAEATATTGQCFGRSF

SEQ ID NO: 43843 - DNA, 450 bp, Unknown
  Obtained from environmental sample
  misc_feature (1)..(450): n is a, c, g, or t
gtgcacagcgaatgtttaaccggagatatatcccattccctaaaatgcgactgtggggcacagcttgaatattccatgagatatatagccgcacaaggcggtattttcatttatatgcttgggcacgagggcaggggaattgggcttgcaaataagttaaaggcttatgaattgcaagaaaagggattagatacggttgaggcaaacataaaactcggctttaaggcagaccacaggaactatgcttatgccgctcatattctaaaagaactcggtgtaaaatccgtgaatttgctcacaaataatcccagaaaaatagaggggcttgaaatgtgcggaataaaaatctccaaaaggattcctgttgaaacagagcctaattcctttaacaaaaaatatttaaaggcaaaaaaagaaaaaatggggcataaatttactacattactataa

SEQ ID NO: 43844 - protein, 149 aa, Unknown
  Obtained from environmental sample
  DOMAIN (1)...(122): GTP cyclohydrolase II
  misc_feature (1)..(149): Xaa is any amino acid
MHSECLTGDISHSLKCDCGAQLEYSMRYIAAQGGIFIYMLGHEGRGIGLANKLKAYELQEKGLDTVEANIKLGFKADHRNYAYAAHILKELGVKSVNLLTNNPRKIEGLEMCGIKISKRIPVETEPNSFNKKYLKAKKEKMGHKFTTLL

SEQ ID NO: 43845 - DNA, 1065 bp, Unknown
  Obtained from environmental sample
  misc_feature (1)..(1065): n is a, c, g, or t
atggttaaggccgctcgtttattttttaaagtcctcagtgttttgattgtccttgctttagtgttattttctcttgctcttggattggctgtctattttaactcgcctccggataaaaagcctgtccctattgaagaaagtatgcgccttgaaaatgacggaaatctgtttattgaaatacgggatggggaatccgctttgtccgtcggcaggcggcttgaaacagcgtccgttatacgaaaccgctacttttggtatttgctgttccgccttgaaggcggccaggttaaaacaggttcctatgtaatagagctccccgcaagccagctaaagatccgctcaatattgattgccggcgaacagatccttgtaaaggcaacaatccccgagggggttacactcaaaaagaccgctattcttcttgaagaagccggtgtttgcacggcggataaatttctcgaagcttcttcttcaagggaaattctggacgcgtatcaagtgccagggcctactatggagggatacctctacccggacacctacctgtttccgcttggttatcccgcttccaaagtggtcgagactatggcggataattttttttcccgggttgacgttatcttcccgggagctgcatccatgagcccttctgagttaaatacccgcgttgttgtggcttccattgtcgaaagggaataccgcataccggaggaagccgcccttatggcgggcgtgttttataacaggctaaaaatangcatggccctgcaatcctgcgctactgtggaatatgtcattactgaaattcagggcaagccgcatcccgagcaattgttaaacagggatctggaaatacgggatccctacaatacctatttgaggccgggacttcctcccggacctatttcagccccgggcgagactgccctgaaagcggctttttatccaagtccatcggattacctttacttcaggctgacggatttaagcacagggcggcattatttttcgcgtaccctggatgaccatatccgggctggaaatctttacgtgaagggaaagtag

SEQ ID NO: 43846 - protein, 354 aa, Unknown
  Obtained from environmental sample
  SIGNAL (1)...(26)
  DOMAIN (56)...(353): Aminodeoxychorismate lyase
  misc_feature (1)..(354): Xaa is any amino acid
MVKAARLFFKVLSVLIVLALVLFSLALGLAVYFNSPPDKKPVPIEESMRLENDGNLFIEIRDGESALSVGRRLETASVIRNRYFWYLLFRLEGGQVKTGSYVIELPASQLKIRSILIAGEQILVKATIPEGVTLKKTAILLEEAGVCTADKFLEASSSREILDAYQVPGPTMEGYLYPDTYLFPLGYPASKVVETMADNFFSRVDVIFPGAASMSPSELNTRVVVASIVEREYRIPEEAALMAGVFYNRLKIXMALQSCATVEYVITEIQGKPHPEQLLNRDLEIRDPYNTYLRPGLPPGPISAPGETALKAAFYPSPSDYLYFRLTDLSTGRHYFSRTLDDHIRAGNLYVKGK

SEQ ID NO: 43847 - DNA, 879 bp, Unknown
  Obtained from environmental sample
  misc_feature (1)..(879): n is a, c, g, or t
atggggttcagcttagcggccgattatgtccctcaaaaacagccatggtatcagaccgcgatacgaagcggcagaaacatagcttatacagcgccctacgaggacgcccttacaggcgaaataattatttccgccgtgcgcaacatcgacatacaaaacggcgagattttcggcatcttaagcgtggacatcaatataaaatggctgcgggaatatgtcggttcccttaaacttgccaaaggcggatacagcatgctccttaaccgcggcatgtcggtcgtaactcaccccgatatatcgcttgtaggcagccagattgaggatttgggcaaaagttacgaagaaatcgctaaaattttgcgcgctcacggaaaagtgtccgcgcgcaaaataaccgacataaacggcgattcagccataatatttataaggcatatatttaacggctggtatgtatgtatcattactccttatattgagttttacaaagacctctacatttccgcagggattttgcttgtattggggattatcctgtccctgcttttatcttttatacttctgcgtttctctgccgcaaaagcccgcgcggatgaggacaataaatccaaatcatcgttccttgcaagcatgagccacgaaattcgcactcccatgaacgccattaccggtatggcggaacttcttcttaggatcgatctttccgatgaagcccgcagttacgcgcgggacatcaagcatgccgggaataatcttgtttctcttatcaacgatattctggatttctcaaaaatagaggcaggcaggctggaaatttttcctgttaaatacatgctttcgtcgcttataaacgattcggttaatattatcagaatctga

SEQ ID NO: 43848 - protein, 292 aa, Unknown
  Obtained from environmental sample
  DOMAIN (29)...(109): Cache domain
  misc_feature (1)..(292): Xaa is any amino acid
MGFSLAADYVPQKQPWYQTAIRSGRNIAYTAPYEDALTGEIIISAVRNIDIQNGEIFGILSVDINIKWLREYVGSLKLAKGGYSMLLNRGMSVVTHPDISLVGSQIEDLGKSYEEIAKILRAHGKVSARKITDINGDSAIIFIRHIFNGWYVCIITPYIEFYKDLYISAGILLVLGIILSLLLSFILLRFSAAKARADEDNKSKSSFLASMSHEIRTPMNAITGMAELLLRIDLSDEARSYARDIKHAGNNLVSLINDILDFSKIEAGRLEIFPVKYMLSSLINDSVNIIRI

SEQ ID NO: 43849 - DNA, 711 bp, Unknown
  Obtained from environmental sample
  misc_feature (1)..(711): n is a, c, g, or t
atgcagtgctgggagatggtggaccggaatgtggcgtttgtgtcatgcagcagcgtgtataacgtcataaaacgccataatctggacaaaaagtgggcggaactggccgaggaggcgaagaaaggttttgaccagccgcaggcggttcacgagcaatggcacatagatttttcgtacatcaagatacaaaattcgttttattattttatcggcatccttgacggctacagccggaaattgctgaactggaagctctgcgaaaacatggagggcgttaacgctgaaatcctggttgcacaaaccaaggaaatgtaccctgaagcggtcaacccgcggctgataagcgacaacggcggccagttcatatcaaaagattttgaagaactgctctctcttttggaagtcgggcacacgcttacatccccgaaccaccctcagagcaacggcaaactggagcggtttcaccgcacattgaaaactgaacacgtaaggagggcatcgtatttagaatatcaagacgcctgcataaggctggcgaaatggatcgcgtattacaacagcgaaaggctccacagcgcggtctggtatttaacgccgaatgacgttttttacggcaggacggcggaacggcttgcagaacgcaaagaaaagttgcatactgcatgtatcaagagacaggaatactggtggacgcaaaatgccggttcctga

SEQ ID NO: 43850 - protein, 236 aa, Unknown
  Obtained from environmental sample
  DOMAIN (45)...(204): Integrase core domain
  misc_feature (1)..(236): Xaa is any amino acid
MQCWEMVDRNVAFVSCSSVYNVIKRHNLDKKWAELAEEAKKGFDQPQAVHEQWHIDFSYIKIQNSFYYFIGILDGYSRKLLNWKLCENMEGVNAEILVAQTKEMYPEAVNPRLISDNGGQFISKDFEELLSLLEVGHTLTSPNHPQSNGKLERFHRTLKTEHVRRASYLEYQDACIRLAKWIAYYNSERLHSAVWYLTPNDVFYGRTAERLAERKEKLHTACIKRQEYWWTQNAGS

SEQ ID NO: 43851 - DNA, 804 bp, Unknown
  Obtained from environmental sample
  misc_feature (1)..(804): n is a, c, g, or t
atgcggatttcaatttcgtctttaatggaaagtagtggtgtggtttttggaactagtgggacgcgtgggcttgttagcgatatgacaaatgaagtgtgctatgcatacacccttggttttttgcagcatacccttgcaaacaaaaatgcaaaaaagaaagtggcaataggtggcgatttacgcccaagcactccacgcataatggcagcttgcatggcggcgacaaaaaacgcaggttttgaatgtgactatcaaggatttttgcccagcccagcccttgcgctttacagcataaaaaaaggaatcccaagtataatggtaaccggaagccacataccagacaacagaaacggcataaagttttgcgattattacggagaaataacaaaagcagacgaacaggatattcgttctcaaactgtggacatttgcccaaacacctgtgaattgccaaatccaaacaatgatgcgttgaaaatatataaggattatattttaaatttgtttccaaaaaattcattgcaaggcgtaaatatcgcattttttcagcactctgcggttggcagggatattgctctagaaattttaaccgagctgggagcaaatgtaaaagcagtggggcgaagcgagaaatttgtgccagttgatacagaaggcatttcgcaagaagacgtagctttgcaaaacagctttgtgcgagcgcggattttttttgcatggcaagcacagatggagattccgacagaccgcttttgtccgatgaaaacggggtttggcttaaaggcgattcgcttgggattttag

SEQ ID NO: 43852 - protein, 267 aa, Unknown
  Obtained from environmental sample
  DOMAIN (13)...(147): Phosphoglucomutase/phosphomannomutase, alpha/beta/alpha domain I
  misc_feature (1)..(267): Xaa is any amino acid
MRISISSLMESSGVVFGTSGTRGLVSDMTNEVCYAYTLGFLQHTLANKNAKKKVAIGGDLRPSTPRIMAACMAATKNAGFECDYQGFLPSPALALYSIKKGIPSIMVTGSHIPDNRNGIKFCDYYGEITKADEQDIRSQTVDICPNTCELPNPNNDALKIYKDYILNLFPKNSLQGVNIAFFQHSAVGRDIALEILTELGANVKAVGRSEKFVPVDTEGISQEDVALQNSFVRARIFFAWQAQMEIPTDRFCPMKTGFGLKAIRLGF

SEQ ID NO: 43853 - DNA, 1677 bp, Unknown
  Obtained from environmental sample
  misc_feature (1)..(1677): n is a, c, g, or t
atgaaggaaactgaggcggatatgtgcggtccgtatctttatgatttattgaatgccgttcaagcaggtaaaccgtataccttttccaattacattgcggcattgaaaacacaaatgcatatgtttttcattcccattactgtcggggaaacgaagaactcatggagttatgcgatagccgttatgcaaaatacgataatggccccggtctaccaaatgatgaaaatagccatagcgataagcgctgtggtattagccctgctgattttggcagccatattcctgtccagttccatcagcaagccaatcgtcaatgtagcgggtacccttaaagacatatcccaaggcgaaggcgatttgaccaaacgaatagcggtcagatccgccgatgaaatcggcgatctcggccgctgcttcaacgttacgatggaaaaaatcagaagcctcgtaggttcaataaaatacaaaatcaacgggcttaaccataccggttttgaactttccaccaatatgggcaggacttctgcggcagtccagcagattacatcgcatcttgacaacatgaaaaatctcatggtcaaacaggaaagcggcgcggaagaggcgggtaaagcggtaggagatatcaaggaaaatattgacagtcttaaaaagatgatagaacaacagactgaaagcgtaaacaaatcgtcttcagccatcgaggaaatgacggccaatattcattcagtgacgcagacgctggtagaaaacagcaaaaacgtcagcgctttaaccgaagcgtcggaaaacggcaaatcgggcgttcagacggttgcgcagatgatacaggaaatatcgaaggactccgagggattgttggaaataaacgccgtaatggacaatatcgccagccagacaaatctgctttccatgaacgccgctattgaggcggcgcacgccggagaagcgggcaagggttttgcggtagtcgccgatgaaatccgcaagcttgccgaatcatcgagcgagcagtcaaaaactacggcaacgatgcttaaaaaaataaaagcgtccatagacagcatcaccaaatcatccgacgaggtactggagcgtttcggggcgatagactcaggcgtaaaaacagtttccgagcatgaacaaaatatcttaaacgcgatggaagaacaggaagtgggcggaaaacaaatactggaatccataggccgcctgcgggacataacatcctcggttaagaacgggtctgatcacatggcgaaatcgggagagacccttgtcagggaaacaaacgagcttataggcaacagcaaagaaacagtaagcggcatgaacgagatacttatcggcattaatcagataagcacttcgatggtccgtgttaaagaaatgagccaggaaaacaacaaaaacttcgaatcgttaaaagaagaaacaaataaatttgttgattccatgggcgacgagaagaaaaaagtccttgtagtggacgatgaaaaacccgttcttgtaatggtgaaaggggtattgcaggaatattatgatgtaattaccgctacttcaggccaggaagcgctgggcttattctatcagggacttcttccaaccttgtattactggacctggttatgccgggaatggacggctggaacgcctataccagaattagaagcttaa

SEQ ID NO: 43854 - protein, 558 aa, Unknown
  Obtained from environmental sample
  DOMAIN (221)...(446): Methyl-accepting chemotaxis protein (MCP) signaling domain
  misc_feature (1)..(558): Xaa is any amino acid
MKETEADMCGPYLYDLLNAVQAGKPYTFSNYIAALKTQMHMFFIPITVGETKNSWSYAIAVMQNTIMAPVYQMMKIAIAISAVVLALLILAAIFLSSSISKPIVNVAGTLKDISQGEGDLTKRIAVRSADEIGDLGRCFNVTMEKIRSLVGSIKYKINGLNHTGFELSTNMGRTSAAVQQITSHLDNMKNLMVKQESGAEEAGKAVGDIKENIDSLKKMIEQQTESVNKSSSAIEEMTANIHSVTQTLVENSKNVSALTEASENGKSGVQTVAQMIQEISKDSEGLLEINAVMDNIASQTNLLSMNAAIEAAHAGEAGKGFAVVADEIRKLAESSSEQSKTTATMLKKIKASIDSITKSSDEVLERFGAIDSGVKTVSEHEQNILNAMEEQEVGGKQILESIGRLRDITSSVKNGSDHMAKSGETLVRETNELIGNSKETVSGMNEILIGINQISTSMVRVKEMSQENNKNFESLKEETNKFVDSMGDEKKKVLVVDDEKPVLVMVKGVLQEYYDVITATSGQEALGLFYQGLLPTLYYWTWLCREWTAGTPIPELEA

SEQ ID NO: 43855 - DNA, 417 bp, Unknown
  Obtained from environmental sample
  misc_feature (1)..(417): n is a, c, g, or t
atgtcccgcaggcggcctatggattccagtatttgttttccgcccacttcctgttcttccatcgcgtttaagatattttgttcatgctcggaaactgtttttacgcctgagtctatcgccccgaaacgctccagtacctcgtcggatgatttggtgatgctgtctatggacgcttttatttttttaagcatcgttgccgtagtttttgactgctcgctcgatgattcggcaagcttgcggatttcatcggcgactaccgcaaaacccttgcccgcttctccggcgtgcgccgcctcaatagcggcgttcatggaaagcagatttgtctggctggcgatattgtccattacggcgtttatttccaacaatccctcggagtccttcgatatttcctgtatcatctgcgcaaccgtctga

SEQ ID NO: 43856 - protein, 138 aa, Unknown
  Obtained from environmental sample
  misc_feature (1)..(138): Xaa is any amino acid
MSRRRPMDSSICFPPTSCSSIAFKIFCSCSETVFTPESIAPKRSSTSSDDLVMLSMDAFIFLSIVAVVFDCSLDDSASLRISSATTAKPLPASPACAASIAAFMESRFVWLAILSITAFISNNPSESFDISCIICATV

SEQ ID NO: 43857 - DNA, 324 bp, Unknown
  Obtained from environmental sample
  misc_feature (1)..(324): n is a, c, g, or t
ttggcagaatttggaatcccatacggaagtgaaattggttttacccgccctgtattaatagtacaagatgacggctttaacgaaagcaggatcaagactgttgtcgtattacctttgacaacaaatttacgattatcagacgcgccaggcaatgtgtttattagaaagaaagaatcaaaaatggcatatgattctgtaataattgccgcccaattatacgcaatagatcgcggaagatttaagaaaaaaatatcaaaggttaataaagaaataatggaaagagtagaagtagggatgaaattagttttaggaataaatcattaa

SEQ ID NO: 43858 - protein, 107 aa, Unknown
  Obtained from environmental sample
  DOMAIN (1)...(104): PemK-like protein
  misc_feature (1)..(107): Xaa is any amino acid
MAEFGIPYGSEIGFTRPVLIVQDDGFNESRIKTVVVLPLTTNLRLSDAPGNVFIRKKESKMAYDSVIIAAQLYAIDRGRFKKKISKVNKEIMERVEVGMKLVLGINH

SEQ ID NO: 43859 - DNA, 654 bp, Unknown
  Obtained from environmental sample
  misc_feature (1)..(654): n is a, c, g, or t
atggccgagntgtgggataaaaaaactacggaaagcaaagaaaagcaaatatctattaattttaaaatttattttctatcaccnggagtaaaacaaattcttatcgcatttttctgttattgttctttggaaacgataacaggattatggggagcaagttatttggtaacagaaaaaggaatatcgccggaaattgccgcgaggtggataactttgtactatttgggaataacagcagggcgttttatttcaggatttataacgatgaagttaaacaacaaacagatggttcgcatggggcaaataataatcgcgtgcggaataataacgcttattttaccgtttgggaacaccgcgcttttctgcggtctttttttgataggactcggctgcgctccggtgtaccccagcctattacatgaaactccggtaaatttcggcgcggagtattcacaggcgataatgggaatacagatgggaagcgcttatgtaggaacaacaataatgccccctatcttcggctggcttgcctcgtacatgagtttcagtatattcccgatttatattggaataattttattagtaatgataacaacagtcgaaatggtaaatagaaagaatataaaaaacaccttttttaatcataaaagataa

SEQ ID NO: 43860 - protein, 217 aa, Unknown
  Obtained from environmental sample
  misc_feature (1)..(217): Xaa is any amino acid
MAEXWDKKTTESKEKQISINFKIYFLSPGVKQILIAFFCYCSLETITGLWGASYLVTEKGISPEIAARWITLYYLGITAGRFISGFITMKLNNKQMVRMGQIIIACGIITLILPFGNTALFCGLFLIGLGCAPVYPSLLHETPVNFGAEYSQAIMGIQMGSAYVGTTIMPPIFGWLASYMSFSIFPIYIGIILLVMITTVEMVNRKNIKNTFFNHKR

SEQ ID NO: 43861 - DNA, 816 bp, Unknown
  Obtained from environmental sample
  misc_feature (1)..(816): n is a, c, g, or t
atgtcgctagaggcggttgtcaattcaatctgctcctccgtcgtcaagagggccgaaaacggcaacaactacggaatagttcttatccccgaaggcctcgtggaattcatcccggaaataaaaagccttattaacgaactcaacgacactattgcgcataacgaagctgaattttcaaaacttgaagcttacgcggaacagctcgcctggctgtacaagcatatctccgcggcctcatacaatgttcttcattccctgccccatgaaatcggaagggaattcctgatggaccgcgatcctcacgggaacgtacaggtctcgctgatcgagacggagaaactcctcatcggcatggtgaagaaaaaactcaacgagcttaagaccgccggaacctacaagggaaaattcaccgcccttgcccatttcttcggctatgagggaaggtgcgccttcccctccaactttgactccgactactgttattcgcttggctacagcgcctttgtgttaatcgccgccggatttacaggctatctttccagcgtgcgaaaccttacggcaaaagcttccgaatggactgccggcggcgtacccataaccatgatgatgaacatggaacagcgccacggcgagggaaaacccgtcatcaagaaagcccttgtcgagcttgacggcaagcccttcaaagccttcaaagcggtacgtgacgaatgggcggtgaagaccagctttaaggtacccggctccatacagtacttcggcccccccgaagtctgcgacgaaccgacaattacactaaagttagaaagggactag

SEQ ID NO: 43862 - protein, 271 aa, Unknown
  Obtained from environmental sample
  misc_feature (1)..(271): Xaa is any amino acid
MSLEAVVNSICSSVVKRAENGNNYGIVLIPEGLVEFIPEIKSLINELNDTIAHNEAEFSKLEAYAEQLAWLYKHISAASYNVLHSLPHEIGREFLMDRDPHGNVQVSLIETEKLLIGMVKKKLNELKTAGTYKGKFTALAHFFGYEGRCAFPSNFDSDYCYSLGYSAFVLIAAGFTGYLSSVRNLTAKASEWTAGGVPITMMMNMEQRHGEGKPVIKKALVELDGKPFKAFKAVRDEWAVKTSFKVPGSIQYFGPPEVCDEPTITLKLERD

SEQ ID NO: 43863 - DNA, 867 bp, Unknown
  Obtained from environmental sample
  misc_feature (1)..(867): n is a, c, g, or t
atgggcggcgtaaacgcgataatggctatgtcggttaacatgattgtaggcataaccggccagctttctctggggcaggcgggttttctcgcgattggcgcttattcatgcatttttttcaatttagatatgggactgccgcttccgttcgcggcattgtgcgccgttattgtcactaccatagcaggttttcttatcggttttcccgtcttaaaacttacaggggattatcttgcgattgttacgctgggtttcggcgagattatccgcgtggtatttatcaatcttaaagctcttacaggcggacctaacggaagagtatttccaacgaaaatggttcttaacggcgaattggcttttatacttacaacggtaacgcttgttgttattctggcattgcttcagaactttctgcgttccagctacggccgcgctatcaaggcgtgcagggaagatgaaatagcggctaacgcaaacggaattaatgttttccgctacaagatgataggttttgtcattgccgcatttatagcgggtatcgcgggctgtatctacgcgatggttgtcggttttgtcaaacctgatgtggcgcagtttttaagatccatcgactttcttatttatgtcgtgcttggcggtatgggttccatgacaggctctattctatcagcgtatgttcttacgtatttgcaggaattcctgcgttttctgcaagactaccgtctgttgatatatccagtgatactgattcttgtcatgatgttccgccccaaaggtcttttgggaatgaaggaattttccgtagttggttttgttgatacgctgtacggcaaattcttgcggtgggtaaagaagggggaggcatga

SEQ ID NO: 43864 - protein, 288 aa, Unknown
  Obtained from environmental sample
  DOMAIN (1)...(253): Branched-chain amino acid transport system / permease component
  misc_feature (1)..(288): Xaa is any amino acid
MGGVNAIMAMSVNMIVGITGQLSLGQAGFLAIGAYSCIFFNLDMGLPLPFAALCAVIVTTIAGFLIGFPVLKLTGDYLAIVTLGFGEIIRVVFINLKALTGGPNGRVFPTKMVLNGELAFILTTVTLVVILALLQNFLRSSYGRAIKACREDEIAANANGINVFRYKMIGFVIAAFIAGIAGCIYAMVVGFVKPDVAQFLRSIDFLIYVVLGGMGSMTGSILSAYVLTYLQEFLRFLQDYRLLIYPVILILVMMFRPKGLLGMKEFSVVGFVDTLYGKFLRWVKKGEA

SEQ ID NO: 43865 - DNA, 822 bp, Unknown
  Obtained from environmental sample
  misc_feature (1)..(822): n is a, c, g, or t
gtgggtaaagaagggggaggcatgagcaagggcgatttacgcttaaaggttcaggatctttccattgattttggcggtcttaaagccgtaagcgaattttcctgcgaactttatcacggtgaacttgtcggccttatcggcccgaatggggctggcaagacaacggtatttaatatgctttccgggatatacaccccaactgaaggggaaattgaattccgcgaccgagggggcagcgcctgccttgtgaaaaatctgaaccctgcaatgttgaaccggattggtcttgccaggacttttcagaacatacgcctgttttcagatctttctgtcgaggataatatccgtatagcgttacattccggcagaaccggcagccctttggacgcgcttttccgcttaaagcgttatcgtattgacgaggagcggatgtgcgctcaggcgcaggaactgctttctctctttaagattgaaaaaaagaaggatgagcttgcgcgtaatcttccttatggagaacagcgcaggctggagattgcccgcgctttagcttcaaatccctgccttcttctgctggatgagcctgccgccggtatgaatccacaggagaccgaagagttgatgaagataataaaatttatcagaaatgaatttcgcctgacaattcttttaatcgaacacgatatgcggctggtaatggggatatgcgagcggattatagttctggattacggaaggactattgcttcaggctccccggaggagattcagcggaatcccgcggtgattaaggcctatctgggaacggaggccgccaatggctga

SEQ ID NO: 43866 - protein, 273 aa, Unknown
  Obtained from environmental sample
  DOMAIN (40)...(244): ABC transporter
  misc_feature (1)..(273): Xaa is any amino acid
MGKEGGGMSKGDLRLKVQDLSIDFGGLKAVSEFSCELYHGELVGLIGPNGAGKTTVFNMLSGIYTPTEGEIEFRDRGGSACLVKNLNPAMLNRIGLARTFQNIRLFSDLSVEDNIRIALHSGRTGSPLDALFRLKRYRIDEERMCAQAQELLSLFKIEKKKDELARNLPYGEQRRLEIARALASNPCLLLLDEPAAGMNPQETEELMKIIKFIRNEFRLTILLIEHDMRLVMGICERIIVLDYGRTIASGSPEEIQRNPAVIKAYLGTEAANG

SEQ ID NO: 43867 - DNA, 591 bp, Unknown
  Obtained from environmental sample
  misc_feature (1)..(591): n is a, c, g, or t
gtggcgggccttctccgttggcggctcttgcggacgcggcggcttatacaggaagaagcaaactatttctttacccaaaacccgcaaattgcggctcttttctataccgcagcctcaaactccgccgggaccgcagggcaaagttcccccccggacagggtatttatcaacgagcgttttttccttacacggggaattgatacaacgcttgctgacgttttccgcgacaaaagcgtaaaattgcgggataatgccgggatggggcagacaatactcatcaacgcctcgcccctgtttaataaaacgcaaagttcgacatatcttgcggcaatgtttttccccatacagaacggaagcggctgcgtcctgttctcaagcgaaagcattaacgagagtttcggcatgggcgttaactcgtctttccttataaacgccgacggcgatgttatcgcggactctgacatagaaagggtaaaaacccatgtgaatctgtcagaacaggaaattatcagacagatatgtaacagccccgaccgtaaacaacagatgttagtcgatattgacaacgtgcgccgctatcttttgctataa

SEQ ID NO: 43868 - protein, 196 aa, Unknown
  Obtained from environmental sample
  misc_feature (1)..(196): Xaa is any amino acid
MAGLLRWRLLRTRRLIQEEANYFFTQNPQIAALFYTAASNSAGTAGQSSPPDRVFINERFFLTRGIDTTLADVFRDKSVKLRDNAGMGQTILINASPLFNKTQSSTYLAAMFFPIQNGSGCVLFSSESINESFGMGVNSSFLINADGDVIADSDIERVKTHVNLSEQEIIRQICNSPDRKQQMLVDIDNVRRYLLL

SEQ ID NO: 43869 - DNA, 1137 bp, Unknown
  Obtained from environmental sample
  misc_feature (1)..(1137): n is a, c, g, or t
ttgacaacgtgcgccgctatcttttgctataacgggctaaatacggcgggaagcgttgtaatcaccacaatcgagcaagataaagtctttgaaggcataaacgcgaccacgaggcgcaacctctacctgaccgccgcgattttgttcctctcaataatgtgtatctggtttttcgcaaaaagcatttccgtacctattaaaacactggcggcggcggcgcgaaaagttgaaggcggcgtctttaatgttgacctgccgccgaacagccgtgatgaaataggcgtattaacgtccggtttcagaaaaatgtgttccgcgttgagtatttttggcaagtttaccaaccgcaatattgccgttcaggccatgcgcggaaaaattaaaccgggcggcttgctgaaacacgccacgatctttttttcggatatccggggttttaccgaaaaatcagaaaactttgtaaaggtgttcggcaatgacgcttccgaccgcatcgttttttggcttaacgaatatttaacgcgcatggttgaatgcgttgaaaagaataacggcattattgataaattcatcggggacgcggtaatggcgcattgggggaccgccaccactgcgggaagcccgcagaaagacgccctcaactgtatcaaggcggcgcttatgatgagggtggcgctgtatgaaataaacaaaggcagaaaacaggaaaatataggaaatccgcccatcagcatcggctgcggcatcaacacgggcatagttaccgccgggcagattggttccgagcttcgcatggagtacaccgtcataggcgatccggttaacctcgcctcccgcgtgagggcgcttaacaaccctttgggcactgatattcttatcaccgaaaacacatggaatctggtaaagaaatattttatcaccgaagaaatgcccccggtaacggtaaaaggaaaagaaaaacccatacgcctctttgccgttgtaaattttaattttaccgctatgaataccccccccgccgtttcggaacctacgacccttgccgaagtgcggaaaaatttgggaattgaggaaaaggatatttcaaaggcgaatgtcaacgccgaagaacttaaatacaaaatcggcggtaaataa

SEQ ID NO: 43870 - protein, 378 aa, Unknown
  Obtained from environmental sample
  DOMAIN (40)...(109): HAMP domain
  misc_feature (1)..(378): Xaa is any amino acid
MTTCAAIFCYNGLNTAGSVVITTIEQDKVFEGINATTRRNLYLTAAILFLSIMCIWFFAKSISVPIKTLAAAARKVEGGVFNVDLPPNSRDEIGVLTSGFRKMCSALSIFGKFTNRNIAVQAMRGKIKPGGLLKHATIFFSDIRGFTEKSENFVKVFGNDASDRIVFWLNEYLTRMVECVEKNNGIIDKFIGDAVMAHWGTATTAGSPQKDALNCIKAALMMRVALYEINKGRKQENIGNPPISIGCGINTGIVTAGQIGSELRMEYTVIGDPVNLASRVRALNNPLGTDILITENTWNLVKKYFITEEMPPVTVKGKEKPIRLFAVVNFNFTAMNTPPAVSEPTTLAEVRKNLGIEEKDISKANVNAEELKYKIGGK

SEQ ID NO: 43871 - DNA, 1719 bp, Unknown
  Obtained from environmental sample
  misc_feature (1)..(1719): n is a, c, g, or t
atgatcagatcggccgagccatatctaaaacgtctgctgcttgccttgtcctgtgaaatttcggcaggttatgatgacgctcccctggaatacacgcttaaagcgttggaaaaacacgccgggagttttcccgaagcgatagtcattgatgattttcatctttgtaatgatttatcggtcgcacgctctctgccgatgatccgctcgcgattaccgcagggcgccgcttttatcataatcagcagaaatccgccgcctgaaatacttatagatcaaatcttaaaaggcattgtgcgcgagataaacgccctacaatttacagttaacgaaattatcgccctgttcaacaaaaaccggattcaaatttcagaatatgaagcccaaataatacagaaaaagacacaaggatgggcggcggcgttatccgccattcttttgtccgaaaaaaaattctcctctaacttgctggactctcaaaccttgaatgattatttcaggacttatgtgtttgattaccgcaaggattatcatattttaaagaagtgcgcggtatgcgacatactttatccgtccttgtgcaatgaagtaaccgggcagaacaacgcgtgggaaataatatccgattttgccgcccaaaccggattgctcgcccgtaccggcaaggacacataccgcttccacgcgctgttaaaagaatttcttgaatcggagcttgttaaagataaaacaatagacgaattaagcctgtataaagcggcggcgcagcagttcaaaaaagacggcgatattcttagggcgatacacatagcggcaaagagccgcgatattgcgatggtagaagaatatatgagcgtaagagatgatgaatacggaaaatttgacgccggagtggaagaaaacactttagcgataattaattatatatactccgaaatacccgcctccgccataaaacaatcaacacgcctttcgtttagctgtattaacgcgctgtttcaaatgggaaggcttgaagaagggtatgaatttattgacgccgtgaagactttgatgcagtcgggcaaaggcgcgcaaatggacataatcagcatggcgttgtggcagtgtgttgacccccgcggaaaaattcgcgatatacctgaagtttttggccgcgctaaaccttttttagaggaagcaaaggccggtaaaatatcgagttatacgataacgttcaattaccccttctttcacagaacggaaattgatttaacggacgcttcaccatgtatagacgagtttatagggaaattaaaaaagtatatgggtaatatacccgtaattataccgtttattcaattaaccgaagccggtttacgttacgaacgcggagaacttgacaaggcggaaaagatttcatcaaatgcgctccatgttgcccagtccttcccgccggaacttcatttttgcgcccttgtcctgtatgccgagattatgcgggtgcagggtaaaagttataaccttgaaacaatcagaacaatgatcacccaaagaaacgcgcattatttatcggcgaatttcaactcttataccacgaatatacagctattcaacggcgatgaggatgccgccaaccgctggctgtcccgacttgatgttgaagaaacattgatgatctataaaatgtatcaatacttcacggcggcgcggtctctcatggcgctcggcaaattgacctag

SEQ ID NO: 43872 - protein, 572 aa, Unknown
  Obtained from environmental sample
  misc_feature (1)..(572): Xaa is any amino acid
MIRSAEPYLKRLLLALSCEISAGYDDAPLEYTLKALEKHAGSFPEAIVIDDFHLCNDLSVARSLPMIRSRLPQGAAFIIISRNPPPEILIDQILKGIVREINALQFTVNEIIALFNKNRIQISEYEAQIIQKKTQGWAAALSAILLSEKKFSSNLLDSQTLNDYFRTYVFDYRKDYHILKKCAVCDILYPSLCNEVTGQNNAWEIISDFAAQTGLLARTGKDTYRFHALLKEFLESELVKDKTIDELSLYKAAAQQFKKDGDILRAIHIAAKSRDIAMVEEYMSVRDDEYGKFDAGVEENTLAIINYIYSEIPASAIKQSTRLSFSCINALFQMGRLEEGYEFIDAVKTLMQSGKGAQMDIISMALWQCVDPRGKIRDIPEVFGRAKPFLEEAKAGKISSYTITFNYPFFHRTEIDLTDASPCIDEFIGKLKKYMGNIPVIIPFIQLTEAGLRYERGELDKAEKISSNALHVAQSFPPELHFCALVLYAEIMRVQGKSYNLETIRTMITQRNAHYLSANFNSYTTNIQLFNGDEDAANRWLSRLDVEETLMIYKMYQYFTAARSLMALGKLT

SEQ ID NO: 43873 - DNA, 765 bp, Unknown
  Obtained from environmental sample
  misc_feature (1)..(765): n is a, c, g, or t
gtgtcccccctcggtgctaattttcctatgccgcgctgctcatcggcccgcgccgcgctgtttgggcgggagccagagggcggcctgggaaaagatttggaagagggtctggcgctgacggtttatggggcctgggctaaggcgagcggggaattgttcctgcgggacgagaatgactgcgagacgcagttgatacatagttccgagttgctgatacctgggtggcacaatgtcgaaaacaccctagccgcaacactgctggccctccacggtggggcggccattgagggggtgcgcgacggcctcaagacatacccagggctggcgcacaggctttcattctgtggggaaaggaatggggcaaaggcatacaacgattccaaggcgacaaacgttgattcgaccctgacggccatccgcgctttagcaggccctttggtgttgatcttggggggtgaagacaaagggagcagctatgggcccctcagatgtgcgctggagggcaagctgcggcacttggtatttttgggcgatgcgattcccatgctggagagggacttgggcgacttgccccatacgaccatcaaaggcttcgatgaggcagtgagaaatgccttggccatagccgcgccaggcgaacaggtgctgctgagccctgcctgcgccagctttgaccaattcaaaaattttgaggagagggggagtaggtttgaagagatagtcctggagtggagggatcaaagatcaggggctggggggctatag

SEQ ID NO: 43874 - protein, 254 aa, Unknown
  Obtained from environmental sample
  DOMAIN (108)...(183): Mur ligase family, glutamate ligase domain
  misc_feature (1)..(254): Xaa is any amino acid
MSPLGANFPMPRCSSARAALFGREPEGGLGKDLEEGLALTVYGAWAKASGELFLRDENDCETQLIHSSELLIPGWHNVENTLAATLLALHGGAAIEGVRDGLKTYPGLAHRLSFCGERNGAKAYNDSKATNVDSTLTAIRALAGPLVLILGGEDKGSSYGPLRCALEGKLRHLVFLGDAIPMLERDLGDLPHTTIKGFDEAVRNALAIAAPGEQVLLSPACASFDQFKNFEERGSRFEEIVLEWRDQRSGAGGL

SEQ ID NO: 43875 - DNA, 567 bp, Unknown
  Obtained from environmental sample
  misc_feature (1)..(567): n is a, c, g, or t
gtgacaagcgtcctgctgccgctgctccccctgtacaaggccggggcgcaaatagattgggtgatagccgactcaaaatccggggtaagcggcgccggcaggggtttaaagcagaacacgcacttccccgaggcgaacgaaaacttcagcgcctactccataggccacaagcaccgccacacgcccgaaatagagcaagagttatcgatagccgcgggaaagccggtaacgataaccttctccccccacctattgccggtcaacaggggtatattatcaacgatatatttaaagacagacatcagcgcaacagaatgtaacgatatagtaaaaaagttttattcaggagcggatttcgtgaggataagggagccgtccgatttgccgcagatcgcttcggtagtccacacgaattattgcgacatagcgtttacgggcggcggtaacgggcagcctgtgatagcggtttcagccttagataatttggtgaaaggggcaagcgggcaggcgttgcagaatatgaatattatgtttgggctgaaggaaacaatggggcttttgaggtga

SEQ ID NO: 43876 - protein, 188 aa, Unknown
  Obtained from environmental sample
  DOMAIN (8)...(164): Semialdehyde dehydrogenase, dimerisation domain
  misc_feature (1)..(188): Xaa is any amino acid
MTSVLLPLLPLYKAGAQIDWVIADSKSGVSGAGRGLKQNTHFPEANENFSAYSIGHKHRHTPEIEQELSIAAGKPVTITFSPHLLPVNRGILSTIYLKTDISATECNDIVKKFYSGADFVRIREPSDLPQIASVVHTNYCDIAFTGGGNGQPVIAVSALDNLVKGASGQALQNMNIMFGLKETMGLLR

SEQ ID NO: 43877 - DNA, 1221 bp, Unknown
  Obtained from environmental sample
  misc_feature (1)..(1221): n is a, c, g, or t
gtgctgtttccgacagcttttagggcgcgttatagacgctctggaaacccttangacaacaaaggcgaaatttcttccgtttgttcgtaccccgcgcttgcaaactcgcctgatccgctgaaaaggaggtgtattacagagcgcataacaacaggagtccgcgccattgacggtcttcttgcggtaggcaaaggccaaaggcttggcattttttccggttcaggcgttggaaaatctacccttcttggaatgattgcgcgtaacacatccgcggatgtaaacgtggtagccctaataggcgagcgcgggcgggaagtgaacgaatttatagaatacgatcttggttccgaggggcttaagcgcagcgtactgatagtaaccccatccaattctccgcctcttgcccgtcttcgcggcgcttatgtggcgaccgcagtggctgaatatttccgcgatcagggaaacgacgttatgcttttgtttgactctattacgcgatttgcccgcgccatgagggaaatagggcttgccgcgggagagcctcccgcgcaaaggggctttcctcccagcatgtttgattccatgccgaaacttcttgaaaggtcgggcacttccgacaaaggaagcataacaggtttttatacagtccttgtagacggcgatgatatggacgaacctgtagcggataccgtacgcggcattctggacgggcatattgttctttcaaggaatcttgctcatgcttatcattaccccgctattgacatattgccgagtatttcccgtctctctcctaaagtatcgggacctgcaaccagaaaagccgcgggcgttatccgcaaaaatatggcggcttacgcggctgccgaagaccttatcaatgtaggcgcgtatcatcagggttcaaatcccgagattgacgaggcaatcgcaaaacacggccttatcgaagattttcttattcaggaagtggacgagcctacgtctttggaagaaactcttacagaaatgtcaaaaattgcaggcgtctttatcccgcctgaagaaatgactgatacaaataagatgcttgtaaaaatagtaaatcaaaaaacaaaagacgatacgcctaaaatcgcggttaagccggttaatacggaagatactaaaatggcgcttaacagcgtggcgtctttattttcttcgctgcctgagatgaatattttagaaggtaacaactga

SEQ ID NO: 43878 - protein, 406 aa, Unknown
  Obtained from environmental sample
  DOMAIN (51)...(261): ATP synthase alpha/beta family, nucleotide-binding domain
  misc_feature (1)..(406): Xaa is any amino acid
MLFPTAFRARYRRSGNPXDNKGEISSVCSYPALANSPDPLKRRCITERITTGVRAIDGLLAVGKGQRLGIFSGSGVGKSTLLGMIARNTSADVNVVALIGERGREVNEFIEYDLGSEGLKRSVLIVTPSNSPPLARLRGAYVATAVAEYFRDQGNDVMLLFDSITRFARAMREIGLAAGEPPAQRGFPPSMFDSMPKLLERSGTSDKGSITGFYTVLVDGDDMDEPVADTVRGILDGHIVLSRNLAHAYHYPAIDILPSISRLSPKVSGPATRKAAGVIRKNMAAYAAAEDLINVGAYHQGSNPEIDEAIAKHGLIEDFLIQEVDEPTSLEETLTEMSKIAGVFIPPEEMTDTNKMLVKIVNQKTKDDTPKIAVKPVNTEDTKMALNSVASLFSSLPEMNILEGNN

SEQ ID NO: 43879 - DNA, 339 bp, Unknown
  Obtained from environmental sample
  misc_feature (1)..(339): n is a, c, g, or t
ttggatggggttactatcagtacgctgcgcttaagcccctcggaaccaagatcgtattctataaattcgttcacttcccgcccgcgctcgcctattagggctaccacgtttacatccgcggatgtgttacgcgcaatcattccaagaagggtagattttccaacgcctgaaccggaaaaaatgccaagcctttggcctttgcctaccgcaagaagaccgtcaatggcgcggactcctgttgttatgcgctctgtaatacacctccttttcagcggatcaggcgagtttgcaagcgcggggtacgaacaaacggaagaaatttcgcctttgttgtcntaa

SEQ ID NO: 43880 - protein, 112 aa, Unknown
  Obtained from environmental sample
  misc_feature (1)..(112): Xaa is any amino acid
MDGVTISTLRLSPSEPRSYSINSFTSRPRSPIRATTFTSADVLRAIIPRRVDFPTPEPEKMPSLWPLPTARRPSMARTPVVMRSVIHLLFSGSGEFASAGYEQTEEISPLLS

SEQ ID NO: 43881 - DNA, 1533 bp, Unknown
  Obtained from environmental sample
  misc_feature (1)..(1533): n is a, c, g, or t
atgcctgatgtcattaataaagtaatgtcgttcattaacagggacggcgaaggcgaatctgaaaaagacatactgctaaagcagatagccaaagatatttctcaaaacaaatacgccaaattttaccgcgtaaggcagcaggaagcggatgttgctttggggcagcttttttacaatctttacaaacttgtttaccctatgcaagtttttctgaaagacccggtcaaaatagccaaaatcaggcagatcacccttgaagcttttttggataagaaaacgatggatcttatcaagaagcttagccttgaagcagtaaacgaaaacatgaaagcaggaagcgatgtaataaaaattctggaagatgatcttgccgctttaaatgcgggatttgacagcccaagaattgtagcggcagacaagtgccacaacctcatcgcttccttgaaacaattcgtgtttttcgattttagctcggtaatcagaaagttcgatcccgaatttaaagagggggattttcttactcagttgaaattttctccggtggatgtcaccgtcctggcttccgatctatctgcctttttgtccgttctgccaacgatggaaagggaagacgactggaaaacagcttttgaaattttaaaatactgtaaaggcggaacagatgttattcctctggcccagtggaccagcatcctgtcgagtcttgccgacataaaacagtccagaattcttgaacttatttccaggatggctacaggcaacccgattttggaggttaaacccgttatcccgcacgaagcactttccaccaagtggttggaaaataaaaccaatgaaatcagggatatgataggcaacattaacgacaaccaaaggcataaccaaataatctctctggaacagtcggtttttggccccctggcgaccatgcggcttgtttactacactccggaaaagggaaaaattcttctggaaaagggacttgatagcagttacatccatgctcaggcgctgaaccatcttcttatttatgttcaggaattcctcagcaaagagattcaggagctttgcgacattcttttagtccgcggtcaatggacaaataactctgctttcagaactatgtcggaggcttttcacgaggctttggacactgccggagaaatactccagctggatgaaagcctttccgaagaaggaagcaacggccccaggctcaagggagccctgctaagggttgacagggacaagacccaaaatcggtatatcaacagtatcattaacactgtaaacgatgatgccctggacataatcaacaaagccgtacctgcccttattgtagtaggcaagcattttaaaatgctgttggatgattgcgaaaaaaaaccttttgaattaattatgaactggaaagagctgaattctgtaacaaagatacctatgggtcaaagaatgggggcggtttataaaaaattaactttgtttgtgcagcttatgacattggaaaaggcctcatcggaggaagaagaataa

SEQ ID NO: 43882 - protein, 510 aa, Unknown
  Obtained from environmental sample
  misc_feature (1)..(510): Xaa is any amino acid
MPDVINKVMSFINRDGEGESEKDILLKQIAKDISQNKYAKFYRVRQQEADVALGQLFYNLYKLVYPMQVFLKDPVKIAKIRQITLEAFLDKKTMDLIKKLSLEAVNENMKAGSDVIKILEDDLAALNAGFDSPRIVAADKCHNLIASLKQFVFFDFSSVIRKFDPEFKEGDFLTQLKFSPVDVTVLASDLSAFLSVLPTMEREDDWKTAFEILKYCKGGTDVIPLAQWTSILSSLADIKQSRILELISRMATGNPILEVKPVIPHEALSTKWLENKTNEIRDMIGNINDNQRHNQIISLEQSVFGPLATMRLVYYTPEKGKILLEKGLDSSYIHAQALNHLLIYVQEFLSKEIQELCDILLVRGQWTNNSAFRTMSEAFHEALDTAGEILQLDESLSEEGSNGPRLKGALLRVDRDKTQNRYINSIINTVNDDALDIINKAVPALIVVGKHFKMLLDDCEKKPFELIMNWKELNSVTKIPMGQRMGAVYKKLTLFVQLMTLEKASSEEEE

SEQ ID NO: 43883 - DNA, 732 bp, Unknown
  Obtained from environmental sample
  misc_feature (1)..(732): n is a, c, g, or t
gtggacgagcttaaagccgccctaaagaatgattccaaatcaaccgcgaagctgctcctctcactggccgactactttatcaaacggtcggtgtggatactgggcggtgacggctggggttatgacattggctttggcggccttgaccacgttattgcttccaaccggaacgtaaacctgctttgtatggataccgaggtttattcaaacaccggcggtcagatgtccaaagctactcctgtgggcgctatcgccaggtttgcggcggctggtaaggaaattgcaaagaaagaccttggcgcaatcgcgatgagttacggttatgtgtatgtggcaaagatttccatgggcgcaaacctggcccagaccatcaaagccatccgcgaagcggagtcctatgacggcccctcgctcataattgcttactcccactgtctgcagcagggcatcgacatgagccacgggatggatcagtcaaaagcggctgttacttccggtatttggccgatttaccgttacgatccgcggcttaaggccgagggcaaaaatcccttccagctggattgcaaggatccgacgacgagccttgaagactttatgtacaaggaagtgcgcttcaagagccttaaggccgccgatccaaagcgggctgatgctctattggccaaggccaaagcgcagaccgaaagggtctggaaggaatacaagtatcttgctgaaagaccattttag

SEQ ID NO: 43884 - protein, 243 aa, Unknown
  Obtained from environmental sample
  DOMAIN (11)...(141): Thiamine pyrophosphate enzyme, C-terminal TPP binding domain
  misc_feature (1)..(243): Xaa is any amino acid
MDELKAALKNDSKSTAKLLLSLADYFIKRSVWILGGDGWGYDIGFGGLDHVIASNRNVNLLCMDTEVYSNTGGQMSKATPVGAIARFAAAGKEIAKKDLGAIAMSYGYVYVAKISMGANLAQTIKAIREAESYDGPSLIIAYSHCLQQGIDMSHGMDQSKAAVTSGIWPIYRYDPRLKAEGKNPFQLDCKDPTTSLEDFMYKEVRFKSLKAADPKRADALLAKAKAQTERVWKEYKYLAERPF

SEQ ID NO: 43885 - DNA, 417 bp, Unknown
  Obtained from environmental sample
  misc_feature (1)..(417): n is a, c, g, or t
atgaacctacgctttgcgcacctgtcgcgatggataatagtctatctcgacaactgttgctacagccgactaaccgacgcggacgcgctacccgacacaatagcggaggccgcgaagatacgggcgattatcgacaaccggtttattggcgggtacgttataataggcggttttgccgtatctatcgaaatggggaacaaccgcaacaacgcaaagcgtacggcttcgcaacgcctttatgacaaaatcattacatacgacgtccaaaagaccgctcagatcattgcaagagcgacgaaattagaatcaatgaagtttggccctatggacgctcgccatcttgcggcggctgaagcggcacaggccgattaccttttgacggtggacaaagattttatagcgaaatgcgcaaaatag

SEQ ID NO: 43886 - protein, 138 aa, Unknown
  Obtained from environmental sample
  misc_feature (1)..(138): Xaa is any amino acid
MNLRFAHLSRWIIVYLDNCCYSRLTDADALPDTIAEAAKIRAIIDNRFIGGYVIIGGFAVSIEMGNNRNNAKRTASQRLYDKIITYDVQKTAQIIARATKLESMKFGPMDARHLAAAEAAQADYLLTVDKDFIAKCAK

SEQ ID NO: 43887 - DNA, 609 bp, Unknown
  Obtained from environmental sample
  misc_feature (1)..(609): n is a, c, g, or t
atggaaggaacaatgcaaataatacaaatagtatttggaattttaaccgctctgatgggattttactccctgctgatatttatcaggattattcttacctggttctcaggcgtacaattcggaaggctggaggagattctggcgcgtattaccgatccctatcttgactggtggcggcaaagactcaacctgagggcaggttatctggacctttcccctattgtcgctatagcggtcctctctgtcgcgcagaccgcctgctcccgcattgcccaaacggggaggatcactattggggttttgctttctatatgtctttccgcgctgtggtcggcagtttcctttatactgggtttttgcatcgtcgtgcttgtcctccgccttatcgcctatcttatcaacgccgatatgttcggcgtattctggcggatcatagattccatatcaaagccgatccagtaccgcgtcagcaggatcatttttagcaggcggttggttcattttacaacaagtatcatcacctcgattctcgttctgaccgctctttggattggcggaggcattgtcatccaattgattgccaacattttatccaggttgccattgtaa

SEQ ID NO: 43888 - protein, 202 aa, Unknown
  Obtained from environmental sample
  DOMAIN (8)...(90): YGGT family
  misc_feature (1)..(202): Xaa is any amino acid
MEGTMQIIQIVFGILTALMGFYSLLIFIRIILTWFSGVQFGRLEEILARITDPYLDWWRQRLNLRAGYLDLSPIVAIAVLSVAQTACSRIAQTGRITIGVLLSICLSALWSAVSFILGFCIVVLVLRLIAYLINADMFGVFWRIIDSISKPIQYRVSRIIFSRRLVHFTTSIITSILVLTALWIGGGIVIQLIANILSRLPL

SEQ ID NO: 43889 - DNA, 684 bp, Unknown
  Obtained from environmental sample
  misc_feature (1)..(684): n is a, c, g, or t
gtgccgacggtaatagaccggatggtgcaacaggcggcagtccaagtcctgcaaccgatattcgagcggacgttttcagattcgagttatggattcaggccggggcggaacgcgcaccaggcgatgcgacgcgcaaagaaatactgtgaggaagggtgccgctatgtggtagacctcgacttggagaaatactttgacacggtgaaccatgacctgttgataaagatggtgagggaagtagtgaaagacgaaacggtcatagggctgatacgcaagttcttaaagagcggcgtaatggtcgatgggctggtgagtcagacggagcaggggacgccgcaaggcgggaacctgtcgccgttattgagcaacatatatttgacgaagtttgaccggatgctggaagagcgaggccataagttcgtcaggtatgcggacgactgcaacatctacgttaaaagccccagagccgccgggcgggtgatggaaagctgtataaagtatctggaaaagaagctaaaactgaaagtgaaccgaaagaaaagcgggagcggaagcccgaagaaattaaagtttctgggtttcagcctgtaccagtggaaagaggcaatcaggatacgggcacatgaaaagtcgttgaatgcgtcggtaatcccccggctttgccgggggactcaaagagtttga

SEQ ID NO: 43890 - protein, 227 aa, Unknown
  Obtained from environmental sample
  DOMAIN (1)...(196): Reverse transcriptase (RNA-dependent DNA polymerase)
  misc_feature (1)..(227): Xaa is any amino acid
MPTVIDRMVQQAAVQVLQPIFERTFSDSSYGFRPGRNAHQAMRRAKKYCEEGCRYVVDLDLEKYFDTVNHDLLIKMVREVVKDETVIGLIRKFLKSGVMVDGLVSQTEQGTPQGGNLSPLLSNIYLTKFDRMLEERGHKFVRYADDCNIYVKSPRAAGRVMESCIKYLEKKLKLKVNRKKSGSGSPKKLKFLGFSLYQWKEAIRIRAHEKSLNASVIPRLCRGTQRV

SEQ ID NO: 43891 - DNA, 438 bp, Unknown
  Obtained from environmental sample
  misc_feature (1)..(438): n is a, c, g, or t
atgagcgatgtaaagagtttagcccatagcagatgggagtgcaagtatcatgtggtatggataccgaaatgccgtaagaagcaactatatgggggagtggcaaaatacttgggaagtatattccacgagctggcaaaagaacgcgagagtcggatagtggaagggcatttatgccctgatcatgtccatatgcttattgagataccacccaaatatgccgtagcgcaagtaatcggttatatcaaggggaaaagcgctatagcgatagcgcggagatttacagggaggcaaaaaaacttcagtgggcagaatttttgggcaagaggatattatgtgtcaacagtcggacgggatgaagtaacgatacgaaagtatatcagggaacaggaagcggaggaccaccggcttgatcagttggaaatgttcaatgataagtaa

SEQ ID NO: 43892 - protein, 145 aa, Unknown
  Obtained from environmental sample
  DOMAIN (19)...(122): Transposase IS200 like
  misc_feature (1)..(145): Xaa is any amino acid
MSDVKSLAHSRWECKYHVVWIPKCRKKQLYGGVAKYLGSIFHELAKERESRIVEGHLCPDHVHMLIEIPPKYAVAQVIGYIKGKSAIAIARRFTGRQKNFSGQNFWARGYYVSTVGRDEVTIRKYIREQEAEDHRLDQLEMFNDK

SEQ ID NO: 43893 - DNA, 585 bp, Unknown
  Obtained from environmental sample
  misc_feature (1)..(585): n is a, c, g, or t
ttggccgagttgatcggtcatcttgcggacggctgggacggtgaattatcagcgctatatcaggcccgcaatcaaaaaatcgcggcgataggtgaaatcggacttgacggcaccaacccgacataccctcctatagacgtacagatgcccgtattcacccgacaattggaaatcgccgtgaccttaaacattccggcggtaatccattcacgcggaacggagaaacgcgccgcggagatttgccgcgatataggcgtcaaaaaagcggtatttcactgtttcaccggcgacgcggagtctttggaatacatagtaaactgcgggtactacgtatcgatatccggcataataacctacaagaactcgcacctccgcgaactgattcgcagcgtccccattgataggctactcatagaaaccgatacgccctacctctcccccgtcccccaccgcggcaaaccaaaccgcccgtccttcctcccccgcaccgccgcggaaatcgcaagattattgggtattaacgagcgggaacttacggttacgctaaaaaacaataccactgcggcgttccctaatatatattaa

SEQ ID NO: 43894 - protein, 194 aa, Unknown
  Obtained from environmental sample
  DOMAIN (1)...(191): TatD related DNase
  misc_feature (1)..(194): Xaa is any amino acid
MAELIGHLADGWDGELSALYQARNQKIAAIGEIGLDGTNPTYPPIDVQMPVFTRQLEIAVTLNIPAVIHSRGTEKRAAEICRDIGVKKAVFHCFTGDAESLEYIVNCGYYVSISGIITYKNSHLRELIRSVPIDRLLIETDTPYLSPVPHRGKPNRPSFLPRTAAEIARLLGINERELTVTLKNNTTAAFPNIY

SEQ ID NO: 43895 - DNA, 798 bp, Unknown
  Obtained from environmental sample
  misc_feature (1)..(798): n is a, c, g, or t
atgatgaacagctttaacaccgagcgcgatactatagcggcgctcaacggctaccccgacatcaaaacagacattccgccgtcattcatacaaaacaagttcccgaaaatcaatgccgccgacttgtcgcccgtagaaaccccgcacgaccggcgcttagagtggaatccgccgggccacggcgacctatacaccgccatacaatgctccggcgtactggacacattgctcaagaggggctacaaatacgccttcatctcaaacatcgacaacctaggcgccgccctcgacacgcggatattgggctactttgccgatcagggcttccccttcctcatggaagtaacggatagaacgttcatggatcgcaaaggcggtcacattgcgcgaatgaaaaacgggcaactggtgcttcgagaggcggcgcagtgcccgccggagtcaatcgatcgctttatgaataccgatttgcacaaatatttcaacacaaacaacctttggatacgcttagacgccctgcacgaaacatggaatcgcggaacgctcacgctgccgatgatccgcaatgtgaaaaaacttgacacccgcgactcggactcgcccgacgtcatacagttggaaagcgctatgggttcggcgctctccgtctttgaagacgccggcgcgctgagagtgccgcgaagccggttcgcacccgtaaaaaactgcgaagagctgcttctcctatggtcggactattatgatttgacggaagactaccgcattgtgatgaacccaacacacaaatcatacagatga

SEQ ID NO: 43896 - protein, 265 aa, Unknown
  Obtained from environmental sample
  DOMAIN (2)...(265): UTP--glucose-1-phosphate uridylyltransferase
  misc_feature (1)..(265): Xaa is any amino acid
MMNSFNTERDTIAALNGYPDIKTDIPPSFIQNKFPKINAADLSPVETPHDRRLEWNPPGHGDLYTAIQCSGVLDTLLKRGYKYAFISNIDNLGAALDTRILGYFADQGFPFLMEVTDRTFMDRKGGHIARMKNGQLVLREAAQCPPESIDRFMNTDLHKYFNTNNLWIRLDALHETWNRGTLTLPMIRNVKKLDTRDSDSPDVIQLESAMGSALSVFEDAGALRVPRSRFAPVKNCEELLLLWSDYYDLTEDYRIVMNPTHKSYR

SEQ ID NO: 43897 - DNA, 306 bp, Unknown
  Obtained from environmental sample
  misc_feature (1)..(306): n is a, c, g, or t
gtggtaaatatgcggcttgcgggaaagacagctttaataagcggggcggcgcagggtttgggggcggcaatggcttatcgctttgccgaagagggtgcttttgtatttatcggcgatcttaacgaggaagcaggaaaagctgccgtcgctgaaattagcaagaaagggggcagggcggcttttctcatcctggatgtttcgaacgaacagagctgggttcaagctatggcacaggtgcagcaggaagctaaacggcttgacattttggtgaataacgcggtatctcgtgccgctcggccaatctga

SEQ ID NO: 43898 - protein, 101 aa, Unknown
  Obtained from environmental sample
  SIGNAL (1)...(29)
  misc_feature (1)..(101): Xaa is any amino acid
MVNMRLAGKTALISGAAQGLGAAMAYRFAEEGAFVFIGDLNEEAGKAAVAEISKKGGRAAFLILDVSNEQSWVQAMAQVQQEAKRLDILVNNAVSRAARPI

SEQ ID NO: 43899 - DNA, 882 bp, Unknown
  Obtained from environmental sample
  misc_feature (1)..(882): n is a, c, g, or t
atgatggtgggatttatcggactcggaatcatgggccgcccaatggccaaaaacctaatcaaagcaggttacaagctggtcgtgtttgacaagttcgccaaatctgacgaccttgttgcccttggtgctgagggagcttcctcaagcaaagaggtcgcgtcaaaaagcaatgtggttattaccatgctccccaactcgccccatgtaaaagaagcgattctgggggaaggcggcgttcttgaaggcagcaaaagcgggcagatagtcgtagacatgagttccatagctccggctgtctcccaggaaattgggacggtcctcaaagccaaaggcgttgagttccttgacgctcctgtttcaggcggcgaaccaaaagcgattgacggcaccctggcgatcatggttggcggggatcagaaaaccttcgacacggtaaagcccattctggaaaaaatgggagcttcggtaatcctggtaggcagtataggcgctggtaacgtggccaaactggcgaatcagatcgtggtggcactgaacatcgccgcggtttccgaagcctttgttcttgcgaccaaggcaggggtcgatccggcgaaagtcttcgatgccatcaaaggcggcctcgccggttccacagtgatgaacgccaaagttccgatgattttggacggcaacttcaagcccggtttcagaatagaattgcacatcaaggatctgcaaaacgccctggataccggccataacctgaacgttccccttccgcttacagccaatgtaatggaaacgcttcaggccctaaaaacggacggcatggcggctaacgatcacagcgctattgtccaattttacgaaaagcttgcgcatatcgaagtgcggaaatag

SEQ ID NO: 43900 - protein, 293 aa, Unknown
  Obtained from environmental sample
  DOMAIN (2)...(161): NAD binding domain of 6-phosphogluconate dehydrogenase
  misc_feature (1)..(293): Xaa is any amino acid
MMVGFIGLGIMGRPMAKNLIKAGYKLVVFDKFAKSDDLVALGAEGASSSKEVASKSNVVITMLPNSPHVKEAILGEGGVLEGSKSGQIVVDMSSIAPAVSQEIGTVLKAKGVEFLDAPVSGGEPKAIDGTLAIMVGGDQKTFDTVKPILEKMGASVILVGSIGAGNVAKLANQIVVALNIAAVSEAFVLATKAGVDPAKVFDAIKGGLAGSTVMNAKVPMILDGNFKPGFRIELHIKDLQNALDTGHNLNVPLPLTANVMETLQALKTDGMAANDHSAIVQFYEKLAHIEVRK

SEQ ID NO: 43901 - DNA, 543 bp, Unknown
  Obtained from environmental sample
  misc_feature (1)..(543): n is a, c, g, or t
atgccgaacatgaccgtcctaaatcccgtggacgcaatagaaacgcaaaagataatgaaggctctggtttcatatcagggaccggcatatattcgaattaaccggaacgatttgcccgtctacacctctccggaaggcgaataccagatcggaaaaatgtaccctataaccgaaggaagcgacgcggttgtttttgccacaggcgttatggtgagtaaggccgttgaagccgccgaaaaactgaaaagcgaaggcatcgcggcgcaggtggtgaatgtcagcacgctcaagcccctgttaaaggaagaagcgttgaaatacgctacagggaaaaaagcgatcgttaccgccgaggaggcggtgaaatcaggcggcctgggcgctgccattgcggcactgctctttggcgaagtcaatgttccattcaggcaggtcgctattgacgatgtctttggaacatcggctcatttttatgaagagcttttgaccgaatacaggatcagcgccgccgacatatacaacgcggtaaaaacagccttatga

SEQ ID NO: 43902 - protein, 180 aa, Unknown
  Obtained from environmental sample
  DOMAIN (51)...(172): Transketolase, C-terminal domain
  misc_feature (1)..(180): Xaa is any amino acid
MPNMTVLNPVDAIETQKIMKALVSYQGPAYIRINRNDLPVYTSPEGEYQIGKMYPITEGSDAVVFATGVMVSKAVEAAEKLKSEGIAAQVVNVSTLKPLLKEEALKYATGKKAIVTAEEAVKSGGLGAAIAALLFGEVNVPFRQVAIDDVFGTSAHFYEELLTEYRISAADIYNAVKTAL

SEQ ID NO: 43903 - DNA, 1302 bp, Unknown
  Obtained from environmental sample
  misc_feature (1)..(1302): n is a, c, g, or t
atggggttggaagggcgtcctcatcctgtttatatgattcaaattgccgatgaccgaacgcggcaggcggtctttgacagggcgtttaagtccattgcgcttaacgaaaacaccagattgaaccttgacggggttcgcatccccagaatcgaagttcccgaatttttgcagtcccttttgcgcaagtgggatatttttataccttctccttattattcaatctacaaagattattttattgtgagcgaatcggcggaggctctccttgccgcattacgcgctatgcagagaaacgatgttttgccgaagactgccgcgtggcgcaatattgccggcgggaaaaacgtttcaagctcttttagcttgtattactcactcgacctttccgtgccgttcttcctgcgaaaaaataccgcccttagcggctttttgtcgctttatcgtcagggacttgcccgcatgagttttaacaaagggcttgtggaaatttctctgtcccttgttcccggttcaggcggcggtataactcttgtaaacggttatccgctggacgccggcgcaagaccttccaaccgcatttacggagcgggcaagggagatgaaagcagaatattctattcttccggtaacacggcatattcgttaaagatagcggataactctaccggtgaactttccggtcaggggaatcactggattattcccgccgtcgatgttacggtaaaagacgctaagggtacggtattcgcctgggttgttacagatcgcggacgcgtaacgcttgtagattccgagatggaagcggtacagggtttccccatgcttacggggctttcgctttcttcagctccaacagcgtttatgggaaaactctacctttgcgatgaagacggcaaagtttattcggttgacgcaacaggcaagcagagcgtttggcaaacttcatttaccgcggctctgcgctccccgccgtctttcctgtccgtttcaggcaaaaaaggaaacgtcgtatacacagccgcttatccaaaaagtttctttggagagatgtggttgcttgacggcgaaggaaaaacattgccaaattggcctaagccgatatctgtagaaaaaagcgacgacgagggcggaggcagttttggcattggttttggatcgccgctgttatttgcgcagaacaacaaagtttatgccgcctttgtaaatcaatcgggacaacttttagtttacgatgaagacgcgattcttgttccgccgttccccgttacgcttgacggcgttttttaccaacagcctttttga

SEQ ID NO: 43904 - protein, 433 aa, Unknown
  Obtained from environmental sample
  misc_feature (1)..(433): Xaa is any amino acid
MGLEGRPHPVYMIQIADDRTRQAVFDRAFKSIALNENTRLNLDGVRIPRIEVPEFLQSLLRKWDIFIPSPYYSIYKDYFIVSESAEALLAALRAMQRNDVLPKTAAWRNIAGGKNVSSSFSLYYSLDLSVPFFLRKNTALSGFLSLYRQGLARMSFNKGLVEISLSLVPGSGGGITLVNGYPLDAGARPSNRIYGAGKGDESRIFYSSGNTAYSLKIADNSTGELSGQGNHWIIPAVDVTVKDAKGTVFAWVVTDRGRVTLVDSEMEAVQGFPMLTGLSLSSAPTAFMGKLYLCDEDGKVYSVDATGKQSVWQTSFTAALRSPPSFLSVSGKKGNVVYTAAYPKSFFGEMWLLDGEGKTLPNWPKPISVEKSDDEGGGSFGIGFGSPLLFAQNNKVYAAFVNQSGQLLVYDEDAILVPPFPVTLDGVFYQQPF

SEQ ID NO: 43905 - DNA, 378 bp, Unknown
  Obtained from environmental sample
  misc_feature (1)..(378): n is a, c, g, or t
atgattttttccgggacgaaaaacaaagaagcggcatggaaatttatgaaatggtggattagcgcggatactcaacttaggtacgggcgggagcttgaaagtatcatgggggcggcggcgcgttatcctacggcgaattatgccgctttcaggcggctttcttggggttcggaacaaatggcggttcttgacgaacaacgcaagtggacggtaggcgtaccggaagttcccggcggatactttataagccgccatattacgaatgcggcgcgtaaaattctaaatgaggggcaggatacacgggaaaccttgttggattatacgcttacaattaacgatgagttaattaaaaaacgaaaagaatttggtttggaatag

SEQ ID NO: 43906 - protein, 125 aa, Unknown
  Obtained from environmental sample
  misc_feature (1)..(125): Xaa is any amino acid
MIFSGTKNKEAAWKFMKWWISADTQLRYGRELESIMGAAARYPTANYAAFRRLSWGSEQMAVLDEQRKWTVGVPEVPGGYFISRHITNAARKILNEGQDTRETLLDYTLTINDELIKKRKEFGLE

SEQ ID NO: 43907 - DNA, 933 bp, Unknown
  Obtained from environmental sample
  misc_feature (1)..(933): n is a, c, g, or t
atgaatttttcaaaatatttaagcaaaataaaagagaagaataaaaaccttataaaagaaatacgcagacataaagtttgttatattttccttgccccctatgcgattgtttttcttcttttctttgtcgctcctgtcgtaatatcaatatttttcagttttacatattataacattcttgaaccgccgaaatttcttggactgcgtaattatatcaatttgctgttaggcgacgatgtgtttttaatttcacttaaaaacacgtttattatggcggcgataaccgggccaatcggctatattgccgctttcctgttcgcgtggtttattaacgaattaccgcgctatattcgcgcttttgtaactttaattttctacgctccttcaatttccggggctgtttacatgatctggacattgatattttcaggcgacgcttacggttacataaacggtattttaatgaacctgggtattcttgatcagcccgttctttggctgactgatcccaggtatatgatgcccgtaatgcttatcgttatcctgtggatgagtttgggcgcaggattcctggcgttccttgccggtctttctacgattgatccttcgctttacgaggctggtcttgtggacggtatttccaaccgctggcaggaactgtggtatataactttaccgaatatgaagggaatgttgatgttcggcgcggtcatggctattacacaatcgttcggagtagcggatgttactgttgcgctggcgggctctccaagtacggactatgccgtgcataccgtagtcaaccatcttgttgattacggttccgtgcgttttgaaatgggttacgcttccgctatcgctacaatattatttcttacaatgattgtaattaacgcggttattcaaaaaatgcttaaacgggtaggaacttaa

SEQ ID NO: 43908 - protein, 310 aa, Unknown
  Obtained from environmental sample
  DOMAIN (81)...(310): Binding-protein-dependent transport system inner membrane component
  misc_feature (1)..(310): Xaa is any amino acid
MNFSKYLSKIKEKNKNLIKEIRRHKVCYIFLAPYAIVFLLFFVAPVVISIFFSFTYYNILEPPKFLGLRNYINLLLGDDVFLISLKNTFIMAAITGPIGYIAAFLFAWFINELPRYIRAFVTLIFYAPSISGAVYMIWTLIFSGDAYGYINGILMNLGILDQPVLWLTDPRYMMPVMLIVILWMSLGAGFLAFLAGLSTIDPSLYEAGLVDGISNRWQELWYITLPNMKGMLMFGAVMAITQSFGVADVTVALAGSPSTDYAVHTVVNHLVDYGSVRFEMGYASAIATILFLTMIVINAVIQKMLKRVGT

SEQ ID NO: 43909 - DNA, 480 bp, Unknown
  Obtained from environmental sample
  misc_feature (1)..(480): n is a, c, g, or t
atgatcagatcggcacgggttaggaacttgaaaagccgcctcttcaaaaaagtttcttttgaatttgagccgcattggggaagcgatttgcaaagcgaacatgaaaagttccttacggagaaaattgcaaatggccctgtaatcgttacagattaccccaaagacataaaggctttttatatgaaacaaaacgatgatgataagactgtccgcgctatggacgtacttgttccgcgtcttggtgaaataatcggcggctcacagagggaagatgatctggaaaaacttatccggcgcatgaaagaaatgaatttgaaaacagaagattattactggtatcttgatctccgccgttacggttctgttccgcattcgggatttggtcttggttttgaacggcttatacaatatatttccggtatgacaaatatccgcgatgtaattccgtatccccgcgctgtaggacaggctgaattttga

SEQ ID NO: 43910 - protein, 159 aa, Unknown
  Obtained from environmental sample
  DOMAIN (1)...(155): tRNA synthetases class II (D, K and N)
  misc_feature (1)..(159): Xaa is any amino acid
MIRSARVRNLKSRLFKKVSFEFEPHWGSDLQSEHEKFLTEKIANGPVIVTDYPKDIKAFYMKQNDDDKTVRAMDVLVPRLGEIIGGSQREDDLEKLIRRMKEMNLKTEDYYWYLDLRRYGSVPHSGFGLGFERLIQYISGMTNIRDVIPYPRAVGQAEF

SEQ ID NO: 43911 - DNA, 1191 bp, Unknown
  Obtained from environmental sample
  misc_feature (1)..(1191): n is a, c, g, or t
gtgtcggactggattaagaacattgtccgggacaaagccggggaaaatctttcctatgcctattcagagaccgagggggttcgttccaccagggaattccttgccgagctggcgaacaagcggcctgtcatagagttacccggctcgaatatgcaaacaccgcctcaaattaaagcggaggacattcttttctttaacggtcttggcgacgcggtggcgaaagttttcggtttcctccgcagggaagcgcgggttctggggccatcccccgcgtactccaccttgtcatccgcggaagccgcgcattccggttatgagcatttaacctaccggcttgatccccagcgggactggatgcccgacatgatcgatgtggaacttaaagtgaagtacaacgattccatcgcggggatactccttatcaatcctgacaaccccaccggcgcggtgtaccctgtggaagttcttctggaatttgtacgaattgcgcgtaactacgggcttttcatcgtctgtgatgaaacatacgccaatattatttacggcggcgcaaaaaccgcggccttatcccaaatcatcggcgatgtgccgggtctggctatgcgatccatttccaaggaagtcccctggcccggcgcgcgctgcggctggacggaggtctacaaccgcagggccgatccccgttttgacgcgtatatcaagagtcttgtggattcaaaacgtctggaagtatgttccaccagccttccccaactttgcatccccgccattctgggaaacgcccgctaccccaagcatcttgaaaaaagggccgccatgtttaagaaaagggccgacgaaatggaacaggctttcgcgggcatatcgggaatcacgattaaaaaaccctgcggcgctttttatgtttccgctgttttcgacgatgttgtgaatgagaatcccggccttcgttccctgccggtcagcgatgaaagcctgcggaattacattcgcgcggaaatcaccaaccttaaaccggacaagcagtttgcctactggctcctggcttccacgggtatctgcgtggttccgctttccggctttgccagcgatctgcccggttttcgttttacattactggaatacaacgatgaaaaacggaactggattttcaatactctggccgaagcggtacaaatttacttacgttga

SEQ ID NO: 43912 - protein, 396 aa, Unknown
  Obtained from environmental sample
  DOMAIN (2)...(383): Aminotransferase class I and II
  misc_feature (1)..(396): Xaa is any amino acid
MSDWIKNIVRDKAGENLSYAYSETEGVRSTREFLAELANKRPVIELPGSNMQTPPQIKAEDILFFNGLGDAVAKVFGFLRREARVLGPSPAYSTLSSAEAAHSGYEHLTYRLDPQRDWMPDMIDVELKVKYNDSIAGILLINPDNPTGAVYPVEVLLEFVRIARNYGLFIVCDETYANIIYGGAKTAALSQIIGDVPGLAMRSISKEVPWPGARCGWTEVYNRRADPRFDAYIKSLVDSKRLEVCSTSLPQLCIPAILGNARYPKHLEKRAAMFKKRADEMEQAFAGISGITIKKPCGAFYVSAVFDDVVNENPGLRSLPVSDESLRNYIRAEITNLKPDKQFAYWLLASTGICVVPLSGFASDLPGFRFTLLEYNDEKRNWIFNTLAEAVQIYLR

SEQ ID NO: 43913 - DNA, 849 bp, Unknown
  Obtained from environmental sample
  misc_feature (1)..(849): n is a, c, g, or t
ttgatgattggacgggaaatagttatacagttgtttaggattctgcctaaagcaatcgcatcggacgtatttgcctacatggacagcgaccatcagcagattattgtcgaagcccttaccgatacggaaatcggcgagattatgaacaaacttttcgtggacgatgcggtagactttatcgaggaaatgcccgccaatgtggtcaaccgcgtacttaaaaacgtacagcctgaaaaacgaaaactaatcaaccattttttacagtaccccgatgattccgcgggcagtattatgaccacggaatatgtcgatcttcgcgaagacgccaccgtgcgcgaggcttttgacactatccgcagtacgggcatcaataaagagacaatttacaactgttatgtgatacgaagggaccgtcttcttgtaggagcgatttccgcgaaaacgcttatgctcgctaaaccgcaggagcgcattggcgatataatggacaccaatctttttttcgcgcatacgaccgacgaccaggaggccattgcggaacaatttaaaaaatactcacttctggcgatgcccgttgttgacaaggagcagaggcttgtgggcattataacggtagacgacattgtagacgttatagttgaggaaagtacggaagatattgaaaagatgaacgccctcgccccgtctgacgatccgtatcttanaacgggcgtattccgtcttgcaagaaaccgcataatatggcttttagtcttgatgctttccgcgaccataaccggcattatcatttccgattttgaaaacggacttgcggctctgccattcttgtcgcttttatcccgatgctaa

SEQ ID NO: 43914 - protein, 282 aa, Unknown
  Obtained from environmental sample
  DOMAIN (4)...(94): MgtE intracellular domain
  misc_feature (1)..(282): Xaa is any amino acid
MMIGREIVIQLFRILPKAIASDVFAYMDSDHQQIIVEALTDTEIGEIMNKLFVDDAVDFIEEMPANVVNRVLKNVQPEKRKLINHFLQYPDDSAGSIMTTEYVDLREDATVREAFDTIRSTGINKETIYNCYVIRRDRLLVGAISAKTLMLAKPQERIGDIMDTNLFFAHTTDDQEAIAEQFKKYSLLAMPVVDKEQRLVGIITVDDIVDVIVEESTEDIEKMNALAPSDDPYLXTGVFRLARNRIIWLLVLMLSATITGIIISDFENGLAALPFLSLLSRC

SEQ ID NO: 43915 - DNA, 393 bp, Unknown
  Obtained from environmental sample
  misc_feature (1)..(393): n is a, c, g, or t
atgctaatggacacaggcggcaacgcaggttctcaatcttcaacccttatcattcgcggtatggcgataggtgaaatcagtccaagagacattatccgcattgtatggaaggaagtgcgcgtcggattattatgcggattagcgcttggaacaataaattttatacgcatttatttaatgaacgggcaaaatcttatgttatgcgtcacagttacgctgtccgtatgctgtacgattataatagcgaaaactgtcggctgtattcttccgttagttgcaaaatgcctaaaaatcgaccccgccgttatggcagcgccgttaatcaccaccattgtagacgccgtatcgctgataatttattttttattcgccaaagcgattattggtttgtaa

SEQ ID NO: 43916 - protein, 130 aa, Unknown
  Obtained from environmental sample
  DOMAIN (1)...(124): Divalent cation transporter
  misc_feature (1)..(130): Xaa is any amino acid
MLMDTGGNAGSQSSTLIIRGMAIGEISPRDIIRIVWKEVRVGLLCGLALGTINFIRIYLMNGQNLMLCVTVTLSVCCTIIIAKTVGCILPLVAKCLKIDPAVMAAPLITTIVDAVSLIIYFLFAKAIIGL

SEQ ID NO: 43917 - DNA, 504 bp, Unknown
  Obtained from environmental sample
  misc_feature (1)..(504): n is a, c, g, or t
atgtttattgtgggaggaggggacgccgcctgcgaggaagcgcgttacctttcaaatttaacggacaagattgtgctggttcacaggcgggataaattccgcgctcaggaagctcttgccgaaagggtaatgaacaacccgcatatagaggttcgttttaacacggtaataaaggaaataaaaggcgataaaaaagtaaaatcggtcgtgttaagcgaaacaacaagcgataaagtttacgaggaagagacggacgcggtttttatttttgtgggaacggttccccagacatcgcttgtcgcgggcgatgatttaaaggccaaacttgatgagagcggctatattgttacaaaccaaaaaatgtttaccagcatatcgggccttttcgccgcgggcgacatacgttccggcgctttccgtcaggttgtaactgccgcagccgacggcgctgtagccgctcacagcgcggcggcatacatagacgcgataaaagacaataaatga

SEQ ID NO: 43918 - protein, 167 aa, Unknown
  Obtained from environmental sample
  DOMAIN (2)...(139): Pyridine nucleotide-disulphide oxidoreductase
  misc_feature (1)..(167): Xaa is any amino acid
MFIVGGGDAACEEARYLSNLTDKIVLVHRRDKFRAQEALAERVMNNPHIEVRFNTVIKEIKGDKKVKSVVLSETTSDKVYEEETDAVFIFVGTVPQTSLVAGDDLKAKLDESGYIVTNQKMFTSISGLFAAGDIRSGAFRQVVTAAADGAVAAHSAAAYIDAIKDNK

SEQ ID NO: 43919 - DNA, 1458 bp, Unknown
  Obtained from environmental sample
  misc_feature (1)..(1458): n is a, c, g, or t
atggactggatccgtcaaagaaatataggcggggtaaaaattttcggatggaatacggcaaatacgcataaattagctgaaactgtaggtatttttcaaggcgcaagtttaaacggagcttttaacattcctcttcttgtcgctacggatcaagaaggcggatggatacgccacataaaaggcgatacaagtgaaactcccggaaatatggcaataggcgcgtctggttatccccgcgacgcgtatctgtccggttattacataggcaaggaattggctctccttggcgtcaacatgaatttcgctcccacagtcgatctttttacaaaccgcgattcagtattgataggaccgcgggcttttggaagcgatcctgtaaaagccgggattttaggcgcggcgtttgtaaaaggacagcttgccgcgggaattatcccgacagcgaaacattatcccggtcacggggatacaaaccttgactctcacggaatccttccaaaaatagaagttccttttgataccctttgggagagggaacttattccctaccgtatgcttgccgcggaaggactgcccgccgtaatgagcggacatcttgcgtttccgctgacgcaatcgggaacagagcccgcttcgctttcatcgtggtttcttcgcgatgtactgcgggataaaataggttttaagggcattgtaataaccgatgatttagtcatgacgggcgcgacatctacaacaggttctctagctcgtaccgcaaaacaggcgattattgccggcaacgatattataatgttttcaagtacgctgcctctttttgatcctgtgtggacgttccttctttcttccatgagggatgaaaaagaattccgtcagtatgtaagaacttccgcccgcagaattctggaattaaaattgacttatatgcgaggtaactcaaaagttccgtatattcccgatttaaaaaaagtagataagggactccatgacccggaaggaaccgcttattttttaaatcttgccgcgcggagcgtaacaatagtaaaaccagttccgtctgattctgtttttccggtaacaaaggaaaacgcggggcgcgttcttttagccggcagattctccgaatttatcagttacggaagaatcgcgtttccggacgccgcggtttaccgtatgccgtcttcggctgtccctaacgatattttatactatgcgcgtaatgcggatactgtaattttctgcctgtcggacaattttgacctgcgtttcctgcgcaatttacagcagttgaataaaaaagtgatagttctttcggtattaagtcccgtttaccttgaaagcgtaaaatgggtaaccggcgcggtcgccgtgtacagttacgctcccgaatcctttgccgccggtttttcggcaataacaggcagaatccccgcgcagggtatacttccatatgagtga

SEQ ID NO: 43920 - protein, 485 aa, Unknown
  Obtained from environmental sample
  DOMAIN (35)...(266): Glycosyl hydrolase family 3 N terminal domain
  misc_feature (1)..(485): Xaa is any amino acid
MDWIRQRNIGGVKIFGWNTANTHKLAETVGIFQGASLNGAFNIPLLVATDQEGGWIRHIKGDTSETPGNMAIGASGYPRDAYLSGYYIGKELALLGVNMNFAPTVDLFTNRDSVLIGPRAFGSDPVKAGILGAAFVKGQLAAGIIPTAKHYPGHGDTNLDSHGILPKIEVPFDTLWERELIPYRMLAAEGLPAVMSGHLAFPLTQSGTEPASLSSWFLRDVLRDKIGFKGIVITDDLVMTGATSTTGSLARTAKQAIIAGNDIIMFSSTLPLFDPVWTFLLSSMRDEKEFRQYVRTSARRILELKLTYMRGNSKVPYIPDLKKVDKGLHDPEGTAYFLNLAARSVTIVKPVPSDSVFPVTKENAGRVLLAGRFSEFISYGRIAFPDAAVYRMPSSAVPNDILYYARNADTVIFCLSDNFDLRFLRNLQQLNKKVIVLSVLSPVYLESVKWVTGAVAVYSYAPESFAAGFSAITGRIPAQGILPYE

SEQ ID NO: 43921 - DNA, 870 bp, Unknown
  Obtained from environmental sample
  misc_feature (1)..(870): n is a, c, g, or t
atggcggttttatcgattcagtctcatgtggtttacggatacgcgggaaataccgcggcggttttccctttgcagaggcttgggcgcgaagtatgggcgattaacacggttgagttttccaatcatacgggttacggttcatggaaagggaaagttcttggcgctgaattggcggcggaacttgttacagggctggaagaacgaaacgctcttaaccgctgcgaggcggttctttcaggctatttaggcgatgcttccgtcgccatggcgattgcagacgccgttaaaaaagtacgaatccaatcgcctaacgctctttacacttgcgatcccgtaatgggagacattggacgaggtttttatgtaaaacccgatattcccgatattttcaaaaaagaacttataccgcttgctgatattgttacgccgaaccagtttgagcttgaagctataaccggaataaacactcaaaatttaagcgatgcgttaaaagcgataaaactcctgcatgatatggggccttccattattcttgtaacaagttacaaagaaaaagaaggagagctttctatgatcgcctccgcttccgataaaaaagaaatctataaaattacaacgcctgaattgccgctcggaaaaggagtagccggtacgggagacatgaccacggcggtatttttatcgaggtatttggaaaccaaagaccttaaaaaaacgctggaactgtgcactgcgtctgttttcggtattttagacgcaagttttaaagcggctgataaaaacgataaattaatagaactgaaaatcattgactcccagcaggagcttgtcgctccttcaattcatcaggcggaaaaaataaccgcgtga

SEQ ID NO: 43922 - protein, 289 aa, Unknown
  Obtained from environmental sample
  DOMAIN (39)...(261): Phosphomethylpyrimidine kinase
  misc_feature (1)..(289): Xaa is any amino acid
MAVLSIQSHVVYGYAGNTAAVFPLQRLGREVWAINTVEFSNHTGYGSWKGKVLGAELAAELVTGLEERNALNRCEAVLSGYLGDASVAMAIADAVKKVRIQSPNALYTCDPVMGDIGRGFYVKPDIPDIFKKELIPLADIVTPNQFELEAITGINTQNLSDALKAIKLLHDMGPSIILVTSYKEKEGELSMIASASDKKEIYKITTPELPLGKGVAGTGDMTTAVFLSRYLETKDLKKTLELCTASVFGILDASFKAADKNDKLIELKIIDSQQELVAPSIHQAEKITA

SEQ ID NO: 43923 - DNA, 888 bp, Unknown
  Obtained from environmental sample
  misc_feature (1)..(888): n is a, c, g, or t
atgaccctttttgaaaaaaatctccttgtcctttcaaaaagaaaccgggagcttagcttaaggctttcaaaaactgttgttaaagaaagccgctataaatttttagaatcccgcacgggagaaataataccgaattgggtagacgttcaaggcgcagcccatccacttcattcgatgatggatccaaaaaaagaagcaaaacggcttgttgaaacattgcaaagcgaaggctttattgttttctttgggcttggagcgggcttttacgcagaagaagcgctcatgcgtgaagaaacgggctttgtactggtcgttgaaaatgatctatgcggccttgctgaacttttgcgccacagggactataccggcctttttgaagatcccgggttcagcctggtagttgatttatccggcgaagagctaaaacatttaattttaaacctgtatcagcctgttttgttcggcggcataagggttattccgcttcgcgccagaaccagttttgacagcgagagctttatcattgccgcaaaagcaatagaagaagcccttgaccgggtttcttcggattattcagtccaggcccgcttcggaaggcgctggctgtcaaacattgtaaggaacctgaaaagcgccttagaggttaagggcagcatcccccagatacacaaggccgcggtttgcgccgcgggcccttccctttcgcttcagattcccactatacaaaaaaaaagaaaagatgcctttcttattgctgttgatacaagccttccctgcctgcttaacgccggaataacgcctgacgcagtcatttcgatagattgccagcatattagctattatcactttatggacggccttcccggaaaacacccttctctttcttga

SEQ ID NO: 43924 - protein, 295 aa, Unknown
  Obtained from environmental sample
  misc_feature (1)..(295): Xaa is any amino acid
MTLFEKNLLVLSKRNRELSLRLSKTVVKESRYKFLESRTGEIIPNWVDVQGAAHPLHSMMDPKKEAKRLVETLQSEGFIVFFGLGAGFYAEEALMREETGFVLVVENDLCGLAELLRHRDYTGLFEDPGFSLVVDLSGEELKHLILNLYQPVLFGGIRVIPLRARTSFDSESFIIAAKAIEEALDRVSSDYSVQARFGRRWLSNIVRNLKSALEVKGSIPQIHKAAVCAAGPSLSLQIPTIQKKRKDAFLIAVDTSLPCLLNAGITPDAVISIDCQHISYYHFMDGLPGKHPSLS

SEQ ID NO: 43925 - DNA, 735 bp, Unknown
  Obtained from environmental sample
  misc_feature (1)..(735): n is a, c, g, or t
atgctggcttcccgttccaaaaaccgccgatttttcgcgagcgcccatcctttaacaaggtatatctcgcaagtttggaagaagcttccagagcttgatacttcaggcggcaacgtaacctacgccgcagtatccctggccgaacagcttggcgcaagcgaaatagagctttacggcgcggatttttcttatccgggaggcatctcttacgcgcagggcgcttacatttattcgcttttttacaaacaccagaaccggctttccccgcttgaatcgcagtgttcggatttactctataggacgcctattgaaaaaataaactgccgcccggataacacgggttcctggtattacgaaaaccggcttttaaagttttacagggaagctctggaaaaaaaaagcctaagtatggaggcggcgattttgcccgagaaagggctgggcgcgcctatatgcgtaaggcaggttgaagaccagaaacaaaaccataacgcaatatcatttggcgaagccgcaacgcaagcggaagattttcttttgcgttataaaaacaaaatcgcgagccttccaaagccagtaaaaaacgccgcgctttaccttggatcgttaagcgatgaacagaaagcagtttttactacaattttccctttggccgcttctttaaaacactgcaattccacccttagctttacagaattaatgaaaaaacaaaggcttataccacagcacaaatag

SEQ ID NO: 43926 - protein, 244 aa, Unknown
  Obtained from environmental sample
  misc_feature (1)..(244): Xaa is any amino acid
MLASRSKNRRFFASAHPLTRYISQVWKKLPELDTSGGNVTYAAVSLAEQLGASEIELYGADFSYPGGISYAQGAYIYSLFYKHQNRLSPLESQCSDLLYRTPIEKINCRPDNTGSWYYENRLLKFYREALEKKSLSMEAAILPEKGLGAPICVRQVEDQKQNHNAISFGEAATQAEDFLLRYKNKIASLPKPVKNAALYLGSLSDEQKAVFTTIFPLAASLKHCNSTLSFTELMKKQRLIPQHK

SEQ ID NO: 43927 - DNA, 768 bp, Unknown
  Obtained from environmental sample
  misc_feature (1)..(768): n is a, c, g, or t
ttgagcgccgtatttgccattgccgtgttaaagcacagttttggcggcctgggggcaaattggatgaatcccgctttgggcggctggctttttgcccgtttttcatggccgcaggccttctcaatagcgcttaacggttccatgaacatcctggatgaatcaggcaccgctgtcggcaatatggtaaatatttccctgaataaaacaattttttcttttctaggggcggaactgcctcccggttacattgaccttttcgcgttaagaacgcccggcattattgccgaccgcgccgtgcttgcgctcgttctcgccactgctatcattgccgcttcccagataagccgttcctggctttcctttgtttacctcgctgttttcgggctgttgacgcggatgctgggggatatttccggttccctatggaacggcgatgtcctttacgcttttctttcaggcggcacccttgtcacggcgtttattctgatctcggatccttcaacaggggctaaatcaatgccaggcggcttaatcgccgcggttcttgccgcggttctgggtttcattttcaggttttatggccgggaattttttggctgcctctatgcggccgccctggttaataccttgattccgttattatacaaagcggaacgccgcctgttttacccttcatccgccggaggctccggccttgccggaggtagcggccataccatcagcggcttaagtgatcatgatataactctggagaagtattatgaataa

SEQ ID NO: 43928 - protein, 255 aa, Unknown
  Obtained from environmental sample
  misc_feature (1)..(255): Xaa is any amino acid
MSAVFAIAVLKHSFGGLGANWMNPALGGWLFARFSWPQAFSIALNGSMNILDESGTAVGNMVNISLNKTIFSFLGAELPPGYIDLFALRTPGIIADRAVLALVLATAIIAASQISRSWLSFVYLAVFGLLTRMLGDISGSLWNGDVLYAFLSGGTLVTAFILISDPSTGAKSMPGGLIAAVLAAVLGFIFRFYGREFFGCLYAAALVNTLIPLLYKAERRLFYPSSAGGSGLAGGSGHTISGLSDHDITLEKYYE

SEQ ID NO: 43929 - DNA, 873 bp, Unknown
  Obtained from environmental sample
  misc_feature (1)..(873): n is a, c, g, or t
atgattaaaaaacctaaaaaattaatcggcggaagaagactaaaccgttcatacggaggcgacgcgtttattatcgcgatccttactatctttggggctttctttgcctatccgcttgttttgcaatttaacaacgcgtttaagccgttaaatgaaattttccgtttcccgcccactctttttgtcaaacgcccgacaataaacaactttcaggatctgtttattcttatgagtaaatcctgggttacattctcgcgttatatttttaatacggtatttattacggttgtcggaactgtcggcttgattattgtcgcgtctatgggcgcgtttgttgtttcaaaatacaaatttcccggttcaaagattttctttaacggcgtaatcataacccttatgttttcaggctatgtaacggcgattcctaactaccttgttatggcgcgccttggttgggtggatacttatctttcagtaattgttcccgcatgggcaatgcctatgggattcttcttattaaagcaatttattgacaccataccggatactttgctggaagcggcaaaagtagacggcgcgaaagagtttcgtatttttatatggatagttctgccgatgattaaaccggcgtggcttaccgtaatgattttctccgttcaaaacctttggaacgcgagagcgtccaactatatatattccgaacaattaaaaacgctgccgtactctcttggtcaaattatcacaggcggtatcgctcgcgccggcgtaggagccgccgtaacgctctttgtaatgattgttccgcttgtgatgtttatatttgcccagagcaatgttttacaaacgatggcaaattcaggaataaaggaataa

SEQ ID NO: 43930 - protein, 290 aa, Unknown
  Obtained from environmental sample
  DOMAIN (84)...(290): Binding-protein-dependent transport system inner membrane component
  misc_feature (1)..(290): Xaa is any amino acid
MIKKPKKLIGGRRLNRSYGGDAFIIAILTIFGAFFAYPLVLQFNNAFKPLNEIFRFPPTLFVKRPTINNFQDLFILMSKSWVTFSRYIFNTVFITVVGTVGLIIVASMGAFVVSKYKFPGSKIFFNGVIITLMFSGYVTAIPNYLVMARLGWVDTYLSVIVPAWAMPMGFFLLKQFIDTIPDTLLEAAKVDGAKEFRIFIWIVLPMIKPAWLTVMIFSVQNLWNARASNYIYSEQLKTLPYSLGQIITGGIARAGVGAAVTLFVMIVPLVMFIFAQSNVLQTMANSGIKE

SEQ ID NO: 43931 - DNA, 663 bp, Unknown
  Obtained from environmental sample
  misc_feature (1)..(663): n is a, c, g, or t
atggcggcgatcacgggaccaatcggttacattgccgctttcctgtttgcgtggtttattaacgagttacctcggtatatccgcgcttttgtaactttaattttttacgcgccttcaatttcaggcgctgtctacatgatatgggcgctgatattttcaggcgacgcttacggttacataaacggtattttaatgaatctgggtattcttgatcagcccgttctttggctgaccgatcccagatatatgatgcctgtaatgcttatagttatcctgtggatgagcttgggcgcgggcttccttgcgttccttgccggtctttcgacgattgatccttctctttacgaggcgggtcttgtagacggaatttccaaccgctggcaggaactgtggtatatcactttgccgaatatgaaaggaatgttgatgttcggcgcggtcatggctattactcaatcattcggagtcgcggatgttaccgtcgcgctggcgggctctccaagtacggactatgccgtgcataccgtagtcaaccatcttgttgattacggttccgtgcgttttgaaatgggttacgcttccgctatcgctacaatcttatttcttacaatgattgtaataaatacgattattcaaaaaatgcttaaacgggtgggaacttaa

SEQ ID NO: 43932 - protein, 220 aa, Unknown
  Obtained from environmental sample
  misc_feature (1)..(220): Xaa is any amino acid
MAAITGPIGYIAAFLFAWFINELPRYIRAFVTLIFYAPSISGAVYMIWALIFSGDAYGYINGILMNLGILDQPVLWLTDPRYMMPVMLIVILWMSLGAGFLAFLAGLSTIDPSLYEAGLVDGISNRWQELWYITLPNMKGMLMFGAVMAITQSFGVADVTVALAGSPSTDYAVHTVVNHLVDYGSVRFEMGYASAIATILFLTMIVINTIIQKMLKRVGT

SEQ ID NO: 43933 - DNA, 1293 bp, Unknown
  Obtained from environmental sample
  misc_feature (1)..(1293): n is a, c, g, or t
atggaattgtttattgaacaaggtgaaagcctgttggaatgcaaacaaaaaatttatgaaaaatacaaacggcctttccatatacaaaaccgaaaagatatcagggttggaggatttttaggcttgtttacaaaacccggcgttcaggttgaattttattttcagccgcaaaggcaaaatacccaaggctttgattataacccccatcttccgctttcacagcatcatggtatgcagaataccgcaaacgtcttgtatcccgaaatgagtcttgaagaggcaaaacatagggttatagagaccgccagaaaaaacattggcgaaacatcggcaagcggcagggaaacttcccagcagattttagatctgctaaaagaaggaataaaggaaataaaagaaaaagtggaaagcacgggtaaaaaagaagaacattcttcttttgtccgcgtgactaaattgttaaaagacaatgatttctcggaaaagtatattaacggaatgttggaaaaactgcggaaagaaatgcctcttgaacagttggaaaattttgatattgtgcaggatcgtgttcttgaatggataggggagagcgtcagcatatataaagaagacgccgttatgcgcaagccaagaatcatggttctgttaggtcctacgggagtgggaaaaacgactacggtgtcaaaactcgcggcgatttacggcatagggacggaaggagtccccgccgtagacgtaagaatgataacaattgacactttccgtatntgcgccaaagagcagcttgaacaaatcggggatattatgcgtattcctgttgcctgcgcgttgaacaagcatgatataaggaaggaaatcgctctttgcggcgaggacatagacttaattttaatcgacactatcggcaacagccccaaagactcgtccaaaataggcgtgatgaaagagattcttgacgggtgtcctaagagcgcagagtatcatctggttataagcgcggcgaccaaatcaagcgatatagaagttattatgcggcagtttgagccttttgactataaatcgattattcttacaaaaatggacgaaaccgacagctatgggaacataatttccgcgcttgcggagaaaagaaaaagtatttcttttataactaacgggcaggaagttcccgaagatataagaagagcgtctattgtgcgttttcttatcaatcttgagggttttaaggtaaaccgggataaaattgaaaaacgcttcccctccggcgaagcggatcagtttaaatggaaataa

SEQ ID NO: 43934 - protein, 430 aa, Unknown
  Obtained from environmental sample
  DOMAIN (209)...(407): SRP54-type protein, GTPase domain
  misc_feature (1)..(430): Xaa is any amino acid
MELFIEQGESLLECKQKIYEKYKRPFHIQNRKDIRVGGFLGLFTKPGVQVEFYFQPQRQNTQGFDYNPHLPLSQHHGMQNTANVLYPEMSLEEAKHRVIETARKNIGETSASGRETSQQILDLLKEGIKEIKEKVESTGKKEEHSSFVRVTKLLKDNDFSEKYINGMLEKLRKEMPLEQLENFDIVQDRVLEWIGESVSIYKEDAVMRKPRIMVLLGPTGVGKTTTVSKLAAIYGIGTEGVPAVDVRMITIDTFRXCAKEQLEQIGDIMRIPVACALNKHDIRKEIALCGEDIDLILIDTIGNSPKDSSKIGVMKEILDGCPKSAEYHLVISAATKSSDIEVIMRQFEPFDYKSIILTKMDETDSYGNIISALAEKRKSISFITNGQEVPEDIRRASIVRFLINLEGFKVNRDKIEKRFPSGEADQFKWK

SEQ ID NO: 43935 - DNA, 789 bp, Unknown
  Obtained from environmental sample
  misc_feature (1)..(789): n is a, c, g, or t
atgtcatcttcgtccggtaatgtaataactattgaagatgttttgaaaatatatacgccggaagtagcccgttatttgtttgcaggaacaaggccaaataccgaatttacaatctcttttgatcttgacgtaataaaaatttacgaagattacgataaaaccgagcgtattgcatggaaaatggaaaacgcgaaagacgaagcggcgtatcaaaaagagcggcgcatttatgaactttcacagatcagcgttgaagggaaaactgcgcgtcttgagagcaggaagccgccgtaccagattcctttccgtcatttatgcaatttaattcaaattgcagacggagatattgaaaaaacacttgcagatttagcggctaacagcggcggtcccaacagcgaacagcttcaggctgtaagaacaagggctgtatgcgcaaaatactgggtcgaaaactgcgctcccgaagaattccgtttccgcctgctgcccgcaggaggagcggcttctctttcgcaggaagaacgcgggaaacttcgtcccatttcagagcttgaaaaaaacgctgttcgcatcctgcgcgatgacgttatctgcaaaattgaagtatttgccgacgacaaaacctgcgcggcggcaatttacgcggcggcggaaaaagcggggattgacggcaaagcgctttttgccgccgcttatcaggcgcttatcggcaaagatcaggggccgcgtcttgcaaacttccttagagttataaacaaacagcggcttctggatattttaaaggattaa

SEQ ID NO: 43936 - protein, 262 aa, Unknown
  Obtained from environmental sample
  DOMAIN (1)...(260): tRNA synthetases class I (K)
  misc_feature (1)..(262): Xaa is any amino acid
MSSSSGNVITIEDVLKIYTPEVARYLFAGTRPNTEFTISFDLDVIKIYEDYDKTERIAWKMENAKDEAAYQKERRIYELSQISVEGKTARLESRKPPYQIPFRHLCNLIQIADGDIEKTLADLAANSGGPNSEQLQAVRTRAVCAKYWVENCAPEEFRFRLLPAGGAASLSQEERGKLRPISELEKNAVRILRDDVICKIEVFADDKTCAAAIYAAAEKAGIDGKALFAAAYQALIGKDQGPRLANFLRVINKQRLLDILKD

SEQ ID NO: 43937 - DNA, 372 bp, Unknown
  Obtained from environmental sample
  misc_feature (1)..(372): n is a, c, g, or t
gtgaaggcgaaactgcctgttctcgttaccttcaacgccgaaggcgaaatgccccgcccagcgtcggctattaagacaatgacctacaaacgagcggttccggtttcggatgccggttcgccgagcaacccggcgggctttgttgaaaaacccgatgcggaggaaaacggcgcggaaaaccctatggccctttggaacattcccgccatcaacgccgacccgcttcagtgcggccttgccggttctcccactaaagtaaagcatatcaattccgtggtgctaaccgctgcggacatcaggtacattgatcccggcgaaacgggaattgcggagctgatccacggcctcatcgcggatcatactttcggataa

SEQ ID NO: 43938 - protein, 123 aa, Unknown
  Obtained from environmental sample
  misc_feature (1)..(123): Xaa is any amino acid
MKAKLPVLVTFNAEGEMPRPASAIKTMTYKRAVPVSDAGSPSNPAGFVEKPDAEENGAENPMALWNIPAINADPLQCGLAGSPTKVKHINSVVLTAADIRYIDPGETGIAELIHGLIADHTFG

SEQ ID NO: 43939 - DNA, 639 bp, Unknown
  Obtained from environmental sample
  misc_feature (1)..(639): n is a, c, g, or t
atgtccattttgaaagaagggtatccttttattatacctgcttttatagcgggggccgccgccgccgcaatttcccgttttgttccttttccgcccggtaaaatcgcgtgtattgaggccggttctttattgataaatttttctttctatggtatgttcttgatccgggatccaaagataaaaattacgcagagcgaggggattattctgtctccttgcaagggaaccgtgctggaagtgacggaagaaaacggcgaaaaggttatccgcgtgtttctttccatttttagcgtccacttgcagagatccccggtaagcgggactgttgttgacgttacgcacaaggacggaaaatattacgcggcgtggaatccgctggcgcaatcccaaaatgagcagaatgttatcactattaagagcgaagacggcggcgtttatgtggtgcgccaaattgccgggcttgtggcgaggcggtgcgtgtcatgggtaaaaaccggcgacaccctgaaaatcggggataaaatcggaatgattaaattcagttctcaggttgatctgcacctgccaaaaacagcggtgatagatgttaaaacgggagacaagacaaaagcgggcattacagtaatggggaaaaaataa

SEQ ID NO: 43940 - protein, 212 aa, Unknown
  Obtained from environmental sample
  SIGNAL (1)...(22)
  DOMAIN (47)...(210): Phosphatidylserine decarboxylase
  misc_feature (1)..(212): Xaa is any amino acid
MSILKEGYPFIIPAFIAGAAAAAISRFVPFPPGKIACIEAGSLLINFSFYGMFLIRDPKIKITQSEGIILSPCKGTVLEVTEENGEKVIRVFLSIFSVHLQRSPVSGTVVDVTHKDGKYYAAWNPLAQSQNEQNVITIKSEDGGVYVVRQIAGLVARRCVSWVKTGDTLKIGDKIGMIKFSSQVDLHLPKTAVIDVKTGDKTKAGITVMGKK

SEQ ID NO: 43941 - DNA, 774 bp, Unknown
  Obtained from environmental sample
  misc_feature (1)..(774): n is a, c, g, or t
atgaaaaggatttttacgtttatactttttaccttaattgccgtttttcctctggctgctgactgggaaacttatgagataataggccgtttattgtctcttcccgggccctgcgcgcccgtaattcaagaccatgcggtgatttttacggctccgtcctccatgcggaaggtcggaatagcgtttgcccatgaagaattcgccagagtgtactggtttaggcaccttatggtccctcaggactggactgcccccgttttactgcccggccagcttgttcccgacgacaccaaggactccggcatccttttttatgtgtacgaagtgcccgaagacgtctttcagcttgaatacaggcttgtagttaacggtctttggtcgatagatccgcttaatccggcttccaagaaagacccggtttccggccttcttttttcaactgtgacccttccgcccaggcctattaagccaaatcccctaagagggatgcccgacggcttaacttttatgttcagcgctcctcccggcgaanacatcacggtagcgggcgattttaacggatgggaccctttcatgtatgaactgaaggaatacccggccggcgtttacagccttgctcttcctttgcgtccgggtactcatcaatatggtatttttctacaagggccggcgttaggttggccctcacaacccttacaggatgtaagcaaaggagggcagcgctgcctcgataattaccgttccataattgcaaagccgttctttttagtgtaa

SEQ ID NO: 43942 - protein, 257 aa, Unknown
  Obtained from environmental sample
  SIGNAL (1)...(20)
  misc_feature (1)..(257): Xaa is any amino acid
MKRIFTFILFTLIAVFPLAADWETYEIIGRLLSLPGPCAPVIQDHAVIFTAPSSMRKVGIAFAHEEFARVYWFRHLMVPQDWTAPVLLPGQLVPDDTKDSGILFYVYEVPEDVFQLEYRLVVNGLWSIDPLNPASKKDPVSGLLFSTVTLPPRPIKPNPLRGMPDGLTFMFSAPPGEXITVAGDFNGWDPFMYELKEYPAGVYSLALPLRPGTHQYGIFLQGPALGWPSQPLQDVSKGGQRCLDNYRSIIAKPFFLV

SEQ ID NO: 43943 - DNA, 831 bp, Unknown
  Obtained from environmental sample
  misc_feature (1)..(831): n is a, c, g, or t
atgggtattaagaaatataaaccaataacgccgggaatgaggcaatggacaagcttggataactcagaccttaccaaaggcgcgaagcctgaaaaaaccctaacaagcggaagaaaagacagagccggtcgcgattcattcggacgcatcagtgtgcgccacaaaggcggcggacacaagcgcaaataccgcgacattgattttaagcgtgacaagatcggtattcccggtaaagttaccacgcttgaatatgatcctaaccgtagcgctaatatcgcccttattaattacaaagacggcgagaaacgctacatcatcgcccccaaagatttaaaatcaggcgctacaattattagcggtcccgacgctcccattgagccgggtaacgctcttccccttgagaatattccgttgggatttaccgtttacaatattgaattaacgctcggtaagggcggacagatggcgcgttccgcgggaaccggcgcgcttattgcggcgaaggaaggcgactatgttacgctaaaattgccttccggcgaaatgcgcatggtgtttaagaagtgttatgcgacaatcggcagtgtcggtaatgaagaccacatgaatacgacattgggaaaagccggacgcaaacgctggcttggcgtgcgccccacagtgcgcggtatgtcaatgaacccggtagatcacccgcacggcggcggtgaaggaagaagcaagggtattcatcctgttactccctggggacagccgactaagggatataagacccgtaaaaaacataagccttcttcaaggtttattgtcagcaggggaaagaagaagtag

SEQ ID NO: 43944 - protein, 276 aa, Unknown
  Obtained from environmental sample
  DOMAIN (43)...(119): Ribosomal Proteins L2, RNA binding domain
  misc_feature (1)..(276): Xaa is any amino acid
MGIKKYKPITPGMRQWTSLDNSDLTKGAKPEKTLTSGRKDRAGRDSFGRISVRHKGGGHKRKYRDIDFKRDKIGIPGKVTTLEYDPNRSANIALINYKDGEKRYIIAPKDLKSGATIISGPDAPIEPGNALPLENIPLGFTVYNIELTLGKGGQMARSAGTGALIAAKEGDYVTLKLPSGEMRMVFKKCYATIGSVGNEDHMNTTLGKAGRKRWLGVRPTVRGMSMNPVDHPHGGGEGRSKGIHPVTPWGQPTKGYKTRKKHKPSSRFIVSRGKKK

SEQ ID NO: 43945 - DNA, 336 bp, Unknown
  Obtained from environmental sample
  misc_feature (1)..(336): n is a, c, g, or t
atgaagatgacccaaaaacaacacaacgatgtagccattttgtgccctgagggcaaaatcacgcttggcgatggagaccaagagcttgcggaggccgtccgcacagagctagaaaaaggatcgcgcaagatattgatagacttcacaaaggtcagctacttggattcttcgggcatcggcgaactggtgggctgcttcacctccatcaagaataagagcggtgagctcagggtatgtggccttaactcaaagatattcggcctgatgaaaatgaccagcctccattccgtttttgaagtgagggacaccgaggcccaagcgctggccgacttctga

SEQ ID NO: 43946 - protein, 111 aa, Unknown
  Obtained from environmental sample
  DOMAIN (2)...(107): STAS domain
  misc_feature (1)..(111): Xaa is any amino acid
MKMTQKQHNDVAILCPEGKITLGDGDQELAEAVRTELEKGSRKILIDFTKVSYLDSSGIGELVGCFTSIKNKSGELRVCGLNSKIFGLMKMTSLHSVFEVRDTEAQALADF

SEQ ID NO: 43947 - DNA, 771 bp, Unknown
  Obtained from environmental sample
  misc_feature (1)..(771): n is a, c, g, or t
atgagtaacataaaaaacgcttttaaaaacggaaaagcatttatcgcctttgtcacaggcggcgacccaagcatagaaaaaacaaaagaatttgtccttgagatgattcgcgcgggcgcggatttaatagaaatcggcattcctttttccgacccaatcgccgaagggccggtaattcaagaagcgaacaaccgcgctctggccgccggcgcgacagtagaaaaacttttcaaccttgttgccgaattgcgaaaagagacaagcgtccctcttttgtttatgacatacgtcaacccggtctttcattatggatatgatgcctttttcaaacgctccggagaagttgggcttgacggtattatcattcccgatctcccgtttgaggaacaggctccggtgaaagaagcggcaagtaaattcaacatagaccttatttccctaatcgctccaacttccgaagcgcggataaaggaaatcgcgaaaaccgcaagcggctttatctaccttgtttcctcaatgggggtaacgggcatacgcggaaaaattaccacagaccttgattcaatcacaaaaacgattaaatccgtttcatcggttccgctcgccattggcttcggcattcacactcccgagcaggcggcgcagatggcgaagatcgcggacggcgttattgtcggaagcgcgattgtaaaaatagccgcggaacacgggaaagaagcgggaccgcatatttatcgttatgtgaaagaaatgaaagacgctattgcttaa

SEQ ID NO: 43948 - protein, 256 aa, Unknown
  Obtained from environmental sample
  DOMAIN (8)...(256): Tryptophan synthase alpha chain
  misc_feature (1)..(256): Xaa is any amino acid
MSNIKNAFKNGKAFIAFVTGGDPSIEKTKEFVLEMIRAGADLIEIGIPFSDPIAEGPVIQEANNRALAAGATVEKLFNLVAELRKETSVPLLFMTYVNPVFHYGYDAFFKRSGEVGLDGIIIPDLPFEEQAPVKEAASKFNIDLISLIAPTSEARIKEIAKTASGFIYLVSSMGVTGIRGKITTDLDSITKTIKSVSSVPLAIGFGIHTPEQAAQMAKIADGVIVGSAIVKIAAEHGKEAGPHIYRYVKEMKDAIA

SEQ ID NO: 43949 - DNA, 1074 bp, Unknown
  Obtained from environmental sample
  misc_feature (1)..(1074): n is a, c, g, or t
ttgattgcgaggattggacgcctgttaaaaattacgcncgggcgtccttcgcttttgtactatgccgataaaatgacccgcgatttaggcggagcgaaaatttacttgaaacgagaggacatgaatcatacgggctcccacaaaatcaacaatgtgcttggacagacattacttgcaaaaaaaatgggcaagacaagaattattgcggagacgggagccggtcagcacggagtagcggcggcaactgcggcggctcttttgggaatggagtgtgaaatcttcatgggtaaggaagataccgaaaggcaggcgttaaatgtttaccgcatgaaacttcttggcgctaaagttcaccctgttacttcgggaacacaaactcttaaagacgctgtaaacgaaacaatgcgtgaatgggtcagccgtgttcatgacacccactatgtgcttggctctgtaatggggcctcaccctttccccgtgattgtgcgggattttcaaagtgtaatcagcagggaagcaagagagcaaattctcgttgcagaagataaacttccggctgcagttcttgcttgcgtaggcggcggcagtaacgctatgggcattttttacaattttatcaatgaccaaagtgtcaggcttatcggctgtgaagcggcaggactgggaatagagactgaaaaacacgccgcttcaatcgcaaaagggactgtcggcatctttcatgggatgaaatcttatttttgtcagaatgaagaaggacaaatagccccagtatactcaatatcggcgggactggattatccgggcatcgggccggaacacgcatggctgcatgacaccaaacgcgccgaatatgtacccgtcacggacgaagaagccgttngcgcgttcgagtacctttcccgcgccgagggaattatctgcgcgatagagagcgcacacgccgtcgcccacacgcaaaaaatagcgcgtaacttcggcaaggacgagagcgtaattatctgcctttcggggcgcggagacaaggatgtttcatcaatagcgaaatacagaggaagaacaataaatgagtaa

SEQ ID NO: 43950 - protein, 357 aa, Unknown
  Obtained from environmental sample
  DOMAIN (10)...(339): Pyridoxal-phosphate dependent enzyme
  misc_feature (1)..(357): Xaa is any amino acid
MIARIGRLLKITXGRPSLLYYADKMTRDLGGAKIYLKREDMNHTGSHKINNVLGQTLLAKKMGKTRIIAETGAGQHGVAAATAAALLGMECEIFMGKEDTERQALNVYRMKLLGAKVHPVTSGTQTLKDAVNETMREWVSRVHDTHYVLGSVMGPHPFPVIVRDFQSVISREAREQILVAEDKLPAAVLACVGGGSNAMGIFYNFINDQSVRLIGCEAAGLGIETEKHAASIAKGTVGIFHGMKSYFCQNEEGQIAPVYSISAGLDYPGIGPEHAWLHDTKRAEYVPVTDEEAVXAFEYLSRAEGIICAIESAHAVAHTQKIARNFGKDESVIICLSGRGDKDVSSIAKYRGRTINE

SEQ ID NO: 43951 - DNA, 387 bp, Unknown
  Obtained from environmental sample
  misc_feature (1)..(387): n is a, c, g, or t
atggaatttacagacgcaatagaagagagaatattcatacaggcggcaaaagaagccgcgtctttctttgccggtaaagatctgatttttgaacacggagaaatgggttttgccgtaattcttccgggcgcgggttttgaactggctatcgccaaatcggaaaaattttatcagcgcattatggaaagattcccgaacagctacgcgaaagcgtgcggtctttgcataggactttcctcgcgttcaggcagattgcttaacaccgacagattgatactggaagcttcggaagcgttgaaaaaagcaaagagcgaaacgaaaacaaagataatagcgtttaaaagcgatctggaaaaatacaggacttttattgcgtcccaaaactag

SEQ ID NO: 43952 - protein, 128 aa, Unknown
  Obtained from environmental sample
  misc_feature (1)..(128): Xaa is any amino acid
MEFTDAIEERIFIQAAKEAASFFAGKDLIFEHGEMGFAVILPGAGFELAIAKSEKFYQRIMERFPNSYAKACGLCIGLSSRSGRLLNTDRLILEASEALKKAKSETKTKIIAFKSDLEKYRTFIASQN

SEQ ID NO: 43953 - DNA, 1341 bp, Unknown
  Obtained from environmental sample
  misc_feature (1)..(1341): n is a, c, g, or t
gtgcaaaaagcctacgacctgtttatctcggtaaacgaaaataaacccgtaacgctgatgcgcatcgccacggcagctatgcggtttttgcgccggcagggcgctctgcccatgcttgatgtgtccgaggaaaacaatgcctgcaccttgcgtattgccgcggagtttgcgcacggacgcgaggactggctgttgttctttaagaatgaaacgcacaatcacccgaccgagatagaaccttttggcggcgcggccacctgtctgggcggtgcgatccgtgatccgctgtcgggacgggcctatgtctatcaagccatgcggattaccggtgcgggcgacccgcgcacgcccatagaaaatactttgccgggcaaactccctcagcgcaagattactaccgccgccgcggagggctatagttcttacggcaatcaaatcggactggctaccggttacgtcaaagaactgtaccatgccggttatgtagccaaacgtctggagaccggcgcagtggtcggcgccgcgccgttaacctcggtgcgcagagagtctccgcaaccgggcgatgtggttgtgctcttgggcggacgcaccgggcgggacggcatcggcggtgccaccggctcttccaaagcgcacggtctcggcacggtatccgaatgtgcggcggaagtgcaaaaaggtaacgcgccggaagagcgcaaacttcagcgtttgttccgcgatccgcaggtcaccaaactgattaaaaaatgtaacgattttggcgccggaggggcggccgtggctatcggtgaattggccgacggggtggatattaatttggatgctctgcctgtgaaatacgacggcttgagcggcacggatctggccatctcggaatcacaggaacgtctggcggcggtagcggccgagactgacctgaaagccctgctgcagcacgccgccgcggaaaatatcgaagcgtcagttgtggcccgcataaccggcgacaagcgtctggttatgaattggcggggacaaaaaatcgtcgatattaccagagctttcttggacacgaacggcgcgccgcgagaggcgtctgtttatgtgccgccggtctgctgccgtactgaaaagcaagcggcagacctaaccctgcggggaaaaattaatgcattctggcccggcaacttaaactttttgttcccaaaaagggatttggtgggaacgcttttgacagttcccatcgggggcgggccagtggtcttcatggccctaccggcggaaaggcccgcccctaaactgaaaacccaataccatggccggcctttgcctgccccggacccgggagacgcgtaa

SEQ ID NO: 43954 - protein, 446 aa, Unknown
  Obtained from environmental sample
  DOMAIN (21)...(176): AIR synthase related protein, N-terminal domain
  misc_feature (1)..(446): Xaa is any amino acid
MQKAYDLFISVNENKPVTLMRIATAAMRFLRRQGALPMLDVSEENNACTLRIAAEFAHGREDWLLFFKNETHNHPTEIEPFGGAATCLGGAIRDPLSGRAYVYQAMRITGAGDPRTPIENTLPGKLPQRKITTAAAEGYSSYGNQIGLATGYVKELYHAGYVAKRLETGAVVGAAPLTSVRRESPQPGDVVVLLGGRTGRDGIGGATGSSKAHGLGTVSECAAEVQKGNAPEERKLQRLFRDPQVTKLIKKCNDFGAGGAAVAIGELADGVDINLDALPVKYDGLSGTDLAISESQERLAAVAAETDLKALLQHAAAENIEASVVARITGDKRLVMNWRGQKIVDITRAFLDTNGAPREASVYVPPVCCRTEKQAADLTLRGKINAFWPGNLNFLFPKRDLVGTLLTVPIGGGPVVFMALPAERPAPKLKTQYHGRPLPAPDPGDA

SEQ ID NO: 43955 - DNA, 456 bp, Unknown
  Obtained from environmental sample
  misc_feature (1)..(456): n is a, c, g, or t
atggcggaaaaggactttaccgatattgaaacttatctggcggccgtacaccccgaaggcgaggccgactcccttcgccgcgatgatcaattgcgcagcctgcttgccaatatccccattccaaaagccatcctcaccaactcgcccagggaacacgccgatttgattctggacaaacttggaatcgccgatctctttacggatatttttgacatacggcaatgcaatttcaagggcaagccgcagaaagaggtttttgacaacgccctaaacaggcttggagtatgcgccgcggaggttctctttatcgacgacaacccgcataatgtagaaaccttcatcaggctgggcggcaagggccttttgtttgatgagaatgacatatacaaaaattattcgctgccgagaatacgggatctcagtcagattgtggaattcctaattcctaactcctaa

SEQ ID NO: 43956 - protein, 151 aa, Unknown
  Obtained from environmental sample
  misc_feature (1)..(151): Xaa is any amino acid
MAEKDFTDIETYLAAVHPEGEADSLRRDDQLRSLLANIPIPKAILTNSPREHADLILDKLGIADLFTDIFDIRQCNFKGKPQKEVFDNALNRLGVCAAEVLFIDDNPHNVETFIRLGGKGLLFDENDIYKNYSLPRIRDLSQIVEFLIPNS

SEQ ID NO: 43957 - DNA, 1110 bp, Unknown
  Obtained from environmental sample
  misc_feature (1)..(1110): n is a, c, g, or t
ttgttggacgggattccgacgcttatcgacaaaaccttcccgctgcccgcgcgcttccgctcctcgctgccaaaggatgtcgcggagctttcacgactgctgacatcgggaaggggcgaacgcggtatttcttacatgggccgccctcccctgctctcggcgtatctgcgctatttccttccatggaacctgtaccgattgtgccgccttctgcctgatcttgacattggtacttcatctggtgacaaaataaccgatctcggctgcgggccgcttacgttcgcttcggccctgtggatctgccgggaggatcttcgttccataccgcttgaatttaactgcgtagaccaaaaccgccgcgcgcttgaggcgggagaaacatttttctcagcccttgtgggaggggattctccctggaaaatcaacaccataaaaggcgatctcaagactttaaaaaatcataacgcaaatctggtctgcgcggttaacgtttttaacgaaatgtacggcgatatttcccggaacgacgaaaacagcctgtcgcttaacgcgaagaaggcgtcgcgtatgcttgccgcttacggctccgcctcatccgcttttctggtcgtggaacccggtttcccccgctgcggggaatttataagccttttgcgcggggcttttttggaacaagggatacggcctttatcaccctgcgcgcatgacaagacatgtcccatgctgaagaattgggaatcgggaataattaaagctaaaaaaaaatggtgccactttgcctttgatacagacgacgcgcccgaggcgctacacaggctttccgcctcggcgaagcttccgaaggaaagggccgtgttaagctttttgtacgccgggaccggacagacaacaggctgcggggaagataaaacaagaatcatctccgacgcttttcccctgccccacggccgtttcgggcgttactgctgttcgcctctggggctcgcgctgcttgcggatgagaaaaacgttattgaaaaaaatccttgcggttctttggtaaacgccgttataagcgatgagcgtgatccgaaaagcggggcgttgatggcaatggggattaaattgtga

SEQ ID NO: 43958 - protein, 369 aa, Unknown
  Obtained from environmental sample
  misc_feature (1)..(369): Xaa is any amino acid
MLDGIPTLIDKTFPLPARFRSSLPKDVAELSRLLTSGRGERGISYMGRPPLLSAYLRYFLPWNLYRLCRLLPDLDIGTSSGDKITDLGCGPLTFASALWICREDLRSIPLEFNCVDQNRRALEAGETFFSALVGGDSPWKINTIKGDLKTLKNHNANLVCAVNVFNEMYGDISRNDENSLSLNAKKASRMLAAYGSASSAFLVVEPGFPRCGEFISLLRGAFLEQGIRPLSPCAHDKTCPMLKNWESGIIKAKKKWCHFAFDTDDAPEALHRLSASAKLPKERAVLSFLYAGTGQTTGCGEDKTRIISDAFPLPHGRFGRYCCSPLGLALLADEKNVIEKNPCGSLVNAVISDERDPKSGALMAMGIKL

SEQ ID NO: 43959 - DNA, 492 bp, Unknown
  Obtained from environmental sample
  misc_feature (1)..(492): n is a, c, g, or t
ttggatactcaaggcagaatgattggaatcaacacgatgatctattccccctcaggcggttcagtcggcattggttttgccgttccggttaataccgcaaaacgcgttgtaaacgaacttattcaatacggaaaagtccgccgaggctggattgacgcgaccgtcgttcagcttttcccaagcctcgtccgttacgcgaaattgcccgtagacgcggggcttcttatttcacgcaccaagaaaggcggtcttgcggaaaaagccggcttacgtcagggcagcgaacccgttcaatacggacgcagtgtaatttatcttggcggcgatattatcacttctataaacggcttaaagacaaatacccttgcagacctttactcgtcattagaggcaagcaagcccggagatgttgtaaaggttgagataatgcgcggcggacagacaactactttgcagataacattggcggatagagaagaagtgatgaattaa

SEQ ID NO: 43960 - protein, 163 aa, Unknown
  Obtained from environmental sample
  misc_feature (1)..(163): Xaa is any amino acid
MDTQGRMIGINTMIYSPSGGSVGIGFAVPVNTAKRVVNELIQYGKVRRGWIDATVVQLFPSLVRYAKLPVDAGLLISRTKKGGLAEKAGLRQGSEPVQYGRSVIYLGGDIITSINGLKTNTLADLYSSLEASKPGDVVKVEIMRGGQTTTLQITLADREEVMN

SEQ ID NO: 43961 - DNA, 1524 bp, Unknown
  Obtained from environmental sample
  misc_feature (1)..(1524): n is a, c, g, or t
gtgacggccgttttttattttttaaaatcacgctggttttcgacttataccgaagaatatatttttttaatatccagatatacagtgtttttgggaacatcgattttctgtattgcttacataaggctgctgtacaaagaaagagggttaagttccggaaaagcgctaatctttacaatagcgcagtttgtttttggtcttgatattttaacggtactgtttcttgcttatttctttaaaggcaaggaaggcgagggaaaagaagaaggcgaaaaaaaggaaaaaacaataagagaaattttgcggttttaccttggtacttacacgccgcctgaattcttgggagttgccgccgcagcttttaagcgaggacctattcctgcggcggcaaaaaaaacaggagcgttttttgcggatcagtttaagaatcaccgtgtgcgcatcgccgtaattatcgccattctgtgtttaattcccgtcggctcttacgcctataaattttatcaatcgcgtttgccccagcttatcagcatagattaccgtgtgcagactcccgacacaaagggagaccccgaagaacgctccaaacttacggtatatttcagaggctcggcggcaacgctggaaatgaagggcggtgaagttcccgaaggtttaataactatcaatccgccgattgacggcgtatggagatggattgatgatgatacgctggttttttctacggaacaaagatggaagataggaacccgttataccgtcaatttttccaaagatttatttccttcccatataaaagtaaataacagttttaattttgaaactgaagatttttatatgcaaattgtcgaaaatgaattttacatagacccggaagacagcgctattaagcgcgtgttattcacaatacggactaattatccgattgatacgtcttctctggaaaaaaatatcgccatcgagccgcaaataacagccgattcaggttcgttaaagaaaaaattatatctgtactcgctgacatataacgaggatcgtacccgcgcttacattgtatccgaatcattgggaatgcccgcaaaaacagttgaaatgcggcttactgtttctgcgggcgtaagagacgctgacaatgagggaaaagctgcgggaagtcagagcgcttatgtgcaaattcccggtatgaagaattatgttagtataaataatgtagattgtataacggtgaaaaatgacaagcagatatacgatcgcgttttggtaatggaaaccaatggaactgtagacataaatgaattaacaaagaacattacggcgtggatattgccgaaggatttacccgctctgccgggattaagggcgcagaagaactacgattgggacagcttgtcggagatagtgcccgaagttttggcgttatcaaaaaaaattactcttgaacctctccccaacgcgcttaaattcagttcaaccaacagttggaaattgaagccgaagcggggcagtatatttattttaagctga

SEQ ID NO: 43962 - protein, 507 aa, Unknown
  Obtained from environmental sample
  misc_feature (1)..(507): Xaa is any amino acid
MTAVFYFLKSRWFSTYTEEYIFLISRYTVFLGTSIFCIAYIRLLYKERGLSSGKALIFTIAQFVFGLDILTVLFLAYFFKGKEGEGKEEGEKKEKTIREILRFYLGTYTPPEFLGVAAAAFKRGPIPAAAKKTGAFFADQFKNHRVRIAVIIAILCLIPVGSYAYKFYQSRLPQLISIDYRVQTPDTKGDPEERSKLTVYFRGSAATLEMKGGEVPEGLITINPPIDGVWRWIDDDTLVFSTEQRWKIGTRYTVNFSKDLFPSHIKVNNSFNFETEDFYMQIVENEFYIDPEDSAIKRVLFTIRTNYPIDTSSLEKNIAIEPQITADSGSLKKKLYLYSLTYNEDRTRAYIVSESLGMPAKTVEMRLTVSAGVRDADNEGKAAGSQSAYVQIPGMKNYVSINNVDCITVKNDKQIYDRVLVMETNGTVDINELTKNITAWILPKDLPALPGLRAQKNYDWDSLSEIVPEVLALSKKITLEPLPNALKFSSTNSWKLKPKRGSIFILS

SEQ ID NO: 43963 - DNA, 903 bp, Unknown
  Obtained from environmental sample
  misc_feature (1)..(903): n is a, c, g, or t
gtgatgctctgcgttagtaaatatcaatcaggcggcgtggataacgctctttatgacgctcccgggcgcgggcgcaacccggaaataaccgatgaagagaaaacgtggatcataaacatagcgtgtcaaaggccccatgacttagggcgtccagaagagacgtggacatatacggggcttgcgtcatatataaacaaaaacgcagaggcgcaaggctatacaaggctttccactatcagccgttccggcataagagacatactggagcgggcgcagataaagccgcataaaatccgatactactgcgaaaaaagagacccggcatttgaagcaaaaatgcatgatgttctggtcgcatacaaggaagtaaagatgcaaagtgatgaacaggggcgcattcttccatgcgaaggtacaaaaatcaataccatatcatatgacgagaaacccggcatacaggcgattgccactacgtcgcctgacaggatgccgacggcggcaaacgggtgcaggcagcgcgattacgaatatgaaaggcttggcaccctgtctttgttagcggggattgatttgcttaccggacaagcgatacctttaataagcgaaacgcataaaagcaaagactttatagagttcttaaaaatagttgacggcaagtatccgaaagaagaaaagatcaggattattctggataatcatagcgcgcatacatcaaaggaaaccggtaagtttgtcgcctccaagccgggccgttttgaattcgtatttactcccacgcacggttcgtggctgaacatgatagaaagtttttttagcaaactgacacgccaaatgttaaggggcattagagtttcatcaaagaagaacttattaaaaggatttatcaatattttgacgagataa

SEQ ID NO: 43964 - protein, 300 aa, Unknown
  Obtained from environmental sample
  misc_feature (1)..(300): Xaa is any amino acid
MMLCVSKYQSGGVDNALYDAPGRGRNPEITDEEKTWIINIACQRPHDLGRPEETWTYTGLASYINKNAEAQGYTRLSTISRSGIRDILERAQIKPHKIRYYCEKRDPAFEAKMHDVLVAYKEVKMQSDEQGRILPCEGTKINTISYDEKPGIQAIATTSPDRMPTAANGCRQRDYEYERLGTLSLLAGIDLLTGQAIPLISETHKSKDFIEFLKIVDGKYPKEEKIRIILDNHSAHTSKETGKFVASKPGRFEFVFTPTHGSWLNMIESFFSKLTRQMLRGIRVSSKKNLLKGFINILTR

SEQ ID NO: 43965 - DNA, 672 bp, Unknown
  Obtained from environmental sample
  misc_feature (1)..(672): n is a, c, g, or t
atgctccacacgattaaaatgatacgtcagtattttccgcagtacagagattacaaaactgccgttatttccccctgtattgccaagcggcgggaatttgacgaaaccgggcatggggactacaacgttacaatgtttgccctgaaaaaatatttacatgatcagaatatcaatatttcttccaaacaagaggtgccatataccgggatacttgccgaacgggcggtcaacttttccagccccggcggtttgcttgacaccgccgagcggtttataccgggcataaggcggaatacccgcaagatcgaaggattacacaatatctacccctacctgactgaaattgccgaagaattattacaccagcagggagtggaattcccgctcctgatagactgtctgaattgcgagaagggctgtaacggcggccccggaacaggcaaccactccgtgcctttggacaaactggaaacacctatccgcaaacgcagcgcggaacatgagaaacaaattgcccggaagaataataaaaataattataaaaaataccacgaacagttgaaccagttctggaaacgcggcctgtatgaccgcagttaccgcgaccgttcgggaaatcttgttttgcgccatccaaacgaggccgaattaaccgagtttatcgtagaatga

SEQ ID NO: 43966 - protein, 223 aa, Unknown
  Obtained from environmental sample
  misc_feature (1)..(223): Xaa is any amino acid
MLHTIKMIRQYFPQYRDYKTAVISPCIAKRREFDETGHGDYNVTMFALKKYLHDQNINISSKQEVPYTGILAERAVNFSSPGGLLDTAERFIPGIRRNTRKIEGLHNIYPYLTEIAEELLHQQGVEFPLLIDCLNCEKGCNGGPGTGNHSVPLDKLETPIRKRSAEHEKQIARKNNKNNYKKYHEQLNQFWKRGLYDRSYRDRSGNLVLRHPNEAELTEFIVE

SEQ ID NO: 43967 - DNA, 408 bp, Unknown
  Obtained from environmental sample
  misc_feature (1)..(408): n is a, c, g, or t
gtggaggagactctgctggtgacgaggaaagaactcgcctacctgactcgaaggaaggccatcaacctgcgcggcgaagtactgggcatctccctcctcagcgaattgctcaacttaaaggacaatcacccccaagatgagtccgaaagcgaagaagccgatgcaaagcaacctgaaaagcagcaagcttccagcatcccagtagtcgttgtttcagcagggggtcgccggatgggcttggtcgtcgatgccttcgtaaagaggcaagagatggtcatcaagcctttggcgccctacttggccagcctcccaggcatcagtggtgccagcatcttgggtgacggcggtgtggtcctgatactcgaccccgccgaactgataacattggcggtccaggtggcatcatga

SEQ ID NO: 43968 - protein, 135 aa, Unknown
  Obtained from environmental sample
  DOMAIN (24)...(131): CheW-like domain
  misc_feature (1)..(135): Xaa is any amino acid
MEETLLVTRKELAYLTRRKAINLRGEVLGISLLSELLNLKDNHPQDESESEEADAKQPEKQQASSIPVVVVSAGGRRMGLVVDAFVKRQEMVIKPLAPYLASLPGISGASILGDGGVVLILDPAELITLAVQVAS

SEQ ID NO: 43969 - DNA, 954 bp, Unknown
  Obtained from environmental sample
  misc_feature (1)..(954): n is a, c, g, or t
atgagcgcactcggacaagcccccacagcaaatgaaggcgaagccgaggcggcttcagagtcttctgtgaaacaatacatgtcctttgtggtggaaggacattcgtatgccctccccttgtccgatgtggccgaaatcacgccctatagagaattgaaccacatgccgcacatgcccaaaaatgtcgtcggcctgttggacttgcgcggggctgtactgcccgtcatcacgctcagaatgaggatgggcttgccgataaaggaatcgcacgctggcgacatgatattgctgttggctcaacaaggctctagagtcggggttctagttgaccaagtggagtcggtcatcacggccaccgaggagcagcacggccaaataagccccctgctcgaaggtgacagtgggaagtggataagggccattttgcttctcaacggaagggtggtgttggtgcttgagccttccgcgttactcaaaatgccaccagaagaagacccacgcgacgacggctcggggtcagaacacactagagtcgatgtcaacgaaatagaaaaaaaaatggatgaagggctgcgcgaactgattgccatggccggctccagagaaaatggcatgatcgtgccggcattgaacgcagtcataggacacaacgagtcagaagtgaccaaagtgcttgaccgcgtagaaaaaatgttggtttccacggactcagccgccgtggggattgcaaagttcaaggaagaagtagcaatgtgtggcatcactactttcgatggtgtaatcgccgaactggaaaaaaccgtgcagggcatgaataacaccatctttgacgtcttcgatcagctgcagttccaagacatagtcaggcaaaaactagaaaaagtactccaccacatccttggcatgcaaggtgttatatcagacgggttttcgtctggaaaaacagcctcctag

SEQ ID NO: 43970 - protein, 317 aa, Unknown
  Obtained from environmental sample
  DOMAIN (25)...(158): CheW-like domain
  misc_feature (1)..(317): Xaa is any amino acid
MSALGQAPTANEGEAEAASESSVKQYMSFVVEGHSYALPLSDVAEITPYRELNHMPHMPKNVVGLLDLRGAVLPVITLRMRMGLPIKESHAGDMILLLAQQGSRVGVLVDQVESVITATEEQHGQISPLLEGDSGKWIRAILLLNGRVVLVLEPSALLKMPPEEDPRDDGSGSEHTRVDVNEIEKKMDEGLRELIAMAGSRENGMIVPALNAVIGHNESEVTKVLDRVEKMLVSTDSAAVGIAKFKEEVAMCGITTFDGVIAELEKTVQGMNNTIFDVFDQLQFQDIVRQKLEKVLHHILGMQGVISDGFSSGKTAS

SEQ ID NO: 43971 - DNA, 975 bp, Unknown
  Obtained from environmental sample
  misc_feature (1)..(975): n is a, c, g, or t
ttgaaaatgccgaagaattactttattttaatattaaaagtattaatgcttggagtatttatgctgatagctaaagctgaacaaaggattgagcagtatttattgtatctcaaacaaaaccggtacagggaactttttaccctggattttgaaacctttgaaacaacagagacatacagaagccctcctgaaaactctggctgggaaaaaatcgccgttccttatgcatatggaaaaccctggcattgctcctggttccgcgcttcctacagcgcccctgcccaaagcaggtatccgctttacattcgggcgatcccaaacgcggattccctggtttttatcaacgggaaaccggctggggcctttaacccggcgcataaaaaaattctcgtcaaggcggatggcaaaagccataccattcacatcgagtcctacgcgggtcattactaccccggatgccatcccttccagaaccgtcaggtgattcttacgctgggtcgtcacatcaacgactatcccaatacttttgtcggcggcgctctggtggaaaggatcgagcctgtctatgccctgtactacgacgttctctgcctttttaatttagccaggactctggacgaaaattcgctgagaaaggccagaattatcagtgggctatacgatgccctcatggacattcattattattccacagggacagtcctggaagaagaaactatcgcggccaggaagaagattctcccgcttcttgaagccaaaaacggctctaccgttcctgagatttatctcataggccacgcccacatcgatcacgcatggttatggcacatcggcgagactgaacggaagatcacccgcacatacatcaacatggctaaactcgcggaagaataccctgagtttatttttatccagacccagagcgcccaactcgaaattgtcaacgggagtaccctgatattttcgaggctgtaa

SEQ ID NO: 43972 - protein, 324 aa, Unknown
  Obtained from environmental sample
  SIGNAL (1)...(26)
  misc_feature (1)..(324): Xaa is any amino acid
MKMPKNYFILILKVLMLGVFMLIAKAEQRIEQYLLYLKQNRYRELFTLDFETFETTETYRSPPENSGWEKIAVPYAYGKPWHCSWFRASYSAPAQSRYPLYIRAIPNADSLVFINGKPAGAFNPAHKKILVKADGKSHTIHIESYAGHYYPGCHPFQNRQVILTLGRHINDYPNTFVGGALVERIEPVYALYYDVLCLFNLARTLDENSLRKARIISGLYDALMDIHYYSTGTVLEEETIAARKKILPLLEAKNGSTVPEIYLIGHAHIDHAWLWHIGETERKITRTYINMAKLAEEYPEFIFIQTQSAQLEIVNGSTLIFSRL

SEQ ID NO: 43973 - DNA, 402 bp, Unknown
  Obtained from environmental sample
  misc_feature (1)..(402): n is a, c, g, or t
atggcattaagtaaagagcaaaaagaatggcttaaaaagatttcagatgattctataaacatgaagaaagtcccaaaagaactctttacagatgaattctgtcttgccaccgtgcaacaaaacggcgaggcgctggaatacgtccccgacgcgcttatcaccgaggctctctgtctttccgcgatacaacaagctgtcggtgcgctgaaatttgtccccgacacgctgaagaccgaggccctctgccttgccgctgtgcaggaaaacggctatgcgctgtattgcgtccccgacgcactgaagaccgaggccgtctgccttgccgctgtgcaacaagacggcagtttgcttaaatacgtccccgatgcgctaaagaccgaaggcctctgcattaagcgatga

SEQ ID NO: 43974 - protein, 133 aa, Unknown
  Obtained from environmental sample
  misc_feature (1)..(133): Xaa is any amino acid
MALSKEQKEWLKKISDDSINMKKVPKELFTDEFCLATVQQNGEALEYVPDALITEALCLSAIQQAVGALKFVPDTLKTEALCLAAVQENGYALYCVPDALKTEAVCLAAVQQDGSLLKYVPDALKTEGLCIKR

SEQ ID NO: 43975 - DNA, 1029 bp, Unknown
  Obtained from environmental sample
  misc_feature (1)..(1029): n is a, c, g, or t
atgaaaacccccagaaaaacttccagttataatactcgttacggagtaccgatttatgacacacatccgctgacgcangtgcccgatgtgctgaagaccgaagccatctgccttgccgccgtgcaacaagacggacgtgcgcttgaatatgtccctgaggcgctgaagaccgaggccatctgccttgccgccgtgcaacaacattacggtgcgctgaaagacgtccccgactcgaagaagaccgaagccgtctgccttgccgcagtacaaaaagattatcatgcgtttgaagacctccccgaagcgcggaagaccgaagccgtctgccttgccgcagtgcaacaaagcggcagaacgcttgaattcgtccccgaggcactaaagaccgaggccctctgccttatcgcagttcaagaaagcagcggcgcgctggaatacgtccccgacgcgttaaagaccgaggctgtctgccttgccgttgtacaaaaagacgactgggcgctggagtacgtccccgacgtgtttagaaccgaagctgtctgccttgttgcagtgcaaaaaagacgtgatgcgtttgaatacgtcccggaagcgctgaagaccgaggctgtctaccttgccgcagtgcagaaaaacggctgggcgctgaaatacatccccgacgcgctgaagactgaagccctctgtcttgccgcagtgaacaaaaccggccgggcgctggaatacgtcccggaagcgcttaagaccgaggccctctgccttgccgcagtgaaacaaagaagtgatgcgcttgaattcgtccccgaggcgcataagaccgaggctgtctaccttgccgcagtgaaaagaaacggctatgcgctgcaacacatccccgaggcgcagaagactgaggccctctgccttgaggcggtgcggcaatacggctgggtgctcgaatacgtccccgaggcgcagaagaccgaggccttctgctttgccgcagtacaacaggccggcggtgcgctgaaattgtccccgaagcgctaa

SEQ ID NO: 43976 - protein, 342 aa, Unknown
  Obtained from environmental sample
  misc_feature (1)..(342): Xaa is any amino acid
MKTPRKTSSYNTRYGVPIYDTHPLTXVPDVLKTEAICLAAVQQDGRALEYVPEALKTEAICLAAVQQHYGALKDVPDSKKTEAVCLAAVQKDYHAFEDLPEARKTEAVCLAAVQQSGRTLEFVPEALKTEALCLIAVQESSGALEYVPDALKTEAVCLAVVQKDDWALEYVPDVFRTEAVCLVAVQKRRDAFEYVPEALKTEAVYLAAVQKNGWALKYIPDALKTEALCLAAVNKTGRALEYVPEALKTEALCLAAVKQRSDALEFVPEAHKTEAVYLAAVKRNGYALQHIPEAQKTEALCLEAVRQYGWVLEYVPEAQKTEAFCFAAVQQAGGALKLSPKR

SEQ ID NO: 43977 - DNA, 837 bp, Unknown
  Obtained from environmental sample
  misc_feature (1)..(837): n is a, c, g, or t
gtgctggaaaaactagacttggacaatgtgcctgttaccagcaggaaattcccttatgtcggcttcaaacccgatcgcgaaataggcaacaatgtgttgaaggcggaaaagctcaactgctcttttgaggggacaaagctcctaagtgatttttcgttccaggtaaacaagggcgacaaaatagcctttgtggggcttgaacacgcgtcaaagtccgcgttattcgacattatttgcggcgagaaaaaaccggaaagcggtgttttttcatggggccagacaacggctttttcctacttccccaaagagaactccgcctttttcaattcgaaactttccataaccgactggctaaggcagtattcgtctgatgaggatgagacatacatccgcagttttctgggcaggatgcttttttccggcgacgaggcgttaaaacccgtcaatgtgctttcagggggcgaaaaagtccgctgcatgctttccaaaatgatgctttccggcgcgaacgtgctgatccttgacgagccgaccaaccaccttgaccttgaggcgatcaccgccctcaacgacggtcttgtcgcgtttcccggcgtcattcttttcaactcgcatgatcacgaatttattaattccattgccaacaggatcattgagattctgccacagggggagagtcctgttgctcctcaaccgagcccgaagggtgaaggttcccctcttgacagtaacagttcatacattgaccgcatgatgccttttgacgattacctgatggacaatgccgtcaaacagatcagaaacgcggcataccatcaggcgcagagaagaatataa

SEQ ID NO: 43978 - protein, 278 aa, Unknown
  Obtained from environmental sample
  DOMAIN (58)...(224): ABC transporter
  misc_feature (1)..(278): Xaa is any amino acid
MLEKLDLDNVPVTSRKFPYVGFKPDREIGNNVLKAEKLNCSFEGTKLLSDFSFQVNKGDKIAFVGLEHASKSALFDIICGEKKPESGVFSWGQTTAFSYFPKENSAFFNSKLSITDWLRQYSSDEDETYIRSFLGRMLFSGDEALKPVNVLSGGEKVRCMLSKMMLSGANVLILDEPTNHLDLEAITALNDGLVAFPGVILFNSHDHEFINSIANRIIEILPQGESPVAPQPSPKGEGSPLDSNSSYIDRMMPFDDYLMDNAVKQIRNAAYHQAQRRI

SEQ ID NO: 43979 - DNA, 1362 bp, Unknown
  Obtained from environmental sample
  misc_feature (1)..(1362): n is a, c, g, or t
gtgttatacacgccattggaaataaaagaaaccgtagacatgtttctgcgctacaagctggatatacgcgctattacccttggggtgtcccttctggactgcgtttctccttccggcgacgagtgccgaagaaaaatccgcgacaagctgatgcggatagccggcccgctggttaagaccggcaaggacatagagaacgaatacggcatacccataataaacaaacgcatagcaattacgcctgtcgctttgatagcggcctcctgcgaggaaagcgattttacaccttttgcccaaacgcttgacaaagccgccgtcgatcttggcgttgattttgtcgggggtttttccgcccttgtgcagaaaggtttatcaagcggcgatgacaggttaattgcctctttgccgtccgcgctttcccaaaccaaaagggtatgcgcctcggtcaatgtcgccgccacaaaaagcggaatcaacatggacgctgtaagggtcatgggcggcgtgattaaacagatagcggaaaagacagcggaccgggacggcataggctgcgcgaagctcgtggtgttctgcaacgctcctgaggataatcccttcatggcgggcgcttttcacggcgtcggcgagggggaaagctgccttagcgtgggggtgtcgggcccgggcgtggttaaggccgcgctgganaacctaaggggagccagctttgacgagcttgccgacgcgattaaaaaaaccgccttcaagattacccgcatgggacagcttgttggtatggaagccgccaaacggttaaacgtgcctttcggcatattggatctttccctggctccgactcccgaggtaggcgattcggttgcccgcatacttgaggagatgggccttgaaaccgccggaacacacggcacaacggcggctctcgccatgttaaccgacatgataaaaaaaggcggcataatggcgtccacccatgtgggcggtttttccggggcctttatccccgtctccgaagacgaaggaatggtaaacgcggtgaggaaaggcgcgatcagccttgacaagcttgaggcgatgacttcggtttgctctgtcggactggacatgatcgccctgcccggcgacacgagcgccgccaccatctcggcgatcattgccgacgagatggcgatcggcatggtgaacaacaagaccactgcggtgcggattattccggtgcccggaaaaaaagctggcgactgggcggaattcggcggcctcctcggcggcgccccggtcatgccggttaatcccgcaagaagcgaagttttcatcaaccgaggcgggagaataccggcgccggttcattcgttcaggaattag

SEQ ID NO: 43980 - protein, 453 aa, Unknown
  Obtained from environmental sample
  DOMAIN (1)...(453): Uncharacterized ACR (DUF711)
  misc_feature (1)..(453): Xaa is any amino acid
MLYTPLEIKETVDMFLRYKLDIRAITLGVSLLDCVSPSGDECRRKIRDKLMRIAGPLVKTGKDIENEYGIPIINKRIAITPVALIAASCEESDFTPFAQTLDKAAVDLGVDFVGGFSALVQKGLSSGDDRLIASLPSALSQTKRVCASVNVAATKSGINMDAVRVMGGVIKQIAEKTADRDGIGCAKLVVFCNAPEDNPFMAGAFHGVGEGESCLSVGVSGPGVVKAALXNLRGASFDELADAIKKTAFKITRMGQLVGMEAAKRLNVPFGILDLSLAPTPEVGDSVARILEEMGLETAGTHGTTAALAMLTDMIKKGGIMASTHVGGFSGAFIPVSEDEGMVNAVRKGAISLDKLEAMTSVCSVGLDMIALPGDTSAATISAIIADEMAIGMVNNKTTAVRIIPVPGKKAGDWAEFGGLLGGAPVMPVNPARSEVFINRGGRIPAPVHSFRN

SEQ ID NO: 43981 - DNA, 702 bp, Unknown
  Obtained from environmental sample
  misc_feature (1)..(702): n is a, c, g, or t
ttgatgaaaacttcgcttcttgcgggattaaccggcatgaccggggcgccgccgaggaggccgccgaattccgcccagtcgccagctttttttccgggcaccggaataatccgcaccgcagtggtcttgttgttcaccatgccgatcgccatctcgtcggcaatgatcgccgagatggtggcggcgctcgtgtcgccgggcagggcgatcatgtccagtccgacagagcaaaccgaagtcatcgcctcaagcttgtcaaggctgatcgcgcctttcctcaccgcgtttaccattccttcgtcttcggagacggggataaaggccccggaaaaaccgcccacatgggtggacgccattatgccgcctttttttatcatgtcggttaacatggcgagagccgccgttgtgccgtgtgttccggcggtttcaaggcccatctcctcaagtatgcgggcaaccgaatcgcctacctcgggagtcggagccagggaaagatccaatatgccgaaaggcacgtttaaccgtttggcggcttccataccaacaagctgtcccatgcgggtaatcttgaaggcggtttttttaatcgcgtcggcaagctcgtcaaagctggctccccttaggttntccagcgcggccttaaccacgcccgggcccgacacccccacgctaaggcagctttccccctcgccgacgccgtga

SEQ ID NO: 43982 - protein, 233 aa, Unknown
  Obtained from environmental sample
  SIGNAL (1)...(25)
  misc_feature (1)..(233): Xaa is any amino acid
MMKTSLLAGLTGMTGAPPRRPPNSAQSPAFFPGTGIIRTAVVLLFTMPIAISSAMIAEMVAALVSPGRAIMSSPTEQTEVIASSLSRLIAPFLTAFTIPSSSETGIKAPEKPPTWVDAIMPPFFIMSVNMARAAVVPCVPAVSRPISSSMRATESPTSGVGARERSNMPKGTFNRLAASIPTSCPMRVILKAVFLIASASSSKLAPLRXSSAALTTPGPDTPTLRQLSPSPTP

SEQ ID NO: 43983 - DNA, 771 bp, Unknown
  Obtained from environmental sample
  misc_feature (1)..(771): n is a, c, g, or t
gtgtacgcggatctgtgggatattccgtaccgcacaataccggtaggagaagacttttcggtaaagaccgccgagtacaaaataccttcaggcggcgtggtttttccaaaccccaatgccccgacaggaatgccgctttcattaggcgaggtcttttcccttgccgaataccttgaaaaactggacaaggtattaattgtggacgaagcatacgccgctttcggtgcggaatctgcggttccttttattaacaagcacggtaacattctcactgtccatacgctttcaaagtcatcgtcattagccggactgcgcggcggttatgcaataggaaaccacgaattgatcgaagggctttgccgcgtaagggacagctttaattcttacacagttgacaggcttgccctggccggcgcggaagcggcagtttccgatgcggcgtattacgatgaaattaaccgtcgcgttatagcaaccagagaacgcgtaacgaaaactttgcaaagcctcggttttatcgtcctgccatcggcggcaaattttatttttgttaaagctccgattaaaaaaaactcgatcgaaaaaactgagccgtgcattggcggagctgaccttatggctgccttgcgtgaaaagggaatacttgtcagacatttcaacaaaaatagaatcgctgattaccttagggtaagcatgggaaccgatgaagaaatggacgcttttttggaagcctgcaaagcgataatcgataatataggaaacacaaagtga

SEQ ID NO: 43984 - protein, 256 aa, Unknown
  Obtained from environmental sample
  DOMAIN (1)...(245): Aminotransferase class I and II
  misc_feature (1)..(256): Xaa is any amino acid
MYADLWDIPYRTIPVGEDFSVKTAEYKIPSGGVVFPNPNAPTGMPLSLGEVFSLAEYLEKLDKVLIVDEAYAAFGAESAVPFINKHGNILTVHTLSKSSSLAGLRGGYAIGNHELIEGLCRVRDSFNSYTVDRLALAGAEAAVSDAAYYDEINRRVIATRERVTKTLQSLGFIVLPSAANFIFVKAPIKKNSIEKTEPCIGGADLMAALREKGILVRHFNKNRIADYLRVSMGTDEEMDAFLEACKAIIDNIGNTK

SEQ ID NO: 43985 - DNA, 405 bp, Unknown
  Obtained from environmental sample
  misc_feature (1)..(405): n is a, c, g, or t
atgagcaagtactggaatagccgcgtaaaaaatatctctccttatgtccccggcgaacagccaagggacaggaagtttatcaagctcaacacaaacgaaaatccgtatcctccttccccaaaagtaattaaagccatacaagaagctaccaatgaacgcctccggctataccccgaccctcaatgcacggagtttcgcgaggcaattgccaggcgatacggagtaaaaagcgaacaggtttttgcgggcaacggatcggatgagattctagcgtttgcctttgcggcgttttttgaaagctcaggcgaaaatcagaataagccgattctatttcccgacataacgtacagttttatccggtgtacgcggatctgtgggatattccgtaccgcacaataccggtag

SEQ ID NO: 43986 - protein, 134 aa, Unknown
  Obtained from environmental sample
  misc_feature (1)..(134): Xaa is any amino acid
MSKYWNSRVKNISPYVPGEQPRDRKFIKLNTNENPYPPSPKVIKAIQEATNERLRLYPDPQCTEFREAIARRYGVKSEQVFAGNGSDEILAFAFAAFFESSGENQNKPILFPDITYSFIRCTRICGIFRTAQYR

SEQ ID NO: 43987 - DNA, 495 bp, Unknown
  Obtained from environmental sample
  misc_feature (1)..(495): n is a, c, g, or t
atgacgggctttaccgatgtcgaagcgttagccgaaactttcatgcagggaaacgtttgttttcacagtcgcactcgaaacaagctctggatgaaaggcgaaacttcaggaaatattttgaaacttctcaaaatacgcgccgactgcgacagggacgcgcttcttgccgtggcggaacctgcaggccctgtttgccatacgggcgcctggtcgtgttttgaaacgggcagaaaatttacctgggaatttttgcagagcattattgtcgagcgttttgagaatccgccgccgggttcgtacaccgcgactttggacgacaagcttgtgcgtgaaaaactgatggaagaagcggaagaagtgtgtacggcaaaaacacacgctgaagttgtctgggaggccgccgatctgctttattttacaaccgtgctgataacccgcgaaggactcaccgttcaggaagttttggacgagcttgaccgcagacacaaaaagtaa

SEQ ID NO: 43988 - protein, 164 aa, Unknown
  Obtained from environmental sample
  DOMAIN (81)...(163): Phosphoribosyl-ATP pyrophosphohydrolase
  misc_feature (1)..(164): Xaa is any amino acid
MTGFTDVEALAETFMQGNVCFHSRTRNKLWMKGETSGNILKLLKIRADCDRDALLAVAEPAGPVCHTGAWSCFETGRKFTWEFLQSIIVERFENPPPGSYTATLDDKLVREKLMEEAEEVCTAKTHAEVVWEAADLLYFTTVLITREGLTVQEVLDELDRRHKK

SEQ ID NO: 43989 - DNA, 1206 bp, Unknown
  Obtained from environmental sample
  misc_feature (1)..(1206): n is a, c, g, or t
gtgataacctgtgtgtctgttccttcgtgcggttataccacgataatcctggataagaaaattgattatgaacccagggcagtttttttcaacaatatgctgattcagggccccgatacatttgttttggaaaatgaatttatccgggcagttctcaatccacttgacggcagcatcgcctcttttgttgacaagaaaaccgaaaccgatcttgctccgcatgacggcggtttcggtattttcaggctggcgcaggaggcccgacagaaaggtatcaccaactggggccaagaaatgactgcctggattattggccgttttaaaagcattgaaaaccttggtaaaggttttgagataaaagcgcttgcccagggcaggctgcagaattcctggcatataaaatttagttttggacatgcctctgttttggaagcggtaatttcccttgattcaggttccaggctactccgctacgacgtaacctgtgattggaaggaattcggttcaggtgaaggaattcccaaccttcatttccatttgccccttgggtggaaaccagcgtatctttttgatgtaccccttggcctgaaagagcgagaacccgtagacatggatctccccgcagaaagctttgtaatcgcgaagaactcaagcggctcttctctgggtcttttgtccatggataaatacggtttccgctgtaaggaaagcagcctttccctcacattaatccgaagttctcttgatcctgatctgaccccggaaacaggcaggcaccgcatctcctttgcccttgttccttttgaggcttcagaaagtaacgaagatattgtgcgggaaagccttatttaccgccgtgccatgacggtcatttcgggaaaaaacaaagcgggaaaaatacaagaccttgaaccatcaggcagcttcctcaagctcaaaggcggcgttctttcggccattaaacgggcggaaacagaaactgtcggagcccaggaagataaaaagctcgttttcaggatctatgaagttgagggaaaagacactacggctgaattgtcccttgcttttgccgcggcttccgcttacacatgcgacgcccttgaagaaaaacatctggaagattgccatatttccgaaggcgggaaaacagttaaatttaaactgcctaagtatagtgtcaggactttgtttgttgagctgaagtaa

SEQ ID NO: 43990 - protein, 401 aa, Unknown
  Obtained from environmental sample
  DOMAIN (1)...(397): Glycosyl hydrolases family 38 C-terminal domain
  misc_feature (1)..(401): Xaa is any amino acid
MITCVSVPSCGYTTIILDKKIDYEPRAVFFNNMLIQGPDTFVLENEFIRAVLNPLDGSIASFVDKKTETDLAPHDGGFGIFRLAQEARQKGITNWGQEMTAWIIGRFKSIENLGKGFEIKALAQGRLQNSWHIKFSFGHASVLEAVISLDSGSRLLRYDVTCDWKEFGSGEGIPNLHFHLPLGWKPAYLFDVPLGLKEREPVDMDLPAESFVIAKNSSGSSLGLLSMDKYGFRCKESSLSLTLIRSSLDPDLTPETGRHRISFALVPFEASESNEDIVRESLIYRRAMTVISGKNKAGKIQDLEPSGSFLKLKGGVLSAIKRAETETVGAQEDKKLVFRIYEVEGKDTTAELSLAFAAASAYTCDALEEKHLEDCHISEGGKTVKFKLPKYSVRTLFVELK

SEQ ID NO: 43991 - DNA, 882 bp, Unknown
  Obtained from environmental sample
  misc_feature (1)..(882): n is a, c, g, or t
gtgtttatcggccccgattatgttgaaatatgccgccgcacgaaccgtacggaagaagccgtatacgccataaaggcgattgcctcaatgaccgagacgatcaaagagcacggctgggacggaaactggttcctgcgggcttacgacgcgtacagtcataaaatcggcagtcatgagtgtgaagatggccagatatttatcgaatccaacggattcgctgtgatggcggagatagggcttgaagacgggtgcgctaaaaaagcgcttgactcggtaaaagaacggctggacacaaagtacggcatcgtgcttcaacagccagcgtacaaggaataccaccttgagcttggcgaagtctcatcttacccgccgggctataaagagaacgcaggtatcttctgccacaacaacccctgggttacgatagccgaaacaaaactggggcggggtacgcgcgcgtttgagacctacacaaaaatttgtccggcctaccgcgaagacgacagcgacctgcgccgcctggaaccgtatgtgtatgcgcagatggttgccggaaaagacgctccgcgtttcggcgaagcgaataattcctggctcaccggaaccgccgcatggacttttgtcagcatttctcagtatattctgggcgtgcgtccggtgttcgatggcctgctcatcgatccctgcatccctgcaagcatgaaaggtttttccgttattcgccattttcaaaacgcagtataccgcattgccgtggacaatagcgcgggcgtggaaaaaggcgttaaatcgcttacgcttgacggcaagccgctggatggcgctgtattgccagcgctgggtgatgggcggacacacgaagtcagcgttgtgatgggataa

SEQ ID NO: 43992 - protein, 293 aa, Unknown
  Obtained from environmental sample
  misc_feature (1)..(293): Xaa is any amino acid
MFIGPDYVEICRRTNRTEEAVYAIKAIASMTETIKEHGWDGNWFLRAYDAYSHKIGSHECEDGQIFIESNGFAVMAEIGLEDGCAKKALDSVKERLDTKYGIVLQQPAYKEYHLELGEVSSYPPGYKENAGIFCHNNPWVTIAETKLGRGTRAFETYTKICPAYREDDSDLRRLEPYVYAQMVAGKDAPRFGEANNSWLTGTAAWTFVSISQYILGVRPVFDGLLIDPCIPASMKGFSVIRHFQNAVYRIAVDNSAGVEKGVKSLTLDGKPLDGAVLPALGDGRTHEVSVVMG

SEQ ID NO: 43993 - DNA, 714 bp, Unknown
  Obtained from environmental sample
  misc_feature (1)..(714): n is a, c, g, or t
atggcggtgtgtttcttgttcctctggccgacattgcgctggtactttttaataccaaaggacaaacaggcgcaggcgctggaatcaagacagcagatcaagacttacgcttcccagtccgctcaggcggatcttcagcgtctttttgacgcggcgcgcgtaaacggccctgttcccgaaggactggaatttattacggcaaaggcaaagaaactttacaagagcaataaactgccggtacctgaaacgatggacgcaaaagcggcacttgaggctttttccggaaggagggaagcgcttgatacaattgaatcgaaatacagggatgaaattttcggtttaaaggatctgcaaaaaaacgcggtaaaactgggtctggatctttcaggcgggttaagcatcgtattacaggcaaatcttgacatgcttcaggaaaaacttgggcgttcgttgaccgaagatgaccgcgtggacgcgatgaaccgttctttggaagttttgaacagccgcatcgaccgtttcggccttacggaacctgttatccgcaggcagggatcggatcaaatatatattgaaattccgggaacggccgatccggaacggattaacgatattatcatgggcaagggaagccttaccttcaatctggaagattccgaagcgacgggtggcgttcaacaattactacaggcaaaatccgacaacgacatttga

SEQ ID NO: 43994 - protein, 237 aa, Unknown
  Obtained from environmental sample
  misc_feature (1)..(237): Xaa is any amino acid
MAVCFLFLWPTLRWYFLIPKDKQAQALESRQQIKTYASQSAQADLQRLFDAARVNGPVPEGLEFITAKAKKLYKSNKLPVPETMDAKAALEAFSGRREALDTIESKYRDEIFGLKDLQKNAVKLGLDLSGGLSIVLQANLDMLQEKLGRSLTEDDRVDAMNRSLEVLNSRIDRFGLTEPVIRRQGSDQIYIEIPGTADPERINDIIMGKGSLTFNLEDSEATGGVQQLLQAKSDNDI

SEQ ID NO: 43995 - DNA, 1164 bp, Unknown
  Obtained from environmental sample
  misc_feature (1)..(1164): n is a, c, g, or t
ttgaaattccgggaacggccgatccggaacggattaacgatattatcatgggcaagggaagccttaccttcaatctggaagattccgaagcgacgggtggcgttcaacaattactacaggcaaaatccgacaacgacatttgacgccggagggaatttaattaatccttccattgttccgtccgacgtaatgattcttggttactacacaaaagataaatacgggctggacgagcaggtaagaaacgccgacggaagcctgatgtatatcgccgcaaaaaaagaagtcggtcttgacggcaaccacatacaggaagctgttgttgaacggaataatatggacggaaagccggaagttactttcaggctggatgccgaaggcggggagattttctaccgtcttacatccgcaaatgtcgagaaaatgctgaccattgttcttgatgacaaggtaagatcccgcgctacaatcacaacttcaatccgcgacgccgtgcgcatttccgggttcggagcggacgaagcgaataacctggctctgctattaagaaccgcagcccttcccgtggaacttgaggttgccagccagcagagcataggcgcttcaatgggcgaggacacgatcaaacaggggctttacgcgctgttgttaggcgttgcgcttgttttagtttttatgcttgtatactataagacagccggtattaacgccgttgtcgcgcaaatattaaatttttacataatgttcagtattctttccgcgcttaactttacattgaccttacccgcaatcgccggatttattttaacaataggtatggcggtagacgccagcgtaattatctttgaacgcatgaaggaagaaatgcgtctcggcaaatcccgcaaagcggtgattgacgccgggtttgataaagcgttctgggcgattatggacggaaatattaccacctttatcgcggctctgttcctttcacagcttggttcaggccccattaaaggttttgccgtaagcctttcaatcggcgtattttcatcggtttttacagccctcttcgtgtcacggctcatctttgacttcagcaccgatgttttcaatccaaaagatctttctgtaagctggacaatcaggattcaggaagatacggtcagtcaaaaaggttga

SEQ ID NO: 43996 - protein, 387 aa, Unknown
  Obtained from environmental sample
  DOMAIN (179)...(359): Protein export membrane protein
  misc_feature (1)..(387): Xaa is any amino acid
MKFRERPIRNGLTILSWAREALPSIWKIPKRRVAFNNYYRQNPTTTFDAGGNLINPSIVPSDVMILGYYTKDKYGLDEQVRNADGSLMYIAAKKEVGLDGNHIQEAVVERNNMDGKPEVTFRLDAEGGEIFYRLTSANVEKMLTIVLDDKVRSRATITTSIRDAVRISGFGADEANNLALLLRTAALPVELEVASQQSIGASMGEDTIKQGLYALLLGVALVLVFMLVYYKTAGINAVVAQILNFYIMFSILSALNFTLTLPAIAGFILTIGMAVDASVIIFERMKEEMRLGKSRKAVIDAGFDKAFWAIMDGNITTFIAALFLSQLGSGPIKGFAVSLSIGVFSSVFTALFVSRLIFDFSTDVFNPKDLSVSWTIRIQEDTVSQKG

SEQ ID NO: 43997 - DNA, 648 bp, Unknown
  Obtained from environmental sample
  misc_feature (1)..(648): n is a, c, g, or t
ttggaagtggacacgctcaacgtgaccatcgaaacaggggaatccgtcagcttgggcggcataccattcgcccatgccgccgcaaatggggccttggacggcgcgactgtcaaactggagcgggcctttatgcaaacatgggggacggttgccgccactgtccatctattcgagggccgggtggcagggattgaccccaagcatagtgaagtagtgctacaagtgaagagcctattggaactattgaacgtccaatggccgcgcaatttataccagccgggttgcaatcaccagctttatgggaatggatgcggcctgtctcggagttcctaccaagtgaacggcacagccacgggcggcacggcaacccgcataaactggaataccggcaaggcggcgggatattacgatcagggcgtgattgtctttacatcgggccgcaaccttggggctaggcggacagtcaagaagtcggacgcaagcgggctagatattgcactgcccctgccatatccgcctttaagcggcgaatctttcacagtcgcgccgggctgcgacaagacgcacaccacttgcaacagcaaattcggcaacctgacccgctataggggcttcccatgggtgccgccgccggaaaccgcaagatga

SEQ ID NO: 43998 - protein, 215 aa, Unknown
  Obtained from environmental sample
  misc_feature (1)..(215): Xaa is any amino acid
MEVDTLNVTIETGESVSLGGIPFAHAAANGALDGATVKLERAFMQTWGTVAATVHLFEGRVAGIDPKHSEVVLQVKSLLELLNVQWPRNLYQPGCNHQLYGNGCGLSRSSYQVNGTATGGTATRINWNTGKAAGYYDQGVIVFTSGRNLGARRTVKKSDASGLDIALPLPYPPLSGESFTVAPGCDKTHTTCNSKFGNLTRYRGFPWVPPPETAR

SEQ ID NO: 43999 - DNA, 531 bp, Unknown
  Obtained from environmental sample
  misc_feature (1)..(531): n is a, c, g, or t
atgattgaaatcaacggcaccataatcggttcagagacagtagcggcccggctgcgcgacctgccattgcaggtgacgatggcgctcaggacagccatcgcacaaaaaacgaatgaaatactgaggggagccaaagaaaaggtttcaggccccgtactcaaaaacaagactggtacactgcgccgcaagataaacgcccgattcgagaatgagggcttgcttggcatagtcggcatcaaactgagctatgccgccatccacgagtttggcttcaatggcaccgaaaacgtgagggagcacgtcaggcgcaacctgcgacagatgaaagaggatcggcgggcccgcacttggggcaaaaagaaaggcacccacgacacaaaggcccagcttggcaagggcgaaatacacgtaaaagtgcatacccgcgaaatggatatgcccaagcgctcattcctacgctccacgctggacgagatacgaccaacaatcaaggccgcgctaaaagaggcggtcatcaaggccatccaatga

SEQ ID NO: 44000 - protein, 176 aa, Unknown
  Obtained from environmental sample
  misc_feature (1)..(176): Xaa is any amino acid
MIEINGTIIGSETVAARLRDLPLQVTMALRTAIAQKTNEILRGAKEKVSGPVLKNKTGTLRRKINARFENEGLLGIVGIKLSYAAIHEFGFNGTENVREHVRRNLRQMKEDRRARTWGKKKGTHDTKAQLGKGEIHVKVHTREMDMPKRSFLRSTLDEIRPTIKAALKEAVIKAIQ

SEQ ID NO: 44001 - DNA, 972 bp, Unknown
  Obtained from environmental sample
  misc_feature (1)..(972): n is a, c, g, or t
gtgtcaaaaaatagtttaaaatattcttgcatattgttagacattatagtatattacaatatatgtaatagcgtgaaaagcaaccgaaaggaggtggcagtggaagttttgtctgttttaaacaagaagggtggggtagggaagacgacagtcgcgaccaaccttgcgcaaggcttggccattgtcgggcagagggtgctcgtcatagacaacgacgggcaacgcaaccttacctccagtttgggaatattggttaaggattgcccggttacgcttgccgacattatgaagtcgccatccgggccgaaaatggagtccgtagccgccaagtcgatttacgagagttttatttccgggctgtactgtgtggtgggtagcggggaattggatgtgataaatcctcgaaagacggcgttgtcggaatttttgtgctctaaggtagtacagaacctaaaaattgactttgtgatcatagacaacgcgccatcaatgagcgctaagaccgtcagcgcgataaacgctagtaaatattttctgttgcctgtgcaattggaaaatttttcaatagccggtctggccgagatgtttgaagttttgacaaaagtttatgacattaatcctgaaaacatctttattttgcgtaatatgtataggaagatcagtcactatgacaacaattcccgtgcgctggaaatagcgtatcccgataacattatggagacgataatcccgcacgacctcgtgtttgataagctggtatgccgcgataaaacagcgtttttttcccagtccaagtgtaaaggaacgttgcagtttcagcggttattttgcgaactgttcggttttgacgaacaacaaatgtttgaaaagtttaagctggcgttggagaagtaccgcagtgaggtagcgaaagaaaatcttaaaaaggccaaaataaaaaatttatcattgaaggaggtggcaaatgcttaa

SEQ ID NO: 44002 - protein, 323 aa, Unknown
  Obtained from environmental sample
  DOMAIN (37)...(251): CobQ/CobB/MinD/ParA nucleotide binding domain
  misc_feature (1)..(323): Xaa is any amino acid
MSKNSLKYSCILLDIIVYYNICNSVKSNRKEVAVEVLSVLNKKGGVGKTTVATNLAQGLAIVGQRVLVIDNDGQRNLTSSLGILVKDCPVTLADIMKSPSGPKMESVAAKSIYESFISGLYCVVGSGELDVINPRKTALSEFLCSKVVQNLKIDFVIIDNAPSMSAKTVSAINASKYFLLPVQLENFSIAGLAEMFEVLTKVYDINPENIFILRNMYRKISHYDNNSRALEIAYPDNIMETIIPHDLVFDKLVCRDKTAFFSQSKCKGTLQFQRLFCELFGFDEQQMFEKFKLALEKYRSEVAKENLKKAKIKNLSLKEVANA

SEQ ID NO: 44003 - DNA, 876 bp, Unknown
  Obtained from environmental sample
  misc_feature (1)..(876): n is a, c, g, or t
atggcaactgaaatcttcacatcggaacaatttgagcaccttcttcctaaattaacgaaagatgaacgcaatgcgctgnaggaatctttacagaaagaaggttgccgcgatccgatcgtaacctggcacaatacgataatcgacggtcacaatcgttattcgatctgcacgaagtatgacatcccgttcaaagtcaagaaaatggatgagttttcggacgaggatgccgtgaagacgtggatagtcaccaatcagctcagccggcgcaatctgacggatgagcagcgggaacggttcatcggaatcctcttcaatacaaacaaaaaagagcgagggggtgtccgtgataacgccggccggaaatcaaaggttcacggtgaccctttgatttccaaaagcaaagaggatagtgaagacacggctgggatgatcgccaagcagcacggaatctccccggcgacagccaaacgggcaggcaaattcgctacggccgttgaccggataagcaaaatcagccctgcggccgaggccaaaataatgagcggcgaagcaaagaacatcattagccggaaagaaatccgaaatcttgccgaggcgcctgagatggaagtcaaaaaagtcatcaaggcaatagaaaaagacgcgccggtcaaaatggccaaaacgacggaaaaagagttgccggttcggcaagtgtacaaaataatcaatgacatagaaatccgaacggataccctcactgacatgatgggaaagctaaccggatcacacgggcagcttacggatgaggatcgtacggagattgctaacctcgttgacaatttggcggctaagatacaattgattagggaggggtttttggaagacgcagggtaa

SEQ ID NO: 44004 - protein, 291 aa, Unknown
  Obtained from environmental sample
  misc_feature (1)..(291): Xaa is any amino acid
MATEIFTSEQFEHLLPKLTKDERNALXESLQKEGCRDPIVTWHNTIIDGHNRYSICTKYDIPFKVKKMDEFSDEDAVKTWIVTNQLSRRNLTDEQRERFIGILFNTNKKERGGVRDNAGRKSKVHGDPLISKSKEDSEDTAGMIAKQHGISPATAKRAGKFATAVDRISKISPAAEAKIMSGEAKNIISRKEIRNLAEAPEMEVKKVIKAIEKDAPVKMAKTTEKELPVRQVYKIINDIEIRTDTLTDMMGKLTGSHGQLTDEDRTEIANLVDNLAAKIQLIREGFLEDAG

SEQ ID NO: 44005 - DNA, 903 bp, Unknown
  Obtained from environmental sample
  misc_feature (1)..(903): n is a, c, g, or t
ttgcgccatttttgggcggtggtttttactctgggaacagtggcgattgtccttatccccatttccctgctggttaccatatttttccgtcaaatcgcggagttggggcgctccgcccgcgacctgttaaacgaaagaccggaatatctgcgtgaactttttataaaaatatcggatgtggttcgtgatgtttccgccggacaggtcgccataaatgccgatactattgaattgcagataaaaatgtttattaccaatgaactgcagcgtatgtttttttggggcagtaatattgtccgtaacatcggcggtttttccataaatatattgataatgacattttcgatgtttttcttttatattgacggcccttacctttcgcggctggcgctgcgttccattccgataaaaagcgaatatatcagcacccttacggcgaaatttatggacataacgcggaaccttttctttggttatattatggtcgctttgctgcaatcggttgtggcgtatattatttttactgtttttcatatcaaaggatcgctggttctttcggccctgacttttctcctggtattttttcccctggttggggctacgctggtttatatacccctgggtattcttaaaatcgcgggcggaaacatcgtgngaggcataatttttctgattgtctcggctatttttatttccggcattgataacgttctgcggcccttttttctgagagaccggatacagcttcatccattgataatattctttgctattttgggcggattgattgtttttggttttaacggacttattcttggccctgtactggtgattttatttctcactgtgctggacctgtttttagtcgaacataaaattgatcatcagaaggagtaccgatga

SEQ ID NO: 44006 - protein, 300 aa, Unknown
  Obtained from environmental sample
  DOMAIN (1)...(288): Domain of unknown function DUF20
  misc_feature (1)..(300): Xaa is any amino acid
MRHFWAVVFTLGTVAIVLIPISLLVTIFFRQIAELGRSARDLLNERPEYLRELFIKISDVVRDVSAGQVAINADTIELQIKMFITNELQRMFFWGSNIVRNIGGFSINILIMTFSMFFFYIDGPYLSRLALRSIPIKSEYISTLTAKFMDITRNLFFGYIMVALLQSVVAYIIFTVFHIKGSLVLSALTFLLVFFPLVGATLVYIPLGILKIAGGNIVXGIIFLIVSAIFISGIDNVLRPFFLRDRIQLHPLIIFFAILGGLIVFGFNGLILGPVLVILFLTVLDLFLVEHKIDHQKEYR

SEQ ID NO: 44007 - DNA, 1242 bp, Unknown
  Obtained from environmental sample
  misc_feature (1)..(1242): n is a, c, g, or t
gtggacatagattacatagaagttggggtgtacgtctccgagccgttcacggtcagcgggtcgctcgtcacgccgaacgcttcgcagaatgcccgcaaagtttacggttttttgcgggataatttccagaaaaaggtgataagcggtgtaatgaccaacaccgtgacgacgaatgacggcaggtacacgcccaacacaccggacaatcaggcggagatggcgcatataaagaacgtttccggcaaactgccggcgctcatgggactcgacttcatgcacagtaccggaaagaaagcgagcgacgaatggtatgtgggttacaccgacgggacgctgtcgcttgccgaaacgttttttaataggggcgggatccccatatactgttggcactggcgggatccgctaaagaatgatgaggagttctactctgataagacgacattcgacttgaccaaggcgttcaataattccaattatacggaggccaacttcaacgagagcagcgccgagtacaaagggattgttgcggacattgaccgtatagccggttacttgaaggggcttgccgacaagggcgttccggtgctttggcgccctctgcacgaggcggcgggcggatggttctggtgggggcgagacaaaaagcccgagccgtgccgggcgctgtaccgcttcatgttcgacaggatggtgcgccaccacgggctcaacaatctgatatgggtgtggacgacggaagagtccggtcgggagcttgattggtacccgggcgacgacgtcgtggacatcgtcgggcgcgactattatccgaatcccgatcaacgcgccaaagagcacggctcccgcgtagcctctttcgagaacatcaaaacaatcttcagcgcgaagaaaatcatagcgttaagtgaaaacggcgcgctcccgcaccccgacagtttggtggccgacggcgcggagtggtcgtggttcatgccgtggtacggcgacttcactatggatgtcaacgttccggcaatatggaatcaaactatgaaccacagctacgtgataacgctcgataagatgcccggttgggataactacaatgtaacgtcgacatataaaacaacatccggcgcgtcgtcggcacaatcgcgtgtttcagtaacatctcgtcgtaactcattggaactgaatgtattagggatggacgtgcggagtgttgagttgtttgatttacatggagcgcggctagccgtttga

SEQ ID NO: 44008 - protein, 413 aa, Unknown
  Obtained from environmental sample
  DOMAIN (23)...(354): Glycosyl hydrolase family 26
  misc_feature (1)..(413): Xaa is any amino acid
MDIDYIEVGVYVSEPFTVSGSLVTPNASQNARKVYGFLRDNFQKKVISGVMTNTVTTNDGRYTPNTPDNQAEMAHIKNVSGKLPALMGLDFMHSTGKKASDEWYVGYTDGTLSLAETFFNRGGIPIYCWHWRDPLKNDEEFYSDKTTFDLTKAFNNSNYTEANFNESSAEYKGIVADIDRIAGYLKGLADKGVPVLWRPLHEAAGGWFWWGRDKKPEPCRALYRFMFDRMVRHHGLNNLIWVWTTEESGRELDWYPGDDVVDIVGRDYYPNPDQRAKEHGSRVASFENIKTIFSAKKIIALSENGALPHPDSLVADGAEWSWFMPWYGDFTMDVNVPAIWNQTMNHSYVITLDKMPGWDNYNVTSTYKTTSGASSAQSRVSVTSRRNSLELNVLGMDVRSVELFDLHGARLAV

SEQ ID NO: 44009 - DNA, 597 bp, Unknown
  Obtained from environmental sample
  misc_feature (1)..(597): n is a, c, g, or t
ttgcacgcagcagaaactgtacttcttgccccaggcaggagcagctcgcaggtgaatgagggcgatggggtagtggcgcctcttaacacgctgtcatcttttctcgttgaaaagggcgggcgcgccgcggctacgcaggactgggatccgaagaggcatatttctttcgcttcatcacattccggtaaaaaaattgtgcgacagctgttgacaccggtgattgtgaaagggcaggcgctttggcctgatcattgcgttcaggggacggacggcgcggcttttcataaagacctcaatttacaccccgtttctttgattatccaaaaaggtttccgcaaagagcttgattcctattccgcgttttttgagaacgacaggaaaactcccacagggcttgaaggctggattaagtctcttggaattcagacggttatcatgggcgggcttgccaccgattactgcgtttattacagcgcgatggattgcaggaaagcgggttttaaaaccattatcgcaagcgacgccatgcggggcgtgggctttccctcaggctcgatagaagcggcggtaagcgaaatgaaatccaacgggatataa

SEQ ID NO: 44010 - protein, 198 aa, Unknown
  Obtained from environmental sample
  DOMAIN (1)...(192): Isochorismatase family
  misc_feature (1)..(198): Xaa is any amino acid
MHAAETVLLAPGRSSSQVNEGDGVVAPLNTLSSFLVEKGGRAAATQDWDPKRHISFASSHSGKKIVRQLLTPVIVKGQALWPDHCVQGTDGAAFHKDLNLHPVSLIIQKGFRKELDSYSAFFENDRKTPTGLEGWIKSLGIQTVIMGGLATDYCVYYSAMDCRKAGFKTIIASDAMRGVGFPSGSIEAAVSEMKSNGI

SEQ ID NO: 44011 - DNA, 1095 bp, Unknown
  Obtained from environmental sample
  misc_feature (1)..(1095): n is a, c, g, or t
ttgaagtctatccattggactcttgtgagcggaaagaggtacccgaaaaaattatcctttgataaaggaacgcgcaaagccggcgccctcccatttggaggtaaatttcggctggtggatattcccatatccaactgcataaacgcggatttgaagcaaatatacattcttacccagtttaattccgcctcgcttcatatgcacctttcgcaggcctacaatttcgataccttttcgtcgggattcgtcgaaattctggccgcggagcagacttttgagcattccagctggtttgagggaaccgccgatgccgtgcggaagaacatgatccatttcaccacccagtccccttcttattatctcattctttccggggatcaactataccgcatggatttgcgcgatctgataaaaaagcacaaggaatcgggagcgaaaataactattgcctgtacgccggtttcccgcgagaacgcaagccagctaggcatactaaaagcggataaaaataacgtaataaccgaattccttgagaaacccggcccgacaaaggatatcagcgactataaaattccatcggaaataaaaaaggataaaagtaagggggatgagtacctggcgtcaatgggtatctacatatttaactccgataccatgatatccagcctggacaacgggctaaccgatttcggcaaggaggttattccccaggccataagcaagcttaaggtaaacgcctatatttttaacggctattgggaagacataggaacaatcaaaaacttttacgaagcaaacctggaactaaccacattaaaaccccgtttcgatttctacgatgaggctcacccgatttatacccgtgccagatgccttcctccgtcaaagatgaatttcagcaacatgaaccaatccattgccgccgagggctgcattattaccaacgcgtccatcgcggattccattgtcggtgtcagaaccatcatcgaatccggttccagcctgaacggcgtcgtgtgcatgggagcggacttttatgaaaacgaagcccaaaaagcgaaaaatgccgaagaacgaattccaatgtggggatag

SEQ ID NO: 44012 - protein, 364 aa, Unknown
  Obtained from environmental sample
  DOMAIN (18)...(272): Nucleotidyl transferase
  misc_feature (1)..(364): Xaa is any amino acid
MKSIHWTLVSGKRYPKKLSFDKGTRKAGALPFGGKFRLVDIPISNCINADLKQIYILTQFNSASLHMHLSQAYNFDTFSSGFVEILAAEQTFEHSSWFEGTADAVRKNMIHFTTQSPSYYLILSGDQLYRMDLRDLIKKHKESGAKITIACTPVSRENASQLGILKADKNNVITEFLEKPGPTKDISDYKIPSEIKKDKSKGDEYLASMGIYIFNSDTMISSLDNGLTDFGKEVIPQAISKLKVNAYIFNGYWEDIGTIKNFYEANLELTTLKPRFDFYDEAHPIYTRARCLPPSKMNFSNMNQSIAAEGCIITNASIADSIVGVRTIIESGSSLNGVVCMGADFYENEAQKAKNAEERIPMWG

SEQ ID NO: 44013 - DNA, 567 bp, Unknown
  Obtained from environmental sample
  misc_feature (1)..(567): n is a, c, g, or t
atgctgcgtatagcgaaacaggaaaccgggctgccccttgtctcggagataatgaatcaaacgcagattgaactgtttgaggatatagacattgtgcaggttggcgcgcggaatatgcagaattttgacctgcttaaagaagtgggaaagctgagaaagccggtgctgctcaaacgcggcctcgcgaacacgattgaggaattgctgatgagcgcggaatatatcgtttcttcggggaataatgaggttattctgtgcgaacgcggcatccgcacttttgagacaatgacccgtaatacgctggatttggcggcagtcgcgctgttgaaacaaaaatcgcatctgcccgttattgtagaccccagccacgcttccggcatacgcagtcttgttccgccgctggcaaaggcggctatggcggtaggggcggacggcctcatggtagaagctcataacaatccggcgaaggcattatgcgacggcgctcaatccctggatttggagcagtttcaatcgctcatggacgagttgaaaaaacgcgcggtaatagagaataaaattttttag

SEQ ID NO: 44014 - protein, 188 aa, Unknown
  Obtained from environmental sample
  DOMAIN (1)...(183): DAHP synthetase I family
  misc_feature (1)..(188): Xaa is any amino acid
MLRIAKQETGLPLVSEIMNQTQIELFEDIDIVQVGARNMQNFDLLKEVGKLRKPVLLKRGLANTIEELLMSAEYIVSSGNNEVILCERGIRTFETMTRNTLDLAAVALLKQKSHLPVIVDPSHASGIRSLVPPLAKAAMAVGADGLMVEAHNNPAKALCDGAQSLDLEQFQSLMDELKKRAVIENKIF

SEQ ID NO: 44015 - DNA, 384 bp, Unknown
  Obtained from environmental sample
  misc_feature (1)..(384): n is a, c, g, or t
atgaggccgtccgcccctaccgccatagccgcctttgccagcggcggaacaagactgcgtatgccggaagcgtggctggggtctacaataacgggcagatgcgatttttgtttcaacagcgcgactgccgccaaatccagcgtattacgggtcattgtctcaaaagtgcggatgccgcgttcgcacagaataacctcattattccccgaagaaacgatatattccgcgctcatcagcaattcctcaatcgtgttcgcgaggccgcgtttgagcagcaccggctttctcagctttcccacttctttaagcaggtcaaaattctgcatattccgcgcgccaacctgcacaatgtctatatcctcaaacagttcaatctgcgtttga

SEQ ID NO: 44016 - protein, 127 aa, Unknown
  Obtained from environmental sample
  SIGNAL (1)...(13)
  misc_feature (1)..(127): Xaa is any amino acid
MRPSAPTAIAAFASGGTRLRMPEAWLGSTITGRCDFCFNSATAAKSSVLRVIVSKVRMPRSHRITSLFPEETIYSALISNSSIVFARPRLSSTGFLSFPTSLSRSKFCIFRAPTCTMSISSNSSICV

SEQ ID NO: 44017 - DNA, 1626 bp, Unknown
  Obtained from environmental sample
  misc_feature (1)..(1626): n is a, c, g, or t
atgaagttttcaaaagaaaacgatataactttacaaagcgatattgccgacgaaagcgcattggcaatcgacgattttgatatgcccgctattgacgacacatccgaagtaaccgccgattcaacagaagacaccgttgccgatgaaagtacgtcttcttttgtagacgacgtttccgaagaaagcgcgttaagcgatgaaagcgccgttgccgcggatgatactgccgatggaaacgtcgttttcgaaggaagcgacgattccgaagcaagcgcacttgccgctgacgatttcgatatgtccgctcttgatgaaacttccgaaggaagcgtcgcttctgaaggaagcgtcgcttctgaaggaagcgaagaagacgccattgccgacgaaagcgacgattccgtaggaagcgacgattcattaggaagcgaccttgccgcggacgatttcgacatgtccgctcttggcgacatttccgaagaaaacgccattgtcgaagaagacgctgtttctttagaagactcagaaagcgccgcttcaacagaagacaacgcttccgaaggaagcgacgcttccgaagcaagcgaacttgcaacagatgattttgatatgtccgccctcggcgacgattccgatactgccgcttttgaagaaagtcttgccgcggaagaaaacatcgttgccgatgaagttgacgctcccatacaagaagatattgatgtgtccgcttttgatatgacacccgaagaaagcgacacatccgaagaaattaccgctcctgaagaaagtgacgaaagcgcgtcaagcgatgaaagcgccggttcagatgatatttcctttgatgatgatgttgtctctcttgatgacagcgatctttcaatggacgatttagatttgtccgatattggcgacattcccgaagaaagcgcgtcaagcgacgaaagcgccgcgagcgatgaaagcgccgcgagcgatgaaatcgaagaaaaacaagagtttgtcgacacggatattgcggatctcggagtaagccttgacgctgaatctctggatgccgagactttggacacaggatccacagacgccgaatctttggacacagagtccttggacacagggtccgcagacattgattctttggacgccgaatctgcccttactgattctgcggaatccgtgactgtcacggatgaacagcctgacctttccgtagacgcgttggatgaaaatatcgaaatagactttgacgcgataaaagatcatgatcacgacgaacttgaagcgttgcgcgaaaatggcgctacaccggtaactttcccccctgaagacacctcttatcttgaagaagacgatcatatcaatttagatctttcagaagcggtaatagacgagcctgaattatcaaccgaaggcattgatgaaccgcctataacagagccttctttggacattgattctcttgatgatctcaatatttccattgatgactcggatgtaccatccgctgatgtaccatctgaagaagctccatctgatgattcatcatctatcgatgattcatcatctatcgatgaatcatcatctatcgatgatgttgacattgatgtcgccactgccgctgggtga

SEQ ID NO: 44018 - protein, 541 aa, Unknown
  Obtained from environmental sample
  misc_feature (1)..(541): Xaa is any amino acid
MKFSKENDITLQSDIADESALAIDDFDMPAIDDTSEVTADSTEDTVADESTSSFVDDVSEESALSDESAVAADDTADGNVVFEGSDDSEASALAADDFDMSALDETSEGSVASEGSVASEGSEEDAIADESDDSVGSDDSLGSDLAADDFDMSALGDISEENAIVEEDAVSLEDSESAASTEDNASEGSDASEASELATDDFDMSALGDDSDTAAFEESLAAEENIVADEVDAPIQEDIDVSAFDMTPEESDTSEEITAPEESDESASSDESAGSDDISFDDDVVSLDDSDLSMDDLDLSDIGDIPEESASSDESAASDESAASDEIEEKQEFVDTDIADLGVSLDAESLDAETLDTGSTDAESLDTESLDTGSADIDSLDAESALTDSAESVTVTDEQPDLSVDALDENIEIDFDAIKDHDHDELEALRENGATPVTFPPEDTSYLEEDDHINLDLSEAVIDEPELSTEGIDEPPITEPSLDIDSLDDLNISIDDSDVPSADVPSEEAPSDDSSSIDDSSSIDESSSIDDVDIDVATAAG

SEQ ID NO: 44019 - DNA, 672 bp, Unknown
  Obtained from environmental sample
  misc_feature (1)..(672): n is a, c, g, or t
atgtgtcgctttcttcgggtgtcatatcaaaagcggacacatcaatatcttcttgtatgggagcgtcaacttcatcggcaacgatgttttcttccgcggcaagactttcttcaaaagcggcagtatcggaatcgtcgccgagggcggacatatcaaaatcatctgttgcaagttcgcttgcttcggaagcgtcgcttccttcggaagcgttgtcttctgttgaagcggcgctttctgagtcttctaaagaaacagcgtcttcttcgacaatggcgttttcttcggaaatgtcgccaagagcggacatgtcgaaatcgtccgcggcaaggtcgcttcctaatgaatcgtcgcttcctacggaatcgtcgctttcgtcggcaatggcgtcttcttcgcttccttcagaagcgacgcttccttcagaagcgacgcttccttcggaagtttcatcaagagcggacatatcgaaatcgtcagcggcaagtgcgcttgcttcggaatcgtcgcttccttcgaaaacgacgtttccatcggcagtatcatccgcggcaacggcgctttcatcgcttaacgcgctttcttcggaaacgtcgtctacaaaagaagacgtactttcatcggcaacggtgtcttctgttgaatcggcggttacttcggatgtgtcgtcaatag

SEQ ID NO: 44020 - protein, 223 aa, Unknown
  Obtained from environmental sample
  misc_feature (1)..(223): Xaa is any amino acid
MCRFLRVSYQKRTHQYLLVWERQLHRQRCFLPRQDFLQKRQYRNRRRGRTYQNHLLQVRLLRKRRFLRKRCLLLKRRFLSLLKKQRLLRQWRFLRKCRQERTCRNRPRQGRFLMNRRFLRNRRFRRQWRLLRFLQKRRFLQKRRFLRKFHQERTYRNRQRQVRLLRNRRFLRKRRFHRQYHPRQRRFHRLTRFLRKRRLQKKTYFHRQRCLLLNRRLLRMCRQ

SEQ ID NO: 44021 - DNA, 708 bp, Unknown
  Obtained from environmental sample
  misc_feature (1)..(708): n is a, c, g, or t
ttgattctcttgatgatctcaatatttccattgatgactcggatgtaccatccgctgatgtaccatctgaagaagctccatctgatgattcatcatctatcgatgattcatcatctatcgatgaatcatcatctatcgatgatgttgacattgatgtcgccactgccgctgggtgatgtaaaagatgacgggcaggacttgtctcttgacaacggatttcagagcggcggcgaaatatctattgacgatcaaatgcccgaaggttttgaagacgaacttcaggacgcttctgttccgcttgaagaagcggcggatacctcagacttaatgtcttcagacttagcgtcttcagacttaatgtctgttgaagaagccgaacctgcggaaataaccgcacccgatgaatctgccgaagatattgataaaatagaagaaataggcgagatagacgacgttgacgaaattgctggcatagatgaaaaacccgcaaaagcggcaagcgcccctgcaagcgcgccctcaagcgcaccggcgcaaaagagcggaaatttccagcttccttcagacttaaaaaaggaactcaaaaatattctcagttacatggatcagctccttgagtccctgccggaagaaaagatcgaagaattcgcaaagtcggaatattttgattcctacaagaaactctttaaagatttggggctggtataa

SEQ ID NO: 44022 - protein, 235 aa, Unknown
  Obtained from environmental sample
  misc_feature (1)..(235): Xaa is any amino acid
MILLMISIFPLMTRMYHPLMYHLKKLHLMIHHLSMIHHLSMNHHLSMMLTLMSPLPLGDVKDDGQDLSLDNGFQSGGEISIDDQMPEGFEDELQDASVPLEEAADTSDLMSSDLASSDLMSVEEAEPAEITAPDESAEDIDKIEEIGEIDDVDEIAGIDEKPAKAASAPASAPSSAPAQKSGNFQLPSDLKKELKNILSYMDQLLESLPEEKIEEFAKSEYFDSYKKLFKDLGLV

SEQ ID NO: 44023 - DNA, 1146 bp, Unknown
  Obtained from environmental sample
  misc_feature (1)..(1146): n is a, c, g, or t
atgcggattattccaatagcaagcggaaagggcggcacaggtaagtctcttgtcgccgcaaatcttggcgtggctttcgcgcaggcagggcagcgggtagttctggccgatcttgacctgggagcctcaaaccttcacctggttcttgggcatcaatcgccaaaaacaggaatcgggacatttttgaacgataccaggtcggatttcaatgatgttatcacagacacggatataagggggctcaggttcattccgggggatacggaaattccaggtacggcaaatctgaagccctttcaattaaaggcccttgtaagccgttttttgtcattaaagaatgaagcggatattcttattcttgacctgggcgcggggacgcatcagtctatcctggacttttttcttctttccgggcagggcatcgtagtttcggcgccgatagttaccgcggtacttaacgcttacgtgtttctgaagaataccgtgttccgcctgatgtttacggttttcggaaaaggcagtccggccgcgacttatctggaaaaggcccgcaaggacggttcgggccatcaaaggctttacattcccaaaatgctgcctgaaataaaaaaaatagatcctgattcctataacaattttttaaaacgcattgagcattttcatccccgcctgataatgaacatgatcgatgatccgaaagacgcggacgtggcatttaagatccgccgttcctgtgaagaataccttgacttaaaaatagagcatctcggcataatctatcgtgattcattccaggatactgccctgtcctcaaggctgccgattgtgctttataaacctcaatcggttttatcacaggccatttaccggattgctgataaaatacttcagagcgaagaagacagcttcggccttagcgataaagaaattgaagaaagctttcaggaagcagggatggaagcggaagtcgactttgagacaaagatggattatgtggaagaccttttacattcaggagccctttctcagggcgatttggttgagaccataaaatcccagcagtttgaaatatcaaagctgaaaaaagaaaacaactttttgaagtataagctttcaaaggcttttgaaaaggggtttgagtcttaa

SEQ ID NO: 44024 - protein, 381 aa, Unknown
  Obtained from environmental sample
  SIGNAL (1)...(27)
  DOMAIN (4)...(207): CobQ/CobB/MinD/ParA nucleotide binding domain
  misc_feature (1)..(381): Xaa is any amino acid
MRIIPIASGKGGTGKSLVAANLGVAFAQAGQRVVLADLDLGASNLHLVLGHQSPKTGIGTFLNDTRSDFNDVITDTDIRGLRFIPGDTEIPGTANLKPFQLKALVSRFLSLKNEADILILDLGAGTHQSILDFFLLSGQGIVVSAPIVTAVLNAYVFLKNTVFRLMFTVFGKGSPAATYLEKARKDGSGHQRLYIPKMLPEIKKIDPDSYNNFLKRIEHFHPRLIMNMIDDPKDADVAFKIRRSCEEYLDLKIEHLGIIYRDSFQDTALSSRLPIVLYKPQSVLSQAIYRIADKILQSEEDSFGLSDKEIEESFQEAGMEAEVDFETKMDYVEDLLHSGALSQGDLVETIKSQQFEISKLKKENNFLKYKLSKAFEKGFES

SEQ ID NO: 44025 - DNA, 723 bp, Unknown
  Obtained from environmental sample
  misc_feature (1)..(723): n is a, c, g, or t
gtggtcaataggttttgcggtaatatctattattcccgcaatatttttaccgatgaagaaggagtaaatatgtggtatgacaatttgtttgccgatttagaaaaaaacaagaatgccgaacaagctaaaaaaatggccgcttacatgaaagataaatttgtttttttaggcataccaaaaccaaaactgatggaaataattaaaccttacttaaaagagggcaaaaaacatgaacttgattggaaatttatcaatacttgctggaaaaaaaattatcgtgaagctcaatatacagcggcagaatatttagaaagtttagaaaaattattaaccgataacgatttacctaatcttaaaaaacttattgttacaaaatcatggtgggatactaccgattcaatagacgcaataatcggaaaaattatattaaattacaaaaaacttgaaaaggaaatgcttaaatggtcaaaagatgaaaatatttgggtaagaagggtgtcaattgattttcaactgcaatacaaagataaaaccaaccaaaaattatttgaacaaattttagtaaacaatctcggaacagatgaattttttataaacaaagccattggctggagtttaagagaatactcaaaaacaaataaaaaatgggttaaagattttattaataaatataaaaatcagcttcataaattgagtataaaagaagcatcgaagtatttataa

SEQ ID NO: 44026 - protein, 240 aa, Unknown
  Obtained from environmental sample
  misc_feature (1)..(240): Xaa is any amino acid
MVNRFCGNIYYSRNIFTDEEGVNMWYDNLFADLEKNKNAEQAKKMAAYMKDKFVFLGIPKPKLMEIIKPYLKEGKKHELDWKFINTCWKKNYREAQYTAAEYLESLEKLLTDNDLPNLKKLIVTKSWWDTTDSIDAIIGKIILNYKKLEKEMLKWSKDENIWVRRVSIDFQLQYKDKTNQKLFEQILVNNLGTDEFFINKAIGWSLREYSKTNKKWVKDFINKYKNQLHKLSIKEASKYL

SEQ ID NO: 44027 - DNA, 651 bp, Unknown
  Obtained from environmental sample
  misc_feature (1)..(651): n is a, c, g, or t
gtgatcattactggcataacagcacaaaattccgattacgacggcaaccccaaaatcggttacaccggcacggcaacagcatcgccatacacaggtgcgttagattatgaatacgcaggcacggagcacccccaagacaaagtggctcccacagacgcgggcgaatacaccatcagagtaaccttgccagatgatgccccttacaccggagaatggagaggcacattcaccatagcaagggtaaaccccacctacacaatccccacaggcttaaccgccacagtagggcaaacattggcagacattgtgtctaatctccctgtgggttgggcatgggcagatgccaccgctcatgttggcgtagttggggaacaaacccacaaagcgaatttcactccgagcgatacgaggaactacaacaccgtgacaaacgttgatgtaattgtaaatgtgacagagactgaaatctcaagcagcgaaaccgaaaccgaccccattttctcccatcgtgaaaatcctataattgggcgaatcggggttcagacaataagcaatacgatcctgctctcaaacctaccgaaaaacacgagagtagaagtgtacaattttgcaggcaagcgcatatattcagcatatcctgaaaaatcctaa

SEQ ID NO: 44028 - protein, 216 aa, Unknown
  Obtained from environmental sample
  misc_feature (1)..(216): Xaa is any amino acid
MIITGITAQNSDYDGNPKIGYTGTATASPYTGALDYEYAGTEHPQDKVAPTDAGEYTIRVTLPDDAPYTGEWRGTFTIARVNPTYTIPTGLTATVGQTLADIVSNLPVGWAWADATAHVGVVGEQTHKANFTPSDTRNYNTVTNVDVIVNVTETEISSSETETDPIFSHRENPIIGRIGVQTISNTILLSNLPKNTRVEVYNFAGKRIYSAYPEKS

SEQ ID NO: 44029 - DNA, 762 bp, Unknown
  Obtained from environmental sample
  misc_feature (1)..(762): n is a, c, g, or t
atgggcgtcgtcctgggtaaaaccacgtaccctcagcaggccatggagtacgccgctgcgctcatagcgatataccgtgccaagctcggcccaacgcagcggcaggtcgcggtagctgcggccttttgttttatagatcaaaatgtggaatgggcagttcatcggtttgatgatgtaatcctgctcatcgatctgcatggggctgtacatattggacttgtaaaaacccagatgtcccgaagtttcccaaagccagcttttaccgatatgcggagtaaagagaatctcgtagccattgcggtaatgttctttgcgccagaagtcctcaatggagacacggatacgcccgccgttgggatgccagtagatcaggcccgcgcccgcttcctcgtgaaccgagtagaggtcaagctctttgccaaggcggcggtggtcgcgtttttcaacctcttccaggaaggtaaggtaggctttcagatccttgggggtttcccatgcggttccgtatatgcgggtgagcatggcgcgcttctcgtcgccgcgccagtaagcgcccgctatactttgcagcttaaacgccgccgaattgatttccctggtattggcgacatggggccctcggcagagatcggcccacagtaccttgccgtttgcgtcacggttttcataaatcgtaatttccgcgtcgccgggcagatcattgataagttcggtcttgaattcttctgtggcaaaacgcgcgcagcgcctcctcgcggctga

SEQ ID NO: 44030 - protein, 253 aa, Unknown
  Obtained from environmental sample
  misc_feature (1)..(253): Xaa is any amino acid
MGVVLGKTTYPQQAMEYAAALIAIYRAKLGPTQRQVAVAAAFCFIDQNVEWAVHRFDDVILLIDLHGAVHIGLVKTQMSRSFPKPAFTDMRSKENLVAIAVMFFAPEVLNGDTDTPAVGMPVDQARARFLVNRVEVKLFAKAAVVAFFNLFQEGKVGFQILGGFPCGSVYAGEHGALLVAAPVSARYTLQLKRRRIDFPGIGDMGPSAEIGPQYLAVCVTVFINRNFRVAGQIIDKFGLEFFCGKTRAAPPRG

SEQ ID NO: 44031 - DNA, 615 bp, Unknown
  Obtained from environmental sample
  misc_feature (1)..(615): n is a, c, g, or t
atgctcacccgcatatacggaaccgcatgggaaacccccaaggatctgaaagcctaccttaccttcctggaagaggttgaaaaacgcgaccaccgccgccttggcaaagagcttgacctctactcggttcacgaggaagcgggcgcgggcctgatctactggcatcccaacggcgggcgtatccgtgtctccattgaggacttctggcgcaaagaacattaccgcaatggctacgagattctctttactccgcatatcggtaaaagctggctttgggaaacttcgggacatctgggtttttacaagtccaatatgtacagccccatgcagatcgatgagcaggattacatcatcaaaccgatgaactgcccattccacattttgatctataaaacaaaaggccgcagctaccgcgacctgccgctgcgttgggccgagcttggcacggtatatcgctatgagcgcagcggcgtactccatggcctgctgagggtacgtggttttacccaggacgacgcccatattatctgtacgccggatcanatggaagcggagattcttgaggtgcttcgcttcagcctttcactgtggaaggtgttcggcttcaggatataa

SEQ ID NO: 44032 - protein, 204 aa, Unknown
  Obtained from environmental sample
  DOMAIN (61)...(204): tRNA synthetase class II core domain (G, H, P, S and T)
  misc_feature (1)..(204): Xaa is any amino acid
MLTRIYGTAWETPKDLKAYLTFLEEVEKRDHRRLGKELDLYSVHEEAGAGLIYWHPNGGRIRVSIEDFWRKEHYRNGYEILFTPHIGKSWLWETSGHLGFYKSNMYSPMQIDEQDYIIKPMNCPFHILIYKTKGRSYRDLPLRWAELGTVYRYERSGVLHGLLRVRGFTQDDAHIICTPDXMEAEILEVLRFSLSLWKVFGFRI

SEQ ID NO: 44033 - DNA, 699 bp, Unknown
  Obtained from environmental sample
  misc_feature (1)..(699): n is a, c, g, or t
gtggaaggtgttcggcttcaggatataaaggcgtaccttgcaaccaagcccaaggaaagcgtgggcgagcagagccgttgggacgccgcgctggaaagcctgcgtaaggcggtggatgccgagggacttgcttacgagattgacgaaggcggcggcgcgttctacggcccgaaaatcgatcttaaaataaaagacgcgcttggacgcgaatggcagatgacgacaatccagtttgactttaacgagcctgaacgttttgacatgacctttgttgatgcggatggccagcacaagcggccctacatggttcaccgcgccctgcttggcagccttgagcgctttttcggcgtgttaatcgaacacttcggcggcagtttccccccgtggatcgccccggagcaaatcgccgtgattcccgttgcggaaggctttaacgagtacgcgaaaaaagttaccacggaactaaaggcccacgacctacgggtttccgttgagttaggcgacgacaggcttaacgcgaagatacgcgactgccagaatcgcaaaattccctacatgcttgtggccggccagcgcgaagcggatgaaggcacggtatcgatacgcctgcgtgacggtaaacagcttccggcgatgaaggtcgccgacttcgccaaatacgcgctggaaaaaattgagagccgagcgatagaactataa

SEQ ID NO: 44034 - protein, 232 aa, Unknown
  Obtained from environmental sample
  DOMAIN (134)...(224): Anticodon binding domain
  misc_feature (1)..(232): Xaa is any amino acid
MEGVRLQDIKAYLATKPKESVGEQSRWDAALESLRKAVDAEGLAYEIDEGGGAFYGPKIDLKIKDALGREWQMTTIQFDFNEPERFDMTFVDADGQHKRPYMVHRALLGSLERFFGVLIEHFGGSFPPWIAPEQIAVIPVAEGFNEYAKKVTTELKAHDLRVSVELGDDRLNAKIRDCQNRKIPYMLVAGQREADEGTVSIRLRDGKQLPAMKVADFAKYALEKIESRAIEL

SEQ ID NO: 44035 - DNA, 849 bp, Unknown
  Obtained from environmental sample
  misc_feature (1)..(849): n is a, c, g, or t
atgggcgtaccgtataatcaggtgttttttccgacatctttcaatgagctgttttccgtctggaatcgtttccccgaaggtgttctttacgccggaggtacaagcttaatcggaaggcagggtaaaaatataattaatctgccgataataaccatttgtcttgataagcttgaagaactgcaccggattacaagaacagaacagtaccttgaaataggatcaatggttaatttaaacaggcttgcaaggctgggaaaaatagtgcctgaaatcctgtgtacttgtctggaaaatattgcgggagtccaactgcggaatatcgcaactgtcggcggaaatatatgcagcgcttcaaatttatttgatttgtcagttccttttaccgctcttgacgcgcaatatgaattccgaagcgctgtaagtacacggcttgttcttgcttcgagatatcattcctcgcctgtcgtacaatctgcggacgcttccggttcaaaaaacaaggaagtacttacccgtatcagactgcccctgcatcaatgggattactcaatttataaaaagatcaaaagagaaaacatatacaacaacgaggtgctggtttttttagcaaaagcccaaaaaaatatactttcagatataagggtagtatacaaagcaaataaaattctgcggaacaaaaacagcgaagacctgcttaacggcaaatccctgcccattaaccgtagaaccgcattggattttatcgaaaactggaaagaattccttgaaaacaggaatgatgtaaatgagttttcaaaaaatgccctaatttacagtatagaagaaaatgtcattatcctttcagaataa

SEQ ID NO: 44036 - protein, 282 aa, Unknown
  Obtained from environmental sample
  DOMAIN (6)...(178): FAD binding domain in molybdopterin dehydrogenase
  misc_feature (1)..(282): Xaa is any amino acid
MGVPYNQVFFPTSFNELFSVWNRFPEGVLYAGGTSLIGRQGKNIINLPIITICLDKLEELHRITRTEQYLEIGSMVNLNRLARLGKIVPEILCTCLENIAGVQLRNIATVGGNICSASNLFDLSVPFTALDAQYEFRSAVSTRLVLASRYHSSPVVQSADASGSKNKEVLTRIRLPLHQWDYSIYKKIKRENIYNNEVLVFLAKAQKNILSDIRVVYKANKILRNKNSEDLLNGKSLPINRRTALDFIENWKEFLENRNDVNEFSKNALIYSIEENVIILSE

SEQ ID NO: 44037 - DNA, 465 bp, Unknown
  Obtained from environmental sample
  misc_feature (1)..(465): n is a, c, g, or t
atggctggtgctggtatagttcacgcagaatataatgactccgaatttcaggcgatcattgatgcgctctccaaagcggcaatgcccgatctcaaagcgattgcggacttagccggaggggaattggactatatcagcaagaaagcttttgaacacgagaaagaccctgttgacggaaaaaaatggcaaccgctaaaagagccgcgccctgacggatcgacaaatccgatcttggattacggcggtcaactgaagcgatctcttgactgggaatccttccctgacggctcggtgatattcggctcaaacatggtatatgcccggatacaccagctgggagggcaagccggaaggggaaacaaaacaaccattccggcgcgaccttacatgggagtgccgaaagatttcgaccgccgcatcttgagcgatccggctgtgcagaaacttctggggctggaggcgtga

SEQ ID NO: 44038 - protein, 154 aa, Unknown
  Obtained from environmental sample
  DOMAIN (14)...(151): Phage virion morphogenesis family
  misc_feature (1)..(154): Xaa is any amino acid
MAGAGIVHAEYNDSEFQAIIDALSKAAMPDLKAIADLAGGELDYISKKAFEHEKDPVDGKKWQPLKEPRPDGSTNPILDYGGQLKRSLDWESFPDGSVIFGSNMVYARIHQLGGQAGRGNKTTIPARPYMGVPKDFDRRILSDPAVQKLLGLEA

SEQ ID NO: 44039 - DNA, 1731 bp, Unknown
  Obtained from environmental sample
  misc_feature (1)..(1731): n is a, c, g, or t
gtggtgcggggcggccgcgtcacggacgaggtcgtgcatctcgacgcctcctgcgagcagaacgaagtcatcgcccaggccaacgcgcgggcggactcaggcggccgtctcctcgacgattccctgaccgcccgcgggcgcggcgacgtgttcatgtccgaacgcaacgaagtcacgctcatggacatctctccggggcagatggtttccatttccgccgcgctcattccctttctggagcacgacgacgccaaccgcgccctcatgggttcgaacatgcagcgccaggccgtgccgcttttgcgttccgaacgctccctggtgggcacgggcatggaaggcgacgtggcccgcgattccggcgcctgccttctggccgaaggcaacggcgtggtccgctacgccgatgcgaacagggtcatcgtcagctacgaggatgcgctctatcccaacctgggcggcgtgcgctcctacgacttgctgaaatatcacaagtcgaaccagaattcctgtttcggccagaccccgtcctgccatcccgggcagcgcgtgacaaagggcatggtgctggccgacggccccggcatcgaaggcggagaactggcgctgggcaaaaacctggtggtcgccttcatgccttggtgcggctacaactatgaagactccatcctcatttccgagcgcacggtcaaggaagacaccttcacctccgtgcacattgaggaatttgaggtcgtggcccgggacaccaagctggggccggaagaaatcacccgcgacatcccccaatgtcggcgaagagatgctcaagaactggatgagtcgggcatcatcaggataggggccactatcaagcacggcgacatactggtgggcaaggtcaccccaaagggagagacggtgctttcgcccgaagaaaagctgctgcgcgccatattcggcgaaaaagcgtccgacgttaaggacgccagcctcaacgtcccgcctggcatcgagggtacggtggtggatgtcaaggtcttcactagaaagggccacgaaaaggatcttcgcacccagcagatagagcgcgaccagatagccaagtgggaaaaagacctgaaggatcaagagcgcatcatccgcgccgaaagcaaaaagaagatagtcgcgctgctaaaaggcaaggagctgtctgagtcgttggaggacgattctggcaacaaactgctgccggccggcaaaaaattgacccagagcatgctggaggcggtgtcctaccaccgcttccgccagataagcgtgaccgccggcaaggagaggcttgaggcccaagtgctggacatattggacaagaccgacagccagctccatgttctcagcgatgtcttggccgaaagggtcgagcgcctgttgaagggcgatgaacttctgccgggcgtcctcaaaaatgtcaaggtgtatgtcgccgtcaagcgcaagctgcaggtgggcgacaaaatggccggcaggcacggcaacaagggcgtggtcagtcgcatcctcccaatagaggacatgccctatctccccgatggcactcctgtggacatcgttcttaacccactgggcgtcccctcccgcatgaacatcggccagattttagagacccaccttgggtgggccggcagggtgatgggcgtacacttcaccactcccgtcttgacggcgccaaggaatccgaaatcaagaaatggctctcggccgatctga

SEQ ID NO: 44040 - protein, 576 aa, Unknown
  Obtained from environmental sample
  DOMAIN (123)...(574): RNA polymerase Rpb2, domain 6
  misc_feature (1)..(576): Xaa is any amino acid
MVRGGRVTDEVVHLDASCEQNEVIAQANARADSGGRLLDDSLTARGRGDVFMSERNEVTLMDISPGQMVSISAALIPFLEHDDANRALMGSNMQRQAVPLLRSERSLVGTGMEGDVARDSGACLLAEGNGVVRYADANRVIVSYEDALYPNLGGVRSYDLLKYHKSNQNSCFGQTPSCHPGQRVTKGMVLADGPGIEGGELALGKNLVVAFMPWCGYNYEDSILISERTVKEDTFTSVHIEEFEVVARDTKLGPEEITRDIPQCRRRDAQELDESGIIRIGATIKHGDILVGKVTPKGETVLSPEEKLLRAIFGEKASDVKDASLNVPPGIEGTVVDVKVFTRKGHEKDLRTQQIERDQIAKWEKDLKDQERIIRAESKKKIVALLKGKELSESLEDDSGNKLLPAGKKLTQSMLEAVSYHRFRQISVTAGKERLEAQVLDILDKTDSQLHVLSDVLAERVERLLKGDELLPGVLKNVKVYVAVKRKLQVGDKMAGRHGNKGVVSRILPIEDMPYLPDGTPVDIVLNPLGVPSRMNIGQILETHLGWAGRVMGVHFTTPVLTAPRNPKSRNGSRPI

SEQ ID NO: 44041 - DNA, 744 bp, Unknown
  Obtained from environmental sample
  misc_feature (1)..(744): n is a, c, g, or t
ttggatatgactacgtttctctggctttcggaaatgacctttattacctttctggcaataagcagtacaaggctgataatttcctgctctgtttcttcgagtatttcagcgcgcttgtcctgggcgcgctgcaaaatggtttgggttctttcaataagccgatttacttcggcctttccctcgataaaacccgcttccctgccttcaacgcggccttcgtcttccgcgtctttcttttcagcctccaacgtcgcgcgcgaatctgcttctatttgcgccgccctttcattggcttcggcgattattttttccgcttcgtcctgggccttgcgcttaatggactgggcttcatcggtctttcgcttgacctgtttaaaggctgccgcttccgcttcctttattatacgttcggcttcggctttggaagcgcggataagggtttccttctctgtttcccactgttccctgaactcgtccgcctcgcgccgcagatcttcaaccgtggggcctgtatatgccgctacagcttcaggtatttcttcctgctccgcttccaccggcactaaatgcgaaagctcaggaaacttggtgggaggatcgagaagtatcctggattcgccgaccgtgatttcacccggcctgaatactgccttggtcataataagcctcttaaaccaccagttcgtcttctccggccctggcgataacgatttcaccggtatcttcaaggtggcggataattga

SEQ ID NO: 44042 - protein, 247 aa, Unknown
  Obtained from environmental sample
  misc_feature (1)..(247): Xaa is any amino acid
MDMTTFLWLSEMTFITFLAISSTRLIISCSVSSSISARLSWARCKMVWVLSISRFTSAFPSIKPASLPSTRPSSSASFFSASNVARESASICAALSLASAIIFSASSWALRLMDWASSVFRLTCLKAAASASFIIRSASALEARIRVSFSVSHCSLNSSASRRRSSTVGPVYAATASGISSCSASTGTKCESSGNLVGGSRSILDSPTVISPGLNTALVIISLLNHQFVFSGPGDNDFTGIFKVADN

SEQ ID NO: 44043 - DNA, 1023 bp, Unknown
  Obtained from environmental sample
  misc_feature (1)..(1023): n is a, c, g, or t
ttgaagataccggtgaaatcgttatcgccagggccggagaagacgaactggtggtttaagaggcttattatgaccaaggcagtattcaggccgggtgaaatcacggtcggcgaatccaggatacttctcgatcctcccaccaagtttcctgagctttcgcatttagtgccggtggaagcggagcaggaagaaatacctgaagctgtagcggcatatacaggccccacggttgaagatctgcggcgcgaggcggacgagttcagggaacagtgggaaacagagaaggaaacccttatccgcgcttccaaagccgaagccgaacgtataataaaggaagcggaagcggcagcctttaaacaggtcaagcgaaagaccgatgaagcccagtccattaagcgcaaggcccaggacgaagcggaaaaaataatcgccgaagccaatgaaagggcggcgcaaatagaagcagattcgcgcgcgacgttggaggctgaaaagaaagacgcggaagacgaaggccgcgttgaaggcagggaagcgggttttatcgagggaaaggccgaagtaaatcggcttattgaaagaacccaaaccattttgcagcgcgcccaggacaagcgcgctgaaatactcgaagaaacagagcaggaaattatcagccttgtactgcttattgccagaaaggtaataaaggtcatttccgaaagccagagaaacgtagtcatatccaacgtggttcaggccctccgcaaggttaaggggaggggaaacatcattatccgtgtaaacatggtggatctgaaacttacaacagagcatacaaaggattttatcaatcttgtggaaggcgcgaaatcagttcaggtagttgaggatacttcggtagacgaaggcggctgcataattgaaaccgacttcggcgagattgacgcgcgcatagcaagccagcttgcggagcttgaatcgaagatacttgagatttctcccatcaagtcatgggcgaaaaacgataccatagagagctga

SEQ ID NO: 44044 - protein, 340 aa, Unknown
  Obtained from environmental sample
  DOMAIN (76)...(320): Flagellar assembly protein FliH
  misc_feature (1)..(340): Xaa is any amino acid
MKIPVKSLSPGPEKTNWWFKRLIMTKAVFRPGEITVGESRILLDPPTKFPELSHLVPVEAEQEEIPEAVAAYTGPTVEDLRREADEFREQWETEKETLIRASKAEAERIIKEAEAAAFKQVKRKTDEAQSIKRKAQDEAEKIIAEANERAAQIEADSRATLEAEKKDAEDEGRVEGREAGFIEGKAEVNRLIERTQTILQRAQDKRAEILEETEQEIISLVLLIARKVIKVISESQRNVVISNVVQALRKVKGRGNIIIRVNMVDLKLTTEHTKDFINLVEGAKSVQVVEDTSVDEGGCIIETDFGEIDARIASQLAELESKILEISPIKSWAKNDTIES

SEQ ID NO: 44045 - DNA, 846 bp, Unknown
  Obtained from environmental sample
  misc_feature (1)..(846): n is a, c, g, or t
gtgcttacggcccagattctttcgcttcttatcgcaatttatcattttttcctctttttttccaggggcagaaaggatataaagtatctgtatttttcgcttctgtgcctttcattcttccttgcctatattaatgtcggttttgtcttttcatcatcatattatacgctgatcgagaaactgagcaggatcggccaggtgttctgttttcccttctttgccgcgttcatgctggaatcgataggcatattcggggctaaaaagaaatacattatcgcctgccttctcggctacagcctgttatgcgcattattcatagcatttcagaatacaaagcaatcggtaaacgcgatgtataccattatgacgaatatcaatacgattccgattctggcctgcagtattattattctttcttacgtcgtttttttcaggaagaatatcaaaattgtaccgttgtttattatcgcgctgaccgtcgcgggctccagccttcgcgatctttttgttctgcaaagcggtacggtgcctttgttctgggcggccccgtattctttcatgatcatggtaattattatttacataatactgattaccgatgaaaattttatacagaacgcgttttcacgctaccttgcgcccgaaattatttccgaaattgtcaaagaccctaacaagctgaacctgggcggtgaaaaacgggaaatgaccgcgatatttacggatattcagggtttttccgctatttccgaacaactcgatcccgcccacctggtaaggctcttaaacaagtaccttactcaaatgagcaacatcataatggaacacttttggaaccatagataa

SEQ ID NO: 44046 - protein, 281 aa, Unknown
  Obtained from environmental sample
  misc_feature (1)..(281): Xaa is any amino acid
MLTAQILSLLIAIYHFFLFFSRGRKDIKYLYFSLLCLSFFLAYINVGFVFSSSYYTLIEKLSRIGQVFCFPFFAAFMLESIGIFGAKKKYIIACLLGYSLLCALFIAFQNTKQSVNAMYTIMTNINTIPILACSIIILSYVVFFRKNIKIVPLFIIALTVAGSSLRDLFVLQSGTVPLFWAAPYSFMIMVIIIYIILITDENFIQNAFSRYLAPEIISEIVKDPNKLNLGGEKREMTAIFTDIQGFSAISEQLDPAHLVRLLNKYLTQMSNIIMEHFWNHR

SEQ ID NO: 44047 - DNA, 627 bp, Unknown
  Obtained from environmental sample
  misc_feature (1)..(627): n is a, c, g, or t
atgggagacgcgatcatcgcgttcttcggagctcctctgttcaacgccgatcacggcgctcttgcctgccgcagcgctctcgcgattaaggcggcggagaaggtgttaaacgaaacaataatcggagaaaagttaagccccgtgccaatatttacccgcatcggaataaacaccggcgaaatggtagtaggcaacatgggggcggaaaaaaagatggactataccatcatggggaacgctgtaaacctcgcgtcgcggattgagggagtaaacaagtattaccggaccggcggcatattgataagcgaatacacgcgggcaaagatcggcgacgagttttcgcttcgccgcattgaccgcgtccgtgtagtgggaataaacacgcctctgcgtctgtatgaattgctgccgacggatactgaacacggcgctgtggagacgtgggagaaggcgcttgacttgtatgagcgcagggatttcaggaaagcatttgctttatttgtttcgctgataaagcgttatcctaatgacaatgtcgccagagtatacgcgcaccggtgcaaggcgtacacggtaaccccgccgccggaagactgggatgccgtgaaaaaccttacaaataaataa

SEQ ID NO: 44048 - protein, 208 aa, Unknown
  Obtained from environmental sample
  DOMAIN (2)...(137): Adenylate and Guanylate cyclase catalytic domain
  misc_feature (1)..(208): Xaa is any amino acid
MGDAIIAFFGAPLFNADHGALACRSALAIKAAEKVLNETIIGEKLSPVPIFTRIGINTGEMVVGNMGAEKKMDYTIMGNAVNLASRIEGVNKYYRTGGILISEYTRAKIGDEFSLRRIDRVRVVGINTPLRLYELLPTDTEHGAVETWEKALDLYERRDFRKAFALFVSLIKRYPNDNVARVYAHRCKAYTVTPPPEDWDAVKNLTNK

SEQ ID NO: 44049 - DNA, 1170 bp, Unknown
  Obtained from environmental sample
  misc_feature (1)..(1170): n is a, c, g, or t
gtgtgcgaggtttgcggggcgacttacgagcctaccgaagtggtaaatcccacctgcgggatgtgcggtaagacgccggagcttcggtcgtccacgcatatatatgtgcagctctcgaagcgagaggattttttgcgcgagtacatacacaggccgggggttcttcaggcggatatgcggaactttgtggggacttggatagaggaggggctcaaggagtggtgcatatcgcgcgacgggccgtacttcgggttcgccataccggggacggagaataagttcttctacgtgtggatggacgcgcccataggctacctctcctcttcggcgcattactgcgccgagcgcgggctggacgtcatggactactggaggaagggcgggccttccgaagttgtgcacttcatcggcaaggacatcgtctacttccacgcgctcttctggccggtgatgctcgacagcgcggggttcgcggtaccgtcgagccttcgcgttcacggttttttaaacgtggagggcgagaagatgtccaagtcccgcggcacgtttatactcgcccgcgagtacaccgaanaggtcagccactcgcaggccccggagttcctgcgcttctactacggctctaagctctccccgaacagcgccgatctcgacttcagccgggacgagataatgacgcgtgtgaacaccgcgctcatcaacaacatcggcaacctgcataaccgctccacggtcttctgcgagcgctacttcgacgggaacgtgccggaggcggcgtgggacaacagcatagcgacgcttgtggacgcggcggcggcggacatcgcggcccactatgagagcggcgactttaagcttgtggtggagaggatacagtcgctgggtagcgtgggaaacaagtactttcaggattgcaagccgtgggaggcgattaagaagggcgataaagacggggcggcggaggttattgtcacttgcgtcaatttgataaaggcgcttatagtctttctgaagcctatcacgccgaagatgtgcgcggtgtttgagaggcagataggggcggagctgtggtgggaggactacaagtttaatttgaaagggaaaaagatcgggagcggggataagctggcgttgccacttgaggtggggcatatgagcgagttgttttga

SEQ ID NO: 44050 - protein, 389 aa, Unknown
  Obtained from environmental sample
  misc_feature (1)..(389): Xaa is any amino acid
MCEVCGATYEPTEVVNPTCGMCGKTPELRSSTHIYVQLSKREDFLREYIHRPGVLQADMRNFVGTWIEEGLKEWCISRDGPYFGFAIPGTENKFFYVWMDAPIGYLSSSAHYCAERGLDVMDYWRKGGPSEVVHFIGKDIVYFHALFWPVMLDSAGFAVPSSLRVHGFLNVEGEKMSKSRGTFILAREYTEXVSHSQAPEFLRFYYGSKLSPNSADLDFSRDEIMTRVNTALINNIGNLHNRSTVFCERYFDGNVPEAAWDNSIATLVDAAAADIAAHYESGDFKLVVERIQSLGSVGNKYFQDCKPWEAIKKGDKDGAAEVIVTCVNLIKALIVFLKPITPKMCAVFERQIGAELWWEDYKFNLKGKKIGSGDKLALPLEVGHMSELF

SEQ ID NO: 44051 - DNA, 570 bp, Unknown
  Obtained from environmental sample
  misc_feature (1)..(570): n is a, c, g, or t
atggcttttccaactccccgcgaacagatcaccctccgtagcgtcgaccgcggcgccgtcgctaaactggccgccgagcttaatgttccagccgccgccgcgacgatacttgtcgggcgcggtttaacggactttaatcagtgcaaggcctacttccggcccggggccgacgggtttctcgatccgttcctattcgccgatatggataaggcggttaagaggatactggcggcgataggttccggcgagaggatagtgatctacggcgactatgatgtcgacggcgttacggctacggcgctgctgacgcgggcgctcgggcggctcggcgcgaattgcgggtactaccttccaaataggctgaccgagggttacggcatttccgagaccggcatacggcacatcgcggagggcggggcggcgctcgttatttccgttgactgcggcgtcacgtcttgcgtggaggctgctctggccgcttcgctcggcatggagatgataatcaccgaccaccacgagccgaaggaggcgctgcccgaagctctggcgctatcaacctcgtggatctga

SEQ ID NO: 44052 - protein, 189 aa, Unknown
  Obtained from environmental sample
  DOMAIN (78)...(187): DHH family
  misc_feature (1)..(189): Xaa is any amino acid
MAFPTPREQITLRSVDRGAVAKLAAELNVPAAAATILVGRGLTDFNQCKAYFRPGADGFLDPFLFADMDKAVKRILAAIGSGERIVIYGDYDVDGVTATALLTRALGRLGANCGYYLPNRLTEGYGISETGIRHIAEGGAALVISVDCGVTSCVEAALAASLGMEMIITDHHEPKEALPEALALSTSWI

SEQ ID NO: 44053 - DNA, 408 bp, Unknown
  Obtained from environmental sample
  misc_feature (1)..(408): n is a, c, g, or t
atgggcgaagttgttgaacatatgattgcgcctaatcttagggagaaatttagggaattaggatatgattttccccaagctaatcccaattccgatgtttcggatcgtaaaaataatatattctttgaaattgacgttaaactggaaaacggcaataaagccatgcttgtcgaagtaaaaaccaaaccaaccaccgaagatgtgcaggatcatgttaaacgccttgaaaaaatgcgcttatatgccgatttgcacgaagacaaacgtaaatttttgggtgctgttgcaggggtggtattaacagacaatgtaagagaatatatattaaaacaaggcttttttgttatagaaccttccggagaaacttttaatattattccgccaaataataaacctaaagaatggtaa

SEQ ID NO: 44054 - protein, 135 aa, Unknown
  Obtained from environmental sample
  misc_feature (1)..(135): Xaa is any amino acid
MGEVVEHMIAPNLREKFRELGYDFPQANPNSDVSDRKNNIFFEIDVKLENGNKAMLVEVKTKPTTEDVQDHVKRLEKMRLYADLHEDKRKFLGAVAGVVLTDNVREYILKQGFFVIEPSGETFNIIPPNNKPKEW

SEQ ID NO: 44055 - DNA, 1491 bp, Unknown
  Obtained from environmental sample
  misc_feature (1)..(1491): n is a, c, g, or t
gtgcgaatatntaaaccacgtcccgaatattcaattttaagagtacggatattaatattaatttattccctattatgcgttcttacttttcttttctccagaggttttttttcaagcacccttcaaaacggcgaagtgccggatcgtcttaaccttatcgtttttttcaccattccagcggtattaataatttttcttggtatttccgtattttaccttattatggattttatttttaaacgcccgggcagcaaatttaacataaggcttttggcttatttcgccgttatcgtcatatttacaatagctccaatcacgctgatgacaagcgccgcattaaaccaaattgtgcgtttttggcacagtattgattcaaacgcgtctacaagggcggcaaacagttttattgccgataattattcgcttcatctggagcgttttgaaaacattctgcggcaaaataatttttccactaccgcgttacagggaaaacttccacaggatatttcctccgttcaagttttcaattcggttaacggccaatggacggaaatatcgtataccggcgacgaacaatttaaactgccgtcccctccttcagaggaaacaggctttgtaatgagggtattaccaagggatcaagggacaattcgttatgtgcaaagagctgggcaaaattccctaagggttatcaattacaatcttgggattgattttgacaggggaaaatccgcgttggacaaccaagccgagcgttttgaaacgattaatttgctaagggaaaatatgcgccctttgttaatttattattatacggcattttttctgccaatcttgttaatgaccgcaattatcgccatttcattcacaagacgcattacccgcccgatagcggaattaacggaagcgattcaacgcgtcgcagaaggggatttttcctttcagattttatcaaaccgcaacgatgagcttggcttgcttatccgttcttttaactcaatggttcaagatttggaaaaaacaagggaagcgcttgtaagaaacgaaaaaatatcaatatggcagaacatggcgcaacaacttgcccatgagataaaaaacccccttacgccaataaaactttccgccgagcgcgtgcttcgcagatggcagaacaaccctgaagaaataggcgaaattattgaaagctccatgatggcgattattcaggaaacggaagggctttctgttttgttaaatgaattcagaacattgtcaaaaccgatggaaccgtcaaattcgcttgcacttttaaaagaatccgtggaagaagtaataaacgcgtactcaggctcttacccaaatgtaaaattcaacctggagcatattcagacggacatacaaataaaaatcgacaagcaccgtctttcgcaaattattacaaatcttgtgataaactccattgactcaatggacggcaacggagaaattgaactgcggactgatatgtaa

SEQ ID NO: 44056 - protein, 496 aa, Unknown
  Obtained from environmental sample
  DOMAIN (353)...(424): His Kinase A (phosphoacceptor) domain
  misc_feature (1)..(496): Xaa is any amino acid
MRIXKPRPEYSILRVRILILIYSLLCVLTFLFSRGFFSSTLQNGEVPDRLNLIVFFTIPAVLIIFLGISVFYLIMDFIFKRPGSKFNIRLLAYFAVIVIFTIAPITLMTSAALNQIVRFWHSIDSNASTRAANSFIADNYSLHLERFENILRQNNFSTTALQGKLPQDISSVQVFNSVNGQWTEISYTGDEQFKLPSPPSEETGFVMRVLPRDQGTIRYVQRAGQNSLRVINYNLGIDFDRGKSALDNQAERFETINLLRENMRPLLIYYYTAFFLPILLMTAIIAISFTRRITRPIAELTEAIQRVAEGDFSFQILSNRNDELGLLIRSFNSMVQDLEKTREALVRNEKISIWQNMAQQLAHEIKNPLTPIKLSAERVLRRWQNNPEEIGEIIESSMMAIIQETEGLSVLLNEFRTLSKPMEPSNSLALLKESVEEVINAYSGSYPNVKFNLEHIQTDIQIKIDKHRLSQIITNLVINSIDSMDGNGEIELRTDM

SEQ ID NO: 44057 - DNA, 525 bp, Unknown
  Obtained from environmental sample
  misc_feature (1)..(525): n is a, c, g, or t
ttggggattttaatacagggcgactcaggagtcggaaaaagcgaaaccgcgctggaactaattcaccgaggacaccggcttgtcgcggacgatgtggtagagataaattgcaattacggaaatacattgatgggcgcgggcgcgaacaaaattatcgggcatcacatggaaattcgcggccccggaataattaatattacgtatctgttcggagtaagggcgataagggatcagaaagaagtccaacttgtcgtagaattggaagaatgggacgcgcataaaaattacgacaggattggcgctgaggatcacacaattgaactgttgggagttaaaataccaaaacttacaataccggtaaaacccggacgtaacattccaattataatagaaacagccgcgatgaatgaacggttaaaatccatgggttatcatgccgccagggaattcaacaagaatattttaaagtggatcgaaagcgacgccgcaaaatcggtcttctttggccatgacaatataatttaa

SEQ ID NO: 44058 - protein, 174 aa, Unknown
  Obtained from environmental sample
  DOMAIN (1)...(164): HPr Serine kinase C-terminus
  misc_feature (1)..(174): Xaa is any amino acid
MGILIQGDSGVGKSETALELIHRGHRLVADDVVEINCNYGNTLMGAGANKIIGHHMEIRGPGIINITYLFGVRAIRDQKEVQLVVELEEWDAHKNYDRIGAEDHTIELLGVKIPKLTIPVKPGRNIPIIIETAAMNERLKSMGYHAAREFNKNILKWIESDAAKSVFFGHDNII

SEQ ID NO: 44059 - DNA, 627 bp, Unknown
  Obtained from environmental sample
  misc_feature (1)..(627): n is a, c, g, or t
atgatggacggcgcgaggtgctttccgcctaccgtcaaactgtctgcggcggttctggcaaataccgccccggagcggaaactggaaatcgtcaaacgcatagcaaagctaaaagatacttcgcctgaagtaattgccagggccgctgcggccataaaggagaaggcccgtcactttgggcaaagcggagctaaagctggggaggaaattgacggcaaaggggtgcttacggccatactaaagcattccgacattgccttcagcggacagctcttagacggcctggaaaaaagcgacccatccctcagcaaagaaatgaaggatcgcctgtatacccttgaggacgttgcgaatgcgaccgatcggcccttacaggaaaaactaagaagcatggacgataaggaaatcgcccttcttctcaagggacgctcggaaactttcacccaaaagataatgtggaacatatcttcggcaagagccgacaggattagggaggaatcggagataatgggggccgtgcccaaaatcgaggccgaagctgcggcaagggaatttctttcctggttccgtgaaagcattgacgaagggcggatattgatgctctcagacaaggatgtatttgtatga

SEQ ID NO: 44060 - protein, 208 aa, Unknown
  Obtained from environmental sample
  DOMAIN (92)...(201): FliG C-terminal domain
  misc_feature (1)..(208): Xaa is any amino acid
MMDGARCFPPTVKLSAAVLANTAPERKLEIVKRIAKLKDTSPEVIARAAAAIKEKARHFGQSGAKAGEEIDGKGVLTAILKHSDIAFSGQLLDGLEKSDPSLSKEMKDRLYTLEDVANATDRPLQEKLRSMDDKEIALLLKGRSETFTQKIMWNISSARADRIREESEIMGAVPKIEAEAAAREFLSWFRESIDEGRILMLSDKDVFV

SEQ ID NO: 44061 - DNA, 852 bp, Unknown
  Obtained from environmental sample
  misc_feature (1)..(852): n is a, c, g, or t
atgtattgtctggcgacggtggctgataaaatcgtcatggacgatcagggaacattggtgctgctgggttatgcctggggcagaggctatgttcagcacagtctggaaaaactgggcgtaggggcgcgtgaactccgttatctggaattcaagtccgctgcggagatatacaccagagattcgctgtcagatgcggatcgcaggcagtacggtgaaatattagacgacatcatgacaattacccgcgatacggtgacaaaggcccgttcatggacggtcggtgaatttgattctattattaataacgaatttatgttttccgccagaagcgcccttgcgcggggtctggttgattatatcggcagaaaagaaacggtgtttaaggctatcaaagaaattaccggaagtgaaaaagaaaatgatttttttatttttggcgattctgattccagccttaccggaagcagatatttttaccagcctgttaaagcaagctggctgagcagaccgccggtaatcgcggtgatatatgccgatggcgtaaccgacatggagcggggaatagcggcaaaaaatttagcccgtaccattcgggaagtgtccgaaaaaaaacgggttaaagctctggtaatacggatcaactcccccggcggcagcgccgaagcggctgactatgtggcggaagcaatcagaaacgccaaagaacggattccggttgtggtatccatgggcgctgtcgccgcttccggcggctattggataagcatgaacgccagccatattaccgcttctccggtaacactgaccggctccatcggcgttatcggcagttggttctacgacaaggcctga

SEQ ID NO: 44062 - protein, 283 aa, Unknown
  Obtained from environmental sample
  DOMAIN (1)...(137): Peptidase family S49
  misc_feature (1)..(283): Xaa is any amino acid
MYCLATVADKIVMDDQGTLVLLGYAWGRGYVQHSLEKLGVGARELRYLEFKSAAEIYTRDSLSDADRRQYGEILDDIMTITRDTVTKARSWTVGEFDSIINNEFMFSARSALARGLVDYIGRKETVFKAIKEITGSEKENDFFIFGDSDSSLTGSRYFYQPVKASWLSRPPVIAVIYADGVTDMERGIAAKNLARTIREVSEKKRVKALVIRINSPGGSAEAADYVAEAIRNAKERIPVVVSMGAVAASGGYWISMNASHITASPVTLTGSIGVIGSWFYDKA

SEQ ID NO: 44063 - DNA, 315 bp, Unknown
  Obtained from environmental sample
  misc_feature (1)..(315): n is a, c, g, or t
ttgggaactgttcccgggggcttttttattggcgaacgaggttgcgccagggcggacacgaagccctttttaacatttccacgatttgattacgaacaacccagtcccagtccccagtccgatcccccgatccccagccctgccctgatccccatccctgatccccgatccccagtctccgatcccctgatccccgatccccagtccccgatcccccgatccccagtccctgatccccagtcccccctgatcctattccgccttgaagttttccgtcccgacaaaaagcttgcggacagaccagcccgggattga

SEQ ID NO: 44064 - protein, 104 aa, Unknown
  Obtained from environmental sample
  misc_feature (1)..(104): Xaa is any amino acid
MGTVPGGFFIGERGCARADTKPFLTFPRFDYEQPSPSPQSDPPIPSPALIPIPDPRSPVSDPLIPDPQSPIPRSPVPDPQSPLILFRLEVFRPDKKLADRPARD

SEQ ID NO: 44065 - DNA, 828 bp, Unknown
  Obtained from environmental sample
  misc_feature (1)..(828): n is a, c, g, or t
ttgggtggtaacgcggcatttatcgacgcggaacacgcgttagaccccgtttacgcgaaaaacctcggcgtaaatatcgacgaactctgggtttcacagcccgacaacggggaacaagcgatggaaatcaccgaaagccttgtccgctcaggcgcggttgacgtaatcgtagtggactctgtcgcggcgcttaccccccaatcggaaatcgagggcgaaatgggtgacgcgcaaatgggagcgcaggcgcgtttaatgagtcaggctcttcgcaaacttacggcaaccatcggcaaatcgcgcacgattctcattttcatcaaccaaatccgcatgaaaatcggagtctttttcggcaacccggaaaccactacgggcggaaacgcgctaaagttctattcgtcactgcgccttgaagtccgtaaaactgaaacaatcgaagttagcaaggacgcggacgcgattggcaacagggtacgcgttaaagttgtaaagaacaaagtcgcgcccccattcagaaaaacagaaatagaactgatgttcggaaagggcatttccgccacaggcagtcttttggactgcgcggtaaagtacgagattattaaaaagagcggagcctggtattcctacaatgacgaaaaaatagggcagggcagggacaacacccgggactaccttgaacagcaccacgactttatgaaagaactggatacaagattaagggcgcaaattttccccggcagggaaccgcccaaggccgccgtaccgcaaaagagcgggaagtcgaagaagggtgatggggagaaggaagagagtaagactgaatag

SEQ ID NO: 44066 - protein, 275 aa, Unknown
  Obtained from environmental sample
  DOMAIN (1)...(246): recA bacterial DNA recombination protein
  misc_feature (1)..(275): Xaa is any amino acid
MGGNAAFIDAEHALDPVYAKNLGVNIDELWVSQPDNGEQAMEITESLVRSGAVDVIVVDSVAALTPQSEIEGEMGDAQMGAQARLMSQALRKLTATIGKSRTILIFINQIRMKIGVFFGNPETTTGGNALKFYSSLRLEVRKTETIEVSKDADAIGNRVRVKVVKNKVAPPFRKTEIELMFGKGISATGSLLDCAVKYEIIKKSGAWYSYNDEKIGQGRDNTRDYLEQHHDFMKELDTRLRAQIFPGREPPKAAVPQKSGKSKKGDGEKEESKTE

SEQ ID NO: 44067 - DNA, 996 bp, Unknown
  Obtained from environmental sample
  misc_feature (1)..(996): n is a, c, g, or t
atgatacagacggctgagcattcctatcaagttttgtctgagcaagaggaacttctggttgggagagttgaggaatggctcaatgaaaaaagaccgcaagattattatatagcgcatgaaaggtttagacggctccgtaatctgggaaacgctgtttttgattatccttcaataagggaaacccgatttgtaagggatattttgattaatgaacatcagcttacagaatccttgcttgccttttccgccccctcgcatgtgcttcgtattcccgcaaaagtagcggctctccgcagttttttaatcgcgaaatttcacgctttttccctgcttgcgcggttaaccgagaaaaacgaagaattgcataatcttgtaagaaagataccttttaccatagtttttacattaatggctgaagacgtttatttttcctgccttgacgatccgggcttttcaaacgatacaaaatccaaacttgccaacgatttaatcgcgttgtgggacagcggaaccgaccaacgcagtatccatcatcttatggcgctttcttcactttggaaggcaagggattccgctccgcccattttcgggacaatggacggtaacgccgagttgcttagaatttccatagatatgggcactgataccgaatgggaagattttttaaaaggggagtccaccagtgattatacaaggtgggcgcttgaggaatttctttttggtctgtcttatgaggaaatacaaaaggttcgcagcaggctgctgcgttacggagtaaaagccgtaagtcatgatgaggttagatcataccttgattcaaaacccgcgtattcggttgtaaacgaccgtgatccgcgggctatttacgacttttttatcgaaagaaaagacgcctgtaatttgcgaaaaatggtgaatgctccgggtcctttgaacacattggaagaaatctatttaaaataccgtataattcttgaaaccgctaaaatttattag

SEQ ID NO: 44068 - protein, 331 aa, Unknown
  Obtained from environmental sample
  misc_feature (1)..(331): Xaa is any amino acid
MIQTAEHSYQVLSEQEELLVGRVEEWLNEKRPQDYYIAHERFRRLRNLGNAVFDYPSIRETRFVRDILINEHQLTESLLAFSAPSHVLRIPAKVAALRSFLIAKFHAFSLLARLTEKNEELHNLVRKIPFTIVFTLMAEDVYFSCLDDPGFSNDTKSKLANDLIALWDSGTDQRSIHHLMALSSLWKARDSAPPIFGTMDGNAELLRISIDMGTDTEWEDFLKGESTSDYTRWALEEFLFGLSYEEIQKVRSRLLRYGVKAVSHDEVRSYLDSKPAYSVVNDRDPRAIYDFFIERKDACNLRKMVNAPGPLNTLEEIYLKYRIILETAKIY

SEQ ID NO: 44069 - DNA, 1029 bp, Unknown
  Obtained from environmental sample
  misc_feature (1)..(1029): n is a, c, g, or t
gtggtggcggaaaagattctggacatcgccagggactccgaagggcttctgcaaatcaacgctgtcatggacaatatcgcggcgcagacgaacctgttgtcaatgaacgcggcaatcgaggcggcccacgccggcgaagcgggcaagggctttgccgtcgtcgccggtgagattcgcaagctcgccgagtcgtcaagcacccagtcgaagacaacggcgacgatgttaaagaagataaagacttccattgacagcattacggaatcttccaacgaggtgctttcgcgttttgggattattgacgagaaagtaaaaaccgtgtcaacgcacgaggaaaatatccgcaacgcgatggaaaagcaggaagtgggcggaaagcagatactggaatccatgggaaagcttaaggagataagcgtgtcggtcaaagagggcgcggagaacatgcagaaatccggcgatcacctgaacacgcagaccacggagttaatacgatccagtaccgacgttgtggacggcatgaacgaaattgtaaacggggccatgaaggagataaaagcggctgttcaccttgttgacgaaatgagcgcggagaacaccaggaactttgagcagcttaaagaggagtcgtcaaagttcaaggttgagtcgggcagcgagaggaaaaaaatcatcgtggttgacgatgagcaaaccgttcttatgctgacaaaaagcgcgctggaaaaaaactatgacgttacaacagtcagttcgggcaaggaggccttggacttgttcttccagggttatactccccatttggtgttattggatttgaatatgcccgaaatgggcggctgggataccttaatcaggatacgggatctgtccaaactgcacaaaactccgatagcgatttatacgacatcggaagacccgaaggacagggctcaggcaaaggaaatgggcgcggttgatttcatcaagaagccctgtagaaaagaggaactgttaagcaggatactacaaataacaggtaacaaataa

SEQ ID NO: 44070 - protein, 342 aa, Unknown
  Obtained from environmental sample
  DOMAIN (2)...(216): Methyl-accepting chemotaxis protein (MCP) signaling domain
  misc_feature (1)..(342): Xaa is any amino acid
MVAEKILDIARDSEGLLQINAVMDNIAAQTNLLSMNAAIEAAHAGEAGKGFAVVAGEIRKLAESSSTQSKTTATMLKKIKTSIDSITESSNEVLSRFGIIDEKVKTVSTHEENIRNAMEKQEVGGKQILESMGKLKEISVSVKEGAENMQKSGDHLNTQTTELIRSSTDVVDGMNEIVNGAMKEIKAAVHLVDEMSAENTRNFEQLKEESSKFKVESGSERKKIIVVDDEQTVLMLTKSALEKNYDVTTVSSGKEALDLFFQGYTPHLVLLDLNMPEMGGWDTLIRIRDLSKLHKTPIAIYTTSEDPKDRAQAKEMGAVDFIKKPCRKEELLSRILQITGNK

SEQ ID NO: 44071 - DNA, 480 bp, Unknown
  Obtained from environmental sample
  misc_feature (1)..(480): n is a, c, g, or t
atgttctccgcgccctctttgaccgacacgcttatctccttaagctttcccatggattccagtatctgctttccgcccacttcctgcttttccatcgcgttgcggatattttcctcgtgcgttgacacggtttttactttctcgtcaataatcccaaaacgcgaaagcacctcgttggaagattccgtaatgctgtcaatggaagtctttatcttctttaacatcgtcgccgttgtcttcgactgggtgcttgacgactcggcgagcttgcgaatctcaccggcgacgacggcaaagcccttgcccgcttcgccggcgtgggccgcctcgattgccgcgttcattgacaacaggttcgtctgcgccgcgatattgtccatgacagcgttgatttgcagaagcccttcggagtccctggcgatgtccagaatcttttccgccaccactgcagccccgtctgccgtctctcggccgatctga

SEQ ID NO: 44072 - protein, 159 aa, Unknown
  Obtained from environmental sample
  misc_feature (1)..(159): Xaa is any amino acid
MFSAPSLTDTLISLSFPMDSSICFPPTSCFSIALRIFSSCVDTVFTFSSIIPKRESTSLEDSVMLSMEVFIFFNIVAVVFDWVLDDSASLRISPATTAKPLPASPAWAASIAAFIDNRFVCAAILSMTALICRSPSESLAMSRIFSATTAAPSAVSRPI

SEQ ID NO: 44073 - DNA, 780 bp, Unknown
  Obtained from environmental sample
  misc_feature (1)..(780): n is a, c, g, or t
ttgaatgttttacgccagcttgccaatcaggacaggcgtatacactatatttctttttctcgtaattttggcaaagaagcggccatgcttgccgggttacaggcggcgcatggggaatacattgtaactcttgacgcagatggacaagaccctccgtctcttattccccaaatgctggaagctgttgtttcgggagaatacgattgcgccgcgacccggcgggtaaaccgtaccggggaaccgccggtacggtctttctttgcacgctgtttctatgcgcttatgaaaaaaataaccgacatagaaatcatttccggctcacgggattttcgcttgatgaacagaaagtatttggaagcgattttagcgataccggaacgaaacaggttttcaaagggtatttttccatgggttggatttaaaacaaagtggttcgaatatgaaaacattgagcggagggcgggtaaaacaaaatggtctttctggaaattgtttgtgtattcgctggatggtattattgcgttttctacaaaaccgcttgccatagcttctgtattggggattcttctattcatcatcgcgcttttctttatcatttttatagtcattcgtagaatcgcgtggggcgaccctgtgggtggatgggcatcaacaatctgtataatccttttttgttcaggaattcaacttttcacaaccggtattttgggacagtacatggcaaaaacatatacggaagctaaacaacgaccacagttcattgttcgggaggcgctgtga

SEQ ID NO: 44074 - protein, 259 aa, Unknown
  Obtained from environmental sample
  misc_feature (1)..(259): Xaa is any amino acid
MNVLRQLANQDRRIHYISFSRNFGKEAAMLAGLQAAHGEYIVTLDADGQDPPSLIPQMLEAVVSGEYDCAATRRVNRTGEPPVRSFFARCFYALMKKITDIEIISGSRDFRLMNRKYLEAILAIPERNRFSKGIFPWVGFKTKWFEYENIERRAGKTKWSFWKLFVYSLDGIIAFSTKPLAIASVLGILLFIIALFFIIFIVIRRIAWGDPVGGWASTICIILFCSGIQLFTTGILGQYMAKTYTEAKQRPQFIVREAL

SEQ ID NO: 44075 - DNA, 738 bp, Unknown
  Obtained from environmental sample
  misc_feature (1)..(738): n is a, c, g, or t
atggaaaggaatatcaaacttaccatcgcttatgacggaacggatttttgcggatggcagagacaggaaaacgaaagaacagtgcagggcgttatagaagacgtgctggaaaaaatgcacggccatcatgtaattctgacaggttcaggcaggactgattccggcgttcacgccgtcggacaagcggcaaatttttacacggacattgaaagcatacccgtagaccgtttcgctcccgcgctgaactcttccctgccgcacgatgtaagagtccttgaatcctgcgaaacagaccatgaatttcacgcccgattcagcgcaaaggcgcggatttatcgttatcaatttatctgccgccccctcctaccgcatgaaagccgctataacctgcatttacgccgtttcccgcgcctcgatatccttaacgcgtacggaaggctgcttctgggagaaacagattgcacaatttttgccggcgcgggagacataagcgcctctaaaaaccgctatgtttacagggcgtatttttatacggaaagagactctctaatttttgaaatctgcgccaacgccttcctccgcaacatggtccgctccgtaaccggcaccttccttcactacgaagaaaccaccacaccgcctcaaaaactgagggaaatcatcgcatcgggagagcgagcccttgccggccccaccctgccaccgcaggggctattcctttggcaggtggagtattaa

SEQ ID NO: 44076 - protein, 245 aa, Unknown
  Obtained from environmental sample
  DOMAIN (144)...(245): tRNA pseudouridine synthase
  misc_feature (1)..(245): Xaa is any amino acid
MERNIKLTIAYDGTDFCGWQRQENERTVQGVIEDVLEKMHGHHVILTGSGRTDSGVHAVGQAANFYTDIESIPVDRFAPALNSSLPHDVRVLESCETDHEFHARFSAKARIYRYQFICRPLLPHESRYNLHLRRFPRLDILNAYGRLLLGETDCTIFAGAGDISASKNRYVYRAYFYTERDSLIFEICANAFLRNMVRSVTGTFLHYEETTTPPQKLREIIASGERALAGPTLPPQGLFLWQVEY

SEQ ID NO: 44077 - DNA, 879 bp, Unknown
  Obtained from environmental sample
  misc_feature (1)..(879): n is a, c, g, or t
atggtaaggaaaaaaaagaaagttgaagacgaagataaagaactaaaattaacatatttatcaaaaaaagaatttacctgccctgtttgcagcgcgcaattccgtaaagaagagcttttttcaggcggcggcagattaatagcgggaaaacttaccgatgactttcacaggctctatgatctttcaaaaaaatacggagtaatatttccgcttgtatacgaatcaattgtctgcccggaatgctggtttgcgtccatggaaaatgattttccgttactgccgaaagaaaacgcgggcaaagcaaaagctgatatggaaaaccgccagaaagatactttgtccattttccccggcgttgattttcatgaaaacagaactttaatggacggaacggcatcattgtatcttacattgcgctgttatgatttttacaataaaccgaattcccctacaattaagcaggggcttgcggctattcgctgcgcttggcttttggacgagcttaataccaaataccccgatcagcattatgactggcttgcgactcttttccggaaaaaagcgcattatctttacaacgaggctctttcacgcgaacagagcggcagggaaacgctttccggcataaaaattttcggtcccgacacagataaaaattacgcttacgaagggatgttatacatgtgcgcctaccttcgttacaaatacggtcccgcgcacaacgaagaggaaagaaaatcgtctcttgaagacgcgcgccgcacaatcgcaaaactcttcggcatgggaaaggcgtccaaggacaaaccgggcgcgttccttgaacacgcaagaaaactctacgacacaataaacaaagaactttccgaaaacgagtga

SEQ ID NO: 44078 - protein, 292 aa, Unknown
  Obtained from environmental sample
  misc_feature (1)..(292): Xaa is any amino acid
MVRKKKKVEDEDKELKLTYLSKKEFTCPVCSAQFRKEELFSGGGRLIAGKLTDDFHRLYDLSKKYGVIFPLVYESIVCPECWFASMENDFPLLPKENAGKAKADMENRQKDTLSIFPGVDFHENRTLMDGTASLYLTLRCYDFYNKPNSPTIKQGLAAIRCAWLLDELNTKYPDQHYDWLATLFRKKAHYLYNEALSREQSGRETLSGIKIFGPDTDKNYAYEGMLYMCAYLRYKYGPAHNEEERKSSLEDARRTIAKLFGMGKASKDKPGAFLEHARKLYDTINKELSENE

SEQ ID NO: 44079 - DNA, 375 bp, Unknown
  Obtained from environmental sample
  misc_feature (1)..(375): n is a, c, g, or t
atgattacaggaataggcattgatataatcgaagtaaaacgcatggaacgctggcttgataaatcagagctcctaaaaagatattttcatccgcaggagataacgcttgccttctccagaaaaaagatcgcggctcaaactcttgccgcaagatttgccgcaaaagaggcgtttggcaaagctctgggaacaggacttgccggaattgaattaaaagatattattgtaattaacaacgacaacggaaaacccgacgtaaaattaacgggaaccgcagaaaatgagtttgtaaaatcgggcgcaaataaagtgcatctttctcttacccatgaaagagaaaacgcgatagccatgatcgttttggagggggcgtaa

SEQ ID NO: 44080 - protein, 124 aa, Unknown
  Obtained from environmental sample
  DOMAIN (5)...(71): 4'-phosphopantetheinyl transferase superfamily
  misc_feature (1)..(124): Xaa is any amino acid
MITGIGIDIIEVKRMERWLDKSELLKRYFHPQEITLAFSRKKIAAQTLAARFAAKEAFGKALGTGLAGIELKDIIVINNDNGKPDVKLTGTAENEFVKSGANKVHLSLTHERENAIAMIVLEGA

SEQ ID NO: 44081 - DNA, 381 bp, Unknown
  Obtained from environmental sample
  misc_feature (1)..(381): n is a, c, g, or t
atgaaagaaattattaaatttcgatttaccggcattcttataatgctggcggcgattgcggcttttagcgcggcggcaatgttgttgtggaacgcgcttatgccgcagcttttcgcccttccgcaagttgactatctacaggcggtaggattgctggttctggcgcggctgttattcggcggactgggcggttggcacggcggaagcaggggcatgaggggagaaggtcatctgtttcaacacggcaacaaacttcgcgagaaatggatgaacatgagcgaggacgagcgcaaagagtttatcgaaaaggaaaaagactttttcaagaaccgcgcttctcattttaaggattttttcggcggcagggaaaggccggaatag

SEQ ID NO: 44082 - protein, 126 aa, Unknown
  Obtained from environmental sample
  SIGNAL (1)...(26)
  misc_feature (1)..(126): Xaa is any amino acid
MKEIIKFRFTGILIMLAAIAAFSAAAMLLWNALMPQLFALPQVDYLQAVGLLVLARLLFGGLGGWHGGSRGMRGEGHLFQHGNKLREKWMNMSEDERKEFIEKEKDFFKNRASHFKDFFGGRERPE

SEQ ID NO: 44083 - DNA, 741 bp, Unknown
  Obtained from environmental sample
  misc_feature (1)..(741): n is a, c, g, or t
atgaatagaagattaatactttatattgtttctgtgttcgtttttgcaataggcttgtttcttatccaacaaagtctgaatattgcttttgaaaagattagttttactcaatttgctccaactttggcatttattattactgttcttttctttaagaatttatatcgaccaattaaaataaatgtcaatataattgttttgataaaaatatttttcgctataattgttccatttataatgtgtttgatagtatattttattgggttaatattcaaattgaatttacaaatagaaaccaatattttttcaatattatttacaacaggaataggtatattaattggtgctattacagaggaaattggctggagaagtttctttcagccgacattggagaaaaagcattccgtatttatttcggctgtaattgtaggcctaatttggggcttatggcacatgaattactattttaatggtatattatttgttattacatttttattgttttcaatatctgcatcaataattattatgtatttactgaaggacatacaatataatattattgtatcatcattatttcatgcttcaataaatgtgagtttcagaatatttttcggaataaatttagacaataaaatattgttttatatatttctaataaatggtattgtatggttgatagcggctataataataacaatattttgtaaaaaatattattttataaaagcaaaataa

SEQ ID NO: 44084 - protein, 246 aa, Unknown
  Obtained from environmental sample
  SIGNAL (1)...(27)
  DOMAIN (110)...(206): CAAX amino terminal protease family
  misc_feature (1)..(246): Xaa is any amino acid
MNRRLILYIVSVFVFAIGLFLIQQSLNIAFEKISFTQFAPTLAFIITVLFFKNLYRPIKINVNIIVLIKIFFAIIVPFIMCLIVYFIGLIFKLNLQIETNIFSILFTTGIGILIGAITEEIGWRSFFQPTLEKKHSVFISAVIVGLIWGLWHMNYYFNGILFVITFLLFSISASIIIMYLLKDIQYNIIVSSLFHASINVSFRIFFGINLDNKILFYIFLINGIVWLIAAIIITIFCKKYYFIKAK

SEQ ID NO: 44085 - DNA, 600 bp, Unknown
  Obtained from environmental sample
  misc_feature (1)..(600): n is a, c, g, or t
atggaaaaatatagctatacttacgaaggctctgaaagttattgttatcctggaacaaatgtattaaaaaataaacttggcattagggatgataatgccttaacaatagctgaaagagaaataaccagcctaaaattattaaaactttataatatgccaataataagcgaatttaattttggcactttatgtaaaatacataaaactatttttgaggatatctatgaatgggctggacaaataaggcggggtgattttttatcgaaaggaaattcaatattctgtaaggggccatatattgttgaaaatgcaaaaacaatttttgaaagtataaaaagtgaaaagtatctggctggaataaataaacaagaatttattaaacgaatggcttattatatgggtgaaataaatgcgttacacccatttcgtgaagggaatggaagaacggcaagagaattctttagacaattgtcattaaatgcaaaatataaattagattttagcaaaatggaaaaagaggagttattaatagcggacattgaagcgtttaatggaaaatatagcaaattgatcaaaatactggaaaaagtagtagtataa

SEQ ID NO: 44086 - protein, 199 aa, Unknown
  Obtained from environmental sample
  DOMAIN (63)...(185): Fic protein family
  misc_feature (1)..(199): Xaa is any amino acid
MEKYSYTYEGSESYCYPGTNVLKNKLGIRDDNALTIAEREITSLKLLKLYNMPIISEFNFGTLCKIHKTIFEDIYEWAGQIRRGDFLSKGNSIFCKGPYIVENAKTIFESIKSEKYLAGINKQEFIKRMAYYMGEINALHPFREGNGRTAREFFRQLSLNAKYKLDFSKMEKEELLIADIEAFNGKYSKLIKILEKVVV

SEQ ID NO: 44087 - DNA, 504 bp, Unknown
  Obtained from environmental sample
  misc_feature (1)..(504): n is a, c, g, or t
atgaataaacataacacggttctgggacagatgctaggcttgatttcgagatctcgttttgagaagctggtaaaagagcataaaacggagcatggggccaaggggctaaaaagctggacgcaatttgtcgccatgctttttggccagctgaccgggcagcacgggcttcggagcatggagcagggaatgaacagccagcggaacggctggtaccatatgggcatcgcgaatgccgaacgggaagtaaagcgttcgactttgtcgtacgcaaacgcccacagaagcgcggatttatttaaggcgctgtttgcaagcctgctaatccaggcgcaaacgctaaaggcaagccatgggtttaggtttaagaacccgctttacagcatcgattcgacgactatagacctgtgcctaaaattattcccctgggctgatttccggaaaggcaaatccgggataaagctgacagtaaagctggatcaccaggggaagatccctgttttgtag

SEQ ID NO: 44088 - protein, 167 aa, Unknown
  Obtained from environmental sample
  misc_feature (1)..(167): Xaa is any amino acid
MNKHNTVLGQMLGLISRSRFEKLVKEHKTEHGAKGLKSWTQFVAMLFGQLTGQHGLRSMEQGMNSQRNGWYHMGIANAEREVKRSTLSYANAHRSADLFKALFASLLIQAQTLKASHGFRFKNPLYSIDSTTIDLCLKLFPWADFRKGKSGIKLTVKLDHQGKIPVL

SEQ ID NO: 44089 - DNA, 636 bp, Unknown
  Obtained from environmental sample
  misc_feature (1)..(636): n is a, c, g, or t
atgcaaagaaagcacgggaagtgccgtatgaaactggggacgtgctggtttttgaccggggatatgccgattatggctatttcgcttcaatttgcgagaaaaaagcgtattttgntgacctcgtttaaagaaaatgcggtatataagcgcgtcaaaaagaaccccgttaaggaaggcgggaatgtcatatccgactacgaaataataatcccgtcattatcgaaagaaataacgctgcgtaaaataataatccgcgatcctgaaacgaagaagcggcttgtgtttttaacgaacaacctgaagtggtctgccgagacagtgtccggagtatataaggatcggtggcagatagaattatttttcaaagcgataaaacaaaacctgaagataaagcggttttacggcaattcggagaatgcggtaatgacgcaaatatggatagcattaatagcgtatcttatgttttatttgctcaaggcgaaatcgaaaagcttgcgcctgtcatttaccaattttatttctgtaataaagacaatgctgtttcagcgggtttccctttacgatttcctgtctggcacaagcccgccgcttaaaaataaaaagcaacatgaacgtcagccggagtttgtatggtag

SEQ ID NO: 44090 - protein, 211 aa, Unknown
  Obtained from environmental sample
  misc_feature (1)..(211): Xaa is any amino acid
MQRKHGKCRMKLGTCWFLTGDMPIMAISLQFARKKRILXTSFKENAVYKRVKKNPVKEGGNVISDYEIIIPSLSKEITLRKIIIRDPETKKRLVFLTNNLKWSAETVSGVYKDRWQIELFFKAIKQNLKIKRFYGNSENAVMTQIWIALIAYLMFYLLKAKSKSLRLSFTNFISVIKTMLFQRVSLYDFLSGTSPPLKNKKQHERQPEFVW

SEQ ID NO: 44091 - DNA, 621 bp, Unknown
  Obtained from environmental sample
  misc_feature (1)..(621): n is a, c, g, or t
ttgtccgataaagttaaggagatacttatggagtatgaatttgaaggccgcaccgaaaaagaagcaatcgacaacgcggcgaaagaactgggactggaaaaagacgattttgacgtggaaattctggagacccagaaaaacggtcttttcaaaaaaggctttgtacggataagggttcataccggaaacacgacgtttcaaaggaacgaatctttttcggaacctgaggcgaagcaaaggaccgggggaggcaaggcgatcttcggggaaccggttcctcaaaatgaatttgaggaaaaaatggcggaatttatgaccggcattattgaaagaatgggttaccccggaaaggttacgatccagttcagggagaagcataaaatcgggataaaaatcgattctgaacattcgtccatcctgattggtaaaaaaggaaaaaatctggacgcgcttcagctcctgttgaatatttacgcaggcaggctgggcagggaagatatgcgcgtaattctagataccgaanattaccgcatccgcagagaagatcacttgtccgccttgcgtacaacgtggcggaaaaagtgtgtgaaaacaaaggttcagtcctgcttgagcctatga

SEQ ID NO: 44092 - protein, 206 aa, Unknown
  Obtained from environmental sample
  misc_feature (1)..(206): Xaa is any amino acid
MSDKVKEILMEYEFEGRTEKEAIDNAAKELGLEKDDFDVEILETQKNGLFKKGFVRIRVHTGNTTFQRNESFSEPEAKQRTGGGKAIFGEPVPQNEFEEKMAEFMTGIIERMGYPGKVTIQFREKHKIGIKIDSEHSSILIGKKGKNLDALQLLLNIYAGRLGREDMRVILDTEXYRIRREDHLSALRTTWRKKCVKTKVQSCLSL

SEQ ID NO: 44093 - DNA, 327 bp, Unknown
  Obtained from environmental sample
  misc_feature (1)..(327): n is a, c, g, or t
ttgcctttgtggaagcccagctctgcttcttgggttttggagcggagtgcttttgctatatggcaggttgcaggcgatgagtgcgaacttttatccattgctgtgaatgctgccgagcgaggcaagggttatgcaaaaactttgatggaacatagccacaaggaatttgcgaaacaaggcattaaaaaatgttttttggaagttagggaaaacaataccgctgcaatatctctttacaaaaaatttggatatgaaaaaattgcagagagaaaaaaatattatgcagacggagaatgtgcggtggtgatgaatttaattctcaactga

SEQ ID NO: 44094 - protein, 108 aa, Unknown
  Obtained from environmental sample
  DOMAIN (12)...(95): FR47-like protein
  misc_feature (1)..(108): Xaa is any amino acid
MPLWKPSSASWVLERSAFAIWQVAGDECELLSIAVNAAERGKGYAKTLMEHSHKEFAKQGIKKCFLEVRENNTAAISLYKKFGYEKIAERKKYYADGECAVVMNLILN

SEQ ID NO: 44095 - DNA, 438 bp, Unknown
  Obtained from environmental sample
  misc_feature (1)..(438): n is a, c, g, or t
ttgctagaggtaggcggttataaactagattcaaaagcagacggaatagagggcacaataggcgaggctcttgctgttccgcaccgcagctattaccactccttgatagatttagttcacgcaaaaaaattgcagggtttggtacacataacaggttcgggctttcagggcaatattcctcgtattcttcccaaaggagtttcggttcaaataaaccgctcggcttggaaggttccagaaattttcaacctaatccaaaaatgcggaaatgttgagcaagacgagatgtacagcacattcaatatgggaatgggaatgttggtttttgcggccccaaacgatgcggtagaaattcgcaagtttttggaaggcaaaggcgaaactgttattgagtgcggcaaggttattgaagggaataacaatgtcgtgttcagttga

SEQ ID NO: 44096 - protein, 145 aa, Unknown
  Obtained from environmental sample
  DOMAIN (5)...(145): AIR synthase related protein, C-terminal domain
  misc_feature (1)..(145): Xaa is any amino acid
MLEVGGYKLDSKADGIEGTIGEALAVPHRSYYHSLIDLVHAKKLQGLVHITGSGFQGNIPRILPKGVSVQINRSAWKVPEIFNLIQKCGNVEQDEMYSTFNMGMGMLVFAAPNDAVEIRKFLEGKGETVIECGKVIEGNNNVVFS

SEQ ID NO: 44097 - DNA, 591 bp, Unknown
  Obtained from environmental sample
  misc_feature (1)..(591): n is a, c, g, or t
atgaattacgaagatgcgggagtctctcttgcacgagctgataaagctatggtcggcgttaaaaaatttgttcgcacaacttttaatgtcggcgttctaggcgatattggcaattttggcggcttgttcaccctaagccatttgaacttaaaagaccctgtgcttgtatcttcggttgacggggtgggcacaaaattaaaagtgcattttggattaaaaagccacaacctgccaggtcaggatattgtaaaccactgctgcaacgatattctagttcagggcgcaagacctcttttctttttagactatttagcaaccggaaagctggaaagcggagttttggaagccgtggtagaaggcatggctcttgcgtgcagagaaaacgactgcgttttaatcggtggagaaacagccgagatgccaggtatgtatcacgaaggcgaatacgatatttccggaactatagtaggcgttgttgagagagatgaaattatagacggcaaaagcattgcgccaggcaccgttgttctagggcttccatccacaggtctccacacaaacggctattccctgcccgcaaagcattgctag

SEQ ID NO: 44098 - protein, 196 aa, Unknown
  Obtained from environmental sample
  DOMAIN (1)...(160): AIR synthase related protein, N-terminal domain
  misc_feature (1)..(196): Xaa is any amino acid
MNYEDAGVSLARADKAMVGVKKFVRTTFNVGVLGDIGNFGGLFTLSHLNLKDPVLVSSVDGVGTKLKVHFGLKSHNLPGQDIVNHCCNDILVQGARPLFFLDYLATGKLESGVLEAVVEGMALACRENDCVLIGGETAEMPGMYHEGEYDISGTIVGVVERDEIIDGKSIAPGTVVLGLPSTGLHTNGYSLPAKHC

SEQ ID NO: 44099 - DNA, 711 bp, Unknown
  Obtained from environmental sample
  misc_feature (1)..(711): n is a, c, g, or t
atgaaaaaatttatcattcttccgctgttatttctctccttagtctcttgcgaggctacgaaacccgcaccccaaggccttgaggctctgcaatccgagcttgccgaagtcaaaagcgttctaaattttgttctagaaagaggaatgggttcctcttttgaacaagttaagaaggaaattgaaaacgccaacaaaatctgggatttgcaattagatgtaggaagcccctccataggtagctcaaatgcaaaaatagtgattgttgagtttagcgaattccagtgtccttattgtgcaaggattaccccttacctagactctctaaccaaggctaatccagacaaaattcgcctagtgtataaaaatttccctctgagcttccacacttcagctcctgccgccgcagcctctgcaatggcagctcataaacagggcaaattctgggaatatcgctgggcactcgcacctaatttccaaagcctcaacgattctacctttatagaaaccgcgaaaaaagtaggcataccaaatattgagcaattcaaaaaagatatggttttggatgccgacaagcaagccataatagatcgtgatatgaagctaggttctgaagttggagttcaaggaacgccaaacttctatgtaaacggcaaacgtcaagaccgtttcgctcctggtcttatagaaaagatgctaagcgaattgtattga

SEQ ID NO: 44100 - protein, 236 aa, Unknown
  Obtained from environmental sample
  SIGNAL (1)...(19)
  DOMAIN (86)...(228): DSBA-like thioredoxin domain
  misc_feature (1)..(236): Xaa is any amino acid
MKKFIILPLLFLSLVSCEATKPAPQGLEALQSELAEVKSVLNFVLERGMGSSFEQVKKEIENANKIWDLQLDVGSPSIGSSNAKIVIVEFSEFQCPYCARITPYLDSLTKANPDKIRLVYKNFPLSFHTSAPAAAASAMAAHKQGKFWEYRWALAPNFQSLNDSTFIETAKKVGIPNIEQFKKDMVLDADKQAIIDRDMKLGSEVGVQGTPNFYVNGKRQDRFAPGLIEKMLSELY

SEQ ID NO: 44101 - DNA, 687 bp, Unknown
  Obtained from environmental sample
  misc_feature (1)..(687): n is a, c, g, or t
atgttgccgggaatcaacgctgtcgctttcgatctggacggaaccctctaccctaattacaggctgaacatgcggctgctgccttttgcgttcaggcactggaagttccttctggcctttagcagaaccagaaatattatccggcgcgaacaggcggcgtttgtgtcgcagctgtcttcctggcctgatttttatgagcgccaggcgcggattacagccgatcaactcaaagaaaggacagaagaaatcagggagaaaattgaccgcctcatctaccgaggctgggaacgtttttttttaaagataaaactgtttcaccatgtaaaggaagttcttggagaactaaagtcggcggggttaaaactggggctgctctccgacttcccgcccgagaccaagctgaaataccttgggcttgcaagcctctgggacgcggtattatgcacggaaaacataggggcgcttaagccggccggaaaaccttttgaagagctggcaaaagctctcgcgtgccaaccggaacagatactctatgtgggcaacaacagccgctacgatgttgagggggcaaaacgggcgggcatgaaagcggccctcctgaacaggggactccccgttataacggggattaaagcggattttaccttccgcaactatcgccaattgcgtaattttatgttacaataa

SEQ ID NO: 44102 - protein, 228 aa, Unknown
  Obtained from environmental sample
  DOMAIN (5)...(203): haloacid dehalogenase-like hydrolase
  misc_feature (1)..(228): Xaa is any amino acid
MLPGINAVAFDLDGTLYPNYRLNMRLLPFAFRHWKFLLAFSRTRNIIRREQAAFVSQLSSWPDFYERQARITADQLKERTEEIREKIDRLIYRGWERFFLKIKLFHHVKEVLGELKSAGLKLGLLSDFPPETKLKYLGLASLWDAVLCTENIGALKPAGKPFEELAKALACQPEQILYVGNNSRYDVEGAKRAGMKAALLNRGLPVITGIKADFTFRNYRQLRNFMLQ

SEQ ID NO: 44103 - DNA, 1080 bp, Unknown
  Obtained from environmental sample
  misc_feature (1)..(1080): n is a, c, g, or t
ttgacctggcttatggtctcccgcatagacttgcgcaattcatcgtctatacccgccatatcctggcgcaaggcctgtaaatcagcggtatactcaccggactcgtctttccatgaattgcgcattttattggcttcgtctttccaggaattgcgcattttattagcctcgccctcccatgactcatgcattttattggacgcttcttcccatgacttattcatttcattctcaaaacgcgcaaaatctccgttgacccggtttattgtttccagcattgatctgcgcaattcctcttccaaatgggtagtgtcgttggaaatgctggcaagctgcttgtattgctcttcctgcaccagtcggtattcctcaagcctgagttcagcggcggtgattaattcctgcccggtcctgtgcgcaatcgccgcccattcgtctttaacctgttttgcgaaagcgtcaagctcatggatatcctttttccagttggcggcatattctttttggcgggcctcaatggaggtggtctcgtttttccattcatcgcggctttctttaatatgctcgttgatttcggcgatttttgtttttaccgtttcctggacactcttgattttttcctcaaaagtggtttttatatggttcacccgttcctgcgcctgctcgtggagttttgccatcgccgcttcttcgactttactcgccctgctgcctgccctttcaacggcttcggtaagcagtttctcgattcgttcctcatcccgcgccagcctctccacacgcccgcgctccagcctgtcaatcgcttcccggtgttcctcaactttctggctgagggtctgggcttcggtttccatgtcctggattattgatctggcgtttgaaacggacgcttcaaccgctttttccagggccgcggcgttctccagttcaaatttagcttctattgacgccagcctttcgccaagagcgtcaatatcgccctcggctgaatcaaatttatcattgatttctatgactttcttctcgacatcttcaacatacgcggattcttcactgagtctgttaaggttttcctga

SEQ ID NO: 44104 - protein, 359 aa, Unknown
  Obtained from environmental sample
  misc_feature (1)..(359): Xaa is any amino acid
MTWLMVSRIDLRNSSSIPAISWRKACKSAVYSPDSSFHELRILLASSFQELRILLASPSHDSCILLDASSHDLFISFSKRAKSPLTRFIVSSIDLRNSSSKWVVSLEMLASCLYCSSCTSRYSSSLSSAAVINSCPVLCAIAAHSSLTCFAKASSSWISFFQLAAYSFWRASMEVVSFFHSSRLSLICSLISAIFVFTVSWTLLIFSSKVVFIWFTRSCACSWSFAIAASSTLLALLPALSTASVSSFSIRSSSRASLSTRPRSSLSIASRCSSTFWLRVWASVSMSWIIDLAFETDASTAFSRAAAFSSSNLASIDASLSPRASISPSAESNLSLISMTFFSTSSTYADSSLSLLRFS

SEQ ID NO: 44105 - DNA, 564 bp, Unknown
  Obtained from environmental sample
  misc_feature (1)..(564): n is a, c, g, or t
gtggcggagggcgcggctcccgaattctacaacgaggagggcaagagcgccaggaaatcgctcaagcgcgcccccatcggcggccgcgtctcctcgcgtttcggcaaccgccgccacccggtgctgggcttttcccgccagcataccggcgtggatttccccgcctccatcggcacccccatccgcgccggcggcgacggcaaggtggtgttcaagggccccaagggagggtacggcaactacatccgcatccgccataactccagctatgaaaccgcctacgcccatatctcgtcgttcgcggcgggcgtcagggtgggcagccaggtgcggcaggggcaggtcgtcgcctatgtcggcaacaccggcctctccaccggcccgcatctgcattatgagataatcaagaacggcgtcttcgtcaatccgttgaccgccccgctgccggccggaaaaaacctcgccggcgacgatttgagcaaattcatggcctccaaagagctgattgaacagcgctatttcgccctttatgcaggcaaggagacggcaagagttgagaattga

SEQ ID NO: 44106 - protein, 187 aa, Unknown
  Obtained from environmental sample
  DOMAIN (46)...(143): Peptidase family M23
  misc_feature (1)..(187): Xaa is any amino acid
MAEGAAPEFYNEEGKSARKSLKRAPIGGRVSSRFGNRRHPVLGFSRQHTGVDFPASIGTPIRAGGDGKVVFKGPKGGYGNYIRIRHNSSYETAYAHISSFAAGVRVGSQVRQGQVVAYVGNTGLSTGPHLHYEIIKNGVFVNPLTAPLPAGKNLAGDDLSKFMASKELIEQRYFALYAGKETARVEN

SEQ ID NO: 44107 - DNA, 2136 bp, Unknown
  Obtained from environmental sample
  misc_feature (1)..(2136): n is a, c, g, or t
atgaaaggcagatttatcataccggtaattttttttctgattatttcttttctgcatgcccaggaaggtgaaccccaggctccccctgaccaggaaacaataaccttaacgcctgagcaaaacagaatccttatggacatcagaacctcaaccctttccgagcttgcggcctgggccaaaagcctgaagttgtccgaagccggcaccagcgccgaccttgcgaagcgcataagggagtattacaagatagccgaacaggggcaggcggtaatagatgaaaaacgcaagatcatcacaattgaatccgcccgcactaccgaatacttcaagattgaagttgtggatgaggaatacgcacgcttaagcggggaggtgagggttagccttaaagacggcgaagcgattcaccagataagggcctgggacattctttttaaccgtaccaggaatatcctgacagcgtccggcggcgttgaatatatcaagacggaaggggataaaatagaaaccttcaggggggattccataaccgtcgacattgacaactggtcaagcgtgttcctgggaggcgtatcggaacgctccctgcagagcgacaataccacctatctgttcgccggaactgtgatttcacgcgatgaggaagatgtcaccgttctgaacagagccacgatcagcagcgccaataatcccgactccctgtggtcgctcaacgcttcgcgcgtatggcttctgcccggatccgatttcgctatacttaacgcggtgcttaaagtcggcgaattgccggtattttatatacctttcttttattatccggcggatgaccttatttttcatcccgttataggctcccgcacgagggaggggcacttcatacagactacgacatacgttctgggccgtcccagggcgacttccagctcccagagctcgcttacgaaaatactgggcaattcaaccgatatagaaaggaagcgggaagggatatttctgcggagcacggggaaaaaagtaaaggatccggacaaagtcagcttaaaggtgatgcttgatcattatattaatctgggtacttatatcggagcggatcttacattgccggcatacaagattcttggcgcgacaaacatcagcgttggcatcggcctgacgcggactctcgccctgcataacggaagttatacgccatttttccctgattataacggtgaaacagactggaatcactccaatctgttttcatttgaggtcccgttcaggtaccggcttaagaccaacagctcggtaagcggaaaatacggcggtttttcatgggaacttccttattattccgatcctttggtagacagcgatttcttaaaacgcgcggaagatatggactgggtcagcatgctgcagaaaggcgcggctgtagagccggatgaaacaacgcaaagccagttaggaagctatagctggcgatttacaagtcaggtaagcccccgatttcccagtatgtcaccatacatttccggtatctccctttccagtatttccagtaccgtatcattcaggattgttaacgcaaatcccagttcctctgacatcaggttctattcacccaacagttctttttacgttcccgataccgccactctgtattcaatgaatgtcacggtcacaggtacgccattaagctttggggaaagcgccgccagccggaccgatgataaaagcgatacaactgaacagcctgatccgttcaaagacataggcgttccccgctcgccttttgaaaatatgcaaaaggaagatacgaaaaagaaagatccgtccgacaaacttgttcccccggaattaaaccagcgttttgaactgcccaaaaccggaagcgtaaagacgagcctggattatcgagttgctccttcaggcgcctcaacgcttaaatttaattcttataaatggaaacagtacgacgagattgattggggggatataagttccattttaaacagttttggcggtgacgctagtacaacggtcaatgtgaatcattctgaaaactttttttccaacagtttttcctatatgggaagcggaacatggcggcaatacggctatctaacgaagaagctgaggactctgccgatctga

SEQ ID NO: 44108 - protein, 711 aa, Unknown
  Obtained from environmental sample
  SIGNAL (1)...(20)
  misc_feature (1)..(711): Xaa is any amino acid
MKGRFIIPVIFFLIISFLHAQEGEPQAPPDQETITLTPEQNRILMDIRTSTLSELAAWAKSLKLSEAGTSADLAKRIREYYKIAEQGQAVIDEKRKIITIESARTTEYFKIEVVDEEYARLSGEVRVSLKDGEAIHQIRAWDILFNRTRNILTASGGVEYIKTEGDKIETFRGDSITVDIDNWSSVFLGGVSERSLQSDNTTYLFAGTVISRDEEDVTVLNRATISSANNPDSLWSLNASRVWLLPGSDFAILNAVLKVGELPVFYIPFFYYPADDLIFHPVIGSRTREGHFIQTTTYVLGRPRATSSSQSSLTKILGNSTDIERKREGIFLRSTGKKVKDPDKVSLKVMLDHYINLGTYIGADLTLPAYKILGATNISVGIGLTRTLALHNGSYTPFFPDYNGETDWNHSNLFSFEVPFRYRLKTNSSVSGKYGGFSWELPYYSDPLVDSDFLKRAEDMDWVSMLQKGAAVEPDETTQSQLGSYSWRFTSQVSPRFPSMSPYISGISLSSISSTVSFRIVNANPSSSDIRFYSPNSSFYVPDTATLYSMNVTVTGTPLSFGESAASRTDDKSDTTEQPDPFKDIGVPRSPFENMQKEDTKKKDPSDKLVPPELNQRFELPKTGSVKTSLDYRVAPSGASTLKFNSYKWKQYDEIDWGDISSILNSFGGDASTTVNVNHSENFFSNSFSYMGSGTWRQYGYLTKKLRTLPI

SEQ ID NO: 44109 - DNA, 630 bp, Unknown
  Obtained from environmental sample
  misc_feature (1)..(630): n is a, c, g, or t
ttgaatcaattgcggcaggagctggctctcatggctgccaaggtagaagaagacataggaaaggcgcttgccgtactgcgctcaggcgacagggagcttgcggaggaggtaaaagaaaacggcaaggttgtagatgctctccagttaaaaatagaagatattgccctggttcttatcgctacccaacagcctgtggcacgtgatttacgggaactcataactgttttcaaaattaccgctaatctggaacgtattggcgattatggaattcatcttgtaaaggcggcggtgaaattgtcagagcgcccttcgtttcgttccattgccagaattgagcgaatggcagaaaccgctcaggaaatgcttaaaaaagcgtattcagcctaccttgctcaggatccaaaagccgccagagaaacagccgcgtttgatgataaaatagacagcgagcataaagcccttaccgaagagatccttacgcttatgaaaaaacagccgcagctaatcaaagccgccgcaaggctcttaaaactttcaggatatatggaacgccttggggatcacatcaccaatatatgcgaaggaattatttatatgatcgaaggaaaacatgaggatttaaacgattga

SEQ ID NO: 44110 - protein, 209 aa, Unknown
  Obtained from environmental sample
  DOMAIN (111)...(196): PhoU family
  misc_feature (1)..(209): Xaa is any amino acid
MNQLRQELALMAAKVEEDIGKALAVLRSGDRELAEEVKENGKVVDALQLKIEDIALVLIATQQPVARDLRELITVFKITANLERIGDYGIHLVKAAVKLSERPSFRSIARIERMAETAQEMLKKAYSAYLAQDPKAARETAAFDDKIDSEHKALTEEILTLMKKQPQLIKAAARLLKLSGYMERLGDHITNICEGIIYMIEGKHEDLND

SEQ ID NO: 44111 - DNA, 705 bp, Unknown
  Obtained from environmental sample
  misc_feature (1)..(705): n is a, c, g, or t
ttgagcatagaacggatattagtaatcgaggatgatcctgaaatacaggaaatgttgaaattcgcttttgcccgcgaagggtggaaactcacccaggccctaacaggggaggaaggacttaaggtaatacgcgaaaaaggggcggattgtgtcattcttgatattatgcttcctggcatggatggctttaagacaattaagaaaatccgggcagagaagaatctgcaaaccttaccggtgatcatgtgtactgcccggggcgaggaggccgatatagtcgcgggactggaattgggagccgacgattacgtggttaagccttacagccccagggtattggctgcgcgtatacgcgctgctctcaggcggaaagatgctgcgtccgctgatgccgaggcttccaaatgcaagaccttctttcagcatggaagtctaaaaatagacattgagcggcatgcggcttttctcgaagatacgccgttggatctttttcccacggaatttgccatccttgcccattttttgagcaatcccgatatcgttttttcccgccagaaactaatcaccgcaatccgtgggcacgattacccggtaacggatcgttccattgatgtgcaaattatggggttgagaaaaaagctcggaacttcaggcgatatgattgaaaccatccggggcattggttacaggttaaaaacggaatga

SEQ ID NO: 44112 - protein, 234 aa, Unknown
  Obtained from environmental sample
  DOMAIN (158)...(231): Transcriptional regulatory protein, C terminal
  misc_feature (1)..(234): Xaa is any amino acid
MSIERILVIEDDPEIQEMLKFAFAREGWKLTQALTGEEGLKVIREKGADCVILDIMLPGMDGFKTIKKIRAEKNLQTLPVIMCTARGEEADIVAGLELGADDYVVKPYSPRVLAARIRAALRRKDAASADAEASKCKTFFQHGSLKIDIERHAAFLEDTPLDLFPTEFAILAHFLSNPDIVFSRQKLITAIRGHDYPVTDRSIDVQIMGLRKKLGTSGDMIETIRGIGYRLKTE

SEQ ID NO: 44113 - DNA, 1314 bp, Unknown
  Obtained from environmental sample
  misc_feature (1)..(1314): n is a, c, g, or t
gtgcccatgagcggcacctccgatccctggttcgtgctttcagtcagggacagggacaccgccatgcgtaccagaaatacggtagttatggcgattttggcgagttccgcggtaattattttaattgccctggtgattgttttcttcatcgcgaggactatcagttcgccgataaaggagattcacctgttcctggaaaaggtaaaggagggggatttaagcgaaaaagtaaccgtaaaaacccgtgatgaaatcggaaatctggcggattactttaacctgacaatagaaaaaatcagaaaccttatagggacaatgaagcataaaattgacgcgctgaccaataccgaacatgaactctcgttaaatatggaaaaaacttccgagtcggtagaccagatttcatttaactttgagggcatgaaaagcaaaatgggcaggcaggaggaaagcgccgccgaagcggataaagcggtaaaaaatattaaatcccacattgacaacctgaacaggctgatagaagaacagtccgaaggcatcaatatctcgtcttccgcggttgaggaaatgacagctaacatccattcggtaaccaaaaccctgatagaaaacaccaaaaatgtaaatgaactgaccgaagcctccgagaacgggaaaatcggggttcagacggtggcggagaagataaaggaaatcgccaaagactccgaaggccttttggaaataaactcggtaatgaacaggatagccagccagaccaacctcctctcgatgaacgcggcgattgaggcggcgcacgccggagaattgggcaggggcttcgcggtagtggcggacgaaatccgcaagctggcggttaattccgccgccgaatccaaaaaaatcggcattgagttaaaacaaattgcggatactataggccgcattgttcatgacgcggctgtctcggaaaatgcttttaccgaagtttcgcacagaattgatgaaaccggaaaattggtattagaggtcagcaatgctatccgcgaacaaaaaaacggagcggctgaagtggtaaaatcattgcacataatgaatgaactttccatgaaagtgaaagacggctcgcgggaaatgagtcagggcagtgaagtcatggtaaatgaaataaacgcgcttcaaaacagcgcaagagaaattgaaacccgtatggaagaaatatcaggcggcataagaaacatcaactcaggcgcgcaggaagtttcagggttggcggaaagaactcaatcttcaatagagaaaatttcggtaatcgccgatgaatttgaagtataa

SEQ ID NO: 44114 - protein, 437 aa, Unknown
  Obtained from environmental sample
  DOMAIN (181)...(431): Methyl-accepting chemotaxis protein (MCP) signaling domain
  misc_feature (1)..(437): Xaa is any amino acid
MPMSGTSDPWFVLSVRDRDTAMRTRNTVVMAILASSAVIILIALVIVFFIARTISSPIKEIHLFLEKVKEGDLSEKVTVKTRDEIGNLADYFNLTIEKIRNLIGTMKHKIDALTNTEHELSLNMEKTSESVDQISFNFEGMKSKMGRQEESAAEADKAVKNIKSHIDNLNRLIEEQSEGINISSSAVEEMTANIHSVTKTLIENTKNVNELTEASENGKIGVQTVAEKIKEIAKDSEGLLEINSVMNRIASQTNLLSMNAAIEAAHAGELGRGFAVVADEIRKLAVNSAAESKKIGIELKQIADTIGRIVHDAAVSENAFTEVSHRIDETGKLVLEVSNAIREQKNGAAEVVKSLHIMNELSMKVKDGSREMSQGSEVMVNEINALQNSAREIETRMEEISGGIRNINSGAQEVSGLAERTQSSIEKISVIADEFEV

SEQ ID NO: 44115 - DNA, 1812 bp, Unknown
  Obtained from environmental sample
  misc_feature (1)..(1812): n is a, c, g, or t
atgaaaaacaggaaaactaaaatagtatgttctttgggtcccgcatcatccggggatgatgttgtacgcagccttatacttgccggaatgaatgtagcgcgtcttaatttttctcatgggacaccagacgagcataaagcttccgtagaacgtgtcaggcgtatttcaggtgaacttggaattcccgttgcgctcctcttggacaccaaagggcctgagatacggacaggcatggtagaaaatgacggtaaagttacgataaataaaggagaccaggttgttatttctaccgatggttgttttaccacagcggcaaagaatgaaactcccgcgcgtatttcattatcgtggaaagaagctgaatcaaaacttcaatgcggacaccgggttcttgtcgcagacgagcttcttgagcttgaagtgacggataccgccggcgggatcaagtgccgcgcaaacaataccgccgttattgggagcaaaaaaaacgtcaatcttatcggcgtacacgccgggcttcccattatggccgagcaggacaaaaaagacctggaattcggcatttcaatggatcttgattatgtcgccgcgagttttttgagctttccccatgaggtaatcgaaatacgaaaattccttgaaagccactcttcccgcatgaaaatcatagccaaaattgaaagcggcgaaggcctggaaaacataaaagaaattgcccggcttgcggacggcgtcatggtagcaagaggggatcttggccaacaggtccccattgagcagattcccctggcgcaaaaacatattatcaatacgtgccgccgggcgggaaaaccggtcattaccgcgacccaaatgctggactcgatgatacataatccgcgccccacccgcgcggaactgaccgatgtggcgaacgcgatactcgacggaaccgacgcgattatgctctccggcgagaccgctcaagggtcatatccggtggaagcggtaaaaacgatggacaaaatagcgtgcgtcattgagcaatcggacgaattccgcgcgcgcatgagaaatttccacaatgaatgtcattctgaagtgcataaccccaaagaaaatctgggcatcatcatgtcaagggcaggagttgaaacggcgacggcggtaagcgcgaaagccatagttacgccgacccgcagcggcaataccgcgcgaattctcagcgtattcaggccggatgagccaattcttgccgtaacgaccgacaaaagagccgaacgcgttatgcagttgtactggggcgttaatacctgtatcactccggaagtcggcgattcggacagcatgatacgcaataccatgaagcttgtctcagagaccggggctgcgggcatatcggaaaaaatagtactcattgccggcctgccccttgaaagcccgaacatgataaacactgtccgcgtcatcattatcgggacggttctggcgcgttcaaacgccggcggttacgcgaacccggaccttacccgcgcgcacggcaggataatccacaccgcaaatccagacgaagccggcaaaaaagtcatgtcttccggtcaggagggaatacttgtttgcaaagtacttacagatgaatacacgcccgttatccgcatggtaaaagggatcatctgtgagggcgtttcggaaataagcgaacagaaattacgccaaatcaacccaaatcttgtctggcttacccacatcagggacgcggcaaaaaaacttgaagcgggattaacggtgacaatagacggcaaagagctgcttgtgtacgaaggcacgatttag

SEQ ID NO: 44116 - protein, 603 aa, Unknown
  Obtained from environmental sample
  SIGNAL (1)...(18)
  DOMAIN (372)...(484): Pyruvate kinase, alpha/beta domain
  misc_feature (1)..(603): Xaa is any amino acid
MKNRKTKIVCSLGPASSGDDVVRSLILAGMNVARLNFSHGTPDEHKASVERVRRISGELGIPVALLLDTKGPEIRTGMVENDGKVTINKGDQVVISTDGCFTTAAKNETPARISLSWKEAESKLQCGHRVLVADELLELEVTDTAGGIKCRANNTAVIGSKKNVNLIGVHAGLPIMAEQDKKDLEFGISMDLDYVAASFLSFPHEVIEIRKFLESHSSRMKIIAKIESGEGLENIKEIARLADGVMVARGDLGQQVPIEQIPLAQKHIINTCRRAGKPVITATQMLDSMIHNPRPTRAELTDVANAILDGTDAIMLSGETAQGSYPVEAVKTMDKIACVIEQSDEFRARMRNFHNECHSEVHNPKENLGIIMSRAGVETATAVSAKAIVTPTRSGNTARILSVFRPDEPILAVTTDKRAERVMQLYWGVNTCITPEVGDSDSMIRNTMKLVSETGAAGISEKIVLIAGLPLESPNMINTVRVIIIGTVLARSNAGGYANPDLTRAHGRIIHTANPDEAGKKVMSSGQEGILVCKVLTDEYTPVIRMVKGIICEGVSEISEQKLRQINPNLVWLTHIRDAAKKLEAGLTVTIDGKELLVYEGTI

SEQ ID NO: 44117 - DNA, 309 bp, Unknown
  Obtained from environmental sample
  misc_feature (1)..(309): n is a, c, g, or t
gtggggcgcggattatgtatcatcgagtccagcatttgggtcgcggtaatgaccggttttcccgcccggcggcacgtattgataatatgtttttgcgccaggggaatctgctcaatggggacctgttggccaagatcccctcttgctaccatgacgccgtccgcaagccgggcaatttcttttatgttttccaggccttcgccgctttcaattttggctatgattttcatgcgggaagagtggctttcaaggaattttcgtatttcgattacctcatggggaaagctcaaaaaactcgcggcgacataa

SEQ ID NO: 44118 - protein, 102 aa, Unknown
  Obtained from environmental sample
  misc_feature (1)..(102): Xaa is any amino acid
MGRGLCIIESSIWVAVMTGFPARRHVLIICFCARGICSMGTCWPRSPLATMTPSASRAISFMFSRPSPLSILAMIFMREEWLSRNFRISITSWGKLKKLAAT

SEQ ID NO: 44119 - DNA, 1089 bp, Unknown
  Obtained from environmental sample
  misc_feature (1)..(1089): n is a, c, g, or t
atgagttcagccaacgattattcagcacaaaatatcaccgttttggagggcctggagcctgtccgcatgcgtccgggcatgtatattgggacgacgagcattgacggactgcaccaccttgtttttgaggttgtcgataacgccattgacgaggccatgcagggtttttgtaccgatattctcgtggttctggaggggaacgatgtggtacgggtggaggacaacggccggggcatccccgtggacatacacccaaccgagcgcgtaagcgccctggaactggtaatgacgcggctccacgcgggcggcaaattcgataaaaaatcctacaaggtttccggcggccttcacggggtaggcgtttccgtggtgaacgccctttccgaatggtgcgaggcctttgtccacgccggcgacaaaatcttcactcaacgctacaaaaaaggtatacccgaaaaaccggtccacgaggccaacgcctccgccctgccctacaacccaagattgcaaaaaggtacggtagtccgctggaaagccgacgcttcgatttttgaaaccaccacccacaattttgacgctttgagcaaccgtctgcgggaactggccttcctaaacaaaggcctgaaaatcacgatccgcgatgagcggctctccactcccaaaattcacgaatttaagtttgagggcggagtgaaaagttttgtggagtacctgaacgagaataaaacggtgctgtacaaagacccgatttttcttgaaggttcccgcgatgacggcgatggcggcagtgttgaggttgaatgcgccattcagtataacgacggctttaacgagataatgttttcgtttgttaatgatattaacacccgtgaaggcggtacgcaccttaatggtttcaagaccgcccttacccgcaccctgaacgaattcctgaaaaagtccaaacaggccaaaaagctggatgagagtctttccggcgacgatgtgcgcgagggtttgacggcggtactttcggtgaaggttcccaatccccagtttgagggccagaccaaaggcaaactgggcaattccgaagtgaagggtatgtga

SEQ ID NO: 44120 - protein, 362 aa, Unknown
  Obtained from environmental sample
  DOMAIN (32)...(182): Histidine kinase-, DNA gyrase B-, and HSP90-like ATPase
  misc_feature (1)..(362): Xaa is any amino acid
MSSANDYSAQNITVLEGLEPVRMRPGMYIGTTSIDGLHHLVFEVVDNAIDEAMQGFCTDILVVLEGNDVVRVEDNGRGIPVDIHPTERVSALELVMTRLHAGGKFDKKSYKVSGGLHGVGVSVVNALSEWCEAFVHAGDKIFTQRYKKGIPEKPVHEANASALPYNPRLQKGTVVRWKADASIFETTTHNFDALSNRLRELAFLNKGLKITIRDERLSTPKIHEFKFEGGVKSFVEYLNENKTVLYKDPIFLEGSRDDGDGGSVEVECAIQYNDGFNEIMFSFVNDINTREGGTHLNGFKTALTRTLNEFLKKSKQAKKLDESLSGDDVREGLTAVLSVKVPNPQFEGQTKGKLGNSEVKGM

SEQ ID NO: 44121 - DNA, 546 bp, Unknown
  Obtained from environmental sample
  misc_feature (1)..(546): n is a, c, g, or t
gtgggtggtggtttcaaaaatcgaagcgtcggctttccagcggactaccgtacctttttgcaatcttgggttgtagggcagggcggaggcgttggcctcgtggaccggtttttcgggtataccttttttgtagcgttgagtgaagattttgtcgccggcgtggacaaaggcctcgcaccattcggaaagggcgttcaccacggaaacgcctaccccgtgaaggccgccggaaaccttgtaggattttttatcgaatttgccgcccgcgtggagccgcgtcattaccagttccagggcgcttacgcgctcggttgggtgtatgtccacggggatgccccggccgttgtcctccacccgtaccacatcgttcccctccagaaccacgagaatatcggtacaaaaaccctgcatggcctcgtcaatggcgttatcgacaacctcaaaaacaaggtggtgcagtccgtcaatgctcgtcgtcccaatatacatgcccggacgcatgcggacaggctccaggccctccaaaacggtgatattttgtgctga

SEQ ID NO: 44122 - protein, 181 aa, Unknown
  Obtained from environmental sample
  misc_feature (1)..(181): Xaa is any amino acid
MGGGFKNRSVGFPADYRTFLQSWVVGQGGGVGLVDRFFGYTFFVALSEDFVAGVDKGLAPFGKGVHHGNAYPVKAAGNLVGFFIEFAARVEPRHYQFQGAYALGWVYVHGDAPAVVLHPYHIVPLQNHENIGTKTLHGLVNGVIDNLKNKVVQSVNARRPNIHARTHADRLQALQNGDILC

SEQ ID NO: 44123 - DNA, 1512 bp, Unknown
  Obtained from environmental sample
  misc_feature (1)..(1512): n is a, c, g, or t
atgaggggggacacgcagttcatggagaccgacacctcgatattcgcgaaatactttgaaacggcggaacgcgttgacacgataaaatgcgtcggcagaatctgcaaggtacagggcctccttgtcgaaagcaaaggcccgcaggccattatcggcgaaatttgtaaaatccaggtgcccaaaggcagcggaacggtttacgcggaagttgtcgggttaagaaacgaaattgttcagttgatggttttcgaggaaaccgacgggctggaagtgggatgtcttgtcatcgcgcagggcagccgccttgaagtgcccgtgtcaacgaagctcctggggcgggtgctgaacgcgctggggcagcccattgacgacaaaggcgatattgattcccccgtaatgtatcccgcgcttgccagtccccccgacccgcttaaacgcaggcgtattacagaacgtattacaacgggcgtgcgggccatcgacggtcttttggcggtaggcaagggccagcggctcggcatattcgccggctcgggcgtgggaaaatcgaccctgcttggcatgatagcgcgtaacaccagcgccgatgtgaatgtagtcgcgttaatcggggagcgcggccgcgaggtaaatgattttattgaaaacgatctcggccccgaggggctcgcgcgcagcgtggttgtggtgactccgtcaaattcgccgccgctggctaggctgcgcggggcttatgtggctacggccatcgccgagtttttccgcgaccagggccttgacgtaatgctgctctttgattcagtgacacgctttgcccgcgccatacgcgagatcggccttgcctcgggcgagccttccgccaccaggggttatacgcccagtatgttcgattccatgcccaaactgctggaaaggtcgggcacttcggacataggcagcatcaccggtttttacacgatacttgtcgacgctgacgatatggacgagcccgtgtcggatacggtgcgcggtattcttgacgggcatgtcacgctttcccgccgccttgcgcaggcctaccattatccggcgattgacgtgctgcaaagcgtttcccgccttgcccccgtggtatcgggaccctcggccaacaaagcggcgggggcgatacgccggagcatggccgtatacgccgaggccgaggacatgattaacgtgggtgcgtaccgcgccggttccaatcccgccattgacgaggctatcgccaggcaccagcccatcgaggaatttttgatccaggaagtcacggatcgttcttcgcttgaagacacgtattcggcaatggaagccgtttccggagtcgccatccctgttgaggagttgtcaggcagggctgcgataaaatccgatggagcgaaatcccaggccaaaatccctgtaggcggggccgacggccagacagccatgaactggcagaacaacagcgtcgcgtcccttttcgccagccgcttaagtcccgaagacgattcttag

SEQ ID NO: 44124 - protein, 503 aa, Unknown
  Obtained from environmental sample
  DOMAIN (34)...(99): ATP synthase alpha/beta family, beta-barrel domain
  misc_feature (1)..(503): Xaa is any amino acid
MRGDTQFMETDTSIFAKYFETAERVDTIKCVGRICKVQGLLVESKGPQAIIGEICKIQVPKGSGTVYAEVVGLRNEIVQLMVFEETDGLEVGCLVIAQGSRLEVPVSTKLLGRVLNALGQPIDDKGDIDSPVMYPALASPPDPLKRRRITERITTGVRAIDGLLAVGKGQRLGIFAGSGVGKSTLLGMIARNTSADVNVVALIGERGREVNDFIENDLGPEGLARSVVVVTPSNSPPLARLRGAYVATAIAEFFRDQGLDVMLLFDSVTRFARAIREIGLASGEPSATRGYTPSMFDSMPKLLERSGTSDIGSITGFYTILVDADDMDEPVSDTVRGILDGHVTLSRRLAQAYHYPAIDVLQSVSRLAPVVSGPSANKAAGAIRRSMAVYAEAEDMINVGAYRAGSNPAIDEAIARHQPIEEFLIQEVTDRSSLEDTYSAMEAVSGVAIPVEELSGRAAIKSDGAKSQAKIPVGGADGQTAMNWQNNSVASLFASRLSPEDDS

SEQ ID NO: 44125 - DNA, 345 bp, Unknown
  Obtained from environmental sample
  misc_feature (1)..(345): n is a, c, g, or t
gtgttacgcgctatcatgccaagcagggtcgattttcccacgcccgagccggcgaatatgccgagccgctggcccttgcctaccgccaaaagaccgtcgatggcccgcacgcccgttgtaatacgttctgtaatacgcctgcgtttaagcgggtcggggggactggcaagcgcgggatacattacgggggaatcaatatcgcctttgtcgtcaatgggctgccccagcgcgttcagcacccgccccaggagcttcgttgacacgggcacttcaaggcggctgccctgcgcgatgacaagacatcccacttccagcccgtcggtttcctcgaaaaccatcaactga

SEQ ID NO: 44126 - protein, 114 aa, Unknown
  Obtained from environmental sample
  misc_feature (1)..(114): Xaa is any amino acid
MLRAIMPSRVDFPTPEPANMPSRWPLPTAKRPSMARTPVVIRSVIRLRLSGSGGLASAGYITGESISPLSSMGCPSAFSTRPRSFVDTGTSRRLPCAMTRHPTSSPSVSSKTIN

SEQ ID NO: 44127 - DNA, 1362 bp, Unknown
  Obtained from environmental sample
  misc_feature (1)..(1362): n is a, c, g, or t
atgactgctgctcccaaatggttgaaatggactacaattaaacctgttaatatgcaggttctgaacgatttcatgtgtgcagacccgttttcaatactgggtttgcatcctataaacaaaggcagcaagatgagcgtcagggcttatatacctggtgctgaagccatctctggcgagtcgctggacaagtcgcttaaatttgatttagtgaagctgggcgactctggcttttttgaggctcagatagaagaggaatttaggcattttctctatagattaaacgttgagttgggaaacggcatcaaatactccgttcttgacccttatgcattcccgcccgcgctttcggattttgatttgcatttaatgcaatcaggcgttcattacgagctttaccgcaaattgggtgcaaaccttgtggaagtggaaggaattagaggcgttatgttttccgtgtgggcacccaatgcccgcgccgtatctgttataggcaatttcaattcttgggacgggcataggcatcaaatgcgagtgcgcggaaatagcggcgtgtgggaaatatttatcccagaaataggagaaggcgagctttaccgctttgagttgcactccaaagaaggcaatatgtaccagaaagccgaccctcttgcaaaattcagcgagcttcgccccaatacagcatctgtagttacacatctggacggctaccagtggggagacgacctttacatgcagactcataatgtgacgcaagtatttgaccgcccaatgaacatttacgaagtacaccccggctcttggaaacgcgacccagaaaatccagaacgctttttgaattgggaagaacttgcagaattaattattccttatgttttggatatgggatatacgcatattgagtttatgcctgttatggaacatcctctggatcaatcttggggttgtcaggtcactggctattttgccccaaccagcaggaaaggctctccagaccaatttcgccattttgtcgataaatgccaccaaagcaatataggcgttattttagactgggttcccgcacattttccaaaagatggttttagccttggtcgttttgacggcagtgcttgctatgaacacgcagacccacgccagggcgagcatccgcattggggaacatatatattcaactatgggcgcacagaagttgcaaactttttgatttcaaatgcaatgtactggcttcgcgaattccacgcagatggcttgcgtgtggacgcagttgcaagtatgcttaaaagggactctggcaggaaccacggcgagtggattcccaacaaagatggcggcaatataaattatgatacaattcaattttaa

SEQ ID NO: 44128 - protein, 453 aa, Unknown
  Obtained from environmental sample
  DOMAIN (134)...(217): Isoamylase N-terminal domain
  misc_feature (1)..(453): Xaa is any amino acid
MTAAPKWLKWTTIKPVNMQVLNDFMCADPFSILGLHPINKGSKMSVRAYIPGAEAISGESLDKSLKFDLVKLGDSGFFEAQIEEEFRHFLYRLNVELGNGIKYSVLDPYAFPPALSDFDLHLMQSGVHYELYRKLGANLVEVEGIRGVMFSVWAPNARAVSVIGNFNSWDGHRHQMRVRGNSGVWEIFIPEIGEGELYRFELHSKEGNMYQKADPLAKFSELRPNTASVVTHLDGYQWGDDLYMQTHNVTQVFDRPMNIYEVHPGSWKRDPENPERFLNWEELAELIIPYVLDMGYTHIEFMPVMEHPLDQSWGCQVTGYFAPTSRKGSPDQFRHFVDKCHQSNIGVILDWVPAHFPKDGFSLGRFDGSACYEHADPRQGEHPHWGTYIFNYGRTEVANFLISNAMYWLREFHADGLRVDAVASMLKRDSGRNHGEWIPNKDGGNINYDTIQF

SEQ ID NO: 44129 - DNA, 687 bp, Unknown
  Obtained from environmental sample
  misc_feature (1)..(687): n is a, c, g, or t
gtggaacgggcaaagccccaccatggagcgcccgcgctgcttcaggctgacgtagcgggagacgacggcgaccatgtcgatccgttgccgtacccgctcctntgcgtcgtcattgtatcgggggctcatattttacaaaaatataacaatgaccggtatgcaagttattattttagatatattgacgttggtgttgatgtcgattttttaaaaacggagcaaaacatgaacaacatttcagacctcctagatcccgattgcatacaactcgaactcgccgcccacggcaaagaagccgtgatcaaagagctcgtacacctactcgcggacgcggagaagctggagggttctgcggatcactacgtcgtcgaggtgatggggcgggagaagatttcgtcgaccggcataggcaacggcatcgcgataccgcacgtgcttgtggcggaggtagacgagataatgatggccgtcggccgaagcgccaaggggatacccttcgactccgttgacggcaaaccggcccacctgctcttcctgataatcggcccgcagggtcggaacaacgaatacctgaaaattcttagcaccctatcgcgatacctgaacgaccgcgcattcttcgaagcgctgatgaaggtagagactccggaggaagttataactttggttgaggagagagagcggtag

SEQ ID NO: 44130 - protein, 228 aa, Unknown
  Obtained from environmental sample
  DOMAIN (81)...(226): Phosphoenolpyruvate-dependent sugar phosphotransferase system, EIIA 2
  misc_feature (1)..(228): Xaa is any amino acid
MERAKPHHGAPALLQADVAGDDGDHVDPLPYPLLCVVIVSGAHILQKYNNDRYASYYFRYIDVGVDVDFLKTEQNMNNISDLLDPDCIQLELAAHGKEAVIKELVHLLADAEKLEGSADHYVVEVMGREKISSTGIGNGIAIPHVLVAEVDEIMMAVGRSAKGIPFDSVDGKPAHLLFLIIGPQGRNNEYLKILSTLSRYLNDRAFFEALMKVETPEEVITLVEERER

SEQ ID NO: 44131 - DNA, 351 bp, Unknown
  Obtained from environmental sample
  misc_feature (1)..(351): n is a, c, g, or t
atgatagccgataaagcagggatgagcaggagaggtctggaacagttgaggcagcggtttgttgaggacggatttgaagtaacgcttgtagggaaacctcgcggccacaaaccaaaaacattaggggcaaaggacgaggcgcgtttaatagcattagcatgcagtcctaaaccagacggacgttcccgctggagtttgcggctgttacaacagacatggaaaactctggcatatacagatacaaagacagtatcataccagacaatcagaaggactttaaaaaaaacgaaattaaaccttggcgcagccaggaatggtgcatcccgccggagggggagcctgagtttgtag

SEQ ID NO: 44132 - protein, 116 aa, Unknown
  Obtained from environmental sample
  misc_feature (1)..(116): Xaa is any amino acid
MIADKAGMSRRGLEQLRQRFVEDGFEVTLVGKPRGHKPKTLGAKDEARLIALACSPKPDGRSRWSLRLLQQTWKTLAYTDTKTVSYQTIRRTLKKTKLNLGAARNGASRRRGSLSL

SEQ ID NO: 44133 - DNA, 582 bp, Unknown
  Obtained from environmental sample
  misc_feature (1)..(582): n is a, c, g, or t
atggaaaactctggcatatacagatacaaagacagtatcataccagacaatcagaaggactttaaaaaaaacgaaattaaaccttggcgcagccaggaatggtgcatcccgccggagggggagcctgagtttgtagcctcaatggaggatatactggatgtttacaccagaaaatatgatgaaaactgcattttgatatgcatggatgaagttccccggcagctgattggtgaaacacggaagccggttccggcagggagaggcaagatcgcccattatgatactgagtacaaacgcaacggcacgtgtgaaatatttatgtttgtcgccccctttaataattggagaagggcagaagtaatgaaacatcggacaagtcttgattgggcgcagcagataaaaaaactgataacggttgattttccccatgttaaaaaaattgttcttgttatggataatctcaatactcatactataggctctttgtataaagcatttccgcctgaagaagcaagacagtatcgaaacatacttgaaatacaacgccgaagcacggcagttggcttaacatggcggaaatag

SEQ ID NO: 44134 - protein, 193 aa, Unknown
  Obtained from environmental sample
  misc_feature (1)..(193): Xaa is any amino acid
MENSGIYRYKDSIIPDNQKDFKKNEIKPWRSQEWCIPPEGEPEFVASMEDILDVYTRKYDENCILICMDEVPRQLIGETRKPVPAGRGKIAHYDTEYKRNGTCEIFMFVAPFNNWRRAEVMKHRTSLDWAQQIKKLITVDFPHVKKIVLVMDNLNTHTIGSLYKAFPPEEARQYRNILEIQRRSTAVGLTWRK

SEQ ID NO: 44135 - DNA, 1125 bp, Unknown
  Obtained from environmental sample
  misc_feature (1)..(1125): n is a, c, g, or t
atgaactttatcggcattgacctgcataccaacaggtttacctgttgctatcgggacgaacggtcaccggcggacaagccttcccaaggccgggttaccagaacatttgagttggatgcgcaaggactggcggcgttttaccggacgctgaccgacgacacgtatgtattggtggaagcgacgataacgactttttctttcgtccggctgttcaaggaaagagtgaaggaagttgtcattgccaacacgtacgagttgaaacaggtgagccttgcccggtgcaacaccgacaagatagacgcggacaaattatgtcgcattataaaaatgcaggtgctgtcgggggaaacgtcggtatcgcctgtaacgctgccgccggaagagatacaggttctgcggggattatttacgacctaccggctgttccaaaaacaaaacgtccagctaaaaaaccggatacattccctgttgaaagagcggttgtacggttttacccaagaagaaatatttgaccagcggaaccggaaaaagatccgtgagattgcccctggttcggcgatgtgcttccaggtcaacctgttgttggaccggcttgagcgtgacgaagcggatgtggaaacgttgaaagaccggatattgcttgaggcggctccgttcatggcgcagatagagatactgaccagcatgaaagggataagcgttttcatagcgatagcgattatagcggacatcattgatgtgagccggttcaaaaattccaaagcgtttacttcgtatttacggtctgccccccgggtggcgaactcgaacacgtccgtaagcattaaggggataaacaagaaggggagaaagctgtcggcgacactgttgacgcaatccctcaaccatgtgatggacgccagcgttaagctcaggctctggtatgaccgtttatgcgagtataagaagccggggttggtacggacaggcctgcggcggcgtgtgttagccgaaatcttccagatgctgaaaaagggggagtatcattatgggcgggatgaaaagaagcattttgcaaagatggttcaatatcggcgttttttagaaaaacaagaaaataatgcgatttcaaaaaaaatcgcttga

SEQ ID NO: 44136 - protein, 374 aa, Unknown
  Obtained from environmental sample
  DOMAIN (201)...(307): Transposase IS116/IS110/IS902 family
  misc_feature (1)..(374): Xaa is any amino acid
MNFIGIDLHTNRFTCCYRDERSPADKPSQGRVTRTFELDAQGLAAFYRTLTDDTYVLVEATITTFSFVRLFKERVKEVVIANTYELKQVSLARCNTDKIDADKLCRIIKMQVLSGETSVSPVTLPPEEIQVLRGLFTTYRLFQKQNVQLKNRIHSLLKERLYGFTQEEIFDQRNRKKIREIAPGSAMCFQVNLLLDRLERDEADVETLKDRILLEAAPFMAQIEILTSMKGISVFIAIAIIADIIDVSRFKNSKAFTSYLRSAPRVANSNTSVSIKGINKKGRKLSATLLTQSLNHVMDASVKLRLWYDRLCEYKKPGLVRTGLRRRVLAEIFQMLKKGEYHYGRDEKKHFAKMVQYRRFLEKQENNAISKKIA

SEQ ID NO: 44137 - DNA, 756 bp, Unknown
  Obtained from environmental sample
  misc_feature (1)..(756): n is a, c, g, or t
atggtctcggagttcatgttgcagcagacgcgggccgagagggttattccctattgggaaaactgggtgaagctctggccgcggccaaaagcccttgcggacgcttcaatggaaaacgcccttcgcgcctggtcgggtcttggttacaaccgccgctgccgttaccttaaagaaagcgccgcgatcatcgcaaacgagaacgacggcaaggtgccggaaacaccccaggctttgctttctcttcccggcgtcggcccctacatgtccgcagccattgcctgctttgcgtataactaccctgtagtctttatcgagacaaacatacgttcagccgttattcattgcttttttcccaacagaaacgatgtcagggattccgagattatccctatactggaagcagcgctggacaatgacgatcctcaaccgagcccgaggggcgaaggttcccctcttgacccgcgcatgtggcattacgcgctaatggattacggcgcgttcctgaagaaaacaacagcaaacccaagccgccgcagcgcccattataccaggcaaagccggttcagcggctctttcaggcaggccaggggcaaagtgatcaaggcgctggtttcggcggggcgatgtggcgccgaggaactaaaactggtaagcgggctggaagaacaaaagctgtacgaggtactggaaaaacttataaaagaatcttttgtcgctgaagacggaggcgtttaccggataaaggacgaagcctga

SEQ ID NO: 44138 - protein, 251 aa, Unknown
  Obtained from environmental sample
  DOMAIN (2)...(131): HhH-GPD superfamily base excision DNA repair protein
  misc_feature (1)..(251): Xaa is any amino acid
MVSEFMLQQTRAERVIPYWENWVKLWPRPKALADASMENALRAWSGLGYNRRCRYLKESAAIIANENDGKVPETPQALLSLPGVGPYMSAAIACFAYNYPVVFIETNIRSAVIHCFFPNRNDVRDSEIIPILEAALDNDDPQPSPRGEGSPLDPRMWHYALMDYGAFLKKTTANPSRRSAHYTRQSRFSGSFRQARGKVIKALVSAGRCGAEELKLVSGLEEQKLYEVLEKLIKESFVAEDGGVYRIKDEA

SEQ ID NO: 44139 - DNA, 1635 bp, Unknown
  Obtained from environmental sample
  misc_feature (1)..(1635): n is a, c, g, or t
atggtcgtgggggtcatcatattcttgatattggtgttgatacagtttatcgtcatcacgaagggcgcggggcgtatagccgaggtcgcggcgcggttcaccctcgacgccatgccgggcaagcagatggcgatagacgccgacctcaacgcggggctgataaacgaggaccaggcgcggtcgcggcgctccaagatacagcgcgagtccgacttctacggggcgatggacggcgcctccaagttcgttcgcggcgacgccatagtgggcatcatcatcacggccatcaacatcataggcgggttcatcatcggcgtggcgcagatgggcatggaatggggagacgcgatttccacctatacccggctgaccatcggcgacggcctcgtttcgcagatgccggcgctcatgatatccgtgggttccggcatgatcgccagccgcgccgcctccgaggacaacctcggttccgagatcacaagccagctgctctctaaccacaaagtgctgtggctcgccggatcgctcatgttcttcttcgcgctcatgcccggtttcccagccgtacctttcggcgcgctgggaattgtctgtttcgcggcggcctacttcaagatgcaggagaggaagagggcggaggccgaggccgctcaggaaagctcctccaagcagcagggcgaagccgccgccaagaaggaggagcgtatagaggactacctccacgtagaccccatggaactcgaaatcggctacggcctcatacccatagtcgacgtaaagcagggcggcgacctgctcgacaggataacgatgatccgcaaacagctggcttcagagctgggcataatcataccccccatacgcataagggacaacatacagcttacgcccaacgagtacaagataaagatacgcacagtcgtggtgggcaaaggcgagcttatgagcggcgcgtaccttgcaatggatcccggcacggccgtaaggaagatacgcggcgtgcctacggtggagccggcgtttaatcttccggccatttggattaccgagagccagaagagcgacgccgaggtggccggctacaccgttgtggagcttccggctgtcattgccacgcacctgacggagacgataaagaagcacgcccacgagatactcacgcgccagaacgtgcagtcgcttatcgacaacctgaaggagcagggcggcgtggtcataggcgagctgattccgggtttgatgggcgtgggcgacgtccacagggtgttgcagaatctgctgcgcgagcgtatttcaataagggatttgttgctgatattagagacgctggccggtgtggcggcgcgcagcaagaataccgacgtgcagaccgagtacgtgcggaatgtcttggctccgcagatatgcgaggcctacaagaacgacgacggcgtgatcccggtcataacgctagatccgaatctggaggctaaactggagggctctatacaggagagcgagggaattttccgtttttcgttatcccccgccgacgcgaatcgtatattagaagctgcgggcgtgcaaatagagggtgccaaacaggccggcgagtatccgatattgatatgttcgccgacggtgcgtccgcagtga

SEQ ID NO: 44140 - protein, 544 aa, Unknown
  Obtained from environmental sample
  DOMAIN (1)...(543): FHIPEP family
  misc_feature (1)..(544): Xaa is any amino acid
MVVGVIIFLILVLIQFIVITKGAGRIAEVAARFTLDAMPGKQMAIDADLNAGLINEDQARSRRSKIQRESDFYGAMDGASKFVRGDAIVGIIITAINIIGGFIIGVAQMGMEWGDAISTYTRLTIGDGLVSQMPALMISVGSGMIASRAASEDNLGSEITSQLLSNHKVLWLAGSLMFFFALMPGFPAVPFGALGIVCFAAAYFKMQERKRAEAEAAQESSSKQQGEAAAKKEERIEDYLHVDPMELEIGYGLIPIVDVKQGGDLLDRITMIRKQLASELGIIIPPIRIRDNIQLTPNEYKIKIRTVVVGKGELMSGAYLAMDPGTAVRKIRGVPTVEPAFNLPAIWITESQKSDAEVAGYTVVELPAVIATHLTETIKKHAHEILTRQNVQSLIDNLKEQGGVVIGELIPGLMGVGDVHRVLQNLLRERISIRDLLLILETLAGVAARSKNTDVQTEYVRNVLAPQICEAYKNDDGVIPVITLDPNLEAKLEGSIQESEGIFRFSLSPADANRILEAAGVQIEGAKQAGEYPILICSPTVRPQ

SEQ ID NO: 44141 - DNA, 666 bp, Unknown
  Obtained from environmental sample
  misc_feature (1)..(666): n is a, c, g, or t
gtgaagaggactataaaggtcaggcgcctcgacaggtgctcggagtgcggcggcagcggctcgaagtccggcaagcgcaccaattgtattaagtgcggcggcagcggccgcgtgcgccacgttaccaactcgttcttcgggcaggtggttcaggagacggcgtgccccatttgccgcggcgacgggcaggtggtctccgacccgtgctcggcgtgcggcgggagcgggttgcggcaggccgagacgaccgtgtccgtggacatcccggcgggggtcgaggatggcaactacatccgcgtgccgggcaggggcgacgccggcaggggagggggggagtccggcgacctcatagtcattctgagcgagaaaccccacgacgtcttcacacgccacggcagagacatcagttgcaaactcgacatcaccttctccgaagcggcgcttgggtgctcgaagaccataagtacgcttgaggacaatgtcagtttgaagataccgagcggcacgcagtccgaaaaggtcttcacgctgaggtcgaaaggactgccggagtaccgcggcaggggcaggggagaccttctcgtgaaggtgcacgtcaacacgccggataagatagggcgcgcggagaaagagttgtttgagaagttggcgaaattgggactgtga

SEQ ID NO: 44142 - protein, 221 aa, Unknown
  Obtained from environmental sample
  DOMAIN (1)...(82): DnaJ central domain (4 repeats)
  misc_feature (1)..(221): Xaa is any amino acid
MKRTIKVRRLDRCSECGGSGSKSGKRTNCIKCGGSGRVRHVTNSFFGQVVQETACPICRGDGQVVSDPCSACGGSGLRQAETTVSVDIPAGVEDGNYIRVPGRGDAGRGGGESGDLIVILSEKPHDVFTRHGRDISCKLDITFSEAALGCSKTISTLEDNVSLKIPSGTQSEKVFTLRSKGLPEYRGRGRGDLLVKVHVNTPDKIGRAEKELFEKLAKLGL

SEQ ID NO: 44143 - DNA, 477 bp, Unknown
  Obtained from environmental sample
  misc_feature (1)..(477): n is a, c, g, or t
ttggcgctgacagggcacttggtattctcaacactaagcacaggcgactccgcaagcgccatcgcccacttcgccgacatcggcgtacccccgctgctgctgggctcgtcgctgaacctgatagcggcgcagcggctggtgcgcaagatatgcgcaaactgcaaaatcgaatacaagcccaccccggagctgctccagagcctcaacctgaccccggaagacgtcccgcaactctacaagggcaacggttgcgtaacctgcaacggcacaggcttctcgggacgcacggcgatattcgagatgctgcaggtgtccaagaatgtccgaaagcttatactgagaaacgcgccggtgaatgaaatccaagaggcggccgcggcggaggggatgaaaacgctgcggcaggccggcatggaattggcggtgaacggaacgaccactatcgagcaagtcatctcggcgacgatagatatttag

SEQ ID NO: 44144 - protein, 158 aa, Unknown
  Obtained from environmental sample
  SIGNAL (1)...(22)
  misc_feature (1)..(158): Xaa is any amino acid
MALTGHLVFSTLSTGDSASAIAHFADIGVPPLLLGSSLNLIAAQRLVRKICANCKIEYKPTPELLQSLNLTPEDVPQLYKGNGCVTCNGTGFSGRTAIFEMLQVSKNVRKLILRNAPVNEIQEAAAAEGMKTLRQAGMELAVNGTTTIEQVISATIDI

SEQ ID NO: 44145 - DNA, 888 bp, Unknown
  Obtained from environmental sample
  misc_feature (1)..(888): n is a, c, g, or t
gtgcttgtggacaaacccgatcttaaaggcagagaggcaattttaaaaattcattccaaggacgtaagacttgaccctgccgtagaccttgaagttgtcgcgcgcataacgtcaggtttttccggggcggatttggcgaatattgtaaacgaagccgcgcttttggcggtcagagcgggacggaaaatggttgtacagcgcgactttgacgaagcgatagaaaaaaccgtcgccggcttacagaaaaaaaccagagtgcttaaacagcaggaaagaaaactgaccgcctaccacgaagccggtcacgcaataatcgctgcgtttacacctaacgccgaccctgtgcaaaaaatttcgattattccgcgcggttttgctttgggttacactttgcagcttccgcttgaagaccgttatacggtaaccaagtccgatcttttaggaaggattgatatccttctcggcgggcgtatcgccgaagaaatgatttccggcgaatattccacaggagcggctaacgatttaaccaaggcgacggacatcgcccgcaaaatgatcaccgattacggaatgagcgaccgtttccgccatgtcgcgctgacatcgcgcggtatgagcatgacagggcaggagcggcaggaaccgtctttccagcgcgagtacgcggaaagcacacagcagtatgtagatgaagaaatcgcccgtattatcgacggcgagtacgctaaagcgaagaaaatccttgaagaacagcgcggggtactggacaatgtttccgccgcattgctggaaaaaaaactcttgatgaaaaagaattcaaggccctcattggaggagggaatttcaatcggtggtgtaaaaaattatttcttatctccgctcaggtaa

SEQ ID NO: 44146 - protein, 295 aa, Unknown
  Obtained from environmental sample
  DOMAIN (64)...(267): Peptidase family M41
  misc_feature (1)..(295): Xaa is any amino acid
MLVDKPDLKGREAILKIHSKDVRLDPAVDLEVVARITSGFSGADLANIVNEAALLAVRAGRKMVVQRDFDEAIEKTVAGLQKKTRVLKQQERKLTAYHEAGHAIIAAFTPNADPVQKISIIPRGFALGYTLQLPLEDRYTVTKSDLLGRIDILLGGRIAEEMISGEYSTGAANDLTKATDIARKMITDYGMSDRFRHVALTSRGMSMTGQERQEPSFQREYAESTQQYVDEEIARIIDGEYAKAKKILEEQRGVLDNVSAALLEKKLLMKKNSRPSLEEGISIGGVKNYFLSPLR

SEQ ID NO: 44147 - DNA, 942 bp, Unknown
  Obtained from environmental sample
  misc_feature (1)..(942): n is a, c, g, or t
atgaaattaggaaaatttcaaaaaattgaattacgtgattattgggcagatgaggcaaaacattttacaccatggctggcacaggaagagaatattgatgaattaagtgaaacaattggaatagatattgaagtcgaaggcactgaagtttttattggaaattttaaagcagatattattggtagagatatttcaaataataaaaaaataattattgagaatcaactggaaaaatcaaatcatgatcatttgggaaaaataataacctatgcttctggtatagatgcatctgttgtaatatggatttgtagcaacatttctgatgaacacaggcaagctattgattggttaaatgaaaatacaaatgaaaatattaatttttttgcaatagaaattgaattatggaaaattgatgattctaatccagctgcaagatttaatataatttgtagaccaaatgaatgggttaaaacaacaaaagaagtaactaatccaaaagaaatgacagatacaagatctttacaattagaatattggaattacttaaaggattattttaatcaacaatctacttttctaagtcttagaacaccaagagctcaacattggtattcaatgtctattggaagatcaaaatttaatatatcattaactataaatacaattcataacagaatcggttgtgaattgtatattagaggtgaaaatgcaaaaaaagcattttctgaattaagaaaagacaaggaaattatagaaaaagaaattggaacagaattagattggcaagaattacctgacggccaagattcaagaataattgtttatcaaaatggaaatattaaagataaagaacaatgggaagaaattacaaaatggtttaaaaaatattcagaactgttttataattcattttcaaatagagttaaaaaaataaaattataa

SEQ ID NO: 44148 - protein, 313 aa, Unknown
  Obtained from environmental sample
  misc_feature (1)..(313): Xaa is any amino acid
MKLGKFQKIELRDYWADEAKHFTPWLAQEENIDELSETIGIDIEVEGTEVFIGNFKADIIGRDISNNKKIIIENQLEKSNHDHLGKIITYASGIDASVVIWICSNISDEHRQAIDWLNENTNENINFFAIEIELWKIDDSNPAARFNIICRPNEWVKTTKEVTNPKEMTDTRSLQLEYWNYLKDYFNQQSTFLSLRTPRAQHWYSMSIGRSKFNISLTINTIHNRIGCELYIRGENAKKAFSELRKDKEIIEKEIGTELDWQELPDGQDSRIIVYQNGNIKDKEQWEEITKWFKKYSELFYNSFSNRVKKIKL

SEQ ID NO: 44149 - DNA, 528 bp, Unknown
  Obtained from environmental sample
  misc_feature (1)..(528): n is a, c, g, or t
atgccgagctttggggacttagacctggaggagaactttggtcccgtaaagggaaagaccctatgttatgtgggagacgggcgcaacaacgtggctaactcccttatggtgatttccgccaagctggggttgaattttaccgttgttaccccgtcagagcttaaccccgacgaggttctgcgggaaaaatgcgcccatctggccgaggcttccggatcaaaaataattgtaagcaatgatattgccgcggtttccggcgcggacgccatatatactgacgtgtgggtttctatgggggaggatgataaaagagagaaacgggtaaagctgttgtccccgtatcaggtgaaccacgcgttgatggaaataaaccatcggacggattccatttttctccactgccttccggcggtcaaaggagaggaagtaacgtccggagtgatagacggcccgcacagccgcgtctgggatcaagcggaaaaccgcaagcacacgattaaagcgattatgttagctacgctaacataa

SEQ ID NO: 44150 - protein, 175 aa, Unknown
  Obtained from environmental sample
  DOMAIN (16)...(173): Aspartate/ornithine carbamoyltransferase, Asp/Orn binding domain
  misc_feature (1)..(175): Xaa is any amino acid
MPSFGDLDLEENFGPVKGKTLCYVGDGRNNVANSLMVISAKLGLNFTVVTPSELNPDEVLREKCAHLAEASGSKIIVSNDIAAVSGADAIYTDVWVSMGEDDKREKRVKLLSPYQVNHALMEINHRTDSIFLHCLPAVKGEEVTSGVIDGPHSRVWDQAENRKHTIKAIMLATLT

SEQ ID NO: 44151 - DNA, 417 bp, Unknown
  Obtained from environmental sample
  misc_feature (1)..(417): n is a, c, g, or t
atggcggtgctggtagacgaattcggcggcactctgggaatagttactgtagaggacatactggaggaactggtaggtgaaatttgggacgaacatgaccgcgtggtggaaccggttaagcataacgccgacggcagtttttccgcgcttggcggattgcagtttcaggatatggtagattttatcggcagcaaaacgtcaaacgatgatttatctgaaggagaggagattcccgatactacggttggcaactgggtaatggagactagaggcgagtcgccggactcgcccggcggcccgccccgcgtgggtgagcagtttgactggcacaagctgcgtatccaggtatcgcgcgttcaacgccaccgcgttatggaggtgcttgtcaccaatgaacaaataacaggtaacaggtaa

SEQ ID NO: 44152 - protein, 138 aa, Unknown
  Obtained from environmental sample
  DOMAIN (40)...(133): Transporter associated domain
  misc_feature (1)..(138): Xaa is any amino acid
MAVLVDEFGGTLGIVTVEDILEELVGEIWDEHDRVVEPVKHNADGSFSALGGLQFQDMVDFIGSKTSNDDLSEGEEIPDTTVGNWVMETRGESPDSPGGPPRVGEQFDWHKLRIQVSRVQRHRVMEVLVTNEQITGNR

SEQ ID NO: 44153 - DNA, 432 bp, Unknown
  Obtained from environmental sample
  misc_feature (1)..(432): n is a, c, g, or t
atgataaaacaggcggttattgtcgcggcgggtcttggttcgcgtcttaaagaaaaaacagtttcaatgccgaaaggttttcttgaattgggcggtatcgccattgttgaatggtcggttcaaaaactgctcgcctgcggcgttgaaaaaattattataggtacgggttatcacgccgaggcatacgacgctcttgcgaaaaaataccccgctattcaaaccgctttcagcgccgactacgagacaacaagcagtatggcgacattgaacgtatgcgccccttatgtaaccgatgattttttgcttttggaatcagaccttatttacgacagcatcggactgagtgttctttgcaacgatatacatgaaaatgttattctcgcttccggcgcgaccaattcaggcgatgaggtgtatttagaaggcggttaa

SEQ ID NO: 44154 - protein, 143 aa, Unknown
  Obtained from environmental sample
  misc_feature (1)..(143): Xaa is any amino acid
MIKQAVIVAAGLGSRLKEKTVSMPKGFLELGGIAIVEWSVQKLLACGVEKIIIGTGYHAEAYDALAKKYPAIQTAFSADYETTSSMATLNVCAPYVTDDFLLLESDLIYDSIGLSVLCNDIHENVILASGATNSGDEVYLEGG

SEQ ID NO: 44155 - DNA, 942 bp, Unknown
  Obtained from environmental sample
  misc_feature (1)..(942): n is a, c, g, or t
gtgtatatgcaaaattcaggtatcggcaacgcaattaatcctctgctttcgcttgcggataacgaagtatatcgtatacctttggttctggttataggctggcgcggagaacccggcgtacatgacgagcctcagcatgttaaacaggggaaagttacctgctcactgcttgaaagcatgggcattccctatgcggtgctgaaaaaaaatgaagatgatatgaactctcagattgaagcttgttttaacacaattgccgaaacaaatgccccatacgctcttgttatatgcaaagacacattcgcgccctacagccttcaaaaaaaagaagagcatgacgtaataatgacgcgcgaagaagcaatcgaagagattgctgccaatcgagacggaattatcgtttctacgacgggaatgatttcgcgcgaattgtacgagttacgcgataaggctggcacaggtcatgcgcgtgattttcttaccgtaggctcaatgggtcatgcgtcttccatcgctctgtctatagctttacaaaaacaacaactgcgggttacatgccttgacggagacggcgcagcgcttatgcacatgggctcttttgcagcaatcggaactcttaaaccgcgcaatttatgccacattgttcttaataacggttcccatgattctgtcggcggccagcctactatcgctccttttattgatattccagcggtcgctcgggcttgcggttatacaaaagtgtatcaagtaaaaacaaagaaagaattgcaaaagattttagcgaaaaaaaacgaagagcttacatttattgaggtaaaagtaaaaaaaggcgctcgcaaagatttggggcgtccaaaatcatcgccgcaggaaaacaaagcggcttttatgaaatttattgaggaatatcgtctccgcgttgcggagccgttcgattaa

SEQ ID NO: 44156 - protein, 313 aa, Unknown
  Obtained from environmental sample
  DOMAIN (136)...(273): Thiamine pyrophosphate enzyme, C-terminal TPP binding domain
  misc_feature (1)..(313): Xaa is any amino acid
MYMQNSGIGNAINPLLSLADNEVYRIPLVLVIGWRGEPGVHDEPQHVKQGKVTCSLLESMGIPYAVLKKNEDDMNSQIEACFNTIAETNAPYALVICKDTFAPYSLQKKEEHDVIMTREEAIEEIAANRDGIIVSTTGMISRELYELRDKAGTGHARDFLTVGSMGHASSIALSIALQKQQLRVTCLDGDGAALMHMGSFAAIGTLKPRNLCHIVLNNGSHDSVGGQPTIAPFIDIPAVARACGYTKVYQVKTKKELQKILAKKNEELTFIEVKVKKGARKDLGRPKSSPQENKAAFMKFIEEYRLRVAEPFD

SEQ ID NO: 44157 - DNA, 786 bp, Unknown
  Obtained from environmental sample
  misc_feature (1)..(786): n is a, c, g, or t
ttgattattgaaaatctggaaatcgaaaaagaagacggccttcatagctttgacggaatgtggtcttcaagtttaaccgactcaacaagcaaggggaaaccggatattgaagcggttgatcttactacccgcctgcaggacctgaccaatattctggaatgtacgacaaagccgattatcttcgacggtgacacaggggggcatcatttcgcctttaccgtaaaaacccttgaacgaaacggcatatccgctgtgattatagaagacaagaccggccttaaaagaaattcgctttttggcaccgaagtaaatcaggagttatgtcccattccggatttctgtaaaaaaataaaagacggcaagcaggcgcaggttacaaaagagtttatgattatcgcgcgccttgaaagtttaatagccggttttccggtttcccacgcgcttgaaagagcgcgcgcttttgtagaagcgggcgcggacggcgttatgatacacagcaaagaaaaaacaggcggggacataaaagaattttgttcgcttttccgcgcagaatatccgcatattccgctggtgctggttccgacaacatataaccagtttacggaaaaagaacttgcctcatggggcgcgaatatcgttatctacgcgaaccatatgctccgttcagcgtatcccgcgatgttaaacaccgcaaaaatgattttacaaaacgaacgttctcttgaggcggattcggtttgtatgccaataaaagagatacttgaattgattccgggctctaaataa

SEQ ID NO: 44158 - protein, 261 aa, Unknown
  Obtained from environmental sample
  misc_feature (1)..(261): Xaa is any amino acid
MIIENLEIEKEDGLHSFDGMWSSSLTDSTSKGKPDIEAVDLTTRLQDLTNILECTTKPIIFDGDTGGHHFAFTVKTLERNGISAVIIEDKTGLKRNSLFGTEVNQELCPIPDFCKKIKDGKQAQVTKEFMIIARLESLIAGFPVSHALERARAFVEAGADGVMIHSKEKTGGDIKEFCSLFRAEYPHIPLVLVPTTYNQFTEKELASWGANIVIYANHMLRSAYPAMLNTAKMILQNERSLEADSVCMPIKEILELIPGSK

SEQ ID NO: 44159 - DNA, 2247 bp, Unknown
  Obtained from environmental sample
  misc_feature (1)..(2247): n is a, c, g, or t
atggcgagagcgggcggacgttatttttatctgcgcgacgagggcgatgtatggactccttcatggatgccgatgaaatccgatctttcccgctacgagtgtcgtcacggaatgggctattcgcgaatttcctcggcgcgtaacgggttggctttttctcaggtttcatttgtgccgttacgcgataagtgcgaaatccataaaattaccctaaccaatgaatcaaatgttgataaacgtatagatatgttttcttttatcgaattttgtttatggaacgccaacgacgatatgaccaatttccagcgtaatttcagcattggcgaggttgagattgacggctcgcgcatttatcacaagaccgagtatcgcgagcggcgcaatcattacgcggtttgggcggtaaatgttccagtagagggctttgacacggacaggcagacattccttggtctttataacggctttgatcacccgcaggcagtttttgcgggtgagtcaaagaactccgtcgcttccggttgggctcctatcggctctcaccacatcaaggcgaggctttcaccgggcgagtctaaaactttcgtttttgttcttggttactgcgaaaatccagaagatcaaaaatgggaaaagcagggagtaataaataaaaaacccgctaatacgcttcttgataaatacggaacgccggaatcagcggacaaggctcttgccgcgcttaacgaatactggaaagaactcttgngacgtttcaccgtggaagcggaagataaaaaaatggcgcgtatggcgggcgtttggaatcagtatcagtgcatggtaacgtttaatatgtcgcgtagcgcgtcttattttgaatctggaatcgggcgcggcatgggtttccgcgattcaaatcaggaccttttgggctttgtgcatcttgtgccggaacgcgcccgcgctcgtattctggacatcgccgccacgcagtttcccgacggcagcgcgtatcatcaataccagccgctgaccaaacgcggcaacaacgaggtcggctccggcttcaacgacgatcccctgtggctgatctgcggcgtggcggcgtacatcaaggagacgggcgacttcggcatccttgatgagaaggttcctttcgacaataaagaagagctggcggaaagcctgtttgtccatttaaagcgttcgttcgattacaccgtcacgcatactggcccccacggcctgccgctgattggccgcgctgactggaacgattgtttgaacctcaactgtttctccaaaacgccgggcgagtctttccagaccacggccaattttgaaagcggtgtcgcggagtcggttttaatcgcggcgatctttgtgttcaccggccccgattacgttgaaatctgccgtagaacgaaacgcgaagaggaagccacgtacgccgccaaggcgattgcctcaatgaccgaaacgatcaaagcgcacggctgggacggcaactggttcctgcgggcttacgatgcgtatggtcataaaatcggcagccatgagtgtgaagacggacagatatttatcgaatcaaacggattcgcggtaatggcggaaatagggcttgacgatggacgcgctcaaaaagcgcttgactcggtgaagaataggctggacacaaaatatggcatcgtacttcaacagcccgcgtacaaggaataccatcttgaactgggcgaagtctcatcctacccgcctggctataaagagaacgcgggcatcttctgccacaacaacccctgggttacaattgccgaaaccaagcttggccggggtacgcgtgcgtttgaaacctatacgaaaatttgccctgcttaccgcgaggacgacagcgaccttcgccgccttgaaccttatgtgtacgcgcagatggtagccggaaaggacgctcctcgtttcggcgaagcgaaaaactcctggctcaccggaacagccgcgtggacttttgtcagcatttctcagtatattctgggtgtgcgtccggtgttcgatggcttgctaatcgacccatgtattcccgctggcatgaagggtttttccgttattcgtcattttcaaaacgcggtataccgtatcaccgtggacaatagcgctggtgtggagaaaggcgttaagtcggttacgctggacggaaaactgcttgacggcgctgtattgccagcgctggatgacgggcggacgcatgaagttaaagtggtaatggggtga

SEQ ID NO: 44160 - protein, 748 aa, Unknown
  Obtained from environmental sample
  DOMAIN (119)...(207): Glycosyltransferase 36 associated family
  misc_feature (1)..(748): Xaa is any amino acid
MARAGGRYFYLRDEGDVWTPSWMPMKSDLSRYECRHGMGYSRISSARNGLAFSQVSFVPLRDKCEIHKITLTNESNVDKRIDMFSFIEFCLWNANDDMTNFQRNFSIGEVEIDGSRIYHKTEYRERRNHYAVWAVNVPVEGFDTDRQTFLGLYNGFDHPQAVFAGESKNSVASGWAPIGSHHIKARLSPGESKTFVFVLGYCENPEDQKWEKQGVINKKPANTLLDKYGTPESADKALAALNEYWKELLXRFTVEAEDKKMARMAGVWNQYQCMVTFNMSRSASYFESGIGRGMGFRDSNQDLLGFVHLVPERARARILDIAATQFPDGSAYHQYQPLTKRGNNEVGSGFNDDPLWLICGVAAYIKETGDFGILDEKVPFDNKEELAESLFVHLKRSFDYTVTHTGPHGLPLIGRADWNDCLNLNCFSKTPGESFQTTANFESGVAESVLIAAIFVFTGPDYVEICRRTKREEEATYAAKAIASMTETIKAHGWDGNWFLRAYDAYGHKIGSHECEDGQIFIESNGFAVMAEIGLDDGRAQKALDSVKNRLDTKYGIVLQQPAYKEYHLELGEVSSYPPGYKENAGIFCHNNPWVTIAETKLGRGTRAFETYTKICPAYREDDSDLRRLEPYVYAQMVAGKDAPRFGEAKNSWLTGTAAWTFVSISQYILGVRPVFDGLLIDPCIPAGMKGFSVIRHFQNAVYRITVDNSAGVEKGVKSVTLDGKLLDGAVLPALDDGRTHEVKVVMG

SEQ ID NO: 44161 - DNA, 1452 bp, Unknown
  Obtained from environmental sample
  misc_feature (1)..(1452): n is a, c, g, or t
atgaataccttatcttttcctgatcttttgcgcataattggcggatccgggccggtttccgccggtatttccgcccttgtgggaggaaaattccccctggaaattgaaggctgtgagggcgccggtaatgccctgctgctggcgaaactctatgcggccaggccgggccggtattttgtcgtcgtgccccaggaaactgacgcggcggactttgcccttgatttgcggagtttggccctgccctgcctgcaatttccctggtggggcgcggcgccgtattacgagctggcccccctttcggcaatattcggggaacgggtcaaaaccctgagcgaactggtttccggcaagccggcgggcattaccatcatttcccagcgggccttcctgacccccctgccgccgcctgattatatcaagagtctgttggtttccgtaaagccggggggaaagatcgacaccacggcccttgcccaaacgctgacctcttacgggtatatacgggtgccgcgggtgcaggtatccggggaatttgccttacgcggcgaggtactggatgtttttctgggcggcgatgacacggcggcggaaaccgcggaagcgtaccgtattctgtttgattttgatcaggtggaatcgattaagcgctttgacccgctcatgcaaggctctcttgtatcaagcgcacattcatcaggcggcgggacaaagctgccggaactgatgatccgccccctgcgggaagtggtctggactgacgagcgaattgaaacgctggaaaagaaccttgccgccttcaatgaattctccgacggcggtaaggccattattgaggaattgatagaaaagcgcggcattgccggtgaagaaatgttttacccgctggcttttgagaatataaatacaaagaatataaccacggaggacacggaggaacacggaggaataaagtcttcaatcgtttcaggactccgtgaaactccgtgtactccgtggtttaatattcttcattacctcggcgacgagggaactctggtattaatggatcgggaacggctggaaaacgcgcaggaaatcctgaaccgcgagtaccacagtttgtacctgcgctcgcagcggggcggcgcacagcgacagtccgcgcggcgggaggaaacaccacgccgccagtatcccctgccggaacggctgctgtttgattttaagaatttaattaccggctgtacgcggatcatctcttttaagaatattaagagcgaaccggagcccggagtctgccgtatcaatgtgggctgtgagacggcgcgcagtttttttggcaacattacttatttgaaagaagaatttgccgcgttatatgcaagcggttggcaaattgtcgtggccgccgaatcggaagtgcaggcggagcgcatacggacgattcttccccctcacgatttctttccataa

SEQ ID NO: 44162 - protein, 483 aa, Unknown
  Obtained from environmental sample
  misc_feature (1)..(483): Xaa is any amino acid
MNTLSFPDLLRIIGGSGPVSAGISALVGGKFPLEIEGCEGAGNALLLAKLYAARPGRYFVVVPQETDAADFALDLRSLALPCLQFPWWGAAPYYELAPLSAIFGERVKTLSELVSGKPAGITIISQRAFLTPLPPPDYIKSLLVSVKPGGKIDTTALAQTLTSYGYIRVPRVQVSGEFALRGEVLDVFLGGDDTAAETAEAYRILFDFDQVESIKRFDPLMQGSLVSSAHSSGGGTKLPELMIRPLREVVWTDERIETLEKNLAAFNEFSDGGKAIIEELIEKRGIAGEEMFYPLAFENINTKNITTEDTEEHGGIKSSIVSGLRETPCTPWFNILHYLGDEGTLVLMDRERLENAQEILNREYHSLYLRSQRGGAQRQSARREETPRRQYPLPERLLFDFKNLITGCTRIISFKNIKSEPEPGVCRINVGCETARSFFGNITYLKEEFAALYASGWQIVVAAESEVQAERIRTILPPHDFFP

SEQ ID NO: 44163 - DNA, 645 bp, Unknown
  Obtained from environmental sample
  misc_feature (1)..(645): n is a, c, g, or t
ttggttagactcgcactgtctcttttattgtcttattacgattataaccagtgtaacaggaggaagatcatggagtacggtcattttgacgcaaaggcgcgggagtatgttattacccggcctgatacgcctgcgccctgggcaaattatctggggtcgccggcttatggggcgattatttccaataatgcgggcggttacagtttcgtaaaaagcggtgcagccggacggttgatacgttaccgttttaacgagcaggacagacccggacgttatatctacctgcgcgatgacgaatcaggcgattactggtcggcctcctggcaaccggtaggcaaggatttggaaaaataccgctcgacctgccgccatggtactggctataccatcatggaaaccgaatatacgggtctgcgttccgaggtgagttactatgtgccgatggatacagcccacgaagtatggcggctcaaactgaccaataccggtgcggctgtgcgaaagatttccgtttttggttttgtcgaatttacctgtgaaagtttttatgagcaggatcaggtaaatctgcaatacacccagtttatcacccgcacctacttcaagatcatttcatattgcaaacgattaacgaaaactgcctga

SEQ ID NO: 44164 - protein, 214 aa, Unknown
  Obtained from environmental sample
  DOMAIN (24)...(87): Putative carbohydrate binding domain
  misc_feature (1)..(214): Xaa is any amino acid
MVRLALSLLLSYYDYNQCNRRKIMEYGHFDAKAREYVITRPDTPAPWANYLGSPAYGAIISNNAGGYSFVKSGAAGRLIRYRFNEQDRPGRYIYLRDDESGDYWSASWQPVGKDLEKYRSTCRHGTGYTIMETEYTGLRSEVSYYVPMDTAHEVWRLKLTNTGAAVRKISVFGFVEFTCESFYEQDQVNLQYTQFITRTYFKIISYCKRLTKTA

SEQ ID NO: 44165 - DNA, 759 bp, Unknown
  Obtained from environmental sample
  misc_feature (1)..(759): n is a, c, g, or t
ttgcaaacgattaacgaaaactgcctgaacgccgtcaacgaaagccgtgtggaaacgcgcttttttggtttggcgggggctccggttaccagctactgcggcgaccgcgctgcatttttgggcggctaccgtgattacgggaatccggtttccattgaaaaaggccgcctggacggaaaacttaactacaacctgaacccctgtggggcactgcacacggccctgacccttaaaggcggcgaaagcgtttcactggtatttttattggggcaaaaacgggaagcggaggcgaaagcgctgatagcccgttacgaagacagcggcctgcctgatcgggaaattaacgatcttaaaaactactggcacggcaaattgaccaacctgaaagtagaaacccccgatgaaaatttcaatcacatgatgaatacctggaatgcctaccagtgttttattacgtttaactggtcgcgggcggcctcgttgatctactgcggccagcgcaacggttacggctaccgcgacacggtgcaggacattcagggcataatccaccttgacccggaaatggctttggaaaagctgaaattcatgatctccggccaggtaagccacggcggagcgctgccgctggtaaagtacgatcataaccccggccatgaagacaagccggaagacgtttcctaccgcaagggaacagggcatccttcctaccgtgccgatgacgcgctgtggctgttcccacggtatggaaatacataa

SEQ ID NO: 44166 - protein, 252 aa, Unknown
  Obtained from environmental sample
  DOMAIN (11)...(97): Glycosyltransferase 36 associated family
  misc_feature (1)..(252): Xaa is any amino acid
MQTINENCLNAVNESRVETRFFGLAGAPVTSYCGDRAAFLGGYRDYGNPVSIEKGRLDGKLNYNLNPCGALHTALTLKGGESVSLVFLLGQKREAEAKALIARYEDSGLPDREINDLKNYWHGKLTNLKVETPDENFNHMMNTWNAYQCFITFNWSRAASLIYCGQRNGYGYRDTVQDIQGIIHLDPEMALEKLKFMISGQVSHGGALPLVKYDHNPGHEDKPEDVSYRKGTGHPSYRADDALWLFPRYGNT

SEQ ID NO: 44167 - DNA, 303 bp, Unknown
  Obtained from environmental sample
  misc_feature (1)..(303): n is a, c, g, or t
atggcgaagttgtcatggcctacccttttttgcaattcactgcaagttgataacgacggaaccgttacaggctactgtttacgccggcagaacggcaaaaaagaagcggtaaaggctttcaagtcaataaatatgcgtatcttcgcggcaggagattcattcaacgatttagcgatgatccgcgaagccgacggcgggtgtttgttccgcgctccggaacaaatccgcaaagattgttctgatttaaaatgcgtagatacgtttgatgagttgcttgcggagattaataatttcttgaagtag

SEQ ID NO: 44168 - protein, 100 aa, Unknown
  Obtained from environmental sample
  misc_feature (1)..(100): Xaa is any amino acid
MAKLSWPTLFCNSLQVDNDGTVTGYCLRRQNGKKEAVKAFKSINMRIFAAGDSFNDLAMIREADGGCLFRAPEQIRKDCSDLKCVDTFDELLAEINNFLK

SEQ ID NO: 44169 - DNA, 300 bp, Unknown
  Obtained from environmental sample
  misc_feature (1)..(300): n is a, c, g, or t
atgaacatggtgtgtcttgatcttgagggagtgcttgttcccgaaatttggatagcgttttccgaagccacaggtataagcgaacttcgtcggactacaagagacgagcctgattacgacaagctgatgaacttccgtcttgatctgcttaaaaaaaacaacttaaaacttcccgatattcaaaaagttatttccggcatggctccccttcccggcgcaatgattttaccaacgccctgcgcgagaaaacacagcttattattttatcggacacctttgaacaattcgcgaaacctctaa

SEQ ID NO: 44170 - protein, 99 aa, Unknown
  Obtained from environmental sample
  misc_feature (1)..(99): Xaa is any amino acid
MNMVCLDLEGVLVPEIWIAFSEATGISELRRTTRDEPDYDKLMNFRLDLLKKNNLKLPDIQKVISGMAPLPGAMILPTPCARKHSLLFYRTPLNNSRNL

SEQ ID NO: 44171 - DNA, 813 bp, Unknown
  Obtained from environmental sample
  misc_feature (1)..(813): n is a, c, g, or t
atgaccgttttgaagctccgtaatccttttaacgcgcctgtttatcacgaagaaaccgtttccagcacaatggatgtttcccgtaaattggcgctggaaggttttcccggcggcaccgtcattttagcggattttcaggaatcgggccggggacggaaacaggatcgacgatgggaaatggaacggggtgagaatttatcttttacaattttatttaaatttcccggcatcgaacaaattccgtccgctcttaccttaagggcgggacttgccgtctgtcttgccatcgaagattttgcgccgtgtttacaagactcatgtttggttaagtggcccaatgatatattgataaaacctgttaatggcgaaagttataaaaaagcggttggaattctctgcgaagcggacggagggaatgttcatcttggaataggcataaacacgtcgcanaaagagtttcctccccacttgcgggataaagccgttagtatcgttcttgccgcgggcaaggatatttcgcgggatgatagttatgtgttattggaaaatatactttcgcgtctttacagtgaattggacgcggcaaaaaatggggagacggaaaataccgcggataataatttgaaaacgcgccttgaacaaaagttgtacaaaaaggatgagcaggttttatttatcgaaggcgccgccggttcaggcatagaagtcaaaggccgccttgccggcatcacggaaggcggcgagctgttgattgtcccggaaggagaagaacaagcgaggtcattcgtcgccggagaattggtttttttctaa

SEQ ID NO: 44172 - protein, 270 aa, Unknown
  Obtained from environmental sample
  DOMAIN (15)...(118): Biotin/lipoate A/B protein ligase family
  misc_feature (1)..(270): Xaa is any amino acid
MTVLKLRNPFNAPVYHEETVSSTMDVSRKLALEGFPGGTVILADFQESGRGRKQDRRWEMERGENLSFTILFKFPGIEQIPSALTLRAGLAVCLAIEDFAPCLQDSCLVKWPNDILIKPVNGESYKKAVGILCEADGGNVHLGIGINTSXKEFPPHLRDKAVSIVLAAGKDISRDDSYVLLENILSRLYSELDAAKNGETENTADNNLKTRLEQKLYKKDEQVLFIEGAAGSGIEVKGRLAGITEGGELLIVPEGEEQARSFVAGELVFF

SEQ ID NO: 44173 - DNA, 627 bp, Unknown
  Obtained from environmental sample
  misc_feature (1)..(627): n is a, c, g, or t
atgccggaagcaggccgcagtttttattttgatttaaaatacggacgtaaatattttacttttataagcgaagaattgccgcaaatttgccgcagaatttacaatgtttccgataaaaaggaagacacggccgtaataggatactccatgggaggttttggctctttattactagccctttccaaaccggagcaatatggtttttgcggcggtatatcgcccgcctgtgtttactttaaaaaccaattggaagcgattcgtggtgatataccggcatttttattaaagactgaatacgaaccggatgaacttattaaagatttatacgctatttatggtcatgacttaaaacacagggaagacggagacatttccgaattgataaaacattatcccgccgataaatcaaaaccaaagatatatgttacatgcggtacggaagataatctgttaaatgaaaatcataaattacgcgatgaaattaaaaataccgctttcgattttacctatgaagaatggagcggcggtcataattgggatttctttaatgaggctttaaagaaaacgcttgagttctggtataaagattacgtattagaaaaaaaccaattctccggcgacgaatga

SEQ ID NO: 44174 - protein, 208 aa, Unknown
  Obtained from environmental sample
  misc_feature (1)..(208): Xaa is any amino acid
MPEAGRSFYFDLKYGRKYFTFISEELPQICRRIYNVSDKKEDTAVIGYSMGGFGSLLLALSKPEQYGFCGGISPACVYFKNQLEAIRGDIPAFLLKTEYEPDELIKDLYAIYGHDLKHREDGDISELIKHYPADKSKPKIYVTCGTEDNLLNENHKLRDEIKNTAFDFTYEEWSGGHNWDFFNEALKKTLEFWYKDYVLEKNQFSGDE

SEQ ID NO: 44175 - DNA, 1446 bp, Unknown
  Obtained from environmental sample
  misc_feature (1)..(1446): n is a, c, g, or t
atgcccagcgatgaggatatgggcaattccgaggtgggacacaatgccataggcgcggggcaggtgtacaatcagggggcagccttggttgcagactccataaaatcgggcgaaatttggggcagggatgcttggaaagaaattgtgaaaggagcggcaaacggaacgctccactttattggcttgttctcagacggcaatgtgcacagccacatagaccacctcaaagccatgattgcagaggcaaaaaaagaaggtttaaaacgagttagggttcacattctcctagatgggcgagatgtcccagaaacaagtgccttggaatatgttgagccttttgaaaaattctgcgctgaattaagtgattccgcttttgatgtttgcatagcgagcggtggcggcagaatgaaaattacaatggatagatacgaagccaactggaaaatggttgagcttggctggcaaatacacgtgcttggagaaggcgataaatttgagagcgcatcggttgctataaaagccttgcgcgaaaaatacaaaggcacaatagaccaagatttgccgccctttgttattgcaaaaaacaacgagcctgttggcacaatcaacgatggcgattctgtggtattcttcaacttccgcggagacagagcaattgaaatcacaagagcctttgaagaaagttccttcacccactttgaccgcaaacgagttccaaaagtcacttatgccggaatgcttcaatacgatggcgacttgaaactccctaaccgttttttggtacctcctccggcaataaaaaacaccagcggcgaatggttcgaaaatagcaaattaacgcaattcgcctgctccgaaacgcagaaattcggtcacgtaacatacttctggaacggcaaccgttccggcaaatttgacggcgaaacatacctagaaattccaagcgatattatcccctttgagcaacgcccgtggatgaaatccgctgaaatagcagatgcaatgatagaggcgctcaaaagcggcaaatacaacacattgcgttgcaacttcgcaaacggcgatatggttgggcacactggttctttccgtgctgcaactatggcagtagaagccgtggacttagccctagcccgcatactgccagtccttgacgctatgggtggcgtagccctaatcaccgcagaccacggcaacgcagacgaaatgtatgagatagacaaaaaaaccaaagaacccgcaaaaaacaaagacggctccttcaaagcaaaaaccgcccacaccttaaatccagttccatttatcctatacgataatgtaaccggcggaaagttgaagctaaaagacattaagaatgcgggtctttcaaacatagcggcaacaaccgcaaatcttctcggctttgaaaaacacgaaagctgggacgaatcgttgctggttgtttga

SEQ ID NO: 44176 - protein, 481 aa, Unknown
  Obtained from environmental sample
  DOMAIN (325)...(459): Metalloenzyme superfamily
  misc_feature (1)..(481): Xaa is any amino acid
MPSDEDMGNSEVGHNAIGAGQVYNQGAALVADSIKSGEIWGRDAWKEIVKGAANGTLHFIGLFSDGNVHSHIDHLKAMIAEAKKEGLKRVRVHILLDGRDVPETSALEYVEPFEKFCAELSDSAFDVCIASGGGRMKITMDRYEANWKMVELGWQIHVLGEGDKFESASVAIKALREKYKGTIDQDLPPFVIAKNNEPVGTINDGDSVVFFNFRGDRAIEITRAFEESSFTHFDRKRVPKVTYAGMLQYDGDLKLPNRFLVPPPAIKNTSGEWFENSKLTQFACSETQKFGHVTYFWNGNRSGKFDGETYLEIPSDIIPFEQRPWMKSAEIADAMIEALKSGKYNTLRCNFANGDMVGHTGSFRAATMAVEAVDLALARILPVLDAMGGVALITADHGNADEMYEIDKKTKEPAKNKDGSFKAKTAHTLNPVPFILYDNVTGGKLKLKDIKNAGLSNIAATTANLLGFEKHESWDESLLVV

SEQ ID NO: 44177 - DNA, 420 bp, Unknown
  Obtained from environmental sample
  misc_feature (1)..(420): n is a, c, g, or t
ttgatggcgagagcccgtctttttggcaagtcatcaaggggtactccgcgcgttgtaaaccggcttttgcggcgtatgcgggatttcgcccagtattcgggagaaaaatccatcacactgcctgtggtaagttccggtttgtcacggctggaaattgacgcgcttgggcttgagaaacaggacagggatatactgaaaattattattgagcgttacaaaggagggcctgtaggcgcggatacgcttgccatttccatcggagaatctgtagaaactctggaagattactatgagccctaccttattcaagccggacttttacagcgcagcccgcgcggaagaatggtaacaagcctcgcgtacggccatttaggacttgcttccaatacaggcggaaacagcgaaggttctcttttttaa

SEQ ID NO: 44178 - protein, 139 aa, Unknown
  Obtained from environmental sample
  DOMAIN (49)...(127): Holliday junction DNA helicase ruvB C-terminus
  misc_feature (1)..(139): Xaa is any amino acid
MMARARLFGKSSRGTPRVVNRLLRRMRDFAQYSGEKSITLPVVSSGLSRLEIDALGLEKQDRDILKIIIERYKGGPVGADTLAISIGESVETLEDYYEPYLIQAGLLQRSPRGRMVTSLAYGHLGLASNTGGNSEGSLF

SEQ ID NO: 44179 - DNA, 1044 bp, Unknown
  Obtained from environmental sample
  misc_feature (1)..(1044): n is a, c, g, or t
atgaagacaagcgatttttcatttcatcttcccgaaaatcttattgcgcagtttccgcccgaaaagcgcgggcagggcaggctgatgactcttgatcgcgtaacagggaaacgggctcaccgcatggtggaagagttacccgaaattttaagtaaagacggacatttgccgcttttggttttcaataattcaaaggtaagaaaagcaaggcttataggcgtgtccgaggaatcgggagcgcgggtagagtttctcttggttgaaaaacttaaaagcggaagctggaaaaccattgttaagcacgcaaaacgccgaaggcctttaagccgttatgtgttttacgatacggcaggcgcgcaaatagcgagagcgcaaatagtattagcaaaaactgagttcagaatacttgaatttgaaaatcctatttccgaggactggctggaaaagtacgggcatattcctctgccgccgtacataaaacgcgaagacgccccgtccgacgccaaccgttatcagacaatttacgctaaggaaacaggttcgtccgcggcgcctacggcgggcctgcattttaccagggaaatccttgataatctttccgcaaacggaatagagagcgtttttataacgcttcatgtcgggatggggacattttaccccgtaagaagcgaaaacattgaagatcatcccatgcacagcgaacctttcagcatagatgaagataccgcgcaaaaaataaatggggcaaaagaagcgggacggaaaattatcgcggtagggacaacaagcgcgcgtactttggaaagcgcgtggagcgaagggaaaattgcctcgggagagggaagcacctcgatttttatttatcccggttacaaatttaaagttgcggacgctctctttacaaattttcacacccccgaatccacgcttcttatgcttgtgtcggcgtttgccggaagagagatgattctggaaagttacgctgatgccgtaagagaaggataccgctttttcagctacggcgacgctatgttgatttattga

SEQ ID NO: 44180 - protein, 347 aa, Unknown
  Obtained from environmental sample
  DOMAIN (1)...(223): Queuosine biosynthesis protein
  misc_feature (1)..(347): Xaa is any amino acid
MKTSDFSFHLPENLIAQFPPEKRGQGRLMTLDRVTGKRAHRMVEELPEILSKDGHLPLLVFNNSKVRKARLIGVSEESGARVEFLLVEKLKSGSWKTIVKHAKRRRPLSRYVFYDTAGAQIARAQIVLAKTEFRILEFENPISEDWLEKYGHIPLPPYIKREDAPSDANRYQTIYAKETGSSAAPTAGLHFTREILDNLSANGIESVFITLHVGMGTFYPVRSENIEDHPMHSEPFSIDEDTAQKINGAKEAGRKIIAVGTTSARTLESAWSEGKIASGEGSTSIFIYPGYKFKVADALFTNFHTPESTLLMLVSAFAGREMILESYADAVREGYRFFSYGDAMLIY

SEQ ID NO: 44181 - DNA, 735 bp, Unknown
  Obtained from environmental sample
  misc_feature (1)..(735): n is a, c, g, or t
atgcgcaaactcatactgactacggcggcggtcgcggcggcgattgcgggggctttcgccggagagccatctttcggaacgttcaccgacaatagggacgggcagacgtacaagactgtgaagattgggacgcagacttggatggcgcagaatatcaattatcagaccaaaggcgggtcttggtgctatgagaacagtgctgatagttgcaagaagtacggcagactgtacgattggatgaccgctaaaactgtctgtcctaaaggatggaagttgccgtctcgcgaggattgggattctttggggcaagcagtagggggcaagaaggagttgggtgatgagggttggatttattggtacggcgcgggtcggaagttgaaatcaaatagcggatggaacaaaaacggtaatggtacggacgattacggattttcggccttgcccggcggcaaccgtaactccagtggcggtttcaacaatgccggcgacaacggcagctggtggacggctacggaggactctaacggtaacgcctacttccggagcatgttctactactacgacctcatgttcgagtactactacgtcaagggcctcgccttctcggcgcggtgcgttcaggacaatgnatgcggtcgtttgtccccaatggcggattccctatcgcagagtccgccctcctgccgtctcccctttatttttaactctccacaatggctaacttataccccatag

SEQ ID NO: 44182 - protein, 244 aa, Unknown
  Obtained from environmental sample
  SIGNAL (1)...(20)
  misc_feature (1)..(244): Xaa is any amino acid
MRKLILTTAAVAAAIAGAFAGEPSFGTFTDNRDGQTYKTVKIGTQTWMAQNINYQTKGGSWCYENSADSCKKYGRLYDWMTAKTVCPKGWKLPSREDWDSLGQAVGGKKELGDEGWIYWYGAGRKLKSNSGWNKNGNGTDDYGFSALPGGNRNSSGGFNNAGDNGSWWTATEDSNGNAYFRSMFYYYDLMFEYYYVKGLAFSARCVQDNXCGRLSPMADSLSQSPPSCRLPFIFNSPQWLTYTP

SEQ ID NO: 44183 - DNA, 843 bp, Unknown
  Obtained from environmental sample
  misc_feature (1)..(843): n is a, c, g, or t
atggtagaggatcagattggtcccggagagagggcccgccttctcctgcaaacagccaaagaacaaatccgttttgattatgccctcgcgctgcgaagcccggccacagcccttcacctggcgcttaaagccctggaattaaaggaaggggacggggtgctggtttcagcgctttctccgcgttattacgcccagacgattgctgatttacgcctaacgccactgttctgcgacgtgtcatattctttcccctgcatgagccgcgagaacgttgaaaaaggcataaccgcaaaaccgtccggagtggagccccgctgcataatccttcaccatactcttggctatgcgccggacgcggcgtccatcgccggtcttggcattccggttattgaggatatatcacaaagttacagccccccccctcagcaggaacaggccgaaggggcaaatgaaaagcaaacgggagatgccgcgccgttagggccaacaaacgcggcttcggaacagacaatccacggggtattcgccatattgggccttgaggaaagggatatgcttacaggcggcggaggggcgatcctctttgccatgaacagaaaggacggtcagatactgcgcgccttttcaaacataccgcccgagtactgcctgcccgacattaacgccgccctggcgtctgtgcagttcagggaagcgccccgtaatatggctaggcgtcaggaaatcgccaaagcctatacccaggcaagcctccgtaccaaacacaagcgcttcgtcccgcttgacggcgccggtgaatactgcaattacgttttttcccctggtgctgggagacaggcatga

SEQ ID NO: 44184 - protein, 280 aa, Unknown
  Obtained from environmental sample
  misc_feature (1)..(280): Xaa is any amino acid
MVEDQIGPGERARLLLQTAKEQIRFDYALALRSPATALHLALKALELKEGDGVLVSALSPRYYAQTIADLRLTPLFCDVSYSFPCMSRENVEKGITAKPSGVEPRCIILHHTLGYAPDAASIAGLGIPVIEDISQSYSPPPQQEQAEGANEKQTGDAAPLGPTNAASEQTIHGVFAILGLEERDMLTGGGGAILFAMNRKDGQILRAFSNIPPEYCLPDINAALASVQFREAPRNMARRQEIAKAYTQASLRTKHKRFVPLDGAGEYCNYVFSPGAGRQA

SEQ ID NO: 44185 - DNA, 942 bp, Unknown
  Obtained from environmental sample
  misc_feature (1)..(942): n is a, c, g, or t
gtggatgttaaacccgatgacgccaaggaaattatcgccgagcagattctaaagggacgggaagtcaagcggctcctttacaagggagacggtgaaaagaaaaatactgttgccatagaagatattgagttttatcagaagcagttacgtgtagttctccgaaactgcggggtaatcaacccggaaagcattgatgaatacatagcccgcgaaggctatgtgggacttgagaaggtactttttaactggtcacaggaacaattaatcgaagagatgaaaatctcaggtcttagggggcgcggcggcgctggattccccacctggctaaagtgggaccttgcgcgtaaggctcagggcagccccaagtacgttatctgcaacgccgacgagggagaccccggggcttacatggacaggtccaccatcgagggagacccccactcggttatagaggggatgattaccgcaggtaaggccataggttcaaatcacggtattgtgtatatacgcgccgagtatccgctggcagtagaacggcttaagatagcaatggcccaggcggaagattacggccttttgggcaagaacatcctcggttcaggtttcgactttgaaatagaaatccgcctgggtgctggcgcctttgtatgcggcgaggagacggccctgattaagtcagtagaagggaaccggggtatgcctgttccaaaaccgcccttcccggcaaacaaagggctttggcagctgccgacaattatcaacaacgttgaaaccttcgcgaatgttccggtcattaccgcaaggggcggggcctggcttgccagaatcggcacggaaaaatccaagggcacaaaggttttcgcccttaccggcaaggtaaaaaattccgggcttgtggaagttccgatgggaaccaccctacgggaaattatcttgagatag

SEQ ID NO: 44186 - protein, 313 aa, Unknown
  Obtained from environmental sample
  DOMAIN (71)...(313): Respiratory-chain NADH dehydrogenase 51 Kd subunit
  misc_feature (1)..(313): Xaa is any amino acid
MDVKPDDAKEIIAEQILKGREVKRLLYKGDGEKKNTVAIEDIEFYQKQLRVVLRNCGVINPESIDEYIAREGYVGLEKVLFNWSQEQLIEEMKISGLRGRGGAGFPTWLKWDLARKAQGSPKYVICNADEGDPGAYMDRSTIEGDPHSVIEGMITAGKAIGSNHGIVYIRAEYPLAVERLKIAMAQAEDYGLLGKNILGSGFDFEIEIRLGAGAFVCGEETALIKSVEGNRGMPVPKPPFPANKGLWQLPTIINNVETFANVPVITARGGAWLARIGTEKSKGTKVFALTGKVKNSGLVEVPMGTTLREIILR

SEQ ID NO: 44187 - DNA, 2187 bp, Unknown
  Obtained from environmental sample
  misc_feature (1)..(2187): n is a, c, g, or t
atgggcgacctgatggaaccgcaggtaacgctggatagtatcaaaaaatacattgtcaataccgttatggttcagggcgcgtacggaatactgctcagtaaggatttggttattctggcgcaccccaatgaaacatatgtcggtcagaacgccggcaattcggaaattcctttttcaatttttatcaatgaattaattaacagggtggaaattaccgaacgtccgctcataacgtataagggcgaacgcgcccgggcttcttttcgctatcttcccaacggctggattataggcattgtaacgcccaaagatctgtactataaaagcatagccaatatggcgttaattctcgttatattgggcacggcgctttcgtcggtgctggtctttgttctcattcgcgttgacgcggccagaaacagatcggacctggaaaacaggcacaaaacttcttttttggccaacgtgagccacgaaatacggacgcccatgaacgccattatcggcatgacggagcttctgggttatgaaccgcttaacaaacggcagatgggttttatcgacgacattaaaatttccgctcactcgcttctttccattatcaacgatatattggatatgtcaaaaattgaggcgggcaaactggagcttaacccgatcaattacgattttcatgtgcttttggataatgttcattccatgttcagctatgtaaccaggaagaagggcattgaatttaaatatgaaaccgaggggaagatgccccgttacctatacggcgatgatataaggcttaaacaggtattaacgaatatctgcggaaatgccgttaaatacaccaaaaaagggtatgtaaaatttaaagtaaccgcctccgatgataaacttatatttgagattaaggacacaggcatcgggatgcgtaaagaagacctgccgaaactgtttaacacttttcaacggatcgaaaatgaacagaaccgcaccatagttggaacaggtttggggctttcaatcagcaagacttttgtagaaatgatgggcggaagtataatggtcgacagcgagtatgaacagggaagcgtcttcaggatcataatcccggttgttttgagcgaaaaagaagaggttaaatcaaataaaagcttgcctgagggacataccttgttcgcaccggatgccaaagttctgattgtagacgacaatgaattcaatataaaggtcgccgagggactgctcggcctgtttaagatcaacgtgcacaaggctttttccggcaggaaagccattgatatggttcaaaaagatgattatgacattgtatttatggatcacatgatgcctgaaatggacggcgttgaagcgaccggcataataaggaaattgggcgggaaatataaaaatatgcccattatagcgctgacagctaatgcggttcagggcgcaaaggaaatgtttttatccaacggatttgacgggtttatttcaaaacccattgatattcaggaaatgtacaaaatcctgaaagaatggcttccgacggataaaatagagataagaaaagaaaaaataatagaagagagggatgataaagaaacagagagtgaatttctctctgaactgtacaaaattgatgaaatcgacgtggagattggtctgaaacgcgtttccggcatggagattatgtaccgggaaacaatagaactttttaaccaaaaactcgtacctgattgtatcggcatgtacgataagctgaattacggggatataagcgggtttgcgatttctgtacacgccatgaaatccgcgctgtccaccataggggcgatgagtttatccgaaacggcgttaaggctggaaacagccgccaaagacaatgattttgatttctgcgtgcagaggtttccggttttcagaaacaagcttttaaagctgcataatgatttgtcagctattttacaggacgatgttgaaacagagaaaaataaaaagaccggagataaagcctacttaaaagaacaaattgaaaaagcgcttgaagccgcttctaaatttaacaacgacgcggggcttaatgccataaacgatttgttgatctatgatttcggcgaagagaacaacgctttattggaaaatgccgccgccgcgtttaaggattttaatttttattcggctgtggagtgttaa

SEQ ID NO: 44188 - protein, 728 aa, Unknown
  Obtained from environmental sample
  DOMAIN (562)...(655): Hpt domain
  misc_feature (1)..(728): Xaa is any amino acid
MGDLMEPQVTLDSIKKYIVNTVMVQGAYGILLSKDLVILAHPNETYVGQNAGNSEIPFSIFINELINRVEITERPLITYKGERARASFRYLPNGWIIGIVTPKDLYYKSIANMALILVILGTALSSVLVFVLIRVDAARNRSDLENRHKTSFLANVSHEIRTPMNAIIGMTELLGYEPLNKRQMGFIDDIKISAHSLLSIINDILDMSKIEAGKLELNPINYDFHVLLDNVHSMFSYVTRKKGIEFKYETEGKMPRYLYGDDIRLKQVLTNICGNAVKYTKKGYVKFKVTASDDKLIFEIKDTGIGMRKEDLPKLFNTFQRIENEQNRTIVGTGLGLSISKTFVEMMGGSIMVDSEYEQGSVFRIIIPVVLSEKEEVKSNKSLPEGHTLFAPDAKVLIVDDNEFNIKVAEGLLGLFKINVHKAFSGRKAIDMVQKDDYDIVFMDHMMPEMDGVEATGIIRKLGGKYKNMPIIALTANAVQGAKEMFLSNGFDGFISKPIDIQEMYKILKEWLPTDKIEIRKEKIIEERDDKETESEFLSELYKIDEIDVEIGLKRVSGMEIMYRETIELFNQKLVPDCIGMYDKLNYGDISGFAISVHAMKSALSTIGAMSLSETALRLETAAKDNDFDFCVQRFPVFRNKLLKLHNDLSAILQDDVETEKNKKTGDKAYLKEQIEKALEAASKFNNDAGLNAINDLLIYDFGEENNALLENAAAAFKDFNFYSAVEC

SEQ ID NO: 44189 - DNA, 1311 bp, Unknown
  Obtained from environmental sample
  misc_feature (1)..(1311): n is a, c, g, or t
atgcnggaaattaacgccgatatcggcgattgcgcaaacagcagtttttccatggcgcggctcntgcagggggatgtcggttcaggcaaaacgcttgtttcgtttctggcagccttgcgggtggctgacaatggcgggcagaccgtgctgttggctccgacagaactgcttgcccgccagcacgcggaaaacgccgcccgcctcctggaaccccttggcatgaggatagcgttcctgaccggaaacataaaagcggctggcagaaaagatctattaaaacatttggaagagggggaaatagacattgccgtaggaactcacgcacttttctcaaaagatgttaactataaaaatttgcagttggtaattattgatgagcagcaccgcttcggcgtaacgcagaggacccttataatggccaaaggccttaatggcgctgcgactggcggaccccatctgttgatgatgagcgctacgccgattccacgcacccttgccatgacggtttttggcgacatggatatttctgtaataagcgatatgccgccggggagaaagccggtaataactcaccttgcaaaggaatccaacgagcaaaaggtgtatgaatttgtacgcgataaactgaaagccggttcccaggcttactttgtatatccgttaatcgaaagcgacgacgaaaaagaaacaggtttaaaagacgccgtctttcttaaagacgccgtatcaatggaggaacggctggcggcggaaattttccccggtttcgccgtggccctgatccattcaaaactagacgaggaagaaaagcgtcagactatggaaagttttcgcaaaggcgaaataaaggtgttagttgccaccagcgttgttgaggtgggcgttgacgtgccgaacacaaactgcatggtgatagaacacgccgagcgatttggtctttccgccctgcaccagcttaggggcagggttggccgggggcaggatcaggcgtactgttttctggtttactcggacaagtacaccgaagacggcaaggcaaggctcaatgtaatgcatgaaagcaccgacggctttgttattgccgaggaggacttaaagctgcgcgggccgggccagatcgccggaaccgagcagtccggctatctcaatctgggaatcgccaatcccatccgcgacatagacgcgctgacaaaagcccgcgaagacgctttttccattcttgagaacgatcccggccttgtgctggacggccaccggatcattgcccgcgtcatggaggaagcgccgccgtttggcgaggtggcgctgtaa

SEQ ID NO: 44190 - protein, 436 aa, Unknown
  Obtained from environmental sample
  DOMAIN (7)...(162): Type III restriction enzyme, res subunit
  misc_feature (1)..(436): Xaa is any amino acid
MXEINADIGDCANSSFSMARLXQGDVGSGKTLVSFLAALRVADNGGQTVLLAPTELLARQHAENAARLLEPLGMRIAFLTGNIKAAGRKDLLKHLEEGEIDIAVGTHALFSKDVNYKNLQLVIIDEQHRFGVTQRTLIMAKGLNGAATGGPHLLMMSATPIPRTLAMTVFGDMDISVISDMPPGRKPVITHLAKESNEQKVYEFVRDKLKAGSQAYFVYPLIESDDEKETGLKDAVFLKDAVSMEERLAAEIFPGFAVALIHSKLDEEEKRQTMESFRKGEIKVLVATSVVEVGVDVPNTNCMVIEHAERFGLSALHQLRGRVGRGQDQAYCFLVYSDKYTEDGKARLNVMHESTDGFVIAEEDLKLRGPGQIAGTEQSGYLNLGIANPIRDIDALTKAREDAFSILENDPGLVLDGHRIIARVMEEAPPFGEVAL

SEQ ID NO: 44191 - DNA, 2016 bp, Unknown
  Obtained from environmental sample
  misc_feature (1)..(2016): n is a, c, g, or t
atggcgcggcttccgcaggggcagatggacgcgatccggcacatcctgacaaccgaccgccgatactccgtgattcagggggacgcggggacgggcaagtctttttcattgcggtacgccaaagaactgcttgaagcgcagggctataatgttttggggatcgcccccaccggcaaggcaacggacgaactgaccgcctccgcagaaattgagaccacaatgactattgccgcgctaataagcgcgaaaaataaaccgcttgaacaaggtaaaaaatactgtatttttgttgatgaaatgtcaatgggcgattcgcggacggtcaataaattactgaaaattacggaggaatacggcgcaaaggtgattttcgtgggcgataaagaacagtttttgcccgtaggcgcaggtagattcttcgcggatttacagaaagccgacatcaaaattacccgcatgaaagacgtcatccggcagaagaccaagcaaaccataaacgtcgtaaacgctctcgccgccaaagaaatccctgccgctatcaactgtcttgccggatacaccactgttatcgggtacgataagactaacgccaagaaataccgtgtcggccaaagaatatcattccacgaccgcaccgcgaccgcaaacaacgccgcgaccatcccgttaggaacaatcgcccatgttaccgcagtcggagaccgcgaactaacgatagagtatactgttcgagggcaaaaaatcacagtcaatatcgatccccgaaacacgcataaaaattataccctatacgataagaacaaaggttataaaaactgcatacataccttagcggacaaagacgaccgtcaacaggcggttgccgccgattacgtgaattgctacaaaaaagggattgacgcacttgtcatcacagcgaccaacgaagaccgcagaagcctcaataagattatccgcgagacgttggtacgtcaggaaaaaatccgaaatgtcagcgattttacactgcttgaaccgaaaaatatcaataactttcttttcgcggactcatttgcggtcggtcaacagattaagggattgccgcaattaaaaacggacggagagtacggcttcggcgaaattactaacattgatatcaatcaaaataagattaccatccgtaacccaaagactgatgaagaatttaagatagacccgtccgattacgtcaaaaaacagttttccgtattcgacaaagccacatcgacattaggtgtcggcgagaagattacatttttgaaaaacgctaaagtaaccgaccaaaatacgggcaagaccgtaaacttgcgcaacggacaactcgccactatcaccgaacttgataagaccgggaacatcactgtaaaggtagataagaaaaaagttaaatttaagttgggcgattataattacctaacgacggcctttgcgctttcactgcataagtcgcaaggaatgacagtcgataaagttatttggcacgccgacacttctaaagaggtatcgacaaacagtttttacgtcgctattacccgctgtaagcgcgatatagcggtctataccgacgatattgagcgtttgcagataaaggcgtccaaagggcaggacaaatacagcacgattgacgttgacgaaatctacgacaaagagtatcaaaaacaactcaaaacgatacaaaaacgcgacccaaaggcaacacagccggacattgcccccgccgccgaccctacagcgcaagaggccgcgccatcactgccgaccgtacccgaaaccaccacgccgccgccgactgcacccgaagctgtcccatcgatccaagagaccgcgccgccgtcaatcatacccgaagccgcctcgctgacccaaaagaccgcgccgccgaccccgatcaagcccgttcccgctcctccgaaaccgactacggtcaaagcaccgccgccgcctacaaccgccgcacctgcgatacaggcggtcaagccgcgaccgaaatatcgttaa

SEQ ID NO: 44192 - protein, 671 aa, Unknown
  Obtained from environmental sample
  misc_feature (1)..(671): Xaa is any amino acid
MARLPQGQMDAIRHILTTDRRYSVIQGDAGTGKSFSLRYAKELLEAQGYNVLGIAPTGKATDELTASAEIETTMTIAALISAKNKPLEQGKKYCIFVDEMSMGDSRTVNKLLKITEEYGAKVIFVGDKEQFLPVGAGRFFADLQKADIKITRMKDVIRQKTKQTINVVNALAAKEIPAAINCLAGYTTVIGYDKTNAKKYRVGQRISFHDRTATANNAATIPLGTIAHVTAVGDRELTIEYTVRGQKITVNIDPRNTHKNYTLYDKNKGYKNCIHTLADKDDRQQAVAADYVNCYKKGIDALVITATNEDRRSLNKIIRETLVRQEKIRNVSDFTLLEPKNINNFLFADSFAVGQQIKGLPQLKTDGEYGFGEITNIDINQNKITIRNPKTDEEFKIDPSDYVKKQFSVFDKATSTLGVGEKITFLKNAKVTDQNTGKTVNLRNGQLATITELDKTGNITVKVDKKKVKFKLGDYNYLTTAFALSLHKSQGMTVDKVIWHADTSKEVSTNSFYVAITRCKRDIAVYTDDIERLQIKASKGQDKYSTIDVDEIYDKEYQKQLKTIQKRDPKATQPDIAPAADPTAQEAAPSLPTVPETTTPPPTAPEAVPSIQETAPPSIIPEAASLTQKTAPPTPIKPVPAPPKPTTVKAPPPPTTAAPAIQAVKPRPKYR

SEQ ID NO: 44193 - DNA, 1104 bp, Unknown
  Obtained from environmental sample
  misc_feature (1)..(1104): n is a, c, g, or t
ttgacttatagttttgcaagcgtttggaccgaacagatcatagatgaggcgccttcggatttatcccaatacggactggataaaccttcccaccgaacgttcgttacagattccgatggaaagaaagcggaatatatcctgggagatatgaccccttcaaggctttcttattatatcatggaagccggcgatcctaaagtatacttgattacttcctatatagcggagtatatgctgtttaccctggacgatattcggcagagattcctattcccctcttttgagttttttgagttggcccagtttcgtttagagtcccggtttaccaaaattgagattaataacaagctgccagagcttcgtcctgatctgaccagtattttctcaactcatctggttacttcgccatacaaacgctcacggggagcggacggtgaagcccttaacaaactgctcacgccgtttaaggatctgtcgattgtggattttattgatgacgcgccatcgtcccttaagccctacgggctggatgagcctgtcagaatttttctggaaactcaggagaaatccattgatctgttgataggaaaagagattgacggggagcactacgcgaaacttgccggagttcccggggtgtttacactttacggtatggaaagcgttgtcaatgtcaaacctttttccctgattaataaattcgccctccttgtcttcattgactgggtggaccatctctcggtaaccggaggagagaaaaatcttgtcgcggatttcaagggaacgggagatgaccagatttattaccataacgggagaaaagcggaaacaaaatccttcaagaccttttaccaggccgttatcggccttctggtagacgccgaatacccgggcccggtcagtcaaagcggagggggcggggaaataaccatcgaatatcagcttaataacccgccgggggaacgtccggttatcacccttgttccctataaccgggatttttacgccttaaagcaggatggggcaacggaatttctgatttcccgaaaccaggttcgccgtatttacgaaaccgccgacgcgatgatctacgatgaaaattaa

SEQ ID NO: 44194 - protein, 367 aa, Unknown
  Obtained from environmental sample
  misc_feature (1)..(367): Xaa is any amino acid
MTYSFASVWTEQIIDEAPSDLSQYGLDKPSHRTFVTDSDGKKAEYILGDMTPSRLSYYIMEAGDPKVYLITSYIAEYMLFTLDDIRQRFLFPSFEFFELAQFRLESRFTKIEINNKLPELRPDLTSIFSTHLVTSPYKRSRGADGEALNKLLTPFKDLSIVDFIDDAPSSLKPYGLDEPVRIFLETQEKSIDLLIGKEIDGEHYAKLAGVPGVFTLYGMESVVNVKPFSLINKFALLVFIDWVDHLSVTGGEKNLVADFKGTGDDQIYYHNGRKAETKSFKTFYQAVIGLLVDAEYPGPVSQSGGGGEITIEYQLNNPPGERPVITLVPYNRDFYALKQDGATEFLISRNQVRRIYETADAMIYDEN

SEQ ID NO: 44195 - DNA, 975 bp, Unknown
  Obtained from environmental sample
  misc_feature (1)..(975): n is a, c, g, or t
ttgacagataaattaaaagcgtttctggaacgccatgatctgttcatcctcactacccatgacccggcggacgccgacgggcttggcgcgcagcttgtccttgcgtgcgtacttagggaattggggaagcaatacaggattatcaactcaagcccaatcccggaacagtttaaatttatggacaggcagggcgtaattgaaaccctggatattgaaaagcacaatacgctgcccgagcaggcggccgtaatcatggcggataccgcggatctgcacaatatagggcaaatgcgcgaccttgtctgcagggctaaggaagtgttcattattgaccatcatgagataatgtcagcttctcatttttccggtatctgcgacccgtcggcggcgtccacctgcgaaatggccgttgaactggccgctcagatgaatgttaccattgaagacggcgccgccttcgccgcttacacgggcatggtttatgatacgggtttctttgcctatcaaaaaaccagcgcccgcagttttcgcgcggccattaccctgcttgagcttggggtaaacccgacgggagcttaccaggaattatgcgaaaatatggcgacaagggcgctgcttctgcaaaaaaaggcctttgccagccttgaaatacactgtaacgggcgggtcgcctcgcaggttttgcgtatggaggactttgcccagataggggccgtcaacgacgactctgacggctttgtaaacgtccccctcagggccagggagatcctcgtttcagtaatggtcaaggaaagccgcaagggaaaggttaaatgttctcttaggtctaaaggggatatagacgtttcgaaaatcgcgcatgactttggaggcggcggccatgttaacgcgtcgggtttcaatagcgatttaaacgtcgaccagacgctcgatctggccctgactaanattaccggatatttaggtaagaaatga

SEQ ID NO: 44196 - protein, 324 aa, Unknown
  Obtained from environmental sample
  DOMAIN (256)...(319): DHHA1 domain
  misc_feature (1)..(324): Xaa is any amino acid
MTDKLKAFLERHDLFILTTHDPADADGLGAQLVLACVLRELGKQYRIINSSPIPEQFKFMDRQGVIETLDIEKHNTLPEQAAVIMADTADLHNIGQMRDLVCRAKEVFIIDHHEIMSASHFSGICDPSAASTCEMAVELAAQMNVTIEDGAAFAAYTGMVYDTGFFAYQKTSARSFRAAITLLELGVNPTGAYQELCENMATRALLLQKKAFASLEIHCNGRVASQVLRMEDFAQIGAVNDDSDGFVNVPLRAREILVSVMVKESRKGKVKCSLRSKGDIDVSKIAHDFGGGGHVNASGFNSDLNVDQTLDLALTXITGYLGKK

SEQ ID NO: 44197 - DNA, 1026 bp, Unknown
  Obtained from environmental sample
  misc_feature (1)..(1026): n is a, c, g, or t
ttgaaccgtatccggcctgcgcccgtccgaataatcggattcaagcctgaatgttgtaacttcaatactgtgttttttgtaaagaactgtaactgtgccgtgttttatgcccgtagggataacctttccccttgcgcctttgacaatgtcggttacttcttccggcagcgcgtccgtagccaaatcccaatcgtgattttttttgcccatcagcatatcccgcactgcgccgcccacaagatacacctgtttcccgtaattgttaaaaatagcggcaatttctttcagtaccgggtcaatggcttttgtcaattgaaaatcctttatcaaaaaagtatactgtattcaattatttatttcatctttgatttttgtgttcagggagtttttttgttaggtatagtttttacaggcggagaggtcccgtcttccgggataatccgacgcttgctggacggcaaggaaatatttgtcatagcggcggactccgggctgattactgcggaagaatctgggtttaagcccgtttttgtaatcggcgacatggattcacttgacgatgactcaaggctttccgcctatccgcctgagcgcgttattcgctattcgcatgacaaagattataccgatacggaattggccttttcgcttgctttggaaaaaggctgtgatgatatttggttgataggcggcggaggcggcaggatagaccatctttttgccattcgctccctttttgaaagagagcgtttcccgcgtcgctggattacagacgcggaagatatttactgtattgactcaaagacaaagaaaaacgagttgtctttgaatcttgaaaaaggcgcggtagtttcagttttcccgctgaactccggcccatggaaagccgcaagcaaaggccttaaatggccgcttgacgctctcacttgggatcgcggcttcttcgggttaagcaacgtagcgacagaaggaaatttttcaataaaagccgaattaggtcggtttatggtgataacgccttcatag

SEQ ID NO: 44198 - protein, 341 aa, Unknown
  Obtained from environmental sample
  DOMAIN (138)...(258): Thiamin pyrophosphokinase, catalytic domain
  misc_feature (1)..(341): Xaa is any amino acid
MNRIRPAPVRIIGFKPECCNFNTVFFVKNCNCAVFYARRDNLSPCAFDNVGYFFRQRVRSQIPIVIFFAHQHIPHCAAHKIHLFPVIVKNSGNFFQYRVNGFCQLKILYQKSILYSIIYFIFDFCVQGVFLLGIVFTGGEVPSSGIIRRLLDGKEIFVIAADSGLITAEESGFKPVFVIGDMDSLDDDSRLSAYPPERVIRYSHDKDYTDTELAFSLALEKGCDDIWLIGGGGGRIDHLFAIRSLFERERFPRRWITDAEDIYCIDSKTKKNELSLNLEKGAVVSVFPLNSGPWKAASKGLKWPLDALTWDRGFFGLSNVATEGNFSIKAELGRFMVITPS

SEQ ID NO: 44199 - DNA, 981 bp, Unknown
  Obtained from environmental sample
  misc_feature (1)..(981): n is a, c, g, or t
ttgggatcgcggcttcttcgggttaagcaacgtagcgacagaaggaaatttttcaataaaagccgaattaggtcggtttatggtgataacgccttcataggaggaataatgtcagcaatattaatggatggaaaagcgcttggacaaaaaattcgcgaaggcgtaaaaataagagcctcggcggtaaaagcaaaaggaattacgccgtgtctcgccgtggtacttgtcggtgaagaccccgcaagcctttcctatgtcaattcaaaggaaaaagcgttagctgaagcgggaatggaaagccgcgatataaggcttccgggaaacacaagcgaggcggaacttctttctctgatagccgaacttaacaaagataaaaaaatacacggcattcttgttcagtcccctgtgcccaaacatataaacgaggaaaaagtgaatgaggcggtcgcccccgaaaaagacgtggattgctttcatcctgtttcagtggggaacttggcgctggacagacccggatttttaccatgtactccgcacggcgttcttgtgcttttaagagaatataaagtccccgtttccggcgcgaatgttgtaatagtgggaagatcaaacatagtcgggaaaccgctcgcgaatcttttaatacgccgcgaatacaacgcgacagtaaccatttgccacacgggaacaaaagaccttacaagccatactttgcgggcggacattttgatagcggcggcggggaaagcgggatttatcaaaactgaaatggtaaaagaaggagcaacagtgatcgatgtgggaataaaccgcgtgcccgattcatcagccgcaaaaggctaccgggtctgcggcgatgttgatcccgccgttgccgaaaaagccgcgtgctttacgcccgtccccggcggcgtcggtcccatgactatcgccatgcttttgcaaaatgtaatcgaagccgcggaaaggagtttatactga

SEQ ID NO: 44200 - protein, 326 aa, Unknown
  Obtained from environmental sample
  DOMAIN (40)...(156): Tetrahydrofolate dehydrogenase/cyclohydrolase, catalytic domain
  misc_feature (1)..(326): Xaa is any amino acid
MGSRLLRVKQRSDRRKFFNKSRIRSVYGDNAFIGGIMSAILMDGKALGQKIREGVKIRASAVKAKGITPCLAVVLVGEDPASLSYVNSKEKALAEAGMESRDIRLPGNTSEAELLSLIAELNKDKKIHGILVQSPVPKHINEEKVNEAVAPEKDVDCFHPVSVGNLALDRPGFLPCTPHGVLVLLREYKVPVSGANVVIVGRSNIVGKPLANLLIRREYNATVTICHTGTKDLTSHTLRADILIAAAGKAGFIKTEMVKEGATVIDVGINRVPDSSAAKGYRVCGDVDPAVAEKAACFTPVPGGVGPMTIAMLLQNVIEAAERSLY

SEQ ID NO: 44201 - DNA, 705 bp, Unknown
  Obtained from environmental sample
  misc_feature (1)..(705): n is a, c, g, or t
atgcttaaaccttctatctctggcggtaaaattttcgcctactctactcccgagtacataaaagacatgggaactcccgaacgttacgcgcaggttatgtccgatattgagaacggtattgtcaggcaaagaaatctgtcggaaaaacaaaaatgtatttttcttgacagggacggcactataaataaattcaataactttataacaaagccggaagattttgatcttattgacggcgcggcggaagcgataaaaagaattaacagtcttggttaccttgccattgttatcacaaaccagcctgtaatagcccgcggcgaagttgattttgaaacgcttgatttaatccacatgaaaatggaaaccgatttaggcaaacacggcgcgtatatcgatgatcttttttactgtccacatcacccggacaaaggatttccgggagaacgtcccgaatacaagataaactgcgattgcagaaaaccaaaaccgggattaatttttaaagcggcggaaaaatataacatcgatctttttcaatcatatatggtaggcgatgatatacgcgatgttaacgccggaaaaaacgccggttgtattccaatattactgacaaacgatatacaaattgaaaattcaaataatttaagaacattcgctaatttgttggattttacggaaaagtttttatatcaggaggatttatga

SEQ ID NO: 44202 - protein, 234 aa, Unknown
  Obtained from environmental sample
  misc_feature (1)..(234): Xaa is any amino acid
MLKPSISGGKIFAYSTPEYIKDMGTPERYAQVMSDIENGIVRQRNLSEKQKCIFLDRDGTINKFNNFITKPEDFDLIDGAAEAIKRINSLGYLAIVITNQPVIARGEVDFETLDLIHMKMETDLGKHGAYIDDLFYCPHHPDKGFPGERPEYKINCDCRKPKPGLIFKAAEKYNIDLFQSYMVGDDIRDVNAGKNAGCIPILLTNDIQIENSNNLRTFANLLDFTEKFLYQEDL

SEQ ID NO: 44203 - DNA, 678 bp, Unknown
  Obtained from environmental sample
  misc_feature (1)..(678): n is a, c, g, or t
ttgtttgtgtcagatgctggagaatcattttttttaatgaaagttgttataatggcgggcggaaaagggactcgcgtatcttcaatagcgaacgacattcccaagccgatgatcccaatttgcggtaaaccgatacttgaacatcaaattgagtgccttaaaaaaaacggtttaactgatattatcataagtgttggacatctcggccggaatataaaggattattttgacgacggcagacgttttggatgcgctatttcttactataccgaaaccgaaccgcttggaaccgcgggggtgttatataaaataaaaaatctttcagatgattttattctgttaaacggcgacattatttttgatattgatttttcgcgtatgattaatttccatcgtgaaaaaaaagcctatgtttcgcttgcggttcatcccaacagccacccatacgacagcgcggttattttcactaacgatgataatcaggtaacgcgctggcttaataaagaagacgaacgtacatggtacaaaaatcaggtaaatgccggaattcatatcctgtctacagaatttttaaaaagctgtccgcagtcaaaagaaaagattgacctgaccgcgatatgcttaaaccttctatctctggcggtaaaattttcgcctactctactcccgagtacataa

SEQ ID NO: 44204 - protein, 225 aa, Unknown
  Obtained from environmental sample
  DOMAIN (14)...(225): Nucleotidyl transferase
  misc_feature (1)..(225): Xaa is any amino acid
MFVSDAGESFFLMKVVIMAGGKGTRVSSIANDIPKPMIPICGKPILEHQIECLKKNGLTDIIISVGHLGRNIKDYFDDGRRFGCAISYYTETEPLGTAGVLYKIKNLSDDFILLNGDIIFDIDFSRMINFHREKKAYVSLAVHPNSHPYDSAVIFTNDDNQVTRWLNKEDERTWYKNQVNAGIHILSTEFLKSCPQSKEKIDLTAICLNLLSLAVKFSPTLLPST

SEQ ID NO: 44205 - DNA, 300 bp, Unknown
  Obtained from environmental sample
  misc_feature (1)..(300): n is a, c, g, or t
gtgataaacgatatgacggtaatatcactttgcgcagcaagttacggttacggaaaagaaacagacgtgttacttgcaatatccacttccggaaactcaaaaaatgtgctgtatgcggcggctgtcgcaaaagcgaaaaaacttaaaattatcgcccttttaggcggaacgggcggagcgcttaaaaaagccgcggatgtaagtatcattgtaccggaaacagaaacttacaaagtacaagaattgcatctgcctgtatatcattgtttgtgtcagatgctggagaatcattttttttaa

SEQ ID NO: 44206 - protein, 99 aa, Unknown
  Obtained from environmental sample
  SIGNAL (1)...(18)
  misc_feature (1)..(99): Xaa is any amino acid
MINDMTVISLCAASYGYGKETDVLLAISTSGNSKNVLYAAAVAKAKKLKIIALLGGTGGALKKAADVSIIVPETETYKVQELHLPVYHCLCQMLENHFF

SEQ ID NO: 44207 - DNA, 816 bp, Unknown
  Obtained from environmental sample
  misc_feature (1)..(816): n is a, c, g, or t
atggctaaagtaactaatgaagatcgtaacctgtattctgaaaagattaagccttataaagccatgattcagtcccttctcaaacgcgaagaagaggttttattggaaataagaaaggacagccggaaagcggcgctaaaacgccttgccctggtggaagatatgctgtctttggttgccaattttatgataatcagcggtatttcgcagtccatgctgaaactacgcagcgaggaagctctaaatgacggcaggaaatccctttacaaagctgtaatttactttgaagaggttgtaagcccgctggtggacgcgccattttcggattatgaggaccgtcttgaggaaattagcgatatagacgcccaaaaacgctataacctgataaggaaaacgggacttgccttgcagctccttgaaactacctatggagacaatacaaaatggagatgggcctttgttgagcttgaaggccggtttgccgctgtcgccaaaaatattatgaatttaaaaaccgccgtggcaaataccgatccgagttcaccggactatgagcccacaatgtatcaccttaggctgataaaaaaactgcttatgcaggcagccgaccgttaccgtgaaaaatacgaattatcaaccaaccggaatgatgattttaaaatgggaatacattttctcaatgccctgcgccgcattcacgctcttcttggggaacggcctgacgctgaaatggtcaagaaaaaggcggaaatttggtcttctaaactggaaacagatcaaaagaagaaggaagacacggctagcaggaaagtttaa

SEQ ID NO: 44208 - protein, 271 aa, Unknown
  Obtained from environmental sample
  misc_feature (1)..(271): Xaa is any amino acid
MAKVTNEDRNLYSEKIKPYKAMIQSLLKREEEVLLEIRKDSRKAALKRLALVEDMLSLVANFMIISGISQSMLKLRSEEALNDGRKSLYKAVIYFEEVVSPLVDAPFSDYEDRLEEISDIDAQKRYNLIRKTGLALQLLETTYGDNTKWRWAFVELEGRFAAVAKNIMNLKTAVANTDPSSPDYEPTMYHLRLIKKLLMQAADRYREKYELSTNRNDDFKMGIHFLNALRRIHALLGERPDAEMVKKKAEIWSSKLETDQKKKEDTASRKV

SEQ ID NO: 44209 - DNA, 621 bp, Unknown
  Obtained from environmental sample
  misc_feature (1)..(621): n is a, c, g, or t
atggaatacagggattctttcccgctgggaaatgcccaggcggtttttgcagcaggcgtaaagccaaaaaccagggaggggggaacaggccttgtctgcggcccttacggcgcggatgatgtggaatttttgatttccgccaattcaggagagccgctaaaggagctggcccggatcgcgtcaggaggggagttatcccgtgtgatgctggctatcaagaccatattgctgaattccgactcagatgccgccggcaccggggccgaggtactgattttcgatgaagttgacaccggaattggcggagaagtagctctctctgtcggagagtaccttgcgcggattgggaaaagcaggcaaattttttgcgttactcatttggccagcatcgcggttcgtgccgataatcatctgaaggtagaaaaaaaggtggtaagctcaggcggcgtcggcggtgccgtaagcgattcaggcgaaagaaccgtgacagaagtttcgcagcttaaaggtttgaccagacggcaggagatagcccggatgcttgcaggcgattcaggggaggtggctcttgcccatgcggatgaattactggcaaaatacagtgtggtgaaaaatggctaa

SEQ ID NO: 44210 - protein, 206 aa, Unknown
  Obtained from environmental sample
  misc_feature (1)..(206): Xaa is any amino acid
MEYRDSFPLGNAQAVFAAGVKPKTREGGTGLVCGPYGADDVEFLISANSGEPLKELARIASGGELSRVMLAIKTILLNSDSDAAGTGAEVLIFDEVDTGIGGEVALSVGEYLARIGKSRQIFCVTHLASIAVRADNHLKVEKKVVSSGGVGGAVSDSGERTVTEVSQLKGLTRRQEIARMLAGDSGEVALAHADELLAKYSVVKNG

SEQ ID NO: 44211 - DNA, 936 bp, Unknown
  Obtained from environmental sample
  misc_feature (1)..(936): n is a, c, g, or t
atggcggatcccggattttggggtttctttttgatctccacggccagcatacccacgaatcgncttttgagaaaggaaacccaccgtgtttaccttgataggttttccggcctggaagacgaagccgcagcctttggccgggtgtttacggagctggcggaaaagcgcaagacccttgaatcgctgaaccgttccgaaaaggaaagggggcagcggcttgagctgttaaattacgctattgaggaaattacaaaagccgctcccaaaaacggggagataaaagagctggaaaccgaaacccagcgccttgcggattttgaaaagctaagccttcatgtgatagctgtttcttcttcgctttttgaagatgaggtttccctcttaagccttgggcggcgccttagggcttcgcttgagaacgctacctccattgacagctcgctttcaccgatgttaaagcggctggaagatatttactacgaggccgaagatttggccggcgaattcaggaattaccgcgaccgcctgacctacgatccggcgaagcttgaagaagctgaagaaaggcttgccctgctttacaaactgaaaaaaaagtatcgccctgccgggcagcaggaatcaggcggcgcagattcggatgagggtggcatacttgcctacaaagcggaagccgaggcggaaatagaggcgctttccggagcgggggaaaaccaggataaactaaaggccgaaatcggccgccttgaaaaagacatagcctcaaaggctgccgctcttagcgctaagcgaagcgaaggggcaaagcgcctgggcgatggaatacagggattctttcccgctgggaaatgcccaggcggtttttgcagcaggcgtaaagccaaaaaccagggaggggggaacaggccttgtctgcggcccttacggcgcggatga

SEQ ID NO: 44212 - protein, 311 aa, Unknown
  Obtained from environmental sample
  misc_feature (1)..(311): Xaa is any amino acid
MADPGFWGFFLISTASIPTNRLLRKETHRVYLDRFSGLEDEAAAFGRVFTELAEKRKTLESLNRSEKERGQRLELLNYAIEEITKAAPKNGEIKELETETQRLADFEKLSLHVIAVSSSLFEDEVSLLSLGRRLRASLENATSIDSSLSPMLKRLEDIYYEAEDLAGEFRNYRDRLTYDPAKLEEAEERLALLYKLKKKYRPAGQQESGGADSDEGGILAYKAEAEAEIEALSGAGENQDKLKAEIGRLEKDIASKAAALSAKRSEGAKRLGDGIQGFFPAGKCPGGFCSRRKAKNQGGGNRPCLRPLRRG

SEQ ID NO: 44213 - DNA, 450 bp, Unknown
  Obtained from environmental sample
  misc_feature (1)..(450): n is a, c, g, or t
atgggaaccggtactgaagatataattaagaaatgcaagaaagaaggtttaaaagcccccgaatttattcaagaagaaaatttttgcgtaattttatggcgaaatgagcaagataacaataacgagcaaatatacttcaaatacccatcaagcaccgtaccagctaccgtaccagctaccgtaccagctaccgagcaagctaccgagcaagctaccgagcaagctaccgagcaagtaaaaaatttgttaaaagctttgattggagatatggacagaaaagaattacaggaaaaactaaaattaactcatagagaaaactttagagcgaattatttacaacccgcaatagagcaaggcttcatatcaatgaaatatcccgaaagcccaaatcacccaaaacagcggtattcattaacgcaaaagggcaagaaattaattaagaaaaaatga

SEQ ID NO: 44214 - protein, 149 aa, Unknown
  Obtained from environmental sample
  misc_feature (1)..(149): Xaa is any amino acid
MGTGTEDIIKKCKKEGLKAPEFIQEENFCVILWRNEQDNNNEQIYFKYPSSTVPATVPATVPATEQATEQATEQATEQVKNLLKALIGDMDRKELQEKLKLTHRENFRANYLQPAIEQGFISMKYPESPNHPKQRYSLTQKGKKLIKKK

SEQ ID NO: 44215 - DNA, 687 bp, Unknown
  Obtained from environmental sample
  misc_feature (1)..(687): n is a, c, g, or t
atgatcgtaaccataaaagacctctggaaaatctaccccatgggcggccttgaagttcaagctcttaaaggcataaaccttgaaatttccgaaggcgattttgtcgccgtagccggcccttccggttccggaaaaaccacgctaatgaacattataggcttaatcgacagttttaccaggggcagccttacaattaacaatctagaaattaattcccaaaaacgaagggaacttgcccgtcttcgccgcgaccttttaggttttattttccagtcctttaacctcctgcctgtgttaaatgtttttgaaaacgttgaacttccgcttattatctccggcaaaggcgggactaaggcgcagaggcgggaaagggtaaattatttgctggaagaagtcgggcttgcggacagaagccgccatattcctgcggaactttccggcggtcagcagcagcgcgtcgctatcgcgcgggcgctggttacaagtcccagaatcgttatcgcagacgagccaactgcgaaccttgattcgggaacaggcgaaaaagttttaagccttatgaagcagataaaccgcgatgaaaaaaccaccttcatcttttccacgcatgaccctgaaatttggaaaatggcggatcatgttatcttcttgcaggacggccttattaaatcggagcaaaggcagtaa

SEQ ID NO: 44216 - protein, 228 aa, Unknown
  Obtained from environmental sample
  DOMAIN (32)...(220): ABC transporter
  misc_feature (1)..(228): Xaa is any amino acid
MIVTIKDLWKIYPMGGLEVQALKGINLEISEGDFVAVAGPSGSGKTTLMNIIGLIDSFTRGSLTINNLEINSQKRRELARLRRDLLGFIFQSFNLLPVLNVFENVELPLIISGKGGTKAQRRERVNYLLEEVGLADRSRHIPAELSGGQQQRVAIARALVTSPRIVIADEPTANLDSGTGEKVLSLMKQINRDEKTTFIFSTHDPEIWKMADHVIFLQDGLIKSEQRQ

SEQ ID NO: 44217 - DNA, 1362 bp, Unknown
  Obtained from environmental sample
  misc_feature (1)..(1362): n is a, c, g, or t
ttggagggctcatacgcgttaggcataatatgcgccgacaatcccgacgtgctcatcgccgtcaaaaaagacaatccgcttattatcggcgtgtccgagggcgaacatttcatcgcctctgacgtgcccgccgttttaaagcatacaaacaaggttttttatcttgacgacaaggaaattgccgtaatccggactgacggcgttcagttctttaatattgataaagaacccattgaaaagcggacggaaacgataacatggaatattgacagcgcggaaaagggcggctatccgcatttcatgcttaaagaaatcatggaacagccaaaaatcctccgcgaaaccattaactcggcggtaaaaaacggcggttataaaaacatttttgataatcttgacgttacgcgctttaacaagatcgtgataagcgcctgcggttcggcttacaacgctggagttgtcgccaggtatgtatttgaaaaactgtgccggtttccttcgattgaagtagaactggccagcgaatttcgctataaagacgccgttattgacgaaaaaacactggttattctgatcagccagtcgggtgaaaccgcggacaccatcgcggcaatgcgggaggcaaagcgcaaaggcgccattaccctgtcaatcgtaaatgttgtcggcagcgctatcgcaaaagaatccgattactgcctgtttacggcggcgggccccgagattgccgtggctacgacaaaagctttttcggcccagcttgtgctgctgtacattctggcaatatggttcgccgccaggtcgggtaaattatcgccccaggaggagcgcgagctgttagccgaaaatgaggccctgcccgaaaaaacggcgggtttgcttaaacaaacggacgctgttcaaatgtacgcttccacctgcgtcggatacaagagcatcttctttatcggcaggaatattgattacgccatcgcgctggaaggctcgcttaaactcaaggagatctcctatattcactccgaagcttacgcgggaggcgaactgaaacacggcactatttcgctggttgagcaggacacgctggttgtcgccatctccaactgcgccccgttatacggtaaaattatgagcaacgcggagcaggtgataagccgcggagcgaaagtgctgcttatcggcagctgcccggaagcgaaaccggacgataaactcttccatatcgttttgccggaaagccttgatttgttttccccttccctgtcggttattgttttacagcttttcagttattatgtggccgcgaataagggtttggatatagataaaccgagaaatttagcaaaaagcgttaccgttgaataa

SEQ ID NO: 44218 - protein, 453 aa, Unknown
  Obtained from environmental sample
  DOMAIN (304)...(439): SIS domain
  misc_feature (1)..(453): Xaa is any amino acid
MEGSYALGIICADNPDVLIAVKKDNPLIIGVSEGEHFIASDVPAVLKHTNKVFYLDDKEIAVIRTDGVQFFNIDKEPIEKRTETITWNIDSAEKGGYPHFMLKEIMEQPKILRETINSAVKNGGYKNIFDNLDVTRFNKIVISACGSAYNAGVVARYVFEKLCRFPSIEVELASEFRYKDAVIDEKTLVILISQSGETADTIAAMREAKRKGAITLSIVNVVGSAIAKESDYCLFTAAGPEIAVATTKAFSAQLVLLYILAIWFAARSGKLSPQEERELLAENEALPEKTAGLLKQTDAVQMYASTCVGYKSIFFIGRNIDYAIALEGSLKLKEISYIHSEAYAGGELKHGTISLVEQDTLVVAISNCAPLYGKIMSNAEQVISRGAKVLLIGSCPEAKPDDKLFHIVLPESLDLFSPSLSVIVLQLFSYYVAANKGLDIDKPRNLAKSVTVE

SEQ ID NO: 44219 - DNA, 306 bp, Unknown
  Obtained from environmental sample
  misc_feature (1)..(306): n is a, c, g, or t
atggaaaacgctttgctcgtttcagactccggaaaagataccgctttatttaccacttttttaaaagccgcttcctttcatcaagttattgtttcgcagtcatgtgacgacgctcgcaagcttatacagaaacaggatttcgatttaattgttgtcaactcgccgctttcggatgaatccggcgatagcttttcccggtatgccgccgcccaaggcgtatcccaggtgatcctcctggtaaaaagcgattcttttaattcggtatccgccgctgtgaggcggacggcgtctgctcggccgatctga

SEQ ID NO: 44220 - protein, 101 aa, Unknown
  Obtained from environmental sample
  misc_feature (1)..(101): Xaa is any amino acid
MENALLVSDSGKDTALFTTFLKAASFHQVIVSQSCDDARKLIQKQDFDLIVVNSPLSDESGDSFSRYAAAQGVSQVILLVKSDSFNSVSAAVRRTASARPI

SEQ ID NO: 44221 - DNA, 993 bp, Unknown
  Obtained from environmental sample
  misc_feature (1)..(993): n is a, c, g, or t
ttgccgaacgggctttcgagaatagggaaaaaagtaatggtcgcgctgagggagccatccctggggccggtctttggcgtaaagggcggcgcggccggcggaggctgggcgcagattatcccaatggaggacatcaacttacatttcaccggcgacttccatgccattggcgcggcaaacaatcttcttgccgcgttgatagacaaccacatttatcagggcaacagcctcaacattgatccccgtaaaattacctggaggagatgtgtggacatgaacgaccgccagctccgctttatcgttgacggtctgggcggaaaggcaaacggcgttgcccgcgaggacggttatgatataaccgtggcgtctgaaattatggcgattctgtgcctttcatcgggcattgacgaccttaaggcgcggttggggcggatcattgtgggctacacttatggcaagcaaagcgacggaagcgaaaagcccgtcacggcggctcagcttaacgcgcagggagcgatggcggcactgctcaaggacgcgctaaagccgaacctggtacaaactctggaaggtacgccggcttttgtccacggcggcccctttgcaaatatcgcccacggctgcaattccgtaatggcgaccaggatggcgctgcagtgcgcggattatgttgttaccgaagcgggctttggcgcggacttgggcgcggaaaaatttcttgatataaaatgccgcatgggcgggtttaaaccctcagctgtcatcatcgtagccactgtccgtgcgctcaagtcccacggcggcgttaaaaaacaggatctggaaaaggaaaaccttgccgcattggaagcgggactgccgaatctgcttcagcatatcgagaacatcaccggggtataccagctgccggctgtagttgcgattacgctttccccaaagacacaaaggccgaactcgatctggttgaggcaaagtgcagggccttgggcgtaa

SEQ ID NO: 44222 - protein, 330 aa, Unknown
  Obtained from environmental sample
  DOMAIN (1)...(329): Formate--tetrahydrofolate ligase
  misc_feature (1)..(330): Xaa is any amino acid
MPNGLSRIGKKVMVALREPSLGPVFGVKGGAAGGGWAQIIPMEDINLHFTGDFHAIGAANNLLAALIDNHIYQGNSLNIDPRKITWRRCVDMNDRQLRFIVDGLGGKANGVAREDGYDITVASEIMAILCLSSGIDDLKARLGRIIVGYTYGKQSDGSEKPVTAAQLNAQGAMAALLKDALKPNLVQTLEGTPAFVHGGPFANIAHGCNSVMATRMALQCADYVVTEAGFGADLGAEKFLDIKCRMGGFKPSAVIIVATVRALKSHGGVKKQDLEKENLAALEAGLPNLLQHIENITGVYQLPAVVAITLSPKTQRPNSIWLRQSAGPWA

SEQ ID NO: 44223 - DNA, 474 bp, Unknown
  Obtained from environmental sample
  misc_feature (1)..(474): n is a, c, g, or t
ttgggcgtaaacgtcgccctttccgaagtttgggcaaaaggcggagaaggcggagaacagcttgcccgtgaagttgtgcggctttgcgaacagcctaacagttttgaatttgtctatgatgttaatcgacccgtaagagaaaagattgaggctattgcccggaagatctaccgcgctgataacgttacgattcttcctaacgcgcaaaaacaaattgagcagattgagaagctaggtctggacaaagttcctgtctgcatggcaaaaacccaatacagcttctccgatgatcctttgctgttgggcgcgccgaaaggctggacgcttaccgtgcggaatattaaaatttccgccggcgcgggcttcatcgtcgccctcaccggcgaaataatgaccatgcccggcctgcccccggttcccgccgcggaaaaaatagacgtggacaacagcgggaaaatttcaggattattctga

SEQ ID NO: 44224 - protein, 157 aa, Unknown
  Obtained from environmental sample
  misc_feature (1)..(157): Xaa is any amino acid
MGVNVALSEVWAKGGEGGEQLAREVVRLCEQPNSFEFVYDVNRPVREKIEAIARKIYRADNVTILPNAQKQIEQIEKLGLDKVPVCMAKTQYSFSDDPLLLGAPKGWTLTVRNIKISAGAGFIVALTGEIMTMPGLPPVPAAEKIDVDNSGKISGLF

SEQ ID NO: 44225 - DNA, 588 bp, Unknown
  Obtained from environmental sample
  misc_feature (1)..(588): n is a, c, g, or t
atgaacataactacccgcctgctttacggcaacagcgtctcccaaaacacgcctccgggacaatccgccggatcgacggtcaagctgaccggaacgcacgcaggcaaaccatccgcctttgcgcttgatagcgatgcgttaagcaagcatactatgctgatcggcgggacaggctgcggcaaaaccaccttgttctatcacttcgtatcgcagataaaacgcagcatgaccaaagacgatgttatgataatatttgacagcaaaggggactttcattccaagttttacaataaatcgaacgaccttgttatcggtaactccaaacagtattcagccgattcggagcattggaacatctacaaagaaatccttgccgatggctgggaagaccgcgactttttaatcaatacccaggaaatttgcaagtcattcttcgaggagcgcactaagagcttatccgggaataagtcctggatgaaccggaatgatctgtcgccaaacgataatggcacaggcaaattgcagcaacgccagataattcacgtcttttttctcataccggatcaaaagctttttaaaacggtttag

SEQ ID NO: 44226 - protein, 195 aa, Unknown
  Obtained from environmental sample
  misc_feature (1)..(195): Xaa is any amino acid
MNITTRLLYGNSVSQNTPPGQSAGSTVKLTGTHAGKPSAFALDSDALSKHTMLIGGTGCGKTTLFYHFVSQIKRSMTKDDVMIIFDSKGDFHSKFYNKSNDLVIGNSKQYSADSEHWNIYKEILADGWEDRDFLINTQEICKSFFEERTKSLSGNKSWMNRNDLSPNDNGTGKLQQRQIIHVFFLIPDQKLFKTV

SEQ ID NO: 44227 - DNA, 411 bp, Unknown
  Obtained from environmental sample
  misc_feature (1)..(411): n is a, c, g, or t
gtggtcgagtcacacggattaccggtaggtataatcgtcagcggagccaacacacatgacataaaactgctggaagggacgctgcaatctattataaccgcccatcctgaggggagcaacatctgtcttgatgccggatatgtcggggcgcgaacgctggtagaagaaatggggtatgtggcgcatattcgcggtcggggggaagagaagcaggaaaaggaacgggagccagagttcaaagcgcggcggtgggtagttgaggtgtgccattcctggctaaaccgttttaaaaagcttttgatccggtatgagaaaaaagacgtgaattatctggcgttgctgcaatttgcctgtgccattatcgtttggcgacagatcattccggttcatccaggacttattcccggataa

SEQ ID NO: 44228 - protein, 136 aa, Unknown
  Obtained from environmental sample
  misc_feature (1)..(136): Xaa is any amino acid
MVESHGLPVGIIVSGANTHDIKLLEGTLQSIITAHPEGSNICLDAGYVGARTLVEEMGYVAHIRGRGEEKQEKEREPEFKARRWVVEVCHSWLNRFKKLLIRYEKKDVNYLALLQFACAIIVWRQIIPVHPGLIPG

SEQ ID NO: 44229 - DNA, 342 bp, Unknown
  Obtained from environmental sample
  misc_feature (1)..(342): n is a, c, g, or t
ttggaaggaatctttttcgtgttgcggaccggcatacagtggagggcattaccaaaagaatatggggcggcaagcagcgtccatgaatatttcagcaaatgggcgcaggcaggattcttcatgcggctatggcaggaagggctgttgagctatgacctgcttcacggcctcggctgggaatggcaaagcgcggacggctgcatggtaaaagcgcccttggcccgggaatcggcgggaaggaaccctaccgatcggggaaaaaaaagggacgaaacgcagccttgtggtcgagtcacacggattaccggtaggtataatcgtcagcggagccaacacacatga

SEQ ID NO: 44230 - protein, 113 aa, Unknown
  Obtained from environmental sample
  misc_feature (1)..(113): Xaa is any amino acid
MEGIFFVLRTGIQWRALPKEYGAASSVHEYFSKWAQAGFFMRLWQEGLLSYDLLHGLGWEWQSADGCMVKAPLARESAGRNPTDRGKKRDETQPCGRVTRITGRYNRQRSQHT

SEQ ID NO: 44231 - DNA, 360 bp, Unknown
  Obtained from environmental sample
  misc_feature (1)..(360): n is a, c, g, or t
ttgcgagaataccgtcggtatggacggctggtttatcttggctgggctctgcgccgccttggccgctggaaagacggcgccgcggcctttactaaagccgttgaacttgacggatcggtcagcgacgtccgcaacgagcttgccatctgcctgatggaatgcggcgacctcaaaggcgcccgccgcgaactggaagccgccctgcgccttgatcccgaaaacataaaaatcatctcaaacctcggcgtgcttgccgtcaaaagcggcaacgccgttgaagccgccgcctttttccgcgccgtccacgagcttgaccccgacgatgagatagccaatcaatacttggggaccggggactag

SEQ ID NO: 44232 - protein, 119 aa, Unknown
  Obtained from environmental sample
  DOMAIN (41)...(74): Tetratricopeptide repeat
  misc_feature (1)..(119): Xaa is any amino acid
MREYRRYGRLVYLGWALRRLGRWKDGAAAFTKAVELDGSVSDVRNELAICLMECGDLKGARRELEAALRLDPENIKIISNLGVLAVKSGNAVEAAAFFRAVHELDPDDEIANQYLGTGD

SEQ ID NO: 44233 - DNA, 1404 bp, Unknown
  Obtained from environmental sample
  misc_feature (1)..(1404): n is a, c, g, or t
ttgggtagctcaagcaacataactttaaatcttgcaaaagacaagaccatgtatcttgcccgccagcgcgcccagtactgggacggccgcttgaacggctatataagcactttacaagccctgtcgaatctttttaacttttatgaaaatatcccggtgggagatcggcgccagcagtttgaacataatttagaaggtatttttgaggatatgcccgattttgtacggcttgctaccatctggaagccggacgccattgacggcatggacagccgtaatataggcagaccgggctcaacagaaacggggcagttcgcttataccctgtcaagggaaaccgggcagataatggtactggccagcaccatcattccggagacaatagccatattgaacagttccagcggcagagtagtcaatatgagcgaccccgccccctttaagaatcatggaaaagatacttatgccgtcagaatcaccgttcccattatcaataagcggctcaatgacgtggtcggagccgtaatcgcccagttggatattggcctaatacaaccaactgtggaaaacactctcaaaaccagccatgaagttagcagcgcggttctttattccaacaacgggtttattttggcgaattacatgccggagtttataggaaagcaaattgacgcggaaacacaatacggcaaacatttagaagacgtcaaaacagccattaaaaactcgaaagaatggctgggggaagagtttgaccccggaatacatagcaagatggtaatggcaatagccactattcccatagggtcttctccgacaacatggtcgataatgatcggctcatccgaagattacatcatgcaggatgtcaacagaatgaccgtatttaccattattctggcggtggtggcgctcattgcggctgttataattgtttattttgtcataagcggcgttaccaaaccaatcgtcatggtaaccgaaagccttaaggatatagccgaaggcgagggcgacctgaccaaaagactgactattcataccaaggacgaaatcggcgaactctccaggtattttaaccaaactatggggtctatcaccggtcttattaaaagaataaaatacaaagtcaacgcgctgaccaatacgggccatgaacttgaagcgaatatgggcaaaactgcccattcggtagacgatatttcgacgaattttgacggcatgaaaaccgagatgagcaggcaggatgaaagcgccaaggcggcggacaaggcggttacggcaatcaaagacaatattgccgatctgaacaggctgatagaagaacagtccgccagcattaataactcgtcttccgcggtcgaggaaatgaccgccaacattcattcggtaaccaaaccctga

SEQ ID NO: 44234 - protein, 467 aa, Unknown
  Obtained from environmental sample
  DOMAIN (297)...(368): HAMP domain
  misc_feature (1)..(467): Xaa is any amino acid
MGSSSNITLNLAKDKTMYLARQRAQYWDGRLNGYISTLQALSNLFNFYENIPVGDRRQQFEHNLEGIFEDMPDFVRLATIWKPDAIDGMDSRNIGRPGSTETGQFAYTLSRETGQIMVLASTIIPETIAILNSSSGRVVNMSDPAPFKNHGKDTYAVRITVPIINKRLNDVVGAVIAQLDIGLIQPTVENTLKTSHEVSSAVLYSNNGFILANYMPEFIGKQIDAETQYGKHLEDVKTAIKNSKEWLGEEFDPGIHSKMVMAIATIPIGSSPTTWSIMIGSSEDYIMQDVNRMTVFTIILAVVALIAAVIIVYFVISGVTKPIVMVTESLKDIAEGEGDLTKRLTIHTKDEIGELSRYFNQTMGSITGLIKRIKYKVNALTNTGHELEANMGKTAHSVDDISTNFDGMKTEMSRQDESAKAADKAVTAIKDNIADLNRLIEEQSASINNSSSAVEEMTANIHSVTKP

SEQ ID NO: 44235 - DNA, 1137 bp, Unknown
  Obtained from environmental sample
  misc_feature (1)..(1137): n is a, c, g, or t
gtggcattgaaccgcaggaatcaaaccgaaacaacacagaatgttttttcgccggtttatgtttaccggaatataaggcccgacgaccccgaatgtcagcgcggcgcccagattttcgacgccctggatttgatgcgcgactcaggcgcggtcagaatgctggacattgagcgttccatggatttccccaggattgatctggcctattacagggaaagcaggagataccccatcggaggttatgtcaccctgttttcaaaggaagacaaacagaagcccgcccttatcacgcggatagtgaagaaaagccttgccgaaggaagacctgtggttatcggcatgaatactccggattcgtttattgaagcgaaaaatgtttgggagcctacggaaaatcccggcagattttacggcggccacgccatgtgcgttgtgggttatgatgacgacagaggcgcctttgagattctcaacagttggggaaggaaatgggggaacggcggtttcatctgggttccctacaaagcctttgtagattttgtaatggaaagctacgagatgatagaaaatctcgcaatctacagcgacacagtaaaatacgagggtttcagccggatagagatacttggcaggggcgcgcccagacccgcggctcttgtcttgtctccggatggatattacaagactgccgaatcctttaccgagggaacacaattccgttttgtcgtgggcgccggtgaaagcgcctatgtatattcattcgcggtctccaggcccgcgcgtgacaacaatttttattcgcctgtcctgatgttccctcagaccggcatatcgccgttgctcaattaccgcgacagcgccgtggttctgcccggcgaggacaagagcctggcccttgacgcggaagcgggcatggaatatctgataacgctttactctaaacagcctctggacatacagacaattatgcggcgctttgcttcaaccaaaggcactctcggagaacgcctgacagcagccgcaggcaataatcctttgctctctccttcgtataacgccagagaagcggcctttaccgcagaatcaaatgatccccgcgccgttaccgctctggttgtagcgatagaacacaagtaa

SEQ ID NO: 44236 - protein, 378 aa, Unknown
  Obtained from environmental sample
  misc_feature (1)..(378): Xaa is any amino acid
MALNRRNQTETTQNVFSPVYVYRNIRPDDPECQRGAQIFDALDLMRDSGAVRMLDIERSMDFPRIDLAYYRESRRYPIGGYVTLFSKEDKQKPALITRIVKKSLAEGRPVVIGMNTPDSFIEAKNVWEPTENPGRFYGGHAMCVVGYDDDRGAFEILNSWGRKWGNGGFIWVPYKAFVDFVMESYEMIENLAIYSDTVKYEGFSRIEILGRGAPRPAALVLSPDGYYKTAESFTEGTQFRFVVGAGESAYVYSFAVSRPARDNNFYSPVLMFPQTGISPLLNYRDSAVVLPGEDKSLALDAEAGMEYLITLYSKQPLDIQTIMRRFASTKGTLGERLTAAAGNNPLLSPSYNAREAAFTAESNDPRAVTALVVAIEHK

SEQ ID NO: 44237 - DNA, 1497 bp, Unknown
  Obtained from environmental sample
  misc_feature (1)..(1497): n is a, c, g, or t
gtgctttacgaaaccgttacctctattggcagtctcgcaagcgataatccatttattgaagaaggcgtgattcttccttcccttgttcctgaggggacggggagcctttcggtttcgctttcttcttcgaggcttgccctgctgaaagaggcggtacgctacctcctagattacccatacggctgtctggaacaaagaaccgcccagctccttccgcttgtcgcctttgccgaccgccttgagacttttgaacttgacagtccggttaaaaatcccaaaaaggttatcgaggacgagctgtccttcctggcgaaaagccaactggcggacggctctttcccctactggcccggcgggcaagatgggaatcggtatgtgacgctcagggttgcccatattgcggcaatcgcaaagcaaaagggctatgccctgcctgatgcaatgaatattccggccctgaccaagtacattacggaaaacgatttttcctcgttagtattcaaagaagatcctttccttaagggctactccctctgggtacgcgccatgtacggtgcgcggattggctcagaaatttccgccttcttgcggcgtggggacgagctgggcatttcaggctggggtttcgcgggccttgccgccatggagctgggcttgagagaccttgccgtttccgcaagggacagggtaaggcgctttataagaccgggaacgcgcactctggatttgacagacacttacgagcggggcggcagtttctggggctacgattctgaccgttacgccctcgcgctgatgctcttcagttcgcttaattcccagggcgatgacatgataacgcgccttgccacatcccttattgagcggcagcgcaggggcgtatggaacaataccgcgtcttctttctgggccgcgctcgcctttggaatgttaggcgacacggaatcatccgaatggaaatcggctaacggaacgccgtttacggcgacgccccttaacgtgacaacgagtcttggcggggcggctcttttcaacgcagaatttaaaacatacggcggcgttccagtgtcgtataacgggcacttcacggaaaagcccttaatcgatcttcagcgcgacacccttctgcccctgcggattgagcgcacgggacccggcaggctctattacactgcgagcctccgctacggcattcccgtcgagctttccggcgcccgcgacgaggggcttggggtgtttgtcgaaacttttgattcggaaggcaaacccgtgaaaaacggcagactccaggcgggcaagacctataccaggcgcgtcaccgtttccagttcccgcgaccgcgcccatgtcgcgctgcgctcgcccatcccctcaggggctgaaattgtagacgccgtgtttgtcaccagctccacagtgcccccttccgcaaaaaacgaggaaggggatgtatacgactggcgttactacaagccggagccnnggtgcgtttcctga

SEQ ID NO: 44238 - protein, 498 aa, Unknown
  Obtained from environmental sample
  misc_feature (1)..(498): Xaa is any amino acid
MLYETVTSIGSLASDNPFIEEGVILPSLVPEGTGSLSVSLSSSRLALLKEAVRYLLDYPYGCLEQRTAQLLPLVAFADRLETFELDSPVKNPKKVIEDELSFLAKSQLADGSFPYWPGGQDGNRYVTLRVAHIAAIAKQKGYALPDAMNIPALTKYITENDFSSLVFKEDPFLKGYSLWVRAMYGARIGSEISAFLRRGDELGISGWGFAGLAAMELGLRDLAVSARDRVRRFIRPGTRTLDLTDTYERGGSFWGYDSDRYALALMLFSSLNSQGDDMITRLATSLIERQRRGVWNNTASSFWAALAFGMLGDTESSEWKSANGTPFTATPLNVTTSLGGAALFNAEFKTYGGVPVSYNGHFTEKPLIDLQRDTLLPLRIERTGPGRLYYTASLRYGIPVELSGARDEGLGVFVETFDSEGKPVKNGRLQAGKTYTRRVTVSSSRDRAHVALRSPIPSGAEIVDAVFVTSSTVPPSAKNEEGDVYDWRYYKPEPXCVS

SEQ ID NO: 44239 - DNA, 930 bp, Unknown
  Obtained from environmental sample
  misc_feature (1)..(930): n is a, c, g, or t
atggatcctttagagttccggtacctgaacgtatacagggaaggtagcaccacgcccaccggatgcccgccggacgttatagcgtttccgcaggcgatagataagctcaggcccatctataaagaagcgaaacaaagggccgaagccaaaaacgctaaaagtacggacataaaatacggcgtgggtatatcccttttggagtatggctgcggccttgacggtgcggactcttccgaagcgtgggtggaattgactgaaaacggggctgcggtgggcgtttcgtgggaagaccatggccagggcgccgatatgggcgcgttgacctttgcccatgaagggctgcggcccctcggcataaagccagagcagatccgacttgtgatgaacgacacgcaaataacgcctaacagcggcccggccggcggaagccgctcgaatgtcatgaccggaaacgccatacgcgttgcctgtgagaatttattggcggcgatgaaaaaagatggcgggtataagacatatcaggagatgaaagccgagaaccagccgctcaggtataaaggcgtctggacggctccaggtaccgcatgcagcgtggaaacaggccagggcagcccgttctccgtttacatgtacggcgtactgctggcagaggtagcggtggatacgctaaccggcaagacatcggtcgaaaaactcaccatcgtctcagactgcggcacgatcacgaacaagcttgtcattgagggccagttgtggggcggtctcgcgcagggcatcgggctggcattatcggaggactttgaggacaggaataagcacgtaacgttttcaaggcgggaataccatacgctttggatgtgccggacgagatggttattatccatcaggagacgccgcgtccgcacgggccgcacggcgcggcaggcgtag

SEQ ID NO: 44240 - protein, 309 aa, Unknown
  Obtained from environmental sample
  DOMAIN (1)...(290): Aldehyde oxidase and xanthine dehydrogenase, molybdopterin binding domain
  misc_feature (1)..(309): Xaa is any amino acid
MDPLEFRYLNVYREGSTTPTGCPPDVIAFPQAIDKLRPIYKEAKQRAEAKNAKSTDIKYGVGISLLEYGCGLDGADSSEAWVELTENGAAVGVSWEDHGQGADMGALTFAHEGLRPLGIKPEQIRLVMNDTQITPNSGPAGGSRSNVMTGNAIRVACENLLAAMKKDGGYKTYQEMKAENQPLRYKGVWTAPGTACSVETGQGSPFSVYMYGVLLAEVAVDTLTGKTSVEKLTIVSDCGTITNKLVIEGQLWGGLAQGIGLALSEDFEDRNKHVTFSRREYHTLWMCRTRWLLSIRRRRVRTGRTARQA

SEQ ID NO: 44241 - DNA, 333 bp, Unknown
  Obtained from environmental sample
  misc_feature (1)..(333): n is a, c, g, or t
atgaataaacgcctttttcaagaatgtgacgcgcaatgcctgagggacgaaccggcggcttgtactagccgctgtccggtgcatgtggacattacgtcgcttgctggcgagatagaaaaaggcgattataaaaacgcttataaaatcctggataaaaggctgccccttgcctctatcatcgcgatgatatgcgatcatccctgcgagagcgcctgtgtcagggatatgccgatccggatatccgaactggaaagagcggccgtcatgtacggaaaatcgccgaaaaaaaaactggtttcgcttcccaaaaagaaggggagcgccgcggtgtaa

SEQ ID NO: 44242 - protein, 110 aa, Unknown
  Obtained from environmental sample
  misc_feature (1)..(110): Xaa is any amino acid
MNKRLFQECDAQCLRDEPAACTSRCPVHVDITSLAGEIEKGDYKNAYKILDKRLPLASIIAMICDHPCESACVRDMPIRISELERAAVMYGKSPKKKLVSLPKKKGSAAV

SEQ ID NO: 44243 - DNA, 1749 bp, Unknown
  Obtained from environmental sample
  misc_feature (1)..(1749): n is a, c, g, or t
atgaagcgctacgagaagctggtagcgttgcttgagccttactccgccgcgtttaacgttcccgtggaaacagtgcccgtagtaccggctgaacctatagccgtccctgcgccggaacctgtctctgattccgaactcgaatcggcgaaatccgtttccgattctgccgccgagccgtcgtcagacgccgtcgccgctgaaatcgcggacactctctctgagcctgaatctgagtcaaaacccgagtcagagccgcctaaactctcaatgcccaaaattttgcccccggcgtttgatccgcgtgactacgctcgtatgctgatattgctgccgcccgacgagagcgtgagcagcaatatcgccgacaatctgcttcctaaatctatgaataatcaggcgaggatggatttggccgataggataacggagatattggggagcgaagaccgcggcatcgccgacgttaccgagttgcttataccctttacgatggccgtacgcgatactgtgaccgtcatggcgcttgacgcctccgagcggctttgggtgggcacggtatccggcgtgtggcggcacagcaacggcaggtggcgccgctataccgccgaggcggaagacgaggacggcgtcctgccgtccgaccgggtcaccgcggtggccgtttcccaaagcggcacagtggcggtcggtaccgacaacggtttggcgataatgaaggatttagagtggtacaagttgaccggcggggacgggttgcccgattcctacgtgacgtcccttgcgtacgtcggcgagaaactctatgtcggcacgaataaggggcttgctttaaaattaggcgacaacagcataacggtttttgatacgtcgtcgggtttgctctctctcgctgtcactgcgctctttgccgactcgaaagggcgtctgtggataggcggcgataacggtgtgacgatctactctcccggcgccaagacgtggacgcgttacaagtttcccgggtctacggtttactcgttcgccgagcagagcggaggcgttatttggataggcacgaacaaaggcgtggtcacgcacaaagcgggcaaggttgtgacgggtaaggacggtaaacaggttaatgttccggagtggaagacctatcattccaagaatgccctgaagaatgacaacgtgacctccatcacggcttgcggcaaggatatgtgggtggctaccgacggcgctatgcaccagtacgcccatgcggagaggcaggtgatgctcttctacgagcagatactgccggcgttcgggatgaccgatttgtggcacggctttccggctgtggtaatccctaccgaagattgggggacgctggccttctctgtgaactacatcaacatgggcgaaaacgaacagtacgatgagacggaggtctataccggaacgtctaagtcgtgggagggcgtgttcggcctctcatacggttttccggtgagggaggatttgtcgcttgggcttaacgccaagtacgtttacagcgtgttggattccagatcgggcggtaccgggcagactttcgcgattgacgccgccgtcctaaagagaaattttttggttgacaaacttgacattgggtttatgctccagaatatggggccgagcatctactacatgacgcctgaggcggccgatccggtaccgttttctttgaggctcggattggcgtaccggcctgtccgtaccccttccctcgtgccgatctga

SEQ ID NO: 44244 - protein, 582 aa, Unknown
  Obtained from environmental sample
  misc_feature (1)..(582): Xaa is any amino acid
MKRYEKLVALLEPYSAAFNVPVETVPVVPAEPIAVPAPEPVSDSELESAKSVSDSAAEPSSDAVAAEIADTLSEPESESKPESEPPKLSMPKILPPAFDPRDYARMLILLPPDESVSSNIADNLLPKSMNNQARMDLADRITEILGSEDRGIADVTELLIPFTMAVRDTVTVMALDASERLWVGTVSGVWRHSNGRWRRYTAEAEDEDGVLPSDRVTAVAVSQSGTVAVGTDNGLAIMKDLEWYKLTGGDGLPDSYVTSLAYVGEKLYVGTNKGLALKLGDNSITVFDTSSGLLSLAVTALFADSKGRLWIGGDNGVTIYSPGAKTWTRYKFPGSTVYSFAEQSGGVIWIGTNKGVVTHKAGKVVTGKDGKQVNVPEWKTYHSKNALKNDNVTSITACGKDMWVATDGAMHQYAHAERQVMLFYEQILPAFGMTDLWHGFPAVVIPTEDWGTLAFSVNYINMGENEQYDETEVYTGTSKSWEGVFGLSYGFPVREDLSLGLNAKYVYSVLDSRSGGTGQTFAIDAAVLKRNFLVDKLDIGFMLQNMGPSIYYMTPEAADPVPFSLRLGLAYRPVRTPSLVPI

SEQ ID NO: 44245 - DNA, 426 bp, Unknown
  Obtained from environmental sample
  misc_feature (1)..(426): n is a, c, g, or t
atgtcagaccaaatagtgcctatagaccaactccttcccaataaactgccgttggtggcgcttatgggcaggcctatttttccggggatttttacccccataatgataggaaaccccgttgacgtcaaagtgattgacgacgccgttgccggcgacgcgatgatcgggctggtgatgctgcaaaacgagaccgaaacgccctccattggggacctttataaagtaggaaccgcggcgaagatcgttaaaaaaatcaacctgcccgacggcggggtgaatatctttatctccacgctgaagcgtttcagggttaaaaagaccctccatgccagcaaccccattgtggcggcggtggagtacttgaatgaggaagaggacgacaccagcgaggtaaaggcccttacaagggcgctcattccgaaatga

SEQ ID NO: 44246 - protein, 141 aa, Unknown
  Obtained from environmental sample
  misc_feature (1)..(141): Xaa is any amino acid
MSDQIVPIDQLLPNKLPLVALMGRPIFPGIFTPIMIGNPVDVKVIDDAVAGDAMIGLVMLQNETETPSIGDLYKVGTAAKIVKKINLPDGGVNIFISTLKRFRVKKTLHASNPIVAAVEYLNEEEDDTSEVKALTRALIPK

SEQ ID NO: 44247 - DNA, 867 bp, Unknown
  Obtained from environmental sample
  misc_feature (1)..(867): n is a, c, g, or t
ttgtctttagggataggattaccaagacnaatatctgaaacaagcttcggctattctccatacgcgccaaattatgatggtgagtttgactggaataaatccagctttttatcttggcctgttcctttccgttacaggataaaatttacaagcggcatcagcatgaaatacggcaatctttcatgggatatcccgtattattccgattcttttgtagccagagactttacaaacagccgtgcggaaagtatggattggatgaatatgcttgaaaaaggagcggactttgaagaaaaatcatcggagggcgatttaggctcatatagttggagtatgtcaggaaacataaatccgtcatttaaagcactctccccttttatttccaacatttcaattcccagcatttcaacatcagtatcatttaataaattaaaagacaatgatgtgaccaatacggcttctccaaactattggttctacgcgccggataagtatacaatttacagtatttcaggttcagtttccggaaccccggtttccttaggcggcgtacaatcaaaaccggcggttaagaagtctgattctcaaacgggtgaagatccgtttaacggcatcggaatacccatatccccatgggcaacggatgacgctgacaaggaaaaaacaacatcgtcagaaattttagttccccccgtcctttctcaaacttttagcctgccggcggcaggaaatataaaattcaacattgattattcattatctcctacaacctcttcagaaatgcaatttatgacaggaggctggaaagataactactctggtattcttatgaagacgttgactggaataaacatcaatcaatactga

SEQ ID NO: 44248 - protein, 288 aa, Unknown
  Obtained from environmental sample
  misc_feature (1)..(288): Xaa is any amino acid
MSLGIGLPRXISETSFGYSPYAPNYDGEFDWNKSSFLSWPVPFRYRIKFTSGISMKYGNLSWDIPYYSDSFVARDFTNSRAESMDWMNMLEKGADFEEKSSEGDLGSYSWSMSGNINPSFKALSPFISNISIPSISTSVSFNKLKDNDVTNTASPNYWFYAPDKYTIYSISGSVSGTPVSLGGVQSKPAVKKSDSQTGEDPFNGIGIPISPWATDDADKEKTTSSEILVPPVLSQTFSLPAAGNIKFNIDYSLSPTTSSEMQFMTGGWKDNYSGILMKTLTGININQY

SEQ ID NO: 44249 - DNA, 1056 bp, Unknown
  Obtained from environmental sample
  misc_feature (1)..(1056): n is a, c, g, or t
atggaacaagcaatgaaaacgccggaagttcttttttccattaaagatttaaatgtgaagttcagcttgcggggccggcagttacacgctattcggaacatttcgctggatatatataaaggcgagagtctggcgattgtaggagaatcaggttctggaaaatccgtattaatgaaaaatctgataggccttttggacaagaacggatggattgattcaggttccataatgtatgacggtaaggatttggccaaatataaaactcacaaggactggcaggggcatcgcggcaagcacgtggcgatggtcatgcaagaccccatgaccagccttaacccgctaaagaccgtcggctggcagatttgcgaggccctgcgctggaaccaaaatatgcgcggcgctgaagcaaaagagaaagccattaacctgcttgcggatgtcgggataccggagcccgcgagaagatacaagcaataccctcacgaattttcaggaggcatgaggcaaagggtggttattgccatagcaatggcctgcaatccccgcctacttatatgcgacgagcctaccaccgccctggatgttaccattcaagctcaaatcctcaatctattgaagagcctgcgtgaaaaatacaatttaaccatggtatacattactcacgaccttggggtagtcgcgaatgtagccgaccgtatagcagtcatgtacgccgggcagatcgtggaatacggccttgtaaacgaaatctactatgacgcatggcacccgtatacctgggcactgctttcttcgcttccgcagctcggcgtcaagggcgaagagctttcgtccatcgagggtacgccgcccaacctgtttaacgcggtaaaaggcgacgcgtttgccccgcgcaacaagagggcgcttgccatagactttgtgaaagagccgcctttcttcgacatctccgagacccacaaggcaaagacatggtatcttgatccccgttcaccaaaaattgaacagccggaagctatccgccgtatgcgtgaaaaattaagggcaaaagggtaa

SEQ ID NO: 44250 - protein, 351 aa, Unknown
  Obtained from environmental sample
  DOMAIN (242)...(306): Oligopeptide/dipeptide transporter, C-terminal region
  misc_feature (1)..(351): Xaa is any amino acid
MEQAMKTPEVLFSIKDLNVKFSLRGRQLHAIRNISLDIYKGESLAIVGESGSGKSVLMKNLIGLLDKNGWIDSGSIMYDGKDLAKYKTHKDWQGHRGKHVAMVMQDPMTSLNPLKTVGWQICEALRWNQNMRGAEAKEKAINLLADVGIPEPARRYKQYPHEFSGGMRQRVVIAIAMACNPRLLICDEPTTALDVTIQAQILNLLKSLREKYNLTMVYITHDLGVVANVADRIAVMYAGQIVEYGLVNEIYYDAWHPYTWALLSSLPQLGVKGEELSSIEGTPPNLFNAVKGDAFAPRNKRALAIDFVKEPPFFDISETHKAKTWYLDPRSPKIEQPEAIRRMREKLRAKG

SEQ ID NO: 44251 - DNA, 567 bp, Unknown
  Obtained from environmental sample
  misc_feature (1)..(567): n is a, c, g, or t
atgaatcttaaaaaatatgaatactggtttatcgtaggaagccaagacctttacggagatgaaacgcttaaacaagtcgccgatcatgcccgtatcatgacggatgaattcaacaaggacacattgctttcaggcactgtagtattgaaaccaacggcgataacgccgcaggctatacgaagtctttttgaggaagcgaacgcatcaaacaactgcgccggtatcataacatggatgcatacattctcgccttcaaaaatgtggatacaggggcttgcgatcaaccgcaaaccgcttctgcatctccatactcaatttaatcgggatattccgtggtcttcaatcaatatggattttatgaacctgaaccaatcggcgcacggcgatcgtgagcacggttatattcatacaagaatgagacttccccgtaaagtagttgccggtttctggcaggataaagaaattcgccgccgaatggacgtatggatgagagccgccgccgcgagaaaagacggaatggattctaccgttatgcggttgggagaacatatgcgggagtggcggtaa

SEQ ID NO: 44252 - protein, 188 aa, Unknown
  Obtained from environmental sample
  DOMAIN (1)...(188): L-arabinose isomerase
  misc_feature (1)..(188): Xaa is any amino acid
MNLKKYEYWFIVGSQDLYGDETLKQVADHARIMTDEFNKDTLLSGTVVLKPTAITPQAIRSLFEEANASNNCAGIITWMHTFSPSKMWIQGLAINRKPLLHLHTQFNRDIPWSSINMDFMNLNQSAHGDREHGYIHTRMRLPRKVVAGFWQDKEIRRRMDVWMRAAAARKDGMDSTVMRLGEHMREWR

SEQ ID NO: 44253 - DNA, 1020 bp, Unknown
  Obtained from environmental sample
  misc_feature (1)..(1020): n is a, c, g, or t
atggatgagagccgccgccgcgagaaaagacggaatggattctaccgttatgcggttgggagaacatatgcgggagtggcggtaaccgaaggcgataaagtcgaagcccagataaggtttggctggcaggtaaacacctggggcataggcgaccttgccgcccgttacgcgaaaacaggcgaggaacgggcggaaaaactggtgaaagaatacgaggcgaaatacgagcttgcgcctgaatttgaattgagtggcaaggccataagcgcgatgtgtgatcaagcaaaaatagaaatcgcccttaaagaaatgcttgaagcggaacacgccggggcttttaccaccacttttcaagaccttcacggcctgccccagttgccgggccttgcctgccagaggctcatggaacagggctacggtttcggcgcggaaggggactggaaacagtctatgcttacccgggccgccaaagtcatggcctggggactgcccggcggcgtttcctttatggaagattacacctaccattttgagcctggcaaggaagccgcgcttggcgcccatatgcttgagatatgcccttccatcgcggagggtaagccccgcatcgaggttcatccgctgggaatcggcggcaaggcggatccggcgcgtatggtgtttgacgccgccccgggacctgcggtgctggcaacgctcatcgatcttggcagccgtttcagaataatagtcaatgaaattgagaccattaaaattgaaaataaaatgccgaaactgcccgttgcccgcgccctttggaagccgtatccgaatttaagcggcgccgccgaagcatggataatttccggcggtacgcaccattcggtatacagctccgcgcttacagcggaatatttccgcgattgggcggaaatgagcggcattgagtttgtgcttatcgaccgggatacaaaacccgcgtgtttgcaggatgaactgcgccgcaacgaagcttattggtctcatcagtttgttatgtaa

SEQ ID NO: 44254 - protein, 339 aa, Unknown
  Obtained from environmental sample
  DOMAIN (1)...(337): L-arabinose isomerase
  misc_feature (1)..(339): Xaa is any amino acid
MDESRRREKRRNGFYRYAVGRTYAGVAVTEGDKVEAQIRFGWQVNTWGIGDLAARYAKTGEERAEKLVKEYEAKYELAPEFELSGKAISAMCDQAKIEIALKEMLEAEHAGAFTTTFQDLHGLPQLPGLACQRLMEQGYGFGAEGDWKQSMLTRAAKVMAWGLPGGVSFMEDYTYHFEPGKEAALGAHMLEICPSIAEGKPRIEVHPLGIGGKADPARMVFDAAPGPAVLATLIDLGSRFRIIVNEIETIKIENKMPKLPVARALWKPYPNLSGAAEAWIISGGTHHSVYSSALTAEYFRDWAEMSGIEFVLIDRDTKPACLQDELRRNEAYWSHQFVM

SEQ ID NO: 44255 - DNA, 738 bp, Unknown
  Obtained from environmental sample
  misc_feature (1)..(738): n is a, c, g, or t
ttggtctcatcagtttgttatgtaaaaggattaactatggatgcatacanaacgttacgggaagaatcatacgaagcgaaccttganataaagaggcagggtcttgccatttacacatggggcaacgtttccgcttttgatccgatcaaaggtgtgtttgcgataaaaccgtccggggtggaatacgatgaattaacgcctaaaaagatagtgttagtcgatcttgaaggaaaggttattgacagcaaactaaaaccgtcttccgacacaaaaacccatcttgtcctgtaccgtgaatttaagggtatctgcggcgtaacgcatacgcactcgccttacgctatcgcttgggcgcagacaggaaaatcaatacctgttttcggaacaactcacgccgatcattgcgcttttgaaataccgtgtacaagttttataaatcagcaggatgtaaaaaatgattacgaactggaaacaggcaatttaattgttaatacttttaagaacggtaatttggattgttcgcagattacaatgacgctggttgccggacacggaccttttacttggggaaacagcgccgctcaatcggtataccacagcgttattctggaagaaatcagcaaaatggcgctgtttaccgtaacgattgacccaaacgcaaaacctctgcccgaacatattatccgtaaacattgggaacgcaaacatggagcgaacgcgtattacgggcagaaataa

SEQ ID NO: 44256 - protein, 245 aa, Unknown
  Obtained from environmental sample
  DOMAIN (21)...(231): Class II Aldolase and Adducin N-terminal domain
  misc_feature (1)..(245): Xaa is any amino acid
MVSSVCYVKGLTMDAYXTLREESYEANLXIKRQGLAIYTWGNVSAFDPIKGVFAIKPSGVEYDELTPKKIVLVDLEGKVIDSKLKPSSDTKTHLVLYREFKGICGVTHTHSPYAIAWAQTGKSIPVFGTTHADHCAFEIPCTSFINQQDVKNDYELETGNLIVNTFKNGNLDCSQITMTLVAGHGPFTWGNSAAQSVYHSVILEEISKMALFTVTIDPNAKPLPEHIIRKHWERKHGANAYYGQK

SEQ ID NO: 44257 - DNA, 1401 bp, Unknown
  Obtained from environmental sample
  misc_feature (1)..(1401): n is a, c, g, or t
gtgtggggcggaggttattatcctgacgattatttcttcgatgtttgcgatgaacttggtcttgtagtttggcaggattttatgtttgcctgcgctgtttacgatcttaatgaagaatttgatcagaatatcagagcggagttagctgacaatatcaaacgtatacggcatcatgcctgccttgggctttggtgcggcaataatgaaatggaatggtatgtggataaaatgcgctgggtaaatacgcttaaacagaaagccgattatatcaagatgtacgagtatattttcccgcaggttcttaaagagtatgatcccaataccttctactggcctgcaagcccctcgtccggcggcagttttgacgagccgaatgatcctgaccgcggggacgttcactattgggatgtatggcacggcgacaaacctttttcggaataccgtaagttcttcttccgttacgtgtcggaattcgggtttcagtcttttcccgccttaaaaacaatagaaagctttactctgcctgaagacagaaatatcttttcgtatgttatggaacgtcatcagaggaataattcagctaacggtaaaatcataaattatatgtaccagacttttttatatcccgaagattttgaaacgcttatttacgcttcacagcttttacaggcggaagcaattaagtacggagtagagcatttccgccgtaaccgcggaaggtgcatgggggcaatttactggcagcttaacgactgctggcctgtagcgtcatgggcttctatagactacttctttcgctggaaagcgctgcactattacgctaaacgtttttttcagccgttgatgatctcctgccatgaagaaggactgcttacccagaacccgaacgccaatcatcagccgcaggtaaaagccgctatcgaaaaaagtttccgtctttgtgtcgcgaacgaaacaaccgaagaaaaaaaacttaccgtgaaatgggaaatacgcgataaaaaagcgggtgctttgaaggaaaaaaccattcccgtgaaaattccggctctttcttccctgtggcttgacaaggtattggttcccgaaataaaaatcaacgatgaatatttaagttatcatctttacgacgggaaaacgcttgtttcggaaggaactgtaatattctctcttccgaagtatttccattgggaagatccgaaactgcgttacacgataaatggcgatacaattaccgtaaaagccgccgcttacgcaaagagcgtggaaattcaaaaccgcaatcaggacattgtgttatctgacaattattttgacatgaacgctggagaaaaaaaggttaaaattttaagcgggaagccgggtaaattaaaacttagaagcgtttgggatataaaatag

SEQ ID NO: 44258 - protein, 466 aa, Unknown
  Obtained from environmental sample
  misc_feature (1)..(466): Xaa is any amino acid
MWGGGYYPDDYFFDVCDELGLVVWQDFMFACAVYDLNEEFDQNIRAELADNIKRIRHHACLGLWCGNNEMEWYVDKMRWVNTLKQKADYIKMYEYIFPQVLKEYDPNTFYWPASPSSGGSFDEPNDPDRGDVHYWDVWHGDKPFSEYRKFFFRYVSEFGFQSFPALKTIESFTLPEDRNIFSYVMERHQRNNSANGKIINYMYQTFLYPEDFETLIYASQLLQAEAIKYGVEHFRRNRGRCMGAIYWQLNDCWPVASWASIDYFFRWKALHYYAKRFFQPLMISCHEEGLLTQNPNANHQPQVKAAIEKSFRLCVANETTEEKKLTVKWEIRDKKAGALKEKTIPVKIPALSSLWLDKVLVPEIKINDEYLSYHLYDGKTLVSEGTVIFSLPKYFHWEDPKLRYTINGDTITVKAAAYAKSVEIQNRNQDIVLSDNYFDMNAGEKKVKILSGKPGKLKLRSVWDIK

SEQ ID NO: 44259 - DNA, 432 bp, Unknown
  Obtained from environmental sample
  misc_feature (1)..(432): n is a, c, g, or t
ttgaccgatacgcttaactctttaaggcgttccatggaatccagtatctgctttccgcctacctcctgttcttccatcgcgttacggatattcaattcgtgctgtgagaccgttttaacgcccgagtcaattacctcaaagcgggaaagaacctcgttggaagagaccgtgatgctgtctatggaagcctttatcttcttcagcatcgtcgcggtggttttcgactgcccgcttgacgattcggcgagcttgcgaatctcgtcggcgactacggcaaacccttttcccgcttcccccgcgtgggccgcctcaattgccgcgttcattgacaggaggttcgtctggctggcgatattgtccattacggcgtttatttccaaaaggccttcggagtccttggcgatttcccttatcatctccgccaccgtttga

SEQ ID NO: 44260 - protein, 143 aa, Unknown
  Obtained from environmental sample
  misc_feature (1)..(143): Xaa is any amino acid
MTDTLNSLRRSMESSICFPPTSCSSIALRIFNSCCETVLTPESITSKRERTSLEETVMLSMEAFIFFSIVAVVFDCPLDDSASLRISSATTANPFPASPAWAASIAAFIDRRFVWLAILSITAFISKRPSESLAISLIISATV

SEQ ID NO: 44261 - DNA, 834 bp, Unknown
  Obtained from environmental sample
  misc_feature (1)..(834): n is a, c, g, or t
atgcgccttagcggtattatgcaaggtcaggaactggtgctggaagccgcccgccccgaaacaagcgagacaagaagcggacgcagcgtggcgatttccgaccgtgagcttacgcgcaccgccgaaattggaatcgttgaagacgttatgaactcggtaaagctgctgccgggtgtaggctacacgggaatgttcagcgcaatgccatcaatacgcggcggagatcccggcgatcttatggccgcgcttgatggtttctatgttgagcgtccctattactggatgggcagcatttcgatcttcgatccaaaaatggtttccagcgcgcggctttcccacggcgttttttccgcccgttatgggcacacaatttcaggcttgctggagataacatctaaatccccttccccgacagaaacagaacttgaagcggcaatcggcacgagcgctacaagccttaacctttccgttccgctttcaggcaagggcggcatattgttcatgggcaaggtaacatattgggaaacattaattttagcggctcaggggttaagccacataacagaaaacgaaactcttgatatggtcaactcagtatctaccgccccttatatcagaagcgccgccctgtcgatgaattaccgttttactccagatttggaatggcggttaaacgctttctttggcagcgacggtgtcggcgcggaatataaaaccgactataccagcaataccgatgacaatgttgaaggcgtaatgcaaatgaagccgattataataattatcagggctttcttatcacaggttttagcgcaagcccgacgcccaaaatag

SEQ ID NO: 44262 - protein, 277 aa, Unknown
  Obtained from environmental sample
  misc_feature (1)..(277): Xaa is any amino acid
MRLSGIMQGQELVLEAARPETSETRSGRSVAISDRELTRTAEIGIVEDVMNSVKLLPGVGYTGMFSAMPSIRGGDPGDLMAALDGFYVERPYYWMGSISIFDPKMVSSARLSHGVFSARYGHTISGLLEITSKSPSPTETELEAAIGTSATSLNLSVPLSGKGGILFMGKVTYWETLILAAQGLSHITENETLDMVNSVSTAPYIRSAALSMNYRFTPDLEWRLNAFFGSDGVGAEYKTDYTSNTDDNVEGVMQMKPIIIIIRAFLSQVLAQARRPK

SEQ ID NO: 44263 - DNA, 453 bp, Unknown
  Obtained from environmental sample
  misc_feature (1)..(453): n is a, c, g, or t
atggacgccgacggccagcactcccccgccgacatcccgcgcttcctcgccgaatcgaagcggaagcccgccgtcggcatctgcatcggggcgcgcgatatgcgcctgcggtctatgcctccggcccggattatatcaaaccgcctgacctcgctcatcctctccatcctcgtcgggcggcgcgtcgcggacagccagtgcgggtaccgcctgtactcggcggagttcgtaaaatccgtacaaattgaatacaaccgctttcaggcggagtcggaacttatacaaaaagccgccgataaacattttcctattagttttacgggtgtgcggacattatatttaaagggtggttcaagccacatatcgcacctattagacacgctgcgctggatcgcggcggtggggcgcgtgtggttccaattaacgtttacgcacggaaagcgtggtttttaa

SEQ ID NO: 44264 - protein, 150 aa, Unknown
  Obtained from environmental sample
  misc_feature (1)..(150): Xaa is any amino acid
MDADGQHSPADIPRFLAESKRKPAVGICIGARDMRLRSMPPARIISNRLTSLILSILVGRRVADSQCGYRLYSAEFVKSVQIEYNRFQAESELIQKAADKHFPISFTGVRTLYLKGGSSHISHLLDTLRWIAAVGRVWFQLTFTHGKRGF

SEQ ID NO: 44265 - DNA, 648 bp, Unknown
  Obtained from environmental sample
  misc_feature (1)..(648): n is a, c, g, or t
atgaatacctcgatgttggatccgaacctgtcaagcgaactccttatcggcaagctgcgcgccagcggcataaaggacgagcgaatactggaagcctttcggaaggttccgcggcatctatttgtcgagaaccccgttcaggcctatgacgacatagcgctatccatagggtacggccagactatcagccaaccgacgctggtggcgcagatgacggagcttttgaatctcggcaaagatcagaagatactcgaaataggcaccggctcgggtttccagacggcgatactggcgcagttttcgcggcgcgttttcacgatagagcgccacaaggagctcggcgacaaggcgcggctgcggttgcgggaaatgggctacgccaacgtcactttcaaggtgggcgacggcacgtgcggttgggtgcagtacagcccgttcgacagaatcatagtaacggcgggggcgccggtgacgcctgagtcgctatccaaccagctggcggtgggcggcataatggtcatccccaccggcgacagggcgatgcaggagctcatggtctacaccaaaacggaaaacggtctggagtcgcggtcggagggggcggtggtcttcgtgccgctcataggtcaacacggatggaaggaataa

SEQ ID NO: 44266 - protein, 215 aa, Unknown
  Obtained from environmental sample
  DOMAIN (10)...(212): Protein-L-isoaspartate(D-aspartate) O-methyltransferase (PCMT)
  misc_feature (1)..(215): Xaa is any amino acid
MNTSMLDPNLSSELLIGKLRASGIKDERILEAFRKVPRHLFVENPVQAYDDIALSIGYGQTISQPTLVAQMTELLNLGKDQKILEIGTGSGFQTAILAQFSRRVFTIERHKELGDKARLRLREMGYANVTFKVGDGTCGWVQYSPFDRIIVTAGAPVTPESLSNQLAVGGIMVIPTGDRAMQELMVYTKTENGLESRSEGAVVFVPLIGQHGWKE

SEQ ID NO: 44267 - DNA, 360 bp, Unknown
  Obtained from environmental sample
  misc_feature (1)..(360): n is a, c, g, or t
atgtttgtgtggattaaagagatattctccggtttcatagtcggaatagccaacatcatcccgggcgtgtccggcggtacgttgctctttctgctcggtctttacgagaggacgatcaacgcgataaacaacgtcaaacccggcgccatattgacgcttttgcgcggttcacgggggaagacgcgggtttccggtctccgccggcacacctttatggatgaggccaacgtgcttggcttcccatttttgttacctctggttatcggcgcaggtgcggccatactgctcctctccggccttaagaaatatctgttggaaaagcagttcccaaacaccgttcgctttcttcttaagggttga

SEQ ID NO: 44268 - protein, 119 aa, Unknown
  Obtained from environmental sample
  misc_feature (1)..(119): Xaa is any amino acid
MFVWIKEIFSGFIVGIANIIPGVSGGTLLFLLGLYERTINAINNVKPGAILTLLRGSRGKTRVSGLRRHTFMDEANVLGFPFLLPLVIGAGAAILLLSGLKKYLLEKQFPNTVRFLLKG

SEQ ID NO: 44269 - DNA, 798 bp, Unknown
  Obtained from environmental sample
  misc_feature (1)..(798): n is a, c, g, or t
atgatcaacggcatgatgaacatcgaggaaagaataagggaacttgaaggcaaaaccaaagagaaggaagaaattgccgaaaagaacaaacttattaaaaggctgttgggcattaagggcccttccaatgaactgcatgaggaagataaaactccaatgccaaagaaaaaaaccgcggaggaatatatggacgattacgcccaatacttccccaaaggtttctttgacgatgcggaatcgcagttattaataacccttagtgaaatttccaaattgcttaaaatggatgagcaaaataataatgataccgctattggcattcagcccatggtatacggtaattacggcaaggattcctgttcaggtcatttcttcagcagaaatgtcgtgacgggcgagaagaaactccagggcagttattttaccggtaagttcaacgaaattggcgctacagggtacgatattaataaaatagatccggcgcaccttaaacagcttgaaaaaatcgccggaactctcgaagacaaattcaaggaaattcgccaggtacgctttacagtggaaaacggaaagctttggctgatagagcagaggcttgtggatcaaaaatccacgcagtccgatcttaaacttctgcttgatcttcaaaagcgcaagattgttgacgcggcttatgtagtaaaagcgattgatcctataaggcttaatgaaattctgcaccctgtaattatccctcaagcgttaagggttttaagtcatggaagggcggtatcgcgggcgctcccggagcggcgatag

SEQ ID NO: 44270 - protein, 265 aa, Unknown
  Obtained from environmental sample
  DOMAIN (2)...(228): Pyruvate phosphate dikinase, PEP/pyruvate binding domain
  misc_feature (1)..(265): Xaa is any amino acid
MINGMMNIEERIRELEGKTKEKEEIAEKNKLIKRLLGIKGPSNELHEEDKTPMPKKKTAEEYMDDYAQYFPKGFFDDAESQLLITLSEISKLLKMDEQNNNDTAIGIQPMVYGNYGKDSCSGHFFSRNVVTGEKKLQGSYFTGKFNEIGATGYDINKIDPAHLKQLEKIAGTLEDKFKEIRQVRFTVENGKLWLIEQRLVDQKSTQSDLKLLLDLQKRKIVDAAYVVKAIDPIRLNEILHPVIIPQALRVLSHGRAVSRALPERR

SEQ ID NO: 44271 - DNA, 897 bp, Unknown
  Obtained from environmental sample
  misc_feature (1)..(897): n is a, c, g, or t
ttgcgtcagagccacacaaatcttggcgatgttgtttatgaattagatgatgaagatttaacaagcgctcaaaccggtttgcttttaagaatgttattagttgataaactcggttacaaatcagcgtcaactaatatttcttcgacagttaatgatatttccggtcttgcaaaagaatttgaaaaatggagcggcatcgatcttgtagccgcctattttcatcccgaaatagggcttttgatagcgaatccaaaagtcgcggaagaacttgccggttttggtcagcttagcaagaacgaattattggtaatatacgccgggcttcagggcgatgaaaccgatgagaattgccagaaagccgcggatttagctttaaagctttttgaaggttctaaggttacagctccggcatttcttacaaaaggaaaattcaccgtgaaaaatgtgtctaaacccaaaaaatctgaggaaactaaatcaacgccggcggcaaaaaccaaagcaaaaacagcttcaaaaggaaaagctccggctaaacgcgccgcggcttcagccgctcccgccgcctctgaaaagaaatcggcgactattgtacaggttaaagccggtacgccctcgaagatgacgcctcgctatgcggtcgtagtacagaatgaacttttccataacggaaatgttgaagcatggaagaaaattatcgcaagttacagggcaaaacatcccgatttggaagtttttgtttattatgagggtgaaagaatacatgacattaactcattgtttaagtggggtaaggtaaagcatggaagcgctattgatttgccgtaccggaaacgatattcaggatgtcgcaaaattacagcgttatctggctcagggagccagtcatcaatttga

SEQ ID NO: 44272 - protein, 298 aa, Unknown
  Obtained from environmental sample
  misc_feature (1)..(298): Xaa is any amino acid
MRQSHTNLGDVVYELDDEDLTSAQTGLLLRMLLVDKLGYKSASTNISSTVNDISGLAKEFEKWSGIDLVAAYFHPEIGLLIANPKVAEELAGFGQLSKNELLVIYAGLQGDETDENCQKAADLALKLFEGSKVTAPAFLTKGKFTVKNVSKPKKSEETKSTPAAKTKAKTASKGKAPAKRAAASAAPAASEKKSATIVQVKAGTPSKMTPRYAVVVQNELFHNGNVEAWKKIIASYRAKHPDLEVFVYYEGERIHDINSLFKWGKVKHGSAIDLPYRKRYSGCRKITALSGSGSQSSI

SEQ ID NO: 44273 - DNA, 576 bp, Unknown
  Obtained from environmental sample
  misc_feature (1)..(576): n is a, c, g, or t
atggattcaagaatacattttttcagtcaaaaagacgttatctccaataaggttgcgccggaattattaggtatccgcggcagacaggcaaatgaatttgccgaacttggttttccaattttgccgggatttattttggataccgatattgcttcggacattgatattaagagtattaaaaaagatatttcggatcttttggcaaaatgcgcaaaaatggtgggcaaaggttacggcgatgttaataatcccatgttgttaaaactgattatttcttcaaacatggcgattacaacttatcccgtattgcacaacttcggacttgtaaaacctgttcttaacggttttgcaaaatgggttggcaaggattttgccgcaaatgaagttttatttatgatcaacggcatgatgaacatagaagagaagattaaagaccttgaaggtaaaaccaaagagaaagatgaaattgccgaaaaaaataaaattataaaaagattattggggattcatggaccttccaatgaactgcataagaaagaagaacccatgccaaagaagaaaaccgctaagaaatag

SEQ ID NO: 44274 - protein, 191 aa, Unknown
  Obtained from environmental sample
  misc_feature (1)..(191): Xaa is any amino acid
MDSRIHFFSQKDVISNKVAPELLGIRGRQANEFAELGFPILPGFILDTDIASDIDIKSIKKDISDLLAKCAKMVGKGYGDVNNPMLLKLIISSNMAITTYPVLHNFGLVKPVLNGFAKWVGKDFAANEVLFMINGMMNIEEKIKDLEGKTKEKDEIAEKNKIIKRLLGIHGPSNELHKKEEPMPKKKTAKK

SEQ ID NO: 44275 - DNA, 879 bp, Unknown
  Obtained from environmental sample
  misc_feature (1)..(879): n is a, c, g, or t
atgctggaagaccgcggcattgacacaaaaggcagaatttttatctccgaccgcgcgcacatcgttctgcccaaatacattcaaattgacaaggaacgcgacgcggcgcgtaagaaaccgataggcacgacaggccgcggcataggtatcacctattcaatgaagagcgaaagagacagtatccgcatagcggatcttacatggaaagaaaaaatggacgagcttgataaatccgaccgcgattttcttgcgccgtatacggataaactccttgaaatgtcagttgatcttagcgcataccttatgcaccgtaaaaattcgcagacgctttttgaaggcgcgcagggtacgctccttgatctcgatcttggaacttatccctatgtgtccagcggaatgtcatgcgcggcgggcgcggcggtcggcggttgtatcgggccgcgttccatcgacaaagtacttggcgtttttaaagcctattccacccgcgttggaaacggtcctcttcccagtgaatttgatccctcttccgaagacgaactttgccgctttgtccgcgaaacagggcgcgaatacggcgtaacaaccggaaggccgcgccgctgcggctacctcgatcttgtttccctgcgctacgcctgttttacaaactccatcgacagtcttgttatgactcatcttgatgtatacgacacttttgatgaaatcaaggcgtgcatcgcataccgcatcggcgataaaatcgtggaaaccttcccggcttctatcgaagaccttaatcgcgcaaaacctgttctgcgttctttttccggctggaaaaatcactcgcgaacgcgcttacctacgaagaattccccgatgcggcaatggagtacataa

SEQ ID NO: 44276 - protein, 292 aa, Unknown
  Obtained from environmental sample
  DOMAIN (1)...(288): Adenylosuccinate synthetase
  misc_feature (1)..(292): Xaa is any amino acid
MLEDRGIDTKGRIFISDRAHIVLPKYIQIDKERDAARKKPIGTTGRGIGITYSMKSERDSIRIADLTWKEKMDELDKSDRDFLAPYTDKLLEMSVDLSAYLMHRKNSQTLFEGAQGTLLDLDLGTYPYVSSGMSCAAGAAVGGCIGPRSIDKVLGVFKAYSTRVGNGPLPSEFDPSSEDELCRFVRETGREYGVTTGRPRRCGYLDLVSLRYACFTNSIDSLVMTHLDVYDTFDEIKACIAYRIGDKIVETFPASIEDLNRAKPVLRSFSGWKNHSRTRLPTKNSPMRQWST

SEQ ID NO: 44277 - DNA, 1326 bp, Unknown
  Obtained from environmental sample
  misc_feature (1)..(1326): n is a, c, g, or t
gtggggatcgtcgtcaccgccagccacaacccgccggagtacaacgggtacaaggcctactggaacgacggggcgcaggtcgtcccccctcacgacacggccatcatcaaagaggtgctcgccgtcggcggcgcgataaaggccatggataaggacgaggctttaaagaccggcatgctggtgatgatcgacgaggagatagaccgcccgtttatagagatggttaaaaaatgcgccatccgccccaacctgctgcgggaggggggcaagagcgtcaaggtggtgtacacgccgctgcacggcaccggggcggtgccggtagacacggcccttagggagatgggggtggacgtcgtcttcgttgaggagcagcgggctcccgacggcaacttccccacggtgagctaccccaatccggaggaggcctccgcgatgaggctggcgcttgaactcggggagaagataggcgccgatttggtgctcgggaccgaccccgacgccgaccgcctaggcatagccgccccggacggcgggagcctcaaactcatcaccggaaatcagctgggctcgctcttggccgactacgtcttcagcgcccgcaaggagatggggagcatgcccgcaaagccgaccctcataaagaccatcgtcaccacggaactgcagcgccttatcgccgacagctacggcgcgctctgcttcgacgtgctgaccggtttcaagtatatctgcgagaagatccgagagttcgagtcgcaaaaagacggcccgtcgtacgtggtcggcggcgaggagagctacggctacctggtcaacaccgaggtaagagacaaagacgccgtctccgcgtctacgatgacggtggagatggccctgtaccacaaaagccaaggccgcaccctgtgggatcagctgcgcgaaatatggaagcggtacggttatttccaggaggcgctgatctcgaaagcgttcaaaggcgagagcggattaaccgcgatgcgggcgctgatggagcgcttgcgcaactccccgcctaagctgttcgccggacagagtgtagtctccgtaaaggattatatgaccggagagacgataaccccgtctaccggcaaacgcgataagaatatagacctcccgtcgtcaaacgtactgcagtttatactggaggacgaaagcatagtaaccgtcagaccgtcgggtacggagcccaagataaaattctacgtctcgtgccggaccggtaagggcgcggagctagaggaggcgaaaaaggttgcgggcgggaagattaaggctatcacggaggagctgaatactattgcgtag

SEQ ID NO: 44278 - protein, 441 aa, Unknown
  Obtained from environmental sample
  DOMAIN (69)...(179): Phosphoglucomutase/phosphomannomutase, alpha/beta/alpha domain II
  misc_feature (1)..(441): Xaa is any amino acid
MGIVVTASHNPPEYNGYKAYWNDGAQVVPPHDTAIIKEVLAVGGAIKAMDKDEALKTGMLVMIDEEIDRPFIEMVKKCAIRPNLLREGGKSVKVVYTPLHGTGAVPVDTALREMGVDVVFVEEQRAPDGNFPTVSYPNPEEASAMRLALELGEKIGADLVLGTDPDADRLGIAAPDGGSLKLITGNQLGSLLADYVFSARKEMGSMPAKPTLIKTIVTTELQRLIADSYGALCFDVLTGFKYICEKIREFESQKDGPSYVVGGEESYGYLVNTEVRDKDAVSASTMTVEMALYHKSQGRTLWDQLREIWKRYGYFQEALISKAFKGESGLTAMRALMERLRNSPPKLFAGQSVVSVKDYMTGETITPSTGKRDKNIDLPSSNVLQFILEDESIVTVRPSGTEPKIKFYVSCRTGKGAELEEAKKVAGGKIKAITEELNTIA

SEQ ID NO: 44279 - DNA, 375 bp, Unknown
  Obtained from environmental sample
  misc_feature (1)..(375): n is a, c, g, or t
ttgcagggaaaccgtaccgagcgtctgggcagcctgattcaggaacttatcagcgctcttattcttgaaagcagaataaaagacccaagaatctcgcaatttgtctcaataaccagggtaaacgttacacgcgacctttcttatgccgatgtatatgtctccaacatcagggaaacggcgaaccttgaacgcaacgcgcaggggctgcaaagcgccgccggttttattcaggcccaactgggcgctgccttaaaaatacggaaaatcccccatctgcgcttccatgccgataccagcatcagagagggttttgacatggtgcagaagatcgaacaaataacaaataacaaagagcaaatagcaaagagcaggtag

SEQ ID NO: 44280 - protein, 124 aa, Unknown
  Obtained from environmental sample
  DOMAIN (5)...(110): Ribosome-binding factor A
  misc_feature (1)..(124): Xaa is any amino acid
MQGNRTERLGSLIQELISALILESRIKDPRISQFVSITRVNVTRDLSYADVYVSNIRETANLERNAQGLQSAAGFIQAQLGAALKIRKIPHLRFHADTSIREGFDMVQKIEQITNNKEQIAKSR

SEQ ID NO: 44281 - DNA, 651 bp, Unknown
  Obtained from environmental sample
  misc_feature (1)..(651): n is a, c, g, or t
ttgatggccgaggacggcgcatttattatcaaaaaagataatgtcatttgcaaaaagtatgagcaattaaaaatacaatttctaactgtgcataaatcaaaaggtcttgaagctgacaatgtgattattctaaatatgaaaaacgacaaactcggctttccaaataaaattgcagatgacccagttttacaattatttttaccaactgaagacaattttgcgtttgcggaagaacgccgtttattctatgttgcgcttacacgaacacgcaataaaacatttttgcttgtaccagaccgtaatgcaagcgaatttgcaaacgaaattaaagcgttgtgtcatatagaagtaccagaaggcgaaaaattgataatcaataatccaacctgtccaaaatgtaaaactggtcgattagtaattcgacaagcaaatgctgaaaactttgtaggttgtacaaattatccagtttgtgactatacgaataaaaatacatcaataattaaaaatccgataaaatgcccaatatgcggcggctttcttgttgttcgtaaaagcaagcgtggacaatttttaggttgtacgaattatcccaattattgtaaatatacggcacaaatcaataattccaaatttgaaaaaaataaatcctaa

SEQ ID NO: 44282 - protein, 216 aa, Unknown
  Obtained from environmental sample
  DOMAIN (127)...(166): Topoisomerase DNA binding C4 zinc finger
  misc_feature (1)..(216): Xaa is any amino acid
MMAEDGAFIIKKDNVICKKYEQLKIQFLTVHKSKGLEADNVIILNMKNDKLGFPNKIADDPVLQLFLPTEDNFAFAEERRLFYVALTRTRNKTFLLVPDRNASEFANEIKALCHIEVPEGEKLIINNPTCPKCKTGRLVIRQANAENFVGCTNYPVCDYTNKNTSIIKNPIKCPICGGFLVVRKSKRGQFLGCTNYPNYCKYTAQINNSKFEKNKS

SEQ ID NO: 44283 - DNA, 378 bp, Unknown
  Obtained from environmental sample
  misc_feature (1)..(378): n is a, c, g, or t
atgacaaatacaatcggtattaggcagggggaaaataggggtaatagcatggatgagcaggaattacggcgtctgttaagcactaatatcaagcggttccgcaaccgccgtggctggtcccaggcaaggcttgcggagaagctggatatttcaaccaacttcctgtctgacatcgaaacccaaaaaggctgggtatccccgttgacgctggtaaaactcgcctctgcccttaacatcgaagtctacgagctgttcaagcctgaaaacgcaatatcaggggatctcaaggacgtggtcaacaagctggccaaagatttgactatcgtgatgaccgagtccgttgaatacgcccgtaaacagtatgcggacgataagtag

SEQ ID NO: 44284 - protein, 125 aa, Unknown
  Obtained from environmental sample
  DOMAIN (30)...(84): Helix-turn-helix
  misc_feature (1)..(125): Xaa is any amino acid
MTNTIGIRQGENRGNSMDEQELRRLLSTNIKRFRNRRGWSQARLAEKLDISTNFLSDIETQKGWVSPLTLVKLASALNIEVYELFKPENAISGDLKDVVNKLAKDLTIVMTESVEYARKQYADDK

SEQ ID NO: 44285 - DNA, 864 bp, Unknown
  Obtained from environmental sample
  misc_feature (1)..(864): n is a, c, g, or t
ttggaagaccaataccgcgttatgacaatgccgtcagcggcaagtatgttctcgttcttggaaaaagttattcccgatttaatccttctggatatagaaatgccggaaatggacggctttgaagcgcttgcgaaacttaaaacaaaagatcgattcagcgaaattcccatcatgtttttaacaggtcgcaccgacgcggatgtggaagcgcgcggttttgaaatgggcgccgtggattttgttacaaaaccgttctccgcgccggtactgttaaaccgcataaagacgcaccttgatattgatcaggttatccgcgagcggacggcgcagttacgccggcttcaaaacaatatagtgtctgttctcgcggacatggtggaaaaccgtgacaaagggacaggcggccatattgagcgcacctcaatttacatcaaaatactgatagaggaaatgaaagaacgcggagtttatcttgatgaaatccgcgattgggacgtggataaaatagtttcttccgcgcgtatgcacgatctcgggaaaatctccattactgatattattgtgaacaagccggataaacttaccgatgatgaatacgaattaattaaaactcatacaatcgaaggcgagatgataattgacgaaataatctccaaaacgggagaagatgaatttttaaacagcgcgaggctgtttgccggctgtcatcacgaacggtgggacggcaaagggtatcctagggggctgaaaggagataaaatcccgctgcaggggcgcattatggctattgtggatgtgtacgacgccctttttccgaacggccgtataaaaaagcgttttccgacgaggaagcggtgcagataa

SEQ ID NO: 44286 - protein, 287 aa, Unknown
  Obtained from environmental sample
  DOMAIN (1)...(95): Response regulator receiver domain
  misc_feature (1)..(287): Xaa is any amino acid
MEDQYRVMTMPSAASMFSFLEKVIPDLILLDIEMPEMDGFEALAKLKTKDRFSEIPIMFLTGRTDADVEARGFEMGAVDFVTKPFSAPVLLNRIKTHLDIDQVIRERTAQLRRLQNNIVSVLADMVENRDKGTGGHIERTSIYIKILIEEMKERGVYLDEIRDWDVDKIVSSARMHDLGKISITDIIVNKPDKLTDDEYELIKTHTIEGEMIIDEIISKTGEDEFLNSARLFAGCHHERWDGKGYPRGLKGDKIPLQGRIMAIVDVYDALFPNGRIKKRFPTRKRCR

SEQ ID NO: 44287 - DNA, 1026 bp, Unknown
  Obtained from environmental sample
  misc_feature (1)..(1026): n is a, c, g, or t
atgaagcaagaactctcactccctttgccagatgatttccacatacatttgaggcaagggagggatttggcaaattatacgaaaagtgctgccctgcagtttgggcgcattttagctatgccaaatactgagccacccataaattcgccagaggcagttaaaaaatacaaagaggaaattttggctgctgctccgaatttggaagttctgctcacattcaagctcaataaaaattacaccgagcaagaaattttagaaatgaaaaaaaacggtgcggttgccgcaaaatattacccgcttggtgttaccacaaatagccaagatggaatttccaaaatagaagatatttaccccaccattgaattgctggaaaaactggatttggttttatgcttgcacggtgaggaacctgaggcattttgtttggacagggaaaaggaatttttgaaacacctagaaaaactttgcaaaacattccccaatttgcgcattgttttggagcacgtatccagcgcagatgcggtggagtttgttaaaaatttgccacaacaggttgcggcaacggtaaccgttcatcatttgattttaacattaaacgatattgttggcgactcgctttgcccgcaaaatttttgcaaaccattgccaaagttcccaaaagacaaagctgcggttagggaggctgtgttcagcggcaataaaaaattctttttgggaacagacagcgcaccgcactccttggagaaaaaagcctgcctttgcggagccgctggagtttattccgctcctgtggcaattcctattttaatagaggaatttgaaaatgagaacaaattgaatttgctctctgattttgtcgcaggttatggtgcagatttttataaaattccgcgccaaacgaaaaaagttgcttatgtaaaagaagaatggcaagttccaaaaaccatagacggagctgtgcctttgagggcggggcagaagttggggtggaagccaacattttctatattgcccccaacgccatga

SEQ ID NO: 44288 - protein, 341 aa, Unknown
  Obtained from environmental sample
  DOMAIN (2)...(334): Amidohydrolase family
  misc_feature (1)..(341): Xaa is any amino acid
MKQELSLPLPDDFHIHLRQGRDLANYTKSAALQFGRILAMPNTEPPINSPEAVKKYKEEILAAAPNLEVLLTFKLNKNYTEQEILEMKKNGAVAAKYYPLGVTTNSQDGISKIEDIYPTIELLEKLDLVLCLHGEEPEAFCLDREKEFLKHLEKLCKTFPNLRIVLEHVSSADAVEFVKNLPQQVAATVTVHHLILTLNDIVGDSLCPQNFCKPLPKFPKDKAAVREAVFSGNKKFFLGTDSAPHSLEKKACLCGAAGVYSAPVAIPILIEEFENENKLNLLSDFVAGYGADFYKIPRQTKKVAYVKEEWQVPKTIDGAVPLRAGQKLGWKPTFSILPPTP

SEQ ID NO: 44289 - DNA, 333 bp, Unknown
  Obtained from environmental sample
  misc_feature (1)..(333): n is a, c, g, or t
gtggacggctccgtaagccatactaagttaaaagccaatcttgccgcgcaaattgtggctttcgctaaagggcaggacagcgccgacggaaacaaagagttcaaaggggagcgcccctcaagtttgatttacgggaagcgtttaactcccgccgttttgggaagtttgcttgcccactatgaaaacaaggttatgtttcagggctttgtctggaaccttaacagctttgatcaggagggcgtacagcttggaaaaattctgacaaaaaaagtgctttccggcaattacggcgacggcgccttggaagcgtacagcaagctgttaggcttatag

SEQ ID NO: 44290 - protein, 110 aa, Unknown
  Obtained from environmental sample
  misc_feature (1)..(110): Xaa is any amino acid
MDGSVSHTKLKANLAAQIVAFAKGQDSADGNKEFKGERPSSLIYGKRLTPAVLGSLLAHYENKVMFQGFVWNLNSFDQEGVQLGKILTKKVLSGNYGDGALEAYSKLLGL

SEQ ID NO: 44291 - DNA, 909 bp, Unknown
  Obtained from environmental sample
  misc_feature (1)..(909): n is a, c, g, or t
atgatccttttggacgtcgatatgccggaagttaacggctacgaagcgataaaagcccttaaatccaggccggaaacaaaagatattcccgtaatctttcttaccgcgcgcaccgattcggacgacgagcttgaggggctttccctcggagccattgattacatcacaaaacccttccagcctccattgcttcttaaacgcatcgaggtacacctgttggtagaggaacagaggaaagaacttcaatactttaatgaaaacctgcaaaagatggtggaagaaaaaacagaaaacgtaattgaactgcagaacgccctcttaaaaacaatagcggaattggttgaatgccgcgacgacataaccggaggccacattgagcggacgcagaggggaataaacatcatgatggaggaaattgaaaacagaaatctttacaaagaagaaacaaaaggctgggataaaaaacttctgcttcaatcctgccagcttcatgacgtaggcaaaatttccatcagcgacaacatactcaagaaaccgggaaaactcaatgacgaagaatataatgagatgaagaaacacgcaagtttcggcgaacagataattgaaaagatagagactctggcgaaggaaagcgattttcttgattatgcgaaaatttttgccgccagccatcacgaaaaatgggacggctcgggttaccccagagggcttaaagaaaacgaaattcccctgcttggccgcatcatggcgattgccgacgtatacgacgcgctcacttcggtgcgcccttacaaagaagccttcagccacgaggaggcggtgcgcataatcacagaaagcagcggaatccagtttgatccgacgctggttgaggtatttatcagtacggcggacaagttcaaaaaataa

SEQ ID NO: 44292 - protein, 302 aa, Unknown
  Obtained from environmental sample
  DOMAIN (1)...(69): Response regulator receiver domain
  misc_feature (1)..(302): Xaa is any amino acid
MILLDVDMPEVNGYEAIKALKSRPETKDIPVIFLTARTDSDDELEGLSLGAIDYITKPFQPPLLLKRIEVHLLVEEQRKELQYFNENLQKMVEEKTENVIELQNALLKTIAELVECRDDITGGHIERTQRGINIMMEEIENRNLYKEETKGWDKKLLLQSCQLHDVGKISISDNILKKPGKLNDEEYNEMKKHASFGEQIIEKIETLAKESDFLDYAKIFAASHHEKWDGSGYPRGLKENEIPLLGRIMAIADVYDALTSVRPYKEAFSHEEAVRIITESSGIQFDPTLVEVFISTADKFKK

SEQ ID NO: 44293 - DNA, 606 bp, Unknown
  Obtained from environmental sample
  misc_feature (1)..(606): n is a, c, g, or t
gtgacagttgacgcgcaaacggcagcgaagctgggagagctgtttttggagatcgtagccgctccggactttgagccgcaggcactggaaatacttatgaagaaaaaaaatcttcgcataataaaactttcaaaagcccctgttgaatctcacgaatacatcgcggttgacggcggccttttggttcagcaaagcgaccgcaggctccttgaaaaatgggatgtcatgacaaaaaccgtgcccgacgcccatgatctgcgggacatgatcttcggcatgagggccgtaacatttgtaaagtcgaacgcgataatgattgttaaagacgaggcagccaccggaatagggggagggcaagttaaccggatatggccgacagtgcaggcgctggaaaggagcgcggctgttacaaaggacgggccggccagggtgcttgcctccgacgcgtttttcccgtttgccgatgttgtggaggccgccgctgcggctggcatcaaggcgataatccagcccggcggctcggttaacgacaaactgtcaattgaggcctgtgataagcacggcatagcgatggtctttaccggcatacggcactttaagcactaa

SEQ ID NO: 44294 - protein, 201 aa, Unknown
  Obtained from environmental sample
  DOMAIN (1)...(130): AICARFT/IMPCHase bienzyme
  misc_feature (1)..(201): Xaa is any amino acid
MTVDAQTAAKLGELFLEIVAAPDFEPQALEILMKKKNLRIIKLSKAPVESHEYIAVDGGLLVQQSDRRLLEKWDVMTKTVPDAHDLRDMIFGMRAVTFVKSNAIMIVKDEAATGIGGGQVNRIWPTVQALERSAAVTKDGPARVLASDAFFPFADVVEAAAAAGIKAIIQPGGSVNDKLSIEACDKHGIAMVFTGIRHFKH

SEQ ID NO: 44295 - DNA, 1860 bp, Unknown
  Obtained from environmental sample
  misc_feature (1)..(1860): n is a, c, g, or t
atggatgagtgggaaactttgtacatggaactacccgaaaatcttaaacaggaactttcccaaacaggttcaaactaccggctggtaaaggttaagcgaaacggcgccgctattccctcaatggttcaccgggaatgggaagagtcatggcggcgcgagcctttgcccctgctgggcccctggctgcgttatgaaggccctacatccctgtcgcgtattgccgaggttttcggcataagcattgtcgaagccgaggatgccgtcaacgctcttgtcgaagttgaggaagtagtctgtgatgtgcgtcttgcggaaggtacttctccgctcatctgtgacagcagaaaccttgagatgctgctgcgtctttccaggcgaaagcagcgccctgaaataaacgaaagacccgccgctcttttggttccatttcttgctttacggcaaaaccttttaatagggtacggggttcaaggttcaggagtcagggacgcccaagtaggcactgcgttaagcgaagctgctcttaaaaaactgaatgcctgctgcgcgcctgttaaattgtgggaaaccgagttctttacttcgcgttgcgctctttatagcccggatattattaataatgaaattatagaaggtcgcctggtctggtacggcgcgggtaaggaaaagatagggctttgccggcccgatgatctggaactggtgaatgtaaataatgtaaagaaatccaagcaaaaaataaaatcaaaggaagggatttttggagaaaccatgtcttcgggggaatttctaaaaaaagccttcgtaaagttaatcgacaatggtttttttgaccgtccccgcgatttttgggaaataaaggacgcgattaacgcaggcatgcagcagaacatcacgagcaaaaactgcgccgaggccctttggcatgaggcatggcagggaaggctgtcgtcggactcctntgagccgcttcgacggggcattcaattcggtttcacgattaagaacactgaaactgccgagctcgcagcccagtcaagttcgggctctccgcgtatgccccatatcccccgttccctgcgggatcgctggcggaacggggcgcccgtatccggcaggtggttttcgatagttcttgctgacgctgaaaacgacgcggggttgtgggatgcttttcaaccgagcccgaagggcgttgaaccggagcttcgcggttcccctcttgacccgcttgcgaaggaaggcagaaaccgggacagagtacgccttttgctggcacgctggggtattctttgccgcccgctcctggaaaaagcttcctccggaagttcaaattccaaaagcgaaccctcgccttttacctggtcaggccttttgccgaccatgcgccgcatggagctttcaggcgagctggttgcgggccgttttttcgcgggaatcaattccctgcaatttgcctcgcctgctattgcgcgcgagcttgagaacgccgaggctgttgaaggcatctactggatgaacgccgttgacccggcaagccctgcgggcgtcaatatagaaggcctggatccccgcctccctgaccggctggcatccagccgtatctatttccggggctcgcagcttatcgccgtgtcaaaccgaaacggcaaagaattgcatgttttcattgcccctgatgatcccggtctccccgccttgatagatctcataagatttccccgtataaggaaagtccttcccgacaataagatagttattgatactattaacaacaaaacagcgggacaaagtgaatacgcgcggttttttcaggactgcgggtttgtctctgaccgcggcaggctgtgcttttggtaa

SEQ ID NO: 44296 - protein, 619 aa, Unknown
  Obtained from environmental sample
  misc_feature (1)..(619): Xaa is any amino acid
MDEWETLYMELPENLKQELSQTGSNYRLVKVKRNGAAIPSMVHREWEESWRREPLPLLGPWLRYEGPTSLSRIAEVFGISIVEAEDAVNALVEVEEVVCDVRLAEGTSPLICDSRNLEMLLRLSRRKQRPEINERPAALLVPFLALRQNLLIGYGVQGSGVRDAQVGTALSEAALKKLNACCAPVKLWETEFFTSRCALYSPDIINNEIIEGRLVWYGAGKEKIGLCRPDDLELVNVNNVKKSKQKIKSKEGIFGETMSSGEFLKKAFVKLIDNGFFDRPRDFWEIKDAINAGMQQNITSKNCAEALWHEAWQGRLSSDSXEPLRRGIQFGFTIKNTETAELAAQSSSGSPRMPHIPRSLRDRWRNGAPVSGRWFSIVLADAENDAGLWDAFQPSPKGVEPELRGSPLDPLAKEGRNRDRVRLLLARWGILCRPLLEKASSGSSNSKSEPSPFTWSGLLPTMRRMELSGELVAGRFFAGINSLQFASPAIARELENAEAVEGIYWMNAVDPASPAGVNIEGLDPRLPDRLASSRIYFRGSQLIAVSNRNGKELHVFIAPDDPGLPALIDLIRFPRIRKVLPDNKIVIDTINNKTAGQSEYARFFQDCGFVSDRGRLCFW

SEQ ID NO: 44297 - DNA, 612 bp, Unknown
  Obtained from environmental sample
  misc_feature (1)..(612): n is a, c, g, or t
atgccgcacgagttgaaagatgcggtgtccatggcggacactcttgcgaaggaagtgtttcccgattttcccctggcgcttttacattccagggtggacgatgaggacaaacggaaatccatggaagccttccgccgcggggaaataaaaatccttgccgccacgagcgttgtggaagttggtgtagatgtgccaaatgcgacctgtatggtgatcgagcacgccgaacgcttcggcctttccgccctgcaccagctccggggcagggtgggccggggagaagatcagtcttactgtttcctggtttattccgacagcttaagcgaagacggaaaaaaacggctcaaggtgatgcttgaaaattcttccggttttatcattgccgaagaggacttaaagcttcgaggccccggccagatagccggcattgagcagtcaggctacctgaggctaagcattgccgatcctgtaagggatgcggaagcccttgcccgtgcccgctctgacgcctttgaaattcttgagtcggatcctgcgcttgaaaagccccagaacaggcggatagccgaagtcctccggcgctgcccgcccttcagcgatgtagggctgtaa

SEQ ID NO: 44298 - protein, 203 aa, Unknown
  Obtained from environmental sample
  DOMAIN (17)...(94): Helicase conserved C-terminal domain
  misc_feature (1)..(203): Xaa is any amino acid
MPHELKDAVSMADTLAKEVFPDFPLALLHSRVDDEDKRKSMEAFRRGEIKILAATSVVEVGVDVPNATCMVIEHAERFGLSALHQLRGRVGRGEDQSYCFLVYSDSLSEDGKKRLKVMLENSSGFIIAEEDLKLRGPGQIAGIEQSGYLRLSIADPVRDAEALARARSDAFEILESDPALEKPQNRRIAEVLRRCPPFSDVGL

SEQ ID NO: 44299 - DNA, 603 bp, Unknown
  Obtained from environmental sample
  misc_feature (1)..(603): n is a, c, g, or t
atgagtgtatgcctcttagaagagcttaccaggcggcggctggagcggaacctgacaattgtagtcatgatgaatatggcgggcactgaggtttcatatgatgaaatacaagccctgggcgccgattcggagccggctgggcattcaattggaaggtcccatttcgcggcttttatggcggaaaagaaaatcgtaataaaccgtcgccaggcttttgatcgttatctgggtaagggaaatcctttctatattccaaaggaaggcctggaattggaattggcaattaaaattattcacgaatccggcggtattgctgtcctagcccatcccatgtgccggtatgtatcatggggaaagctcccagacttgattaagagccttaaagaaaagggccttgacggaattgaggcctggcatccttcgggtaaagtttcttcgtgtaaacgcctggaggagctggcaagaaaactcggcctttatgtaaccgcgggcagcgattttcacggagaagccagaaaagaccgtaaattgggattcacagccggaagaaggaaaataagcgaatcatttttggaagatttacctgttttgggcgctatatga

SEQ ID NO: 44300 - protein, 200 aa, Unknown
  Obtained from environmental sample
  misc_feature (1)..(200): Xaa is any amino acid
MSVCLLEELTRRRLERNLTIVVMMNMAGTEVSYDEIQALGADSEPAGHSIGRSHFAAFMAEKKIVINRRQAFDRYLGKGNPFYIPKEGLELELAIKIIHESGGIAVLAHPMCRYVSWGKLPDLIKSLKEKGLDGIEAWHPSGKVSSCKRLEELARKLGLYVTAGSDFHGEARKDRKLGFTAGRRKISESFLEDLPVLGAI

SEQ ID NO: 44301 - DNA, 1128 bp, Unknown
  Obtained from environmental sample
  misc_feature (1)..(1128): n is a, c, g, or t
ttgcagggcaattataggccggcagtcgggcctaaggaaggcactttttaccttacatggcagccatgggataacgatctaaaagcttcctccatttttacagaacgctccaaactgacaagagaggagctttatttactaagcagctataaatgcattttttccggggttactaccgtaaacgatcattttccacaggctattaacggaaaaatacttccaacgcttccgattcgggctatttccgaatacgccctggcccatgaagccacctcatacgacctgaaatggggagacggcgtaattgcggagcataaaaaagccgtaaataacaaatggccctttataacgcatctctgcgaaggttttgacgaggagtccatgcacagcgtggaaacccttgaaaagctgggggttctggacagccattgcctcttaattcattgcattgccatgagcgacgaggatataaagaaagccgcaaaagcgggggtaagtatttcgatttgcccgacctcaaataagctcatgttcaatgttactgcgaagattcggaagatgattaaggctggcttgaatattacgctgggcaccgattcttccgcgtcgggttcggccaaccttttggaagaaatcaggaatttaaggaaattctaccgggatatgtacggcgaggatctggctccagaaaaaatttttgaaatggtaacgattaacagtgctaaagccttctggatgcaggatcaaataggttctcttgatgaaggaaagctggctgatataatggttttaaaggcaagaggcgacgatccatacgagaatttggccggcacttcgatggaggacattgaattgcttgttttagccggaaagccaatatacggcgaaatgcgttttcttgatattttccaggattcaaaagtaccggaaggatacactgaaattacagtgggcaaaaggcccatgtttgtaattggtgatcatgcggctttgtacagggaaatccggcgaagaacgggttttaaaaagatcctggatttctttccttttgagctgtctgaatccaatcaggaacaggcaaagaagccgggaaaatcaacagctaaaaccaggaaggaactcacctaa

SEQ ID NO: 44302 - protein, 375 aa, Unknown
  Obtained from environmental sample
  DOMAIN (26)...(265): Amidohydrolase family
  misc_feature (1)..(375): Xaa is any amino acid
MQGNYRPAVGPKEGTFYLTWQPWDNDLKASSIFTERSKLTREELYLLSSYKCIFSGVTTVNDHFPQAINGKILPTLPIRAISEYALAHEATSYDLKWGDGVIAEHKKAVNNKWPFITHLCEGFDEESMHSVETLEKLGVLDSHCLLIHCIAMSDEDIKKAAKAGVSISICPTSNKLMFNVTAKIRKMIKAGLNITLGTDSSASGSANLLEEIRNLRKFYRDMYGEDLAPEKIFEMVTINSAKAFWMQDQIGSLDEGKLADIMVLKARGDDPYENLAGTSMEDIELLVLAGKPIYGEMRFLDIFQDSKVPEGYTEITVGKRPMFVIGDHAALYREIRRRTGFKKILDFFPFELSESNQEQAKKPGKSTAKTRKELT

SEQ ID NO: 44303 - DNA, 990 bp, Unknown
  Obtained from environmental sample
  misc_feature (1)..(990): n is a, c, g, or t
ttggggggtgaattccccctgcgccggcgaagttttggacattttatgggcggaagaagagggaagctttccgggatcttttttgatttcgataggattgagtcaatcaagcgctttgagcccttaccccagagcggcatggaaaaaagaccggagcttgtcatacaccctttcaaagagctggtctggacagaagatcgcatcgaagcgttaaaagccaaccttgaaagctttgaagaattcccgtcaaacggaaaagaaatactggaagagctaaagacccggcggacaattaacggcgaagaataccttttccccctggcctttgaaaaacccgccacgctcgcggattacttctttccttccaccgataagggcgaagggaagggcgaagccttaggctgcgccctcgttgtctaccttgagcgggaacggcttgagaacgcgcaggaaagccttgaaaaagagtatcagagcctgtattccaaaacgcgcagaagcaaggaaatcccgcttcccagtcggatacttctcaacttcaaagagctttcctcctccattccccgctgtgtttcttttacgttattaaaaggagccgtagaagaaaacacccagtgcattaacgccgcctgcgatccgcccagaagttttttcggaaacgtgaactatttaaaagaagaattcgcatctcttaaaaagcagggctgggatttggcggtggccgccgaatccgatgtccaggctggacggatcgccgagcttttaagggacgaggacgtttccgtgggggcactgcccttctcctccggctttgccttgccggacatcaagttcatgctcatccaggaaaacgagatctttggccgccgacgccgtccgcccaaatcccttaaaaccgcgcgcagcgccgtaatcgacacctttgttgagctcaaccccggcgactacgtggttcacgtaaattacggcatcgggctttcaaaggcatga

SEQ ID NO: 44304 - protein, 329 aa, Unknown
  Obtained from environmental sample
  misc_feature (1)..(329): Xaa is any amino acid
MGGEFPLRRRSFGHFMGGRRGKLSGIFFDFDRIESIKRFEPLPQSGMEKRPELVIHPFKELVWTEDRIEALKANLESFEEFPSNGKEILEELKTRRTINGEEYLFPLAFEKPATLADYFFPSTDKGEGKGEALGCALVVYLERERLENAQESLEKEYQSLYSKTRRSKEIPLPSRILLNFKELSSSIPRCVSFTLLKGAVEENTQCINAACDPPRSFFGNVNYLKEEFASLKKQGWDLAVAAESDVQAGRIAELLRDEDVSVGALPFSSGFALPDIKFMLIQENEIFGRRRRPPKSLKTARSAVIDTFVELNPGDYVVHVNYGIGLSKA

SEQ ID NO: 44305 - DNA, 312 bp, Unknown
  Obtained from environmental sample
  misc_feature (1)..(312): n is a, c, g, or t
gtgatcagatcggccgaaagacaagcccttccgctcattgaagaatgggaagggcggataggcgtcgaggtaaaaaaactatttgtaaggaaaatgaaaacctgttgggggagctgtaacagcacaaggcagactttaagactgaattcagaattggccaaaagaaagcgtgaatgtcttgaatacgtgattgttcacgagatgatccacattattgaaaaaagccacaaccgcaaattctacagtcttttgaacaagtatttgccagcgtggaaaatcattcgcaaaaaaatgaatgccggggaactgtaa

SEQ ID NO: 44306 - protein, 103 aa, Unknown
  Obtained from environmental sample
  DOMAIN (2)...(101): Protein of unknown function DUF45
  misc_feature (1)..(103): Xaa is any amino acid
MIRSAERQALPLIEEWEGRIGVEVKKLFVRKMKTCWGSCNSTRQTLRLNSELAKRKRECLEYVIVHEMIHIIEKSHNRKFYSLLNKYLPAWKIIRKKMNAGEL

SEQ ID NO: 44307 - DNA, 990 bp, Unknown
  Obtained from environmental sample
  misc_feature (1)..(990): n is a, c, g, or t
gtgaatcggaaaaacgctccggactatcgtccgttccttcgtttgttaatagtaattttgcttgtctttttaggtttttcaatgcttcccgcagcggaagcggggattgatttcagtattcgttattttgacaagcgtatatattacctggaatccgacccgatttatatccaggtgacggtaacaaacaacagcccttccacgtacaggttcaaactggcggatgagagggctttttcggtagattttgatgtcagaaccaacagcaataggattgtggacgctgcggatattctggtacgcaagcgaagccagagccagcaggtttatttcagggaagtcgcaatagaagctggtgagtccttttcctttgtcgaggatctgaagaattacgccgccctgacccaaagcggtacttatgtggttcaggcgaaggtataccgggatctttaccagacaataaggtctgagtcttttggcatattgtcaaaccgccttgcgctcaacataaggccggctcttatccccggcccggacggcatcccgcttgaactggatgtggaaaccaacgccattcttgtccgcgagaaactcccccccgacgaggttattcgttatatgctgacggccaggcagaaaagccagtgggaaaaatttttcctttaccttgacctggaagccatgctctcccgcgacgcttaccggagacggcagtacgccgccgaatccgaagaaggccgccaaaggatgatcgcccggtaccggcaggatttgcaaaattccgtgatagacggggatatttcgctcattcccatgaatttcatcattgagcgcactacccacaacgggcagacagggacggtaaccgtgctggaatatttcaggattggtgattatacggagaaaaagcgctacacctggtatctggaaaaaaaagatgatatatggactatcgtcgattattcggttgttaatttaggaacccagtag

SEQ ID NO: 44308 - protein, 329 aa, Unknown
  Obtained from environmental sample
  misc_feature (1)..(329): Xaa is any amino acid
MNRKNAPDYRPFLRLLIVILLVFLGFSMLPAAEAGIDFSIRYFDKRIYYLESDPIYIQVTVTNNSPSTYRFKLADERAFSVDFDVRTNSNRIVDAADILVRKRSQSQQVYFREVAIEAGESFSFVEDLKNYAALTQSGTYVVQAKVYRDLYQTIRSESFGILSNRLALNIRPALIPGPDGIPLELDVETNAILVREKLPPDEVIRYMLTARQKSQWEKFFLYLDLEAMLSRDAYRRRQYAAESEEGRQRMIARYRQDLQNSVIDGDISLIPMNFIIERTTHNGQTGTVTVLEYFRIGDYTEKKRYTWYLEKKDDIWTIVDYSVVNLGTQ

SEQ ID NO: 44309 - DNA, 882 bp, Unknown
  Obtained from environmental sample
  misc_feature (1)..(882): n is a, c, g, or t
ttgccgcattttcagtcaattgcaaatctttcgtttggttcttcacccctgcttgttctcggcgcaggtccgtctcttgacgagactcttgatgttcttgaacgtcatttttccgctaacattcactgccctgataaacgctcctttaaaatcatctgcgttgatacctgccttggcgcgttgaaagacagaaacattgtccctgaccttgtagttatacttgaaagtcagttttggaatttaaaggattttaccggctgtaaagactggaatgtaaatagcgcaatagacctttccgcttacccggcgtctgcgcgggttctttcaggcgaaggttttatttttatgacgccgtggacttcattgcgtatctttgaaagacttaaaagttccgggctttgtcctttatccgtttcgccgttaggttctgtaggcttaaccgccgcggaagttgcaaggcacatcagtaacgggaaaataattttcagcggactggacttttcttttacagcggataaataccatgcccgttctacgcccggacaccgcagccgccttaatgtccaaacccgcatgaagggaattgccaatgccgcggcttttgatacggcttcttttaccgctgtttcaaaatcaggggtttatgtaaaatcaagccctattatgcgtaattacagggacctttttgaacaggaatttgcaagtgatccgcggctgtttgacataacgggtacggggcttccgcttggtattaaaacgctttcgaatgaagaagcaatatcagtattgagcggcatgcggaacataacacgcgtaaagacgaaggtgtacaggtacaggaaaagtctgataaagacagagcattgtagagggaaaaagtaa

SEQ ID NO: 44310 - protein, 293 aa, Unknown
  Obtained from environmental sample
  SIGNAL (1)...(21)
  DOMAIN (5)...(167): Protein of unknown function DUF115
  misc_feature (1)..(293): Xaa is any amino acid
MPHFQSIANLSFGSSPLLVLGAGPSLDETLDVLERHFSANIHCPDKRSFKIICVDTCLGALKDRNIVPDLVVILESQFWNLKDFTGCKDWNVNSAIDLSAYPASARVLSGEGFIFMTPWTSLRIFERLKSSGLCPLSVSPLGSVGLTAAEVARHISNGKIIFSGLDFSFTADKYHARSTPGHRSRLNVQTRMKGIANAAAFDTASFTAVSKSGVYVKSSPIMRNYRDLFEQEFASDPRLFDITGTGLPLGIKTLSNEEAISVLSGMRNITRVKTKVYRYRKSLIKTEHCRGKK

SEQ ID NO: 44311 - DNA, 543 bp, Unknown
  Obtained from environmental sample
  misc_feature (1)..(543): n is a, c, g, or t
atgacgctttgtcttgaaaagcggggcatacaaaccaacatgacttaccttgatgaaaaacgcgtagagatggtttacgaaatgccgctttccgaggtgttattcgatttttacgatcgcttaaaaagtatcagcagtggttatgcgtcatttgattacgatattttcggctataaaccgactgaacttgcaaaaatggatattttattgaacggcaaggcggttgacgcgctttcccagcttgtattcaagggtaacgcatataaccgagcgcgaaaagtttgcgaacgtcttcgcgatgaaatccccagacagcagtttaaaataccgattcagggagcgataggcagccagataatcgcaagagaaactgtcaacgcgcttcgcaaagacgtacttgcaaaatgctacggcggggacattacgcgcaaaagaaaacttctcgaaaaacagaaagaaggcaaaaagcgcatgaaaatggtaggggatgttgagcttcctcaaagcgcgtttcttgccgtccttaaaacaaaggacgaataa

SEQ ID NO: 44312 - protein, 180 aa, Unknown
  Obtained from environmental sample
  DOMAIN (1)...(69): Elongation factor G C-terminus
  misc_feature (1)..(180): Xaa is any amino acid
MTLCLEKRGIQTNMTYLDEKRVEMVYEMPLSEVLFDFYDRLKSISSGYASFDYDIFGYKPTELAKMDILLNGKAVDALSQLVFKGNAYNRARKVCERLRDEIPRQQFKIPIQGAIGSQIIARETVNALRKDVLAKCYGGDITRKRKLLEKQKEGKKRMKMVGDVELPQSAFLAVLKTKDE

SEQ ID NO: 44313 - DNA, 468 bp, Unknown
  Obtained from environmental sample
  misc_feature (1)..(468): n is a, c, g, or t
atgaaagccgagtggataaatgcctttattttagcaacaagagataccttctctaaaatgctcaatcttcacgtggaagccagcaaaccttatttatattcagaaactgtgaatatgaaggatatttctggaatgataggcctttctggaacaatcagaggagccgtggttataggctttccagaagcaagcgcattaaaagctgctagcaagttcattggcgaggaatttaaggaactcggaccagacgtcagtgatgctgttggcgagcttgtgaatataatcgcaggatacgtcaagaaagtcatccaaaacgagaggtttggaatttccctgccatccatagccagaggaccaaagcacatggtatatatgcccagcggcattccaaacatagttataccatttaattcggatataggtacttttgtgttggaagctgcccttaccgaaggtcataatgaatga

SEQ ID NO: 44314 - protein, 155 aa, Unknown
  Obtained from environmental sample
  misc_feature (1)..(155): Xaa is any amino acid
MKAEWINAFILATRDTFSKMLNLHVEASKPYLYSETVNMKDISGMIGLSGTIRGAVVIGFPEASALKAASKFIGEEFKELGPDVSDAVGELVNIIAGYVKKVIQNERFGISLPSIARGPKHMVYMPSGIPNIVIPFNSDIGTFVLEAALTEGHNE

SEQ ID NO: 44315 - DNA, 1056 bp, Unknown
  Obtained from environmental sample
  misc_feature (1)..(1056): n is a, c, g, or t
gtggtatttgctgctcaatacgcatccctctgccgcaggctctcagagcttccaataccttttcaattaaagaaagatttaaaaataaaagttttgctggaggcggatttttacattcctcacggaaaatttcagtgcaaaataatagacatagacacggttttcacaatacgggaaattgccataaccagagaaaaaatctgggaaaggcttatgaaagaaaatttgcacagaatgaacggagagcttccaatgcccatgcttccgcttaacataggtttaataacatccgaaagcagtgcggcttataaagatttcacatccacaataagagcctctgggtatgcctttaaaataacaactatttctgccaaaatgcaaggtcaaagcaccgaatccgatattgttgaagcactaggtaacctaaggaattacaaggacttagatgttgtttgcataataaggggtggcggctcaaaaaccgatttggttttttttgacagctatgccctttgcaaggctgtggcaattttccccttgcctgtgttaactggaataggtcacgaaattgacgaatcccttttggacaaggttgcccatacccatttgataaccccaaccgattgcgcaaactttttaatagcaagggcagatgccgctctgcaaaggttgcaaaccatatcttacgagtttgcaaattttatgcagcttttcgtaagagagcgagataaactgagttacaaagctttgcagatttcaaatatatgcgataaaagggttgagtacgaaaaagaaaggctaaacagaaacctgcttggattaaagcgaggggttccaaaaataatggattaccaaaagcagacactcaaattattagaagaaaaaacaaaagcggcaaatcccgaaattcagctaaaaagaggttataccataaccaaaaacaaaaacgagaatatcctgcgctcggcaaaagaagccgccaaaacacctgtattgaaaacggtattttttgatggtgaggtggaaacgtcaaatagcaattttggggaattatag

SEQ ID NO: 44316 - protein, 351 aa, Unknown
  Obtained from environmental sample
  DOMAIN (148)...(322): Exonuclease VII, large subunit
  misc_feature (1)..(351): Xaa is any amino acid
MVFAAQYASLCRRLSELPIPFQLKKDLKIKVLLEADFYIPHGKFQCKIIDIDTVFTIREIAITREKIWERLMKENLHRMNGELPMPMLPLNIGLITSESSAAYKDFTSTIRASGYAFKITTISAKMQGQSTESDIVEALGNLRNYKDLDVVCIIRGGGSKTDLVFFDSYALCKAVAIFPLPVLTGIGHEIDESLLDKVAHTHLITPTDCANFLIARADAALQRLQTISYEFANFMQLFVRERDKLSYKALQISNICDKRVEYEKERLNRNLLGLKRGVPKIMDYQKQTLKLLEEKTKAANPEIQLKRGYTITKNKNENILRSAKEAAKTPVLKTVFFDGEVETSNSNFGEL

SEQ ID NO: 44317 - DNA, 603 bp, Unknown
  Obtained from environmental sample
  misc_feature (1)..(603): n is a, c, g, or t
ttgcgcctcgtcctggaaaaaatccgggatggcgatatcggcccgttgcgggatttcacggaaaagagcgaaactctttcaaacgcgagtctgcaactatggatgaaagagcgtcccgatctcctgttaggcgatattatgcgctggagcctcagagcggataaactttttgaggaacatacccaggggctgctcccctatgccaatgtggaagccaccctcaaagtcttagctgaaaaggctgatattatggtcgtctcttcagcttccggcagaggattggtcaaggactggtccttttcagggcttacccgctatacggcgctgctcgcaggtcaggaagcagggagtaaaagtaaacagctccgcatgggggcaggaggtaaataccctcccgaaaaaatactgatgatcggggacgctccgggggatctggaagcggcccgttcaatcgacgctcttttctttccggtgatacccggcaaggaagaggcaagctggatccgccttcgggaagaaggtctcgaccgctttttcgccggaacctttaagggtgaatatgaagacgcgctgattagggaatttacggcggtgctggaatag

SEQ ID NO: 44318 - protein, 200 aa, Unknown
  Obtained from environmental sample
  misc_feature (1)..(200): Xaa is any amino acid
MRLVLEKIRDGDIGPLRDFTEKSETLSNASLQLWMKERPDLLLGDIMRWSLRADKLFEEHTQGLLPYANVEATLKVLAEKADIMVVSSASGRGLVKDWSFSGLTRYTALLAGQEAGSKSKQLRMGAGGKYPPEKILMIGDAPGDLEAARSIDALFFPVIPGKEEASWIRLREEGLDRFFAGTFKGEYEDALIREFTAVLE

SEQ ID NO: 44319 - DNA, 720 bp, Unknown
  Obtained from environmental sample
  misc_feature (1)..(720): n is a, c, g, or t
atgaagctggaatactttatgctttattttttgacaatatcttttatggcttatacggacaagctttgcaacgcgcgttattccattataacaaaaatatacggcgtcttttgtctgattctggcggtaacccagttgttttcatttcaggcttcgtcgcttatctgggagtattcgaatgttatcgtaatagtgtggatttgcacttataatattattctgccgtttatccgtgaattaaaaaaaggcaggaagttcgccgatgccttggctaatacttatccggggaatctgttaattgccactttaataatcggcataacctcaatctttgaccttattgattcttttaccctgcatttatcgcttcatttaaccaattacagtattgttgtcttcgcgttgtcggttacatttatgttatttagaatgtccgttataaaagacagggaacttaaagaaaaaagcgcgctgctggaaaaggcaacaagtccggaggccgtgcgtgaaaaagcgttcaaatcatacggtttaactgaacgtgaaaaggaagttgcccggttcatggcggaagggcttgacaataagaatattggggaacgtcttttcttatccaccagaaccgtcgcgtttcatgtaacaaatattttccgtaaattcggcattattgacggaaaaaacaagggacgggcgatgtttttggccaagctgttcaattaa

SEQ ID NO: 44320 - protein, 239 aa, Unknown
  Obtained from environmental sample
  DOMAIN (175)...(235): Bacterial regulatory proteins, luxR family
  misc_feature (1)..(239): Xaa is any amino acid
MKLEYFMLYFLTISFMAYTDKLCNARYSIITKIYGVFCLILAVTQLFSFQASSLIWEYSNVIVIVWICTYNIILPFIRELKKGRKFADALANTYPGNLLIATLIIGITSIFDLIDSFTLHLSLHLTNYSIVVFALSVTFMLFRMSVIKDRELKEKSALLEKATSPEAVREKAFKSYGLTEREKEVARFMAEGLDNKNIGERLFLSTRTVAFHVTNIFRKFGIIDGKNKGRAMFLAKLFN

SEQ ID NO: 44321 - DNA, 387 bp, Unknown
  Obtained from environmental sample
  misc_feature (1)..(387): n is a, c, g, or t
ttgtcattcattgtaaagagaataagttccgcaatcataaccctttttctcgtgtcggtcttcagttttcttgccttcagcgtcatacccggcgacccggcaagccttgccctgggaaccgaagctacccctgaacagcttgccagtctccgcagaacgatgggcatagaccacagcgtccctgtccgttatctgcaatggctggngaatttcctctcgggcaacccgggggcttccctgcgcttcangggggaagccgtttccgcgcttgtgcttgagcgtctgcctgtaagttttaccctgggcttccttttcccttattcttgttttgaatatcgcccttggtgttttcctgttttcagtgcgccgcgaaaacggcctttttga

SEQ ID NO: 44322 - protein, 128 aa, Unknown
  Obtained from environmental sample
  SIGNAL (1)...(27)
  misc_feature (1)..(128): Xaa is any amino acid
MSFIVKRISSAIITLFLVSVFSFLAFSVIPGDPASLALGTEATPEQLASLRRTMGIDHSVPVRYLQWLXNFLSGNPGASLRFXGEAVSALVLERLPVSFTLGFLFPYSCFEYRPWCFPVFSAPRKRPF

SEQ ID NO: 44323 - DNA, 804 bp, Unknown
  Obtained from environmental sample
  misc_feature (1)..(804): n is a, c, g, or t
atgagcggaaaactaaaagccggattactgctaacgctgctcatagtgttaatatcattaacaagcgcggtttggatacgcggcgtttttaacgcgcaatataacgcgatgaatcctgaaattcgttttcagcctcccggtattgggcatccgcttggaacggacaatttcggcagggatgtcctgctgcggataatagccggttcaaggcataccatcgtcctcgcgatctgcgttgtcgccggcgcggtaatactgggaagcgcgctggggctttttgccggctattcaagcggaatccgcgatgaaattgtcatgcgcctcatggacgcggtaagctcttttccggggattcttttcgcccttgtaatggccgcggtttttggcaacagccagtttacccttttcaccgccctgctgattctgtttgtccccagctttacccgcattatacgaagcgggacattgcagtacagggacgcagacttcatactggccgagcgtttgcttggggccggcggcgcgagaatcgtattcatccatatattgccgaaccttgcggcgcaactgctgccggccgccgccctgggcctttccaacgcgatcctcgccgaagccgccatgagctacctgggattgggaattcagccgcccgaaccaagctggggaaggatgctttccgaatcgcagaattacctgatcaacgcgccctggtgcgctcttgcccccggcgttttcatcatgctgacggtcattggcttccactgccttagcgacggtctccgccgctattttggagattag

SEQ ID NO: 44324 - protein, 267 aa, Unknown
  Obtained from environmental sample
  SIGNAL (1)...(23)
  DOMAIN (69)...(266): Binding-protein-dependent transport system inner membrane component
  misc_feature (1)..(267): Xaa is any amino acid
MSGKLKAGLLLTLLIVLISLTSAVWIRGVFNAQYNAMNPEIRFQPPGIGHPLGTDNFGRDVLLRIIAGSRHTIVLAICVVAGAVILGSALGLFAGYSSGIRDEIVMRLMDAVSSFPGILFALVMAAVFGNSQFTLFTALLILFVPSFTRIIRSGTLQYRDADFILAERLLGAGGARIVFIHILPNLAAQLLPAAALGLSNAILAEAAMSYLGLGIQPPEPSWGRMLSESQNYLINAPWCALAPGVFIMLTVIGFHCLSDGLRRYFGD

SEQ ID NO: 44325 - DNA, 666 bp, Unknown
  Obtained from environmental sample
  misc_feature (1)..(666): n is a, c, g, or t
gtgatggcgagccgattgtcgcttgccgtcgccgagcaatttgctctgcaaggcaaagacgtgcttgttcttttgaccgacatgacaaacttcgccgacgcgatgaaggaaatctcgatcattcaggaacaggttccttcaaaccgcggctatccgggcgacctttacagccagcttgccagccgctatgaaaaagcggttgactttgaaacagcgggttcaatcacagtcctcggcgttaccacaatgcccggcgacgacgttactcaccctgtgccggataataccggatacattacggaaggtcagtattatcttaaaaacggacgcattgagccgtttggttctctctctcgtcttaaacagcaggtaaacggcaaaacacgcaaagaccaccgcgcccttatggacggcatgatcaaactttactccgctttccgcgacactctggaaaagaaggcgatgggctttatcatgacccattgggacgagaaacttttaaagtacggcgttcaatttgaaacaagaatgatggatctttcggtaaatattccgcttgaaaaagcgttagatttgggctgggaaatcttgtcagattgtttcaacaaagaagaaacaggattacgcacagaattgatcaatgaattctggccgaaaaaagaatag

SEQ ID NO: 44326 - protein, 221 aa, Unknown
  Obtained from environmental sample
  DOMAIN (1)...(118): ATP synthase alpha/beta family, nucleotide-binding domain
  misc_feature (1)..(221): Xaa is any amino acid
MMASRLSLAVAEQFALQGKDVLVLLTDMTNFADAMKEISIIQEQVPSNRGYPGDLYSQLASRYEKAVDFETAGSITVLGVTTMPGDDVTHPVPDNTGYITEGQYYLKNGRIEPFGSLSRLKQQVNGKTRKDHRALMDGMIKLYSAFRDTLEKKAMGFIMTHWDEKLLKYGVQFETRMMDLSVNIPLEKALDLGWEILSDCFNKEETGLRTELINEFWPKKE

SEQ ID NO: 44327 - DNA, 1107 bp, Unknown
  Obtained from environmental sample
  misc_feature (1)..(1107): n is a, c, g, or t
atggtgttttggcacccgcacggagcggtgcttgtgaatgtgctgaaagattttgttcgcaaagagataacaaagcgaggctacaaagaggtgattacccccgaaatagtggataaatctctttggataaaaagtggtcacgcagacaaatacgattccaatatgttcaaaaccttggcaggcgaaaaagatatggcggtaaaacccatgaactgcccctgccatattgaaattttcaatcagggcttgaaaagctggcgcgacttgccgcttcgatttgccgaatttggaaaatgccaccgcaacgaaccagctggcacaatgcacggcttgatgagggttcgcggttttgttcaagacgatgcccatatattctgcaccgaggagcaaatcactcaggaagtgagcagtttttgcacattggtaaaagacctatacaaagtttttggttttgaaaaaataaccgtgaaattcagcacacgcccagaactcagaattggctcagacgaactttgggacaaagcggaacactccttagaagaagccacaaaacttgccggcttggaatacaaactaaacccaggcgaaggcgcattttatggaccaaaactggaatttgtactcaaagattccttgggcagagattggcaatgcggcactatacaagtggatttcaatatgcccggtcgccttggagcggaatatgttggcaaagacaaccaaaaacacacgcccgttatgctacaccgcgccgcccttggttcccttgaacgcttcataggcattctaaccgaagaattcgcaggcgatttccccttttggctcgcccccgtgcaagttcgcgttttgcccgtttccgaaaaattctcggaatatgcggagaaaattcgcgcggaactcgtagatgctggcattcgcgcagaaatagacaactcaaacgaaaaggttggctacaaaattcgccttggcgaattagcgaagataccatatttgcttgttgttggcgaaaaggagattgccgagaatgcggtgtccgttcgcaagaggaaggagggcgatttggggaagaagagtttgggggaatttttgaaagagattgcgaggtga

SEQ ID NO: 44328 - protein, 368 aa, Unknown
  Obtained from environmental sample
  DOMAIN (279)...(368): Anticodon binding domain
  misc_feature (1)..(368): Xaa is any amino acid
MVFWHPHGAVLVNVLKDFVRKEITKRGYKEVITPEIVDKSLWIKSGHADKYDSNMFKTLAGEKDMAVKPMNCPCHIEIFNQGLKSWRDLPLRFAEFGKCHRNEPAGTMHGLMRVRGFVQDDAHIFCTEEQITQEVSSFCTLVKDLYKVFGFEKITVKFSTRPELRIGSDELWDKAEHSLEEATKLAGLEYKLNPGEGAFYGPKLEFVLKDSLGRDWQCGTIQVDFNMPGRLGAEYVGKDNQKHTPVMLHRAALGSLERFIGILTEEFAGDFPFWLAPVQVRVLPVSEKFSEYAEKIRAELVDAGIRAEIDNSNEKVGYKIRLGELAKIPYLLVVGEKEIAENAVSVRKRKEGDLGKKSLGEFLKEIAR

SEQ ID NO: 44329 - DNA, 1452 bp, Unknown
  Obtained from environmental sample
  misc_feature (1)..(1452): n is a, c, g, or t
atgtacataggacgtctcggtgacggttccaatcccgacgacggtatttatgttttgttaaaagaagtaatcgacaacggcattgacgagtttattatgggtaacggaaaacttatcgaaacggttgttaaagatattgataaacccggcaaggccatggttaaagtgcgtgattacgggcgcggcatcccccttggaaaactggtcgaatgcgtgtcggtaataaataccggggcaaagtacaatgacgacgtgtttcagttttctgtcggccttaacggggtgggaacaaaagcggttaacgcgctttcggctcattttagggtaatcgcgataaggagcggagaattcgccgaggctatttttgaaagagggaaacttaaaagcgagcgtaagggcaagttaaaagacccgttaaaagacggcacaatggtggaatttattcccgaccctgaaatttttaaggattatgtttttaatcccgaatttatagaaaagcgcgtgcagaattacgcctaccttaacgccgggcttaccctggcttttaacggcaaaaaatttatctcaaaccgcggattatacgatttattgcaagaagaaacaggcagtgacggattgtactccctcggttactatcgcggcaaacattcagctaacgggcagttggaaatagcctttacccacaccaacaactacggcgaggaatatttttcgtttgtaaacggacagtacacgtcggacggcggaacgcatctgtccgcgtttaaagaaggcttcctaaagggtattcaaactttttataaaaaagactaccgctcggaagacgtacgcgaagggacgaccgcggcaatcgcaatcaaaataaaaagccccgtctttgaaagccagacaaaaaacaaacttggcaattccgacatacgcgcatggattgtgcaggaaacgcgcaacgccgttgaagactggctgcataaaaatcccgaagcaagtaaaaagcttgaacacaaaatagcggctaacgagtccctgcgtacggaattaaacgccgtcaaaaaagaagctcgtgaagcggcgaaaaaaatcgcacttaaaatcccgaagttaaaggattgtaaataccaccttgacgacgggcaggacggggaagcatcgacaatttttatcacggagggcgattcggcggcggggtctattgtctcaagccgtgatgtgatgacgcaggcgattttcgccctacgcggcaaggtggaaaacgtgtacggaaaaaaacgcgccgcaatttacaaaaacgaagaactttttaacatgatgatggctttaggcatcgataacgacatcgaaggcttgcgttatgcgaagatagtaatcgccaccgacgctgactttgacggcttccacatccgcaaccttcttttaacatttttcctctcttatttgaagaactcggccatctga

SEQ ID NO: 44330 - protein, 483 aa, Unknown
  Obtained from environmental sample
  DOMAIN (11)...(152): Histidine kinase-, DNA gyrase B-, and HSP90-like ATPase
  misc_feature (1)..(483): Xaa is any amino acid
MYIGRLGDGSNPDDGIYVLLKEVIDNGIDEFIMGNGKLIETVVKDIDKPGKAMVKVRDYGRGIPLGKLVECVSVINTGAKYNDDVFQFSVGLNGVGTKAVNALSAHFRVIAIRSGEFAEAIFERGKLKSERKGKLKDPLKDGTMVEFIPDPEIFKDYVFNPEFIEKRVQNYAYLNAGLTLAFNGKKFISNRGLYDLLQEETGSDGLYSLGYYRGKHSANGQLEIAFTHTNNYGEEYFSFVNGQYTSDGGTHLSAFKEGFLKGIQTFYKKDYRSEDVREGTTAAIAIKIKSPVFESQTKNKLGNSDIRAWIVQETRNAVEDWLHKNPEASKKLEHKIAANESLRTELNAVKKEAREAAKKIALKIPKLKDCKYHLDDGQDGEASTIFITEGDSAAGSIVSSRDVMTQAIFALRGKVENVYGKKRAAIYKNEELFNMMMALGIDNDIEGLRYAKIVIATDADFDGFHIRNLLLTFFLSYLKNSAI

SEQ ID NO: 44331 - DNA, 675 bp, Unknown
  Obtained from environmental sample
  misc_feature (1)..(675): n is a, c, g, or t
ttggatcttcaccttgaccgcacatggagttatgcaaacggtaacagcttgaaaattatccgcattgccgttgatgccggagacggaaacttaacgccgcagattttatttttttgcaaggcaagagagaaacgcggagtatatccaattaaaggcgttgctggagacgcggccccgcttgtacgcccttcaaaaaacgcgaaagataaacaggtttttcttgtaggcgtttccggaataaaaagcgatttaatatcatggcttcggattgacaagcctggccccggaatgtgtcattttcctatgggggataacggagaagtactttcccgatgttcccctgattttttcgcaatgctgacagccgaaaaaaaagttatacggcaaaacaaaaaaggtttttcgcactatgaatggattaaacacggaggctcgcgcaatgaggcgattgatgttttttgctacagcagggcggcgcttcggatcgcatattcaaacgacagcaaaacgcttgaaagattggccatgcgcgagccctgggcaatggaaaacgccatgccgaacacagcggatacagtaaccgcaagggaaacaaaggcggcgcctgttaaaaagaaaagccgttcaatacccccgcgcaatgagagaacgagggcgcagggtattattatttaa

SEQ ID NO: 44332 - protein, 224 aa, Unknown
  Obtained from environmental sample
  misc_feature (1)..(224): Xaa is any amino acid
MDLHLDRTWSYANGNSLKIIRIAVDAGDGNLTPQILFFCKAREKRGVYPIKGVAGDAAPLVRPSKNAKDKQVFLVGVSGIKSDLISWLRIDKPGPGMCHFPMGDNGEVLSRCSPDFFAMLTAEKKVIRQNKKGFSHYEWIKHGGSRNEAIDVFCYSRAALRIAYSNDSKTLERLAMREPWAMENAMPNTADTVTARETKAAPVKKKSRSIPPRNERTRAQGIII

SEQ ID NO: 44333 - DNA, 825 bp, Unknown
  Obtained from environmental sample
  misc_feature (1)..(825): n is a, c, g, or t
ttggagagcgggctttcttcgcctgtctttgggaagccgcgccctgcggacagagaccgcctgtattgccgccgctgttttagcaatagaaaaaatcggcgaattggggtaggattaagcatgaacacggatcaggtaaaacaaaaacttttgcggattgaggacgccccgctggagttttcacttgttttctcggggaaaaaaagcagcaaggttaacggcctgtacaaacccgacagccgtgagatcatcatccataaccacaattttgatcaggatgccgcgggggataacctgctgttgtacacggcgatccatgaatacgcccaccatctccatgcctgctcgcagggcggcaaactttcaccccgcgcgcacacgtcggaattttgggcgattttccacgcgcttctggaaaaagccgagtcaaaaaaaatctaccgcgatgttttcgccgacgccccggaacttacggcgcttaccgaaactatccgtaaaaaatacctccaggaaaacggcagcctggtaaaggaaatgggcaaacatctcctgaaagcgcatgaactctgcgccgcgataggtgtgcgttttgaggactatgttgaccgcgtgctgcggataccccgtaccgcggcaaacatggcgattaaaatgttcgagtacgaccttaatccgcagacgggcgccgatatatgcgtttcctcgccggcatccgcgacgccgatgagcgaaaagccgccgaaaccgccctcctcaaaaataaaagccccgattcggtcaaaacggcgattcgccaaaaagccaaagatgaagaccccgtgctaa

SEQ ID NO: 44334 - protein, 274 aa, Unknown
  Obtained from environmental sample
  misc_feature (1)..(274): Xaa is any amino acid
MESGLSSPVFGKPRPADRDRLYCRRCFSNRKNRRIGVGLSMNTDQVKQKLLRIEDAPLEFSLVFSGKKSSKVNGLYKPDSREIIIHNHNFDQDAAGDNLLLYTAIHEYAHHLHACSQGGKLSPRAHTSEFWAIFHALLEKAESKKIYRDVFADAPELTALTETIRKKYLQENGSLVKEMGKHLLKAHELCAAIGVRFEDYVDRVLRIPRTAANMAIKMFEYDLNPQTGADICVSSPASATPMSEKPPKPPSSKIKAPIRSKRRFAKKPKMKTPC

SEQ ID NO: 44335 - DNA, 780 bp, Unknown
  Obtained from environmental sample
  misc_feature (1)..(780): n is a, c, g, or t
atgtattgtgaaattattaataattctattattaacaaagaaatattcaggcttgatgtaatctggcagggtaccgcacaatcaaaacttgcggcgccaaaggccggacagttttttatgataaagccgaaacgaagcgcggtttttctcggcaggccaatctgcgtggcgctctttcagcatgatacactttcctttttaatcgcaaagataggcagggggaccgcggaactcgcctccatgcggacaggcgaagaagtcgaacttatcggcccgcagggaaacgcctggacggattttctaccagataaaaaaaacgcaaagcccatagccctgatcggcggcggcctggggattgccccgcttaacgcgctgttatgtgaaaaaaccggccacaatttcgatctgtacgccggtttcaaaaccggttttaaaagcgtggaagaaaaagcctctttcctcggtccggctattaacgcgcaaaacgttattatcgcgagcgaagacggcaaaaccgggcaaaagggactcatcctcgattttttggagccggaaaaatacgccgccgtttgcgcctgcggcacgctgaccatgttaaaagctgtcgcggaaaaatgcattaggaaaggggttccctgttttatcagcatggaaagccggatggcctgcggcgtgggggcctgccttggatgcaccattaaaaccgttaacgggaaccgccgctgctgcgccgacgggcctatatttaaagccgaagaggtgatttttgatgataagtaa

SEQ ID NO: 44336 - protein, 259 aa, Unknown
  Obtained from environmental sample
  DOMAIN (111)...(204): Oxidoreductase NAD-binding domain
  misc_feature (1)..(259): Xaa is any amino acid
MYCEIINNSIINKEIFRLDVIWQGTAQSKLAAPKAGQFFMIKPKRSAVFLGRPICVALFQHDTLSFLIAKIGRGTAELASMRTGEEVELIGPQGNAWTDFLPDKKNAKPIALIGGGLGIAPLNALLCEKTGHNFDLYAGFKTGFKSVEEKASFLGPAINAQNVIIASEDGKTGQKGLILDFLEPEKYAAVCACGTLTMLKAVAEKCIRKGVPCFISMESRMACGVGACLGCTIKTVNGNRRCCADGPIFKAEEVIFDDK

SEQ ID NO: 44337 - DNA, 1659 bp, Unknown
  Obtained from environmental sample
  misc_feature (1)..(1659): n is a, c, g, or t
atgtcgctggttgatagggcggaagaactgggtatgactcatcttgctttgacagatcacgggaatatgttcggtgcgatggattttatcgccgcctgcggtcataaaaaacgaaaaagacctgtaaaaccgataatcggctgcgaggtctatgtttctccagcttcccgcctcgaaaaaaaaggttctgaaaacgaaaataaatattaccaccttgtccttcttgcctataaccgcacaggctattttaaccttgtaaaattatgctccctcgcttacacggaaggtttttactacagacccagaatagacgaagaaattttatccaaatatcacgaagggcttatcgctctttccgcctgcgcctcgggggaaattccgcgttacattcaggcgggtaaaattgatgaagcggaaaaaaaagccgtttattaccgagaccttttcggcaaagacgacagcggaaaccctaacttttatcttgagatacaggatcacggcattccgtcgggggtattgagaggcagtgatttgtctcaaaaagacattaacgaggcggttgccgctatttccaaaaagaccggtattcctcttgtagcgacaaacgacgttcattatttgaacaaggacgattatatttcgcatgacgttcttctttgcattggaacgggtaaggtgcgcacggaagaaaggcggaaaaaatattacggagatcagttttattttaagacaggcgatgaaatggcggcgattttcgccgagtatccgcaggctgtcgagaataccgtaaaaatagcgcataggtgtaacgccgatgttccaaagatagagaccaaagaattgccgcaatatctgcctgaatataaaataccccgaagatttaaggaatccggcgattatttaaaacatcttacaatagacgggctggaaaagcgttacgcaaaggtaaaagaaaaagatttaaagaaatgggaagaaataaaaaaaagggcggattatgaacttgatacgataatcagtatgggttatacgggatattttttgatagtttgggattttataaaatacgcaaaagagcagaatattcccgtaggtcccgggcgtggctccggtgccggttcaatagtcgcttattccctgcgtatcacggatattgatccattaaaatacggccttatttttgaacgatttttgaacccggaacgtatttcaatgccggattttgatattgatttcgccaatgaaggacgcgaggacgtaataaactatgttacgcgcacttacggcaaagaaagggtagctcagataatcacattcggaacattgggcgcgaaagcggttatcaaggacgttgcgagagtgcttggaatatcaatttcagaatctgaaatgataacaaaacttatctcgttagatcctgaaattacgctggaaaaagcgaaagaagaagaatcgcgcctcagggaactggaaagcgatccgcgttttaccgagttatttgcgattgccggtaagttagagggtcttaaccgccattcaagcatacacgccgctggaattgttatagggaagaaaccgcttattgaactggtgccgctgtttcaggaaagggaagataagggcggaaatatcgcgacgcagtacagcatgactttctga

SEQ ID NO: 44338 - protein, 552 aa, Unknown
  Obtained from environmental sample
  DOMAIN (1)...(208): PHP domain
  misc_feature (1)..(552): Xaa is any amino acid
MSLVDRAEELGMTHLALTDHGNMFGAMDFIAACGHKKRKRPVKPIIGCEVYVSPASRLEKKGSENENKYYHLVLLAYNRTGYFNLVKLCSLAYTEGFYYRPRIDEEILSKYHEGLIALSACASGEIPRYIQAGKIDEAEKKAVYYRDLFGKDDSGNPNFYLEIQDHGIPSGVLRGSDLSQKDINEAVAAISKKTGIPLVATNDVHYLNKDDYISHDVLLCIGTGKVRTEERRKKYYGDQFYFKTGDEMAAIFAEYPQAVENTVKIAHRCNADVPKIETKELPQYLPEYKIPRRFKESGDYLKHLTIDGLEKRYAKVKEKDLKKWEEIKKRADYELDTIISMGYTGYFLIVWDFIKYAKEQNIPVGPGRGSGAGSIVAYSLRITDIDPLKYGLIFERFLNPERISMPDFDIDFANEGREDVINYVTRTYGKERVAQIITFGTLGAKAVIKDVARVLGISISESEMITKLISLDPEITLEKAKEEESRLRELESDPRFTELFAIAGKLEGLNRHSSIHAAGIVIGKKPLIELVPLFQEREDKGGNIATQYSMTF

SEQ ID NO: 44339 - DNA, 471 bp, Unknown
  Obtained from environmental sample
  misc_feature (1)..(471): n is a, c, g, or t
atggtacgggaggaacactgttaccttttggaatataacgcgcgcctgggtgatcccgaaacgcaggcggtgcttcccttaatggattcggatctcgctgagctctgcgcggctattctggacggaacacttcaggacttcccgctcaaatggaaaaagggcgctgtctgtgcgcctgtagcagctgccgagggctacccgggcccttaccggaagggggacccaatagcggtaaaccccgaagggttagagaagaccggagcaaagctgtttgtggccggcgcaagccgagggacaggcgggccctatggctcggggctgcggacaacaggcggacgagtgctttgtgtatccgccctgggaagcgacgcggacgacgcttttacaaaggcttaccaggcgcttcaattcgtcagttttgaaggcatgggttaccgtactgacataggccgggaacacgggcaatcatga

SEQ ID NO: 44340 - protein, 156 aa, Unknown
  Obtained from environmental sample
  DOMAIN (55)...(153): Phosphoribosylglycinamide synthetase, C domain
  misc_feature (1)..(156): Xaa is any amino acid
MVREEHCYLLEYNARLGDPETQAVLPLMDSDLAELCAAILDGTLQDFPLKWKKGAVCAPVAAAEGYPGPYRKGDPIAVNPEGLEKTGAKLFVAGASRGTGGPYGSGLRTTGGRVLCVSALGSDADDAFTKAYQALQFVSFEGMGYRTDIGREHGQS

SEQ ID NO: 44341 - DNA, 408 bp, Unknown
  Obtained from environmental sample
  misc_feature (1)..(408): n is a, c, g, or t
atggcagctaaaacggtaaaaaaaacctccgccacaaaagatggcgatgccacaaaaagcggttccgcaaagaagagcgcccctgttaaaaaaggccgcgccgcttcaaaaggcgaaacagaggccggcaaacgcgtcctggtcattgtggagtccccgaccaaggcggcatcttttgaaaaataccttggtcccaattacatcgttaaagcatccatgggccacctgatcgatctccccaaatcacggaccggcgttgacacagagcatgattttaagcctgagtatatcaccgtccgcggacgggcaaaaatacttaatgaattactggcggaagcaaaaaaggcggagatggtgctgctggcaagcgaccccgaccgtgaaggcgaggcaatcgcctggcattga

SEQ ID NO: 44342 - protein, 135 aa, Unknown
  Obtained from environmental sample
  DOMAIN (45)...(135): Toprim domain
  misc_feature (1)..(135): Xaa is any amino acid
MAAKTVKKTSATKDGDATKSGSAKKSAPVKKGRAASKGETEAGKRVLVIVESPTKAASFEKYLGPNYIVKASMGHLIDLPKSRTGVDTEHDFKPEYITVRGRAKILNELLAEAKKAEMVLLASDPDREGEAIAWH

SEQ ID NO: 44343 - DNA, 654 bp, Unknown
  Obtained from environmental sample
  misc_feature (1)..(654): n is a, c, g, or t
ttggccctaaacgcggcggtagaggcggcgcgggcaggcgttgcgggcaagggtttcgcggtcgtggcaaatgaggttcggaacttggcgatgcgtagcgccaaagcggcgaaggacaccgagagtatgattgacgaatcggtgaaaaacgccaacagcggcgttcagatcacggaagagatcgtcgcggcgctttcgaaaatcgttgaccgcaccgcaaaagtcggcagcctgatcgccgatatagcaaccgcgtcaaacgaacagtcaaccggtatagagcaggtgaacgtcgccgtggcgcagatgaacacagtcacacaaaacaacgcggccaactccgaagagtcggcgagcgctgcggaagaactgagcagccaagcctcggaattggcgaacatggtgggaagcttcaaactgagcgactccggcatcgacgcaaactatggagaaaagcaacacaaccgcaactcgagcgtaaaagttgaaccggaacacagcgaccgcgccgcgttaccgtcgacgtatggccgcccggttctcgcgattcaccacaaactgcaccagcatggggcatcacacagagcgataatggccaaggagattaaaacgctcaatgataaggaaatcgagcatatattggctgaagtctga

SEQ ID NO: 44344 - protein, 217 aa, Unknown
  Obtained from environmental sample
  DOMAIN (1)...(141): Methyl-accepting chemotaxis protein (MCP) signaling domain
  misc_feature (1)..(217): Xaa is any amino acid
MALNAAVEAARAGVAGKGFAVVANEVRNLAMRSAKAAKDTESMIDESVKNANSGVQITEEIVAALSKIVDRTAKVGSLIADIATASNEQSTGIEQVNVAVAQMNTVTQNNAANSEESASAAEELSSQASELANMVGSFKLSDSGIDANYGEKQHNRNSSVKVEPEHSDRAALPSTYGRPVLAIHHKLHQHGASHRAIMAKEIKTLNDKEIEHILAEV

SEQ ID NO: 44345 - DNA, 1278 bp, Unknown
  Obtained from environmental sample
  misc_feature (1)..(1278): n is a, c, g, or t
ttgatgaaaggcgggggaaatatgcgcgaattgataaccaacgacgtttccaagtgcgtcgggtgtaatcgttgtatccgtgtttgccctgtcgaaggcgcgaacgtcgtctacagcgagggcggccaaataaaggtgaaagtggatcccaaccactgcatagcatgcggggcctgcatacgcgcttgcagacacaaatgccgtgattacaacgacgacaccgagcggtttttggccgatttggagaaaggaacgcccatctccctcttcgccgcgcccgcaaaccgcgccaacggggagaactggggacacctcctgacttggcttaggcagaaaggggtgaagaagatatacgacgtctccatgggggcggacatctgctcttgggggcatattcgatatatccagaagcataaccccaaatccgtcatcacccagccctgcccggccatcgtgaactatatactgatgcaccgccccgaattgatacagtatctctctccggtgcaaagccctatgctgtgcacggccatcttcatgaaaaaatacgagggcataaacgaccgcatagccgccctgtccccgtgtatagcgaagtcggacgaattcgccgcgaccggatacgtggactacaacgtgacgctgaagaggctctacgagcatattgagacgcacggaatagcgctgccgaaagaggagtccggctttgaccatgcggagtcgtcgctcgggtgcctgtattccatgcccggcggattgcgtgaaaacgtggaacagtacctcggcaagtcgctgcgcatcgacaaatccgagggtcaggaggtggtgtaccacgcgctggacagattcgccaagaagcgcggggtcaacctgcccgtgatattcgacgtgctgaactgcccggaaggatgcaacttgggaaccggctgcgcccacgagcgcgacgagttcgacgtcaacgccattatggacgaggcgcggcagaacatattgcgggagcgcagccaggaagatttcgaggccctgtacgccgattacgacaaaaagctgaatttgaacgattttatccgaaaatacacgcctgtgcgcctcgccccctacaacgcctcccaagagcagatacaccgctcgttccagcagctcggcaaggacacggaactgaagcagaacttcgactgctccgcatgcggcgcggacacctgcctcgatatggccaaaaaggtggcttgcgggctgaatatccccgaaaactgcgtccaaaggcccgcgacgagataa

SEQ ID NO: 44346 - protein, 425 aa, Unknown
  Obtained from environmental sample
  DOMAIN (387)...(421): Putative Fe-S cluster
  misc_feature (1)..(425): Xaa is any amino acid
MMKGGGNMRELITNDVSKCVGCNRCIRVCPVEGANVVYSEGGQIKVKVDPNHCIACGACIRACRHKCRDYNDDTERFLADLEKGTPISLFAAPANRANGENWGHLLTWLRQKGVKKIYDVSMGADICSWGHIRYIQKHNPKSVITQPCPAIVNYILMHRPELIQYLSPVQSPMLCTAIFMKKYEGINDRIAALSPCIAKSDEFAATGYVDYNVTLKRLYEHIETHGIALPKEESGFDHAESSLGCLYSMPGGLRENVEQYLGKSLRIDKSEGQEVVYHALDRFAKKRGVNLPVIFDVLNCPEGCNLGTGCAHERDEFDVNAIMDEARQNILRERSQEDFEALYADYDKKLNLNDFIRKYTPVRLAPYNASQEQIHRSFQQLGKDTELKQNFDCSACGADTCLDMAKKVACGLNIPENCVQRPATR

SEQ ID NO: 44347 - DNA, 624 bp, Unknown
  Obtained from environmental sample
  misc_feature (1)..(624): n is a, c, g, or t
ttgcgccacgatattttatcaatggcggcaagagttgaaggaaatctgggcaaagcgctttccgcgttaagaacgcgtaacgcggagcttgcgaacgaggtgcgtgcggacgattccgccgtggacgccctgcaattacagattgaggacgatgccgcgattgttatcgctacgcagcagcctgtggcgagcgacttgcgcgagcttgtttcggtttttaagcttacaagcaatatcgagagggtaggggatcacgccgtgcatctcgcgcgcgccgcgaaaaaactcgcgaagacgggagattcctttaacgctcaggaacatcttgaaaaaatggcggagacagggcagattatgcttcgcgcggctatttccgcctttatgtcaaaggacgcgcaggcgtccagggaagcggcggcaatggacaatattatcaatgcggaacataaaatcattacagaggatatattaaaagtgatgaaaaagaacccagatcttgttaaagaggcgcttcagatacttcatacttccaaccagcttgaacggcttggtgatcatatcacaaatatatgcgaagctgttatttatatgatagaaggaaaacacgaggaattaaatgactaa

SEQ ID NO: 44348 - protein, 207 aa, Unknown
  Obtained from environmental sample
  DOMAIN (109)...(194): PhoU family
  misc_feature (1)..(207): Xaa is any amino acid
MRHDILSMAARVEGNLGKALSALRTRNAELANEVRADDSAVDALQLQIEDDAAIVIATQQPVASDLRELVSVFKLTSNIERVGDHAVHLARAAKKLAKTGDSFNAQEHLEKMAETGQIMLRAAISAFMSKDAQASREAAAMDNIINAEHKIITEDILKVMKKNPDLVKEALQILHTSNQLERLGDHITNICEAVIYMIEGKHEELND

SEQ ID NO: 44349 - DNA, 756 bp, Unknown
  Obtained from environmental sample
  misc_feature (1)..(756): n is a, c, g, or t
atgagcggtaaaaaaatagaagtaaacggccttgatctttattatggtgattttaaggcgttatcaaatatcaatttttcgctcgcgaagcaggatgtggcggcgcttatcggaccttcaggctgcgggaaatcaacgtttatccgcattttgaaccggatgaacgacttaattccttcatgcagaataacgggcgaagtttttctggacggtaaggatatttacggaactatggatgttacggaactgcgcagccgggtggggatggtgttccaaaaaccaaatccctttaacatgagcgtgtttgataatgtcgcgtacggaaagagaatgcagggtttaaaaaacaaaggtcgcattgcggacatagtggaaatttcattgcgaaaggcggctctttgggacgaggtaaaggacaggctgaaaaagccggctcaggcgctttccggcggacaacagcaaaggctctgcatagcgagaacaatagcgatggagcctgaaattattttgatggacgagccgacaagcgctcttgatccaatcgcgacggggcgcattgaggagcttataggagaattaaaaaaagattatagtataataattgttacacacgctatgcatcaggcttctagggtcagtaataaaacggctttttttcttttgggagagttgattgagtataataatacaagagaagtttttacaaacccaaaagacaaaagaacggaagattatatttcgggaaggtttggttga

SEQ ID NO: 44350 - protein, 251 aa, Unknown
  Obtained from environmental sample
  DOMAIN (31)...(222): ABC transporter
  misc_feature (1)..(251): Xaa is any amino acid
MSGKKIEVNGLDLYYGDFKALSNINFSLAKQDVAALIGPSGCGKSTFIRILNRMNDLIPSCRITGEVFLDGKDIYGTMDVTELRSRVGMVFQKPNPFNMSVFDNVAYGKRMQGLKNKGRIADIVEISLRKAALWDEVKDRLKKPAQALSGGQQQRLCIARTIAMEPEIILMDEPTSALDPIATGRIEELIGELKKDYSIIIVTHAMHQASRVSNKTAFFLLGELIEYNNTREVFTNPKDKRTEDYISGRFG

SEQ ID NO: 44351 - DNA, 1236 bp, Unknown
  Obtained from environmental sample
  misc_feature (1)..(1236): n is a, c, g, or t
atggcgagcattgagcggaataccaaccttattgaagaaaaaggcgtactggtaaccgcccaggattatgaacacgccgcagtggtgcgggataaagtacgggaacttaaatcaaggctggaggacgcccgcgttgcatgggaacgggtgtatagccgggatcatattcaggttgatgaagatgatattcgccgcgtggtttcacaggcgaccggcattcccttgatgaaccttgaggaacatgaatcaaaacgtatgctcatgatggaaacggaactgcataaacgggtaatcgggcaggatgacgcggtgcagcgcattgcgtcggcgatacgccgttcccgcgccggagtttcatccccccgccgccccatgggttcctttatttttctggggcctaccggcgtcggaaaaacccttcttgccaaacggcttgcggaatgtctctttggcaacgaagaaagtctggtgcgaatcgatatgtctgattttatggaaaagcacaatacctcgcgtctggtgggagcgccgccgggttatatcggctatgaagagggcggcatactcactgaaaaaatccggcgcaacccctaccgtgtgattctgtttgatgaaattgaaaaagcccaccgcgatgtatttaatttatttttgcaggtaatggaagagggcgaactgcgcgacaatttaggccatacggttagtttccgtaacacggttatcataatgaccagcaacgccggcgtgcgggaaatttcccgcgactcccggctgggctttgcctccggttccggccagatgagcatggaagaaattgaatcgcaggctatgtcggaactcaagcggctgttcaatcccgaattcctgaatcgcgttgacgacgtggtcgtcttccaccccctgagcgttgagcagatagagagtattctggagattgagctcgcggaactgtccacaaggctcgcggaacagaattacagcatcagcctgtcgcccgaggccagggatttgcttattgaaaaaggctgggatcccaaattcggcggaaggcccctgcgccgcaccctgcagaaagaactcgaagacccattagcccgcatcctcatggaaaacgactggccgaaaggctctgtttttaccgcaaacgtccgcgaggggaagatagaactctacggcaatataccaacatacgcagatgaattagaaatcaggaatgacgagctagtttacggttag

SEQ ID NO: 44352 - protein, 411 aa, Unknown
  Obtained from environmental sample
  DOMAIN (127)...(320): ATPase family associated with various cellular activities (AAA)
  misc_feature (1)..(411): Xaa is any amino acid
MASIERNTNLIEEKGVLVTAQDYEHAAVVRDKVRELKSRLEDARVAWERVYSRDHIQVDEDDIRRVVSQATGIPLMNLEEHESKRMLMMETELHKRVIGQDDAVQRIASAIRRSRAGVSSPRRPMGSFIFLGPTGVGKTLLAKRLAECLFGNEESLVRIDMSDFMEKHNTSRLVGAPPGYIGYEEGGILTEKIRRNPYRVILFDEIEKAHRDVFNLFLQVMEEGELRDNLGHTVSFRNTVIIMTSNAGVREISRDSRLGFASGSGQMSMEEIESQAMSELKRLFNPEFLNRVDDVVVFHPLSVEQIESILEIELAELSTRLAEQNYSISLSPEARDLLIEKGWDPKFGGRPLRRTLQKELEDPLARILMENDWPKGSVFTANVREGKIELYGNIPTYADELEIRNDELVYG

SEQ ID NO: 44353 - DNA, 912 bp, Unknown
  Obtained from environmental sample
  misc_feature (1)..(912): n is a, c, g, or t
atgccagtggactggaataaagctccgcggcgggaaaggttcatttcctttcacgccaggcgcgaaggtcgcgtcccagcagccaatcgcggaactaaagtagggggaatcatgttagataaaaaagttgatcctgtttgggtattaaaaggatgcattatcctgctggtcgccacgtttttgtttaatttcgtttccgccagcttttctcccagggctgtggcgcaaaccgccgcctcaagcgaagaactaccttctttcaggaatatgggaggtataatcccaaacagccgggacttgccacgcgtaacccttgggagttttattataaacatcgccaagaccacggggatttacgcatttttcaccgatgcaatcgagggagagactcccgcgggccagaaaatcactgtgttcggctggaatgaattcatcatggtgctggttgggtttttggttatttatttgggggcggcaaagggttttgagcccttgctacttgtgccgattggcttcggcattgttttcgtcaatatccccttcgcgaatatggggagcccgggtatctggaacgaacagcttaaagcgtttgagcatcagggttttcttgacattatttacaaatccggggtaggcaacgaatttttccccctcatcatctttatcggcataggggccatgacagatttcggccctcttatcgccaatccaaagaccgcccttttaggcgcggctgcccagttcggcgtattcgctactttgttttttatcagcgtagccaacttcctgccgggagtcgcctttaacctgaaagaggcctgcgctgtagcgattatcggaggcgcggacggtcctaccacgatttacatcgcggcaaacttgcccctcatcttctggcgacggttgcggtag

SEQ ID NO: 44354 - protein, 303 aa, Unknown
  Obtained from environmental sample
  DOMAIN (140)...(303): Na+-transporting methylmalonyl-CoA/oxaloacetate decarboxylase, beta subunit
  misc_feature (1)..(303): Xaa is any amino acid
MPVDWNKAPRRERFISFHARREGRVPAANRGTKVGGIMLDKKVDPVWVLKGCIILLVATFLFNFVSASFSPRAVAQTAASSEELPSFRNMGGIIPNSRDLPRVTLGSFIINIAKTTGIYAFFTDAIEGETPAGQKITVFGWNEFIMVLVGFLVIYLGAAKGFEPLLLVPIGFGIVFVNIPFANMGSPGIWNEQLKAFEHQGFLDIIYKSGVGNEFFPLIIFIGIGAMTDFGPLIANPKTALLGAAAQFGVFATLFFISVANFLPGVAFNLKEACAVAIIGGADGPTTIYIAANLPLIFWRRLR

SEQ ID NO: 44355 - DNA, 612 bp, Unknown
  Obtained from environmental sample
  misc_feature (1)..(612): n is a, c, g, or t
atggcccttgtgccgatgatccagccacccatcatgaaactgcttacatcacaaaaagagcggcttataaaaatgaagcagcttcgtcctgtctccaagacagaaaaaatcgcctttccgataattgtattttcactggcaattcttctgattccggcggcggccccgcttatcggctgtcttatgttcggaaactttatccgtgaaatcggcgtggtggacaggctttcaaagacagcccaaaacgagctgatgaatatcgtgtcaatgttcctgtctttgggagtcggaagtcagatgactccggaaaagttccttaacccatcgtcattaatcatcgtagtaatgggtcttcttgccttttcgatagcgaccgcctcgggcgttatggtagcgaagtttatgaatctctttcttaaagagaagatcaacccgcttatcggctccgccggagtttccgcggttccaatggcggctcgtgtttcaaataaagtcggtcttgaatacgatcccggcaacttcctattaatgcacgcaatgggcccgaatgtggccggcgtaataggaacagcaatagccgccggcgttatgatagcggtttacggcaggtaa

SEQ ID NO: 44356 - protein, 203 aa, Unknown
  Obtained from environmental sample
  DOMAIN (1)...(202): Na+-transporting methylmalonyl-CoA/oxaloacetate decarboxylase, beta subunit
  misc_feature (1)..(203): Xaa is any amino acid
MALVPMIQPPIMKLLTSQKERLIKMKQLRPVSKTEKIAFPIIVFSLAILLIPAAAPLIGCLMFGNFIREIGVVDRLSKTAQNELMNIVSMFLSLGVGSQMTPEKFLNPSSLIIVVMGLLAFSIATASGVMVAKFMNLFLKEKINPLIGSAGVSAVPMAARVSNKVGLEYDPGNFLLMHAMGPNVAGVIGTAIAAGVMIAVYGR

SEQ ID NO: 44357 - DNA, 867 bp, Unknown
  Obtained from environmental sample
  misc_feature (1)..(867): n is a, c, g, or t
ttgtatttcaagcagatttcaatgtttccccttttaaccctgcaggaagagcagaatataggcgagaaaattatcagcctaagaaccaaaattaaaacgctggaaaacgaaaaaaagaaaaaggaaatagataacagcgaagaaaccgccgcgcttgaacgcgctcttcttttctataaaaataaaatgataaattccaacctgcgccttgttgtaagcatcgcgaaaaattaccagcaccgcgggctttctcttctggacttgatcgacgaggggaacatagggcttatcgaggcggtagaacgctttgattacacaagaggctgccgcttctcaacttacggcacctggtggataaggcaggcgattattaaaagcatagcggacaaggggcgcgttatacgcatacctattcacatgcttaacactattaaaaaatgctactatgtcgccaaacagctaacgcaggatttgggacgcgaccccaacgaacaggaactgtccgaatacctgggcgttccggtttccaaggtaaaggaaatagtaaaactttctcaggagacgacaagccttgacacaatcgtagacgacggaaacatgacccgccttgcggaacttataaaagacgacgtaagggccgaaccttttgaaatggttttttccatgaccttgcaggagacaatgaccgatatcctctcgcagttatctgaaagggaaatgaaaattatccagctccgttacggtttaacgggagaaaacccccttacccttgaaagaacagggcaatacctggggataacccgcgagcgcgtcaggcaaatccaggaaaaagccgtctggaaactcccgcaccatgcgagaacttaa

SEQ ID NO: 44358 - protein, 288 aa, Unknown
  Obtained from environmental sample
  DOMAIN (137)...(219): Sigma-70 region 3
  misc_feature (1)..(288): Xaa is any amino acid
MYFKQISMFPLLTLQEEQNIGEKIISLRTKIKTLENEKKKKEIDNSEETAALERALLFYKNKMINSNLRLVVSIAKNYQHRGLSLLDLIDEGNIGLIEAVERFDYTRGCRFSTYGTWWIRQAIIKSIADKGRVIRIPIHMLNTIKKCYYVAKQLTQDLGRDPNEQELSEYLGVPVSKVKEIVKLSQETTSLDTIVDDGNMTRLAELIKDDVRAEPFEMVFSMTLQETMTDILSQLSEREMKIIQLRYGLTGENPLTLERTGQYLGITRERVRQIQEKAVWKLPHHART

SEQ ID NO: 44359 - DNA, 603 bp, Unknown
  Obtained from environmental sample
  misc_feature (1)..(603): n is a, c, g, or t
atggcgaaaataaagctcactaaaaacgagctaaaaaagcaaaaagattcccttaaaatgttccagcgttaccttcctacgctgatgttgaaaaaacagcaactacagggggagatacggcttaccgaattgcggattaaggaactgcacgcccaaaaagagcgtcttgacgaatccttcaaaacctggatagccgttttcggagagaagaatgtttttactccggatatattaaaaataaccaaactgaaaaccggcatggggaacatcgccggcgtcgcgattcccgttttcgaaggcgccgagtttcaggttagcccatacgatcttttcggaacctccctctggcttgacgccgcggttgaaaaaatgagccaggccctccttctcgatcttgaagctgagatagttgaagagcagcgcaaacggctggatcacgaattacgcgtaacgacgcagagggttaaccttttcgagaaagtaaaaattcccgaaacaaagggcagcataaaaaagattcaggtttatctgggcgaccagcagacctcagccgtggtacggggaaagatcgccaaaaccgggcttgtaaaggcggcaaagtaa

SEQ ID NO: 44360 - protein, 200 aa, Unknown
  Obtained from environmental sample
  DOMAIN (2)...(196): ATP synthase subunit D
  misc_feature (1)..(200): Xaa is any amino acid
MAKIKLTKNELKKQKDSLKMFQRYLPTLMLKKQQLQGEIRLTELRIKELHAQKERLDESFKTWIAVFGEKNVFTPDILKITKLKTGMGNIAGVAIPVFEGAEFQVSPYDLFGTSLWLDAAVEKMSQALLLDLEAEIVEEQRKRLDHELRVTTQRVNLFEKVKIPETKGSIKKIQVYLGDQQTSAVVRGKIAKTGLVKAAK

SEQ ID NO: 44361 - DNA, 933 bp, Unknown
  Obtained from environmental sample
  misc_feature (1)..(933): n is a, c, g, or t
atgatccgcaccggtatccccatgatcgacttgttcaacaccctggtcgtctcgcagaaactgccgatcttctcggtctcgggagaaccgtacaacgagcttctggcgcgtatagcaatgcaggcagaggttgacgtgatcgtgctgggcggcatgggtcttaaatacgatgattaccttaccttcaagaacacgcttgaaaacgcaggtgccctcgctcgcacggtcatgtttatgcacaccgccagcgacccgacggtcgaatgcctcatgatccccgatatgtcccttgccgttgccgagcagttcgccttaaagggcaaggacgtgctggtgcttcttaccgacatgaccaacttcgcagacgcgatgaaggaaatttccattatccaggagcaggtaccgtccaaccgaggctaccccggcgatttgtacagccagctagcaagccgctacgaaaaagccgttgactttgaaaaggccggctccattaccgtactgggcgtaaccacaatgcccggcgatgatgtaacccatccggtacctgacaataccgggtatatcaccgagggccagtactacctcaaacacggacgcatagagccgttcggttccttaagccgccttaaacagcaagttaacggcaaaacccgcgcggaccaccgcgccctgatggacggcatgatcaaactgtactcagccttccgggacactctggaaaagaaggctatgggctttatgatgtcagcctgggacgaanaactcctcaaatacggcgcgcagtttgaatcgaagatgatggacctctcggtcaatattccccttgaaaaagcccttgaccttggatgggagattctggccgactgtttcaatcccgaagataccggccttaggaccgagcttatcagcaaattctggccgaagaagggttag

SEQ ID NO: 44362 - protein, 310 aa, Unknown
  Obtained from environmental sample
  DOMAIN (4)...(207): ATP synthase alpha/beta family, nucleotide-binding domain
  misc_feature (1)..(310): Xaa is any amino acid
MIRTGIPMIDLFNTLVVSQKLPIFSVSGEPYNELLARIAMQAEVDVIVLGGMGLKYDDYLTFKNTLENAGALARTVMFMHTASDPTVECLMIPDMSLAVAEQFALKGKDVLVLLTDMTNFADAMKEISIIQEQVPSNRGYPGDLYSQLASRYEKAVDFEKAGSITVLGVTTMPGDDVTHPVPDNTGYITEGQYYLKHGRIEPFGSLSRLKQQVNGKTRADHRALMDGMIKLYSAFRDTLEKKAMGFMMSAWDEXLLKYGAQFESKMMDLSVNIPLEKALDLGWEILADCFNPEDTGLRTELISKFWPKKG

SEQ ID NO: 44363 - DNA, 504 bp, Unknown
  Obtained from environmental sample
  misc_feature (1)..(504): n is a, c, g, or t
gtgttaatctctttaattgccgccgtttccgaaaatggctcaataggaaaagacaacaagctgccttggcatttgcctgcggatttgcgtttttttagaaacacaactcttggccaccctataataatggggcggaaaagttttgaaagcataggcaaagcattgcccggcagaacgaatatagtgctaacaaggaacgccaactttgcggcggcggagaatttgaaggttgcgcattcgttagaggaagcttttgaaattgcacgagaaacgggtgcagacgagtgttttgtgataggcggtgcggaaatttacaaagaagccttgccgttttgccaaaaactctacataacaagggtgcatgggactttcgagggcaatacatttatgcccgaatttgaaaaaggcttttgcaaaatcagcagcgtgagcaattcaaaagacgagcagaatgcttacgcttacgactttgagatttttatcccaaatgcctgctcttcctga

SEQ ID NO: 44364 - protein, 167 aa, Unknown
  Obtained from environmental sample
  DOMAIN (2)...(162): Dihydrofolate reductase
  misc_feature (1)..(167): Xaa is any amino acid
MLISLIAAVSENGSIGKDNKLPWHLPADLRFFRNTTLGHPIIMGRKSFESIGKALPGRTNIVLTRNANFAAAENLKVAHSLEEAFEIARETGADECFVIGGAEIYKEALPFCQKLYITRVHGTFEGNTFMPEFEKGFCKISSVSNSKDEQNAYAYDFEIFIPNACSS

SEQ ID NO: 44365 - DNA, 1809 bp, Unknown
  Obtained from environmental sample
  misc_feature (1)..(1809): n is a, c, g, or t
atgcttatgggcggttttacttcttggtctctgttatttgacaaacttctaaaaagggagaatatgggaaacgaaaataacattgatacaaaaactgatgcgtcgggaacggattttataagcgaatttataaaagaagatttggcgtcgggaagatacggctatgtgcatacacgcttcccgcccgagcccaacggctggctgcacatcgggcactgcaaggcgttctatatcgactttagcatggctgaacgtttcggcggaaaatgcaatttgcgctttgacgacaccaaccccgaaaaagaagacatctcctacgttgaggcaatcaagcgtgacattaaatggatgggctacgattgggaagaccgtgaatattacgcctccgattattacgagtacctttatgagttagcgataaaaatcatcaaaaagggaaaagcctatgttgacgatttaactgataccgaaatgagcgagtaccgaggaacagcggtcgccgacaagaataatatcaccataacgccgccgggcaaaaacagtccttacagagatcgttctatcgaagaaaatcttgatctctttgcgagaatgcgtaagggcgaattcgccgacggcgcaaaaaccctgcgggctaaaatcgacatgactcaccctaacctgcttctgcgtgatcctgtcatgtaccgtatccgccgtgaaacacattaccgcacaggcaattcatggtgtatctatcccatgtatgattttcagcacccgctttccgacgcaaaagagggtatcacccactctctctgttcgcttgaatacgaaatccacagaccgctttacgaatggtttatccaagaggcggaagtttttccttcacgccagatagaatttgcccgtcttaatttgagccataccgttatgagcaaacgctggctgttaaagctcgtgcaggacaaatatgtttcaggctgggacgatccgagaatgcccacaatagccggtcttcgcagacgaggttacactcccgaagccatccgcagttttgtctctcaaatcggcatcgcaaaaacggacagcatggtagacatcgcctttcttgaatactgtcttcgtgaagacttaaacaaacacgctctgcgtgtaatggcagtcctgcgccctctcaaactaatcatagaaaattgggacgaggttaagaccgatgaaatggaagcggtaaataaccccgaggacgagagcgcgggtaaacgcctagtgccgttctcccgcgaattatggatagagcgtgaagattttgaagaaactccgccgcctaaatatttccgtcttttccccggaaactccgtccgcctgcgttatgcgtacattgttacctgcacaggctttgacaaagacgcaagcggtaatattacagccgtgcgctgcacttacgatcccgaaacaagaggcggtaacgctcaagacaacaaaaaagtaaaaggtacgatacattgggtatccgcggcgcattcagttcccatacaagcccgtatttacgattacttgttcggcgtggaaaagccgatggaagttcctaaccgtcccgacggctccgccggcgaatttaccgacaacttaaatcccaattcgcttgaagtaattgaaaacgcatggggtgaaccgttactcgcaaatgtttcgccgggcaaagttttccaatttgaacgcctcggctattttgtccgcgatcccgacatttccgctaacggaaaatctgtttttaacaaaacaatcggtcttcgcgacacatgggcgaaaatagcgaataaaagttag

SEQ ID NO: 44366 - protein, 602 aa, Unknown
  Obtained from environmental sample
  DOMAIN (376)...(574): tRNA synthetases class I (E and Q), anti-codon binding domain
  misc_feature (1)..(602): Xaa is any amino acid
MLMGGFTSWSLLFDKLLKRENMGNENNIDTKTDASGTDFISEFIKEDLASGRYGYVHTRFPPEPNGWLHIGHCKAFYIDFSMAERFGGKCNLRFDDTNPEKEDISYVEAIKRDIKWMGYDWEDREYYASDYYEYLYELAIKIIKKGKAYVDDLTDTEMSEYRGTAVADKNNITITPPGKNSPYRDRSIEENLDLFARMRKGEFADGAKTLRAKIDMTHPNLLLRDPVMYRIRRETHYRTGNSWCIYPMYDFQHPLSDAKEGITHSLCSLEYEIHRPLYEWFIQEAEVFPSRQIEFARLNLSHTVMSKRWLLKLVQDKYVSGWDDPRMPTIAGLRRRGYTPEAIRSFVSQIGIAKTDSMVDIAFLEYCLREDLNKHALRVMAVLRPLKLIIENWDEVKTDEMEAVNNPEDESAGKRLVPFSRELWIEREDFEETPPPKYFRLFPGNSVRLRYAYIVTCTGFDKDASGNITAVRCTYDPETRGGNAQDNKKVKGTIHWVSAAHSVPIQARIYDYLFGVEKPMEVPNRPDGSAGEFTDNLNPNSLEVIENAWGEPLLANVSPGKVFQFERLGYFVRDPDISANGKSVFNKTIGLRDTWAKIANKS

SEQ ID NO: 44367 - DNA, 417 bp, Unknown
  Obtained from environmental sample
  misc_feature (1)..(417): n is a, c, g, or t
atgatcagatggccgaggaataacgcggagaataaacttttctggatagtttcaaataatctggctttgttaataaaaaaaacatgggtggaaaaatccgatgaagaccgcaaaggaaaattacaggacgatatccccctgtttatgaaaactgtcgaattgccggattacataaaagcgctggacgaattcagcgaaatccttgatgaactggcttatctttttttcggtacacaaagcgaaaaagaggattttaccgaatacactttccgcattgatgtgcagatggggcttttctggtggtacggaagcaaacttgatacattaaaagagttgaaaaataaaaatatagaccaaaacgacaaatgcttatgggcggttttacttcttggtctctgttatttgacaaacttctaa

SEQ ID NO: 44368 - protein, 138 aa, Unknown
  Obtained from environmental sample
  misc_feature (1)..(138): Xaa is any amino acid
MIRWPRNNAENKLFWIVSNNLALLIKKTWVEKSDEDRKGKLQDDIPLFMKTVELPDYIKALDEFSEILDELAYLFFGTQSEKEDFTEYTFRIDVQMGLFWWYGSKLDTLKELKNKNIDQNDKCLWAVLLLGLCYLTNF

SEQ ID NO: 44369 - DNA, 1536 bp, Unknown
  Obtained from environmental sample
  misc_feature (1)..(1536): n is a, c, g, or t
atgccgagccggagtaacctggctgttggcaacgccatgttcaaatatcccgacctgccaaaacagataaacaatatcaacatcaaggccggcgccttctacgacggatccgtgttcgacagaacaacgcttgacgtggacaagctccattttgagatggcaggcaaccccttcgatgccgaactgcatgtaaagacccccgcaagcgatatgcaggttgcggcgaaattttccggcaggatagacttcaactccctgcccgacgttattccgttagatgacatcaccctaaagggtcttcttgaatgtgatttcgcgctggctggacgaatgtcttccctggaaaacaggcggtacgaagactttgacgccaaaggcgcgctgaaacttggcggcgcggaatttaaaaaccccagccttccgcaaaccataaaaaacgcgaatattagccttaattttacgccaaaaagggttgaaatgacgaatttcgacgcttttatgggaaacagcgatattgttatgaacggcgcgctggaaaatttcataccctttgttcttaaaggcgctgtcataagcggcagcctcagcctgaaatcggacaacatcgaccttaatgaattcatgaagccgaaagatacttctgaaaaacaaaaagaaacatccgaaaagccggaagataattccccgatgtcggttatcgaagtgccaaaaaatattaatttttccgttaaggtaaacatcggcaggctcctcttcgacaaactgaccatcacaggcgttacaggttcgctgctggtgaaagacggcaaactgcaaatgcaaaatcttgacatgaatatgctggaaggcggcgtaacgctgtcaggcgaatataacacgcaggatattaaaaccccgtcggtttatttagacgcggacataaaacagatcggcgccgcgccggcgatttcatcgtttaaaatactccaaaaaatactgccccggccgcagaattacgccggaaaagtgtcggctaacctgatcctgtccggtattctcgacgaacatctcagcccggtattgaacacggttgggtcaaaaggccggctgcggacgcataacctgagaatacaaaactccgaattgttcggcgctatggcaaatctgctgaaagacgaagcgtggcgcgcgcccgctcttaataatattaatatcgaatatgaaatcagggacggacgtttaacaatagagccggtacggatgaacatcgggcagaccagtctcgaactcacaggcagccagggactcgatacggctcttgattacaaggtaaacgccgccgtgcctgtttcggcaatcggctccggcgcggctgatattttgaacaaaatacccggagcttctaagatcagggaaatcagggtgacaggattgataggcggcacagctgccaagcctgtcataagcctcaacgtcgccgacatggctgctaacgccgccgaaactgtcaaagaaacagtcaaagaacaggcgaaagaagaattgacagacagataa

SEQ ID NO: 44370 - protein, 511 aa, Unknown
  Obtained from environmental sample
  misc_feature (1)..(511): Xaa is any amino acid
MPSRSNLAVGNAMFKYPDLPKQINNINIKAGAFYDGSVFDRTTLDVDKLHFEMAGNPFDAELHVKTPASDMQVAAKFSGRIDFNSLPDVIPLDDITLKGLLECDFALAGRMSSLENRRYEDFDAKGALKLGGAEFKNPSLPQTIKNANISLNFTPKRVEMTNFDAFMGNSDIVMNGALENFIPFVLKGAVISGSLSLKSDNIDLNEFMKPKDTSEKQKETSEKPEDNSPMSVIEVPKNINFSVKVNIGRLLFDKLTITGVTGSLLVKDGKLQMQNLDMNMLEGGVTLSGEYNTQDIKTPSVYLDADIKQIGAAPAISSFKILQKILPRPQNYAGKVSANLILSGILDEHLSPVLNTVGSKGRLRTHNLRIQNSELFGAMANLLKDEAWRAPALNNINIEYEIRDGRLTIEPVRMNIGQTSLELTGSQGLDTALDYKVNAAVPVSAIGSGAADILNKIPGASKIREIRVTGLIGGTAAKPVISLNVADMAANAAETVKETVKEQAKEELTDR

SEQ ID NO: 44371 - DNA, 1074 bp, Unknown
  Obtained from environmental sample
  misc_feature (1)..(1074): n is a, c, g, or t
gtgctggatccggagcagaatgtcgcttttagggatcattatctggatatgccttttgacatttcccacatcttctttattgttacagctaacaccctggacacaatcccgcctccgcttctggatcgtatggagataatacagcttcccggctatatcgacacggaaaagctggaaatcgcccgcaggtatcttgttcccaaaagccttgaaaaaaacggcctgaaaaaaaaccaggtcaagtacaccaaggacagccttttgcatattgccaactcctacgcccgcgaggccggcgtgagaaattttgaaaaaaaccttgacaagattcaccgcaagctggcgaagcagatagtagaggagagggagaaatcgtccgcgaaagcggacgacaacgtttccgaaggaaacgacgcttccggcggaaaagctgcaaagcctgtcctgttccccatagataaaaagctgattgaaaaacatttgggcaagccggtttttcctgaaggcgacataaaaaaagcggacaggccgggaatgtccgtggggcttgcctggacaagcatgggcggcgacactctggtaatcgaggcgacctcggttccgggcaaggaagggctgacccttaccggtaaaatgggcgacacgatgaaggaaagcgccgctatcgccatgaccgtagcgcggaaaatggcaatagaacgctaccggatcgcgcaggactggtttgattttaaccatatacacctgcatataccggaaggcgcgaccccaaaagacggtccctcggccggaataacaatggctacggccctgctttcgcttatgcgggataaggtggtcactgaacggctggtaatgacaggcgaaatttccctgacagggcaggtgcttccaatcggcggtctgaaggaaaaaacaatcgccgcgaggcggaataaagcccggcacatcattatccccaagcagaacgagcgcgatcttgacgagattcccgaacatgtaaagaaggacatcagcttccatccggtagaacgcttcgaggaagtgctggcattagctttacctgacgcctag

SEQ ID NO: 44372 - protein, 357 aa, Unknown
  Obtained from environmental sample
  DOMAIN (151)...(356): Lon protease (S16) C-terminal proteolytic domain
  misc_feature (1)..(357): Xaa is any amino acid
MLDPEQNVAFRDHYLDMPFDISHIFFIVTANTLDTIPPPLLDRMEIIQLPGYIDTEKLEIARRYLVPKSLEKNGLKKNQVKYTKDSLLHIANSYAREAGVRNFEKNLDKIHRKLAKQIVEEREKSSAKADDNVSEGNDASGGKAAKPVLFPIDKKLIEKHLGKPVFPEGDIKKADRPGMSVGLAWTSMGGDTLVIEATSVPGKEGLTLTGKMGDTMKESAAIAMTVARKMAIERYRIAQDWFDFNHIHLHIPEGATPKDGPSAGITMATALLSLMRDKVVTERLVMTGEISLTGQVLPIGGLKEKTIAARRNKARHIIIPKQNERDLDEIPEHVKKDISFHPVERFEEVLALALPDA

SEQ ID NO: 44373 - DNA, 312 bp, Unknown
  Obtained from environmental sample
  misc_feature (1)..(312): n is a, c, g, or t
atgtccttctttacatgttcgggaatctcgtcaagatcgcgctcgttctgcttggggataatgatgtgccgggctttattccgcctcgcggcgattgttttttccttcagaccgccgattggaagcacctgccctgtcagggaaatttcgcctgtcattaccagccgttcagtgaccaccttatcccgcataagcgaaagcagggccgtagccattgttattccggccgagggaccgtcttttggggtcgcgccttccggtatatgcaggtgtatatggttaaaatcaaaccagtcctgcgcgatccggtag

SEQ ID NO: 44374 - protein, 103 aa, Unknown
  Obtained from environmental sample
  misc_feature (1)..(103): Xaa is any amino acid
MSFFTCSGISSRSRSFCLGIMMCRALFRLAAIVFSFRPPIGSTCPVREISPVITSRSVTTLSRISESRAVAIVIPAEGPSFGVAPSGICRCIWLKSNQSCAIR

SEQ ID NO: 44375 - DNA, 486 bp, Unknown
  Obtained from environmental sample
  misc_feature (1)..(486): n is a, c, g, or t
ttgttcggcgctatggcaaatctgttgaaaaacgagtcctggcgcacccccactctgaacaatattaccgttaattatgaaataaaggacggacagttaacgattgagccgatacggatgaacatcgcgcagaccgcgctcgaactcactggcggccagggactcgatatgaccctgcattacaagataaacgccgcggtgcctgtttcaacagtcggttccggcgcgacagatattttgagcaaaatacccggaggctcgaagatcagggaaatcaaggtgacgggactgataacaggcgcgcctataaaacccgccgtaaccctcagcgtcgccgacatggcggctaacgttgccgaaagcgttaaagaaacagtcaaagagcaggtaaaagaaacggtcaaagaagctgttaaagaaaatgttgaaaagcaagtcacatccattttagacgctttcaaacaaataaaaggtaacagggaataa

SEQ ID NO: 44376 - protein, 161 aa, Unknown
  Obtained from environmental sample
  misc_feature (1)..(161): Xaa is any amino acid
MFGAMANLLKNESWRTPTLNNITVNYEIKDGQLTIEPIRMNIAQTALELTGGQGLDMTLHYKINAAVPVSTVGSGATDILSKIPGGSKIREIKVTGLITGAPIKPAVTLSVADMAANVAESVKETVKEQVKETVKEAVKENVEKQVTSILDAFKQIKGNRE

SEQ ID NO: 44377 - DNA, 840 bp, Unknown
  Obtained from environmental sample
  misc_feature (1)..(840): n is a, c, g, or t
atggaagcggtacagggtttcccgcttcttacggggctttcaatttcttccgctccaaccgcgtttatgggaaaactctacctttgcgatgaagacggcaaagtttattcggttgacgcagcaggcaagcagagcgtttgggaaacaaaatttaacgcggctctgcgttccccgccgtctttcctgtccgtttcaggcaaaaaaggaaacgtcgtatacacagccgtttatccgaaaagtttttttggagaaatgtggctgcttgacggcgaaggaaaagcattgccgaattggcctaagccgatagctatagaaaaaaacgacgacgaagacagcggcagttttggcattggttttggatcgccgcttttatttgcgcagaacaacaaagtttacgccgcctttgtaaatcaatcggggcagcttttagtttacgatgaagacgcggttcttgttccgccgttccccgtcgcgcttgacggtgttttttaccaacagcctgtttttgacggaacatatttgtggcttgtttcgtctaacggttcgtttttccgggtaagtttggagggcgagattttgtatcagactattcaaggtttttcagtaaaagaagaaggttatataacattctttgacagcgacggagataaagttcctgaaatctatataaccggcgacggcaacgcgctttatgcctatacgcgcaatttccgctctcttgaaggctttccgcttcccgcgtggggcagacctttatttgttccggcgcagggaaacaagaaagcggaaattttcggcatgggaatggacaagcgtttgtatcgctggcagttcaaataa

SEQ ID NO: 44378 - protein, 279 aa, Unknown
  Obtained from environmental sample
  misc_feature (1)..(279): Xaa is any amino acid
MEAVQGFPLLTGLSISSAPTAFMGKLYLCDEDGKVYSVDAAGKQSVWETKFNAALRSPPSFLSVSGKKGNVVYTAVYPKSFFGEMWLLDGEGKALPNWPKPIAIEKNDDEDSGSFGIGFGSPLLFAQNNKVYAAFVNQSGQLLVYDEDAVLVPPFPVALDGVFYQQPVFDGTYLWLVSSNGSFFRVSLEGEILYQTIQGFSVKEEGYITFFDSDGDKVPEIYITGDGNALYAYTRNFRSLEGFPLPAWGRPLFVPAQGNKKAEIFGMGMDKRLYRWQFK

SEQ ID NO: 44379 - DNA, 711 bp, Unknown
  Obtained from environmental sample
  misc_feature (1)..(711): n is a, c, g, or t
gtgcttgccgccggcagggccgtgctcacgcccgaggagcaggaacttggcatcgccctgatcgatctcggcggcgggacaaccgacgtgctggtttattatgacggcgccccgtattccacattcacaatccccgttggcggggtggaggtaacccgcgacatatccacgataaaggccatttctatcgaatacgccgaacagataaagcaggaatccgcctgctgttgggagcctctgctggaaaacgacaaagacatacttgttccgccgcgcgtggcagggcagccgccgcttaagataccacgttcccatatttacgcgatcgtaaggccgagaatggaagaaattttcgatcttgtaaaacaaaagctggactgcctcggtttgacccgccccttaagcggggggcttgtattaacaggcggcggcgcgtccctgtccggcgttgtggaacttgccggcgatattttcaagatgccggtccgcataggcatgcctatacgtttcgcgaatctgggaggccttatcgacaattacaggacgccggcctacgccaccgccatcggccttgtgctggaaggcgacaggcgcgaaagggaggagaatactgagcgggattccccgctctggccaaagcagccgatgaacgggaaagcttcgggggcgtttggcagatttgttaagtggataaaagatgggcttttttaa

SEQ ID NO: 44380 - protein, 236 aa, Unknown
  Obtained from environmental sample
  DOMAIN (18)...(191): Cell division protein FtsA
  misc_feature (1)..(236): Xaa is any amino acid
MLAAGRAVLTPEEQELGIALIDLGGGTTDVLVYYDGAPYSTFTIPVGGVEVTRDISTIKAISIEYAEQIKQESACCWEPLLENDKDILVPPRVAGQPPLKIPRSHIYAIVRPRMEEIFDLVKQKLDCLGLTRPLSGGLVLTGGGASLSGVVELAGDIFKMPVRIGMPIRFANLGGLIDNYRTPAYATAIGLVLEGDRREREENTERDSPLWPKQPMNGKASGAFGRFVKWIKDGLF

SEQ ID NO: 44381 - DNA, 762 bp, Unknown
  Obtained from environmental sample
  misc_feature (1)..(762): n is a, c, g, or t
atggagatttacgcggtgaaagagtttgagagagtgacgccggaggatcatgatgaccagccgccggcgaagatcaaggttatcggggtcggcggcggcgggtgtaacgccgtgaaccggatgatagtcagcgggctgtcaggcgtcgagtttatcgccgttaatacggataaacaggaccttttgaaaaaaagcaaggccgagaccaaattgcagattggcgccaaagtaaccggcggaaggggggccggcagcaaaccgtccgttggagaggacgcggccaaagaagatcaggaggagatcggcgacgtctcgcgcggcgcggacatggtttttgttaccgccggcatgggcggcggcaccggtactggcgccgctccggtaattgcccaggtagcccgggaatgcggagccctgaccgtgggagtggtaaccaagccctttggttttgaaggccgttacaaaatgcgcctggcggaagatggaattgccaagatgagggaggccgttgataccctcatcgttattcaaaatcagcagcttctttctttggttgaaaagtggactcccattaaagaagctttccgcatggccgacgacatactccgtcagggggttcaggggatttccgatttgatccttgagacaggcgagatgaacgtagactttgccgatgtaaaacaaaccatgtatggtcaaggggacgccctgatgggggtaggaattgcctctggagataacaggcccgtcaagcggccttga

SEQ ID NO: 44382 - protein, 253 aa, Unknown
  Obtained from environmental sample
  DOMAIN (23)...(217): Tubulin/FtsZ family, GTPase domain
  misc_feature (1)..(253): Xaa is any amino acid
MEIYAVKEFERVTPEDHDDQPPAKIKVIGVGGGGCNAVNRMIVSGLSGVEFIAVNTDKQDLLKKSKAETKLQIGAKVTGGRGAGSKPSVGEDAAKEDQEEIGDVSRGADMVFVTAGMGGGTGTGAAPVIAQVARECGALTVGVVTKPFGFEGRYKMRLAEDGIAKMREAVDTLIVIQNQQLLSLVEKWTPIKEAFRMADDILRQGVQGISDLILETGEMNVDFADVKQTMYGQGDALMGVGIASGDNRPVKRP

SEQ ID NO: 44383 - DNA, 561 bp, Unknown
  Obtained from environmental sample
  misc_feature (1)..(561): n is a, c, g, or t
ttgaccatacatggtttgttttacatcggcaaagtctacgttcatctcgcctgtctcaaggatcaaatcggaaatcccctgaaccccctgacggagtatgtcgtcggccatgcggaaagcttctttaatgggagtccacttttcaaccaaagaaagaagctgctgattttgaataacgatgagggtatcaacggcctccctcatcttggcaattccatcttccgccaggcgcattttgtaacggccttcaaaaccaaagggcttggttaccactcccacggtcagggctccgcattcccgggctacctgggcaattaccggagcggcgccagtaccggtgccgccgcccatgccggcggtaacaaaaaccatgtccgcgccgcgcgagacgtcgccgatctcctcctgatcttctttggccgcgtcctctccaacggacggtttgctgccggccccccttccgccggttactttggcgccaatctgcaatttggtctcggccttgctttttttcaaaaggtcctgtttatccgtattaacggcgataaactcgacgcctga

SEQ ID NO: 44384 - protein, 186 aa, Unknown
  Obtained from environmental sample
  misc_feature (1)..(186): Xaa is any amino acid
MTIHGLFYIGKVYVHLACLKDQIGNPLNPLTEYVVGHAESFFNGSPLFNQRKKLLILNNDEGINGLPHLGNSIFRQAHFVTAFKTKGLGYHSHGQGSAFPGYLGNYRSGASTGAAAHAGGNKNHVRAARDVADLLLIFFGRVLSNGRFAAGPPSAGYFGANLQFGLGLAFFQKVLFIRINGDKLDA

SEQ ID NO: 44385 - DNA, 999 bp, Unknown
  Obtained from environmental sample
  misc_feature (1)..(999): n is a, c, g, or t
gtgcaaaaacagcactttgaattcttaaaaagttttatctatccgtaccccttgccggaaacattggtctgggcgacgcacactccggaatatatcactaatgacgaaggaggcggggcaaggaacgcttattacggtttgatacggcttgcgaaaaaatggataaacgacataacaggaggaggatcgttttataaaaagaacacgaagtttttcacaagagccgaagcgcattattttctatgcttgaaagtgccttacgaggattgctgttcgataataaaattgtatttctacgccaaatgcagggcaaaggctataaatccaaaattgagcatgattgtgtcgaatgtgttccatgtaaagtttttaacttgtttcaaacacagacttgttgaaagcttccttgatttgattgcaagaacgcctgagtaccgctatgaccgggggacaatcggagacctctgcgattttgtcttcgcgaaaatacgggaacggaaaaatagttctttctcctttagcggacggacgatttacagcgtcataaagctttgcaacgaatggcacgaacaggtcaggaaagaagctgaacaggcgcggagaatagccgctatgccgaacggaaaatccggcggtattccgcgctggagaggactggggataagacgtttcaggtacgaaatggaagaatgtgtttgggttataacggagcttacgtcggttcaggatttggtaaatgaagggcgcaaaatgaagaactgcgtgggaaattatgcggaaaaatgcgcttccggcaattccgccgttttctcggtcgagagagtcaataaagagaaaaatcagcttattgaaaatgccgctacgctggaagttaatgtttcaaaccgtatgttaattcaggcaaaaggaaaatgtaattccgcgctgacagccaaaaccatgagcgtggttgaacgatgggccgcaagcaacaggattatagtccgtttacttgcgtaa

SEQ ID NO: 44386 - protein, 332 aa, Unknown
  Obtained from environmental sample
  misc_feature (1)..(332): Xaa is any amino acid
MQKQHFEFLKSFIYPYPLPETLVWATHTPEYITNDEGGGARNAYYGLIRLAKKWINDITGGGSFYKKNTKFFTRAEAHYFLCLKVPYEDCCSIIKLYFYAKCRAKAINPKLSMIVSNVFHVKFLTCFKHRLVESFLDLIARTPEYRYDRGTIGDLCDFVFAKIRERKNSSFSFSGRTIYSVIKLCNEWHEQVRKEAEQARRIAAMPNGKSGGIPRWRGLGIRRFRYEMEECVWVITELTSVQDLVNEGRKMKNCVGNYAEKCASGNSAVFSVERVNKEKNQLIENAATLEVNVSNRMLIQAKGKCNSALTAKTMSVVERWAASNRIIVRLLA

SEQ ID NO: 44387 - DNA, 399 bp, Unknown
  Obtained from environmental sample
  misc_feature (1)..(399): n is a, c, g, or t
atgatccaaaaagccgtntacgatccttcggtttcaacggactttaacccttcctntacgccgagcgacattgacatagggattcccaaaggccgtgaagcggactatgttccgcgcctggcggaaggtctttcgcgtctggaggaacttcttccaaaaccggatattgccattgtagtcggcggtgttgatccctacgagaaggacgagcttgcttcgacaaaacttttacaacttacgaaagaggcattattggaaagggatttacttgtttacaattttttacaggagaggcaaattccaacagcatggattacagcgggggggtatggggagaagtcttgggagatttatgttaattttttggagagggttttgcctttgaggatggggagataa

SEQ ID NO: 44388 - protein, 132 aa, Unknown
  Obtained from environmental sample
  misc_feature (1)..(132): Xaa is any amino acid
MIQKAVYDPSVSTDFNPSXTPSDIDIGIPKGREADYVPRLAEGLSRLEELLPKPDIAIVVGGVDPYEKDELASTKLLQLTKEALLERDLLVYNFLQERQIPTAWITAGGYGEKSWEIYVNFLERVLPLRMGR

SEQ ID NO: 44389 - DNA, 387 bp, Unknown
  Obtained from environmental sample
  misc_feature (1)..(387): n is a, c, g, or t
gtggagcccaagctctacgctatcggtgagcctgacaggaaatcgcctgtctttgtgacaaccaacttttcactgacttacttcctggtttccggtgaaattgagaacagtggtatatccgcgtggctggtgattcccgaatgtgaaggctttagcgtgttgaccgcctgggctgccgggaaattctccggggcttccatcgccaagtttgtcaaagaaatcggcctggaaaaccaggtggatacccgcgagattgtgatccccggttatgtcgcgcaaatctccggagagcttgaggaaaacctgcccggcttcaaggttctggtaggccccgccgaagctgcggatatggaaagctttatcaaaagtgtgctggtaaaaagatag

SEQ ID NO: 44390 - protein, 128 aa, Unknown
  Obtained from environmental sample
  misc_feature (1)..(128): Xaa is any amino acid
MEPKLYAIGEPDRKSPVFVTTNFSLTYFLVSGEIENSGISAWLVIPECEGFSVLTAWAAGKFSGASIAKFVKEIGLENQVDTREIVIPGYVAQISGELEENLPGFKVLVGPAEAADMESFIKSVLVKR

SEQ ID NO: 44391 - DNA, 1755 bp, Unknown
  Obtained from environmental sample
  misc_feature (1)..(1755): n is a, c, g, or t
atgcctgatgttactttttcgccagataacaaaacggtggaaattccggaagacacgtttcttttggaaggggcgcgtcttgccggtgtttttattgaaactccctgcgggggcaagggaacctgtcaaaaatgccgggcaaagataaccgtagacggcattacatctaacgttttgatctgtcagaccaaagtcggcgataaaccggttacggtggagcttccaaaaatcgcaggtattggtatcggacagtttgaggggttcgaggatccatccaaatacctgccagaaacaggggaagcctttttaaaaaaagtgaagcttcaaattccattgccggctctactggacggcttatcggatgccgacagattttccaaaacttttctgaaaactgttaattgtaaatccgttgatctgcctcttgccgtattggctgttttgccggaaaaattgcgtgagacagacggcgaaattcaggcttattacttcgtagaaaatgatatcgccagagttgtggatatttccagggaaaaagcttacgggattgccgtagatatcggcactactaccgttgccctctggcttgtggatttggagaacaaaaaaattcttgctgcgcgtaatgcgtacaacgatcaggttgagtgcgggctggacgtgatcagccgtataaattacgcaaagaaatccctttccgaactgcgctcacggattttaaaaacaatcaataaattaatcgaagaactaattgccgtcgccagtaaagacgcaggtgtctcgccagaccggattctaagcgtttctctggctggcaacacaacgatgatacatttattgcttggaatcgtacccgaatatatcaggctgtttccatatacgccggcggtttttatgcctcaagtttatacggcggcacaggttgggataaatgtctgtgaaaacgcccccgtctttttcgcccccgccgttggaagctatgtaggcggagacatcacatcgggtttgctctgtaccgacctagccgccgattctggtaaattggttttattcatcgacatcggtaccaacggggaaattgtccttggaaaccgcgaatttatctttgcctgcgcctgctccgccggtcccgcttttgaaggaggcggaattaaacatggggtgcgcgcctgctcaggcgcgatagaaagggtagtgattgatgaaaacggcaaaccgcaaatcttcacaatcggcggcgcggaacctatcggtatttgcggatcgggggtaatttccgctattgcggagcttttcaggaagggaattattgactccgccggaaagttttcgcaaaaaaaaggcgagtattttctttgcggcggaatttcgctcaatgaaagcgacattaacaattttatccgcgcaaagggcgctattttttccgcgtgccaaacaatgcttgacaatgcgggtatgtcgtttaacgatgtggaaagattttatgtagccggcggctttggaaggtttcttgatcttgaagacgcaagaacaattggtttgctgccgcgccttccaaacgaaaaatttgcctttctcggtaatacctcggttttaggcgcgtaccttactctggttagcgaagaaagaaggaaaaaaagaaatgagcttgcaaataaaataacgtatatggatttaagcagcgaggctaactacatggatagatacacgggggcgctgtttttaccgcatacggataggaaattgtttgaatga

SEQ ID NO: 44392 - protein, 584 aa, Unknown
  Obtained from environmental sample
  DOMAIN (4)...(67): 2Fe-2S iron-sulfur cluster binding domain
  misc_feature (1)..(584): Xaa is any amino acid
MPDVTFSPDNKTVEIPEDTFLLEGARLAGVFIETPCGGKGTCQKCRAKITVDGITSNVLICQTKVGDKPVTVELPKIAGIGIGQFEGFEDPSKYLPETGEAFLKKVKLQIPLPALLDGLSDADRFSKTFLKTVNCKSVDLPLAVLAVLPEKLRETDGEIQAYYFVENDIARVVDISREKAYGIAVDIGTTTVALWLVDLENKKILAARNAYNDQVECGLDVISRINYAKKSLSELRSRILKTINKLIEELIAVASKDAGVSPDRILSVSLAGNTTMIHLLLGIVPEYIRLFPYTPAVFMPQVYTAAQVGINVCENAPVFFAPAVGSYVGGDITSGLLCTDLAADSGKLVLFIDIGTNGEIVLGNREFIFACACSAGPAFEGGGIKHGVRACSGAIERVVIDENGKPQIFTIGGAEPIGICGSGVISAIAELFRKGIIDSAGKFSQKKGEYFLCGGISLNESDINNFIRAKGAIFSACQTMLDNAGMSFNDVERFYVAGGFGRFLDLEDARTIGLLPRLPNEKFAFLGNTSVLGAYLTLVSEERRKKRNELANKITYMDLSSEANYMDRYTGALFLPHTDRKLFE

SEQ ID NO: 44393 - DNA, 1074 bp, Unknown
  Obtained from environmental sample
  misc_feature (1)..(1074): n is a, c, g, or t
ttgctgggcgcgcaggttgcctcggacgatcaatggcgttttccgggcaccgataaggtaaatgagaaatttgcgctcgcgctaatcgagaccgaagaccgcagatttcgcagacacttaggtgttgatcctctggcgatagcgcgtgcggcatatcagaacatccgagggaaaagaataatttccggcggctccacaattaccatgcagaccatacgcctcgcgaggggagcgcgaaaaagatcgttctttgaaaagtttatagaagcatatttggcaatcaggcttgaagccggaaattccaagaataaaattcttgccctctattcagctaacgctccatttggggcgaatgtagtgggactggaagccgccgcgtggcgctggttcggcagaagctctaacgatctttcatgggcggaagcggctgttctggcggcgctcccgaacagcccagcgcttattcatccgggacgaaaccgtgatatcttaaaagcaaaaagagacttactcttaaacaaacttttcaagaaaggttactttgacgaggaaactctcgcgctcagcatagccgaaccgcttcccgatgagccgcttcccctgccccgcctcgcccctcatctgcttgaaagatatattttggacgccggaaaaaattcttcgttgaaaaaaccggctgcttttgtcaccacggtagaccgtaacatacaaatgcgggtcacggatgtcttaacagggcatcggaccgtttcgcgcttaacggaatatttaacggcgcctgcgttgtgcttaaacgaagacaggcgagatcgccgcttatgtcggcaacacaaatacgctccatgcctccgatgtggatattccttcttccccccgcagttcgggaagtttgttaaaaccatttctttatgccgccatgctggatgcgggggacatacttccctcttctctggtaagcgacatcccgacccgtattggaagcttcagtcccgagaacatgagcagaaattatttaggcgtagttcccgccgacgaagcactgtcgcgttccctcaatgttccggcggcccgtaa

SEQ ID NO: 44394 - protein, 357 aa, Unknown
  Obtained from environmental sample
  DOMAIN (1)...(161): Transglycosylase
  misc_feature (1)..(357): Xaa is any amino acid
MLGAQVASDDQWRFPGTDKVNEKFALALIETEDRRFRRHLGVDPLAIARAAYQNIRGKRIISGGSTITMQTIRLARGARKRSFFEKFIEAYLAIRLEAGNSKNKILALYSANAPFGANVVGLEAAAWRWFGRSSNDLSWAEAAVLAALPNSPALIHPGRNRDILKAKRDLLLNKLFKKGYFDEETLALSIAEPLPDEPLPLPRLAPHLLERYILDAGKNSSLKKPAAFVTTVDRNIQMRVTDVLTGHRTVSRLTEYLTAPALCLNEDRRDRRLCRQHKYAPCLRCGYSFFPPQFGKFVKTISLCRHAGCGGHTSLFSGKRHPDPYWKLQSREHEQKLFRRSSRRRSTVAFPQCSGGP

SEQ ID NO: 44395 - DNA, 1311 bp, Unknown
  Obtained from environmental sample
  misc_feature (1)..(1311): n is a, c, g, or t
gtggatattccttcttccccccgcagttcgggaagtttgttaaaaccatttctttatgccgccatgctggatgcgggggacatacttccctcttctctggtaagcgacatcccgacccgtattggaagcttcagtcccgagaacatgagcagaaattatttaggcgtagttcccgccgacgaagcactgtcgcgttccctcaatgttccggcggcccgtaatttacgtattttcggcgttgaaagatttcttcagttcctccgctcattgggtcttacaacactttttcgccccgccaatgagtacggtcttccgttaattttaggcggcgcggaagttaatctttttgaaataacaaaactttacgccgccttaggacgcgcgaccgatccatcctccaaagactcaaaattaatttcttccggcgcggcatggctcactttagaagctctggttaacgcggcgcgtcccggagaagaatctatctggcgcgattacgccggagcaaggcacattgcgtggaagacggggacaagttacggttttagggacgcttgggctgtgggcgtaacccccgaatggacggtaggcgtctggataggaaacgcaacgggcgaaggaaggccggaactgcgaagcgccgttacctccgctcccgtactctttgaaattttttccgtactcagttctctcggcggaaacagaaatacatggttcggcaaacctgcgaaagaattagcgcaagcggaagtttgcgcgtcatcaggttttccggcttccgttaattgcgccgacacaaaatatgttgacatacccaaagacgcacccgccgcgagaccgtgccgattttgccagacaataattctggacagcactcttacccatcgcattgttcttggttccggcgtttctgcggcggcggtggaacaaaagtggtttgttcttccccctgctgaagaatggtattaccgccgctggaatcttgattacaaacctctgccgccttttttaaattccaaagacttgctaaaccgcggcgagggagtgcttgcgctttttaatccggagccggacagcaaggtatatgttccgagggaattggacaacagcgaggggaaaattgttttttccgcggctcatcgtgatggagaggaaataatttattggcatcttgatgatgagtttttgggttatacgcaaacatttcatgaaatggaggcgcgtcctttgccgggggcgcgtgttttgacgcttgttgattcgaaggggaatatgattgtgcggcggtttactgtgttggaggggaagtaa

SEQ ID NO: 44396 - protein, 436 aa, Unknown
  Obtained from environmental sample
  DOMAIN (1)...(223): Penicillin binding protein transpeptidase domain
  misc_feature (1)..(436): Xaa is any amino acid
MDIPSSPRSSGSLLKPFLYAAMLDAGDILPSSLVSDIPTRIGSFSPENMSRNYLGVVPADEALSRSLNVPAARNLRIFGVERFLQFLRSLGLTTLFRPANEYGLPLILGGAEVNLFEITKLYAALGRATDPSSKDSKLISSGAAWLTLEALVNAARPGEESIWRDYAGARHIAWKTGTSYGFRDAWAVGVTPEWTVGVWIGNATGEGRPELRSAVTSAPVLFEIFSVLSSLGGNRNTWFGKPAKELAQAEVCASSGFPASVNCADTKYVDIPKDAPAARPCRFCQTIILDSTLTHRIVLGSGVSAAAVEQKWFVLPPAEEWYYRRWNLDYKPLPPFLNSKDLLNRGEGVLALFNPEPDSKVYVPRELDNSEGKIVFSAAHRDGEEIIYWHLDDEFLGYTQTFHEMEARPLPGARVLTLVDSKGNMIVRRFTVLEGK

SEQ ID NO: 44397 - DNA, 810 bp, Unknown
  Obtained from environmental sample
  misc_feature (1)..(810): n is a, c, g, or t
atgcagaaaattctttctcttgataaaaatgaagaggaaacgatagaacacaccgttaaagaaatggaaacggagatggaaacagaccgtgaagcggcattagctgatatgcgttatcaatttatcgaggatgtttgtaaaaaatgcgtaataaaagcgcatgaaagccgcgaatatcggcgcagcgtgagtttggactcaatattaacccacaagtttttcgcgtttccggcttttttgggaataatgctgttggtcttcttccttaccttcggagttatcggagacagactgagcgaattattagaatcgggagtggactatgtaagcggcattatagataacgcgttgacagcttacggcataaatcccgttgtacactctctgctgattcatggaatatttgcgggagtaggagcggtattaagttttgttccaataatcgttgtgttatttttctttctgtctttactggaagattcaggttacatggctcgtgttgcgtttgtcatggacaaaccgttacgcaaaatcgggctttcagggcgcagttttgttccgatgctcatgggctttggatgttcagttccggcgattatggcgacccggacgcttgcaagcgagcgcgataaaaaaatgactattctgcttacgccatttatgagctgcagcgcanaacttcctatctacgccctgtttgccgccgcgttctttccgggacattcagcgttagtaatgagcagtttgtatctgctgggaattttattcggcgtactttcagggctcataatggaaaaaacncgtttttaa

SEQ ID NO: 44398 - protein, 269 aa, Unknown
  Obtained from environmental sample
  DOMAIN (1)...(137): Ferrous iron transport protein B
  misc_feature (1)..(269): Xaa is any amino acid
MQKILSLDKNEEETIEHTVKEMETEMETDREAALADMRYQFIEDVCKKCVIKAHESREYRRSVSLDSILTHKFFAFPAFLGIMLLVFFLTFGVIGDRLSELLESGVDYVSGIIDNALTAYGINPVVHSLLIHGIFAGVGAVLSFVPIIVVLFFFLSLLEDSGYMARVAFVMDKPLRKIGLSGRSFVPMLMGFGCSVPAIMATRTLASERDKKMTILLTPFMSCSAXLPIYALFAAAFFPGHSALVMSSLYLLGILFGVLSGLIMEKTRF

SEQ ID NO: 44399 - DNA, 546 bp, Unknown
  Obtained from environmental sample
  misc_feature (1)..(546): n is a, c, g, or t
atggaactgcccaattaccgcttcccttccgccaaaaccgtattacagctttgctgggataaagcgaaggattttattcaaagggcgtttaccgtcatttttttagcgactgttataatatggtttttacaatcatttgatttgcgattgaattacgtcgaaggcggcgaaggttctctgcttgcgttaatcgggcggttaatcagcggaatatttgttcctctgggcttctccgactggcgtatttccacggcgctcattaccggttttaccgcaaaagaagccgttataagtacattggcagtattaatcaacgctaacgccgcagggcttgaaaacaccttacatacgctgttttcttcgttaagcgcggtcagtttccttgtgtttacgcttttatacactccatgcgttgcggcaatagcgacggtaaaacgggaatacggcaatgtaaaagggttaatttttatcattgtgtatcagaccgccattgcgtggcttgcggcgttctgcgtgtataaaatcgggagtttgctggggttttaa

SEQ ID NO: 44400 - protein, 181 aa, Unknown
  Obtained from environmental sample
  DOMAIN (26)...(152): Nucleoside recognition
  misc_feature (1)..(181): Xaa is any amino acid
MELPNYRFPSAKTVLQLCWDKAKDFIQRAFTVIFLATVIIWFLQSFDLRLNYVEGGEGSLLALIGRLISGIFVPLGFSDWRISTALITGFTAKEAVISTLAVLINANAAGLENTLHTLFSSLSAVSFLVFTLLYTPCVAAIATVKREYGNVKGLIFIIVYQTAIAWLAAFCVYKIGSLLGF

SEQ ID NO: 44401 - DNA, 567 bp, Unknown
  Obtained from environmental sample
  misc_feature (1)..(567): n is a, c, g, or t
atggtaattaaacgggctgcggaacttggagacaatattagagaaaaaatgggagaattatacgttaatgctttttatgataacgtattaaaatttttctcaagaaataaaactaaactaataaaaatatttgcctgcatttttttgcttgactgtttctatgtagcaataatagatgatgaagttatcggaatggtcgcctgtatgggtaaagatgattcttgtattaaattagatttaaaaacaataattaaacatatagggctattgggtggattaattataaatttttggctaaaacagtttttaaaagtatctccggaacacgatgaaaaaacagctttagttgaatgtctggctattgatacaaaacatctgagaaaaggcgttgcttcaacgcttgttaaatcattatttaaattaactgaatataaaaattatatattagaagtaataggaacaaataaagaagcgattaaactgtataacaaattaggttttaaaattgaaaatataaaaccatattttccaagtttatatttaggcatgagatatacaaaagcataa

SEQ ID NO: 44402 - protein, 188 aa, Unknown
  Obtained from environmental sample
  DOMAIN (54)...(168): Acetyltransferase (GNAT) family
  misc_feature (1)..(188): Xaa is any amino acid
MVIKRAAELGDNIREKMGELYVNAFYDNVLKFFSRNKTKLIKIFACIFLLDCFYVAIIDDEVIGMVACMGKDDSCIKLDLKTIIKHIGLLGGLIINFWLKQFLKVSPEHDEKTALVECLAIDTKHLRKGVASTLVKSLFKLTEYKNYILEVIGTNKEAIKLYNKLGFKIENIKPYFPSLYLGMRYTKA

SEQ ID NO: 44403 - DNA, 2169 bp, Unknown
  Obtained from environmental sample
  misc_feature (1)..(2169): n is a, c, g, or t
atggaaaacaaacctgaaacaattgttgtgtctcccgtttatttcaacagggatatttcatgggttgattttaacgggcgcgtgctggaagagggcttgaggaaagacctgccgctgtttgaacggtttcgttttttgtccattgtttcttccaattttgacgagtttttcatggttagagtcgcggcgattaagcgggcgaagcagtccgtgaatgctccgctgctcctgccggacccggcggaagacgcgggtcccggcccggcggaacagttgaagatcatttcccggaaggttcacgccatgtacggccgtctgtattcctgtctgatggatgaaatttttccgggccttgctaaaaacggccttaagcttgtcagcccggatacctacaccgtcccgcaaatggactatctggaatctttttttatcagggagatatacccggttctcacccctctgcgaattgaggatgacaagcctctgcctttttttgaaagccgctgcataaacgccgctttccttttaataccggatgccgcttcagccatggatcaggaacgcattgtcatggtgcagatcccctcttcgctcagccggatcgtctggctgcccgccgaagaaggcacactccgctgggctctgctggacgatataatgctgacatgggggggatacctgttccccggttacaaagtcagggaaagcatgttgttcaaggtaaaccgggacgctgatttttccgttgacgaacgcagggacgaagactttatcgaggcgatggaggaagtaattgaaggcagggaaaaatcggcgcctgtcaacatgatcttttcaccgggctcaggcaggttaagggacgagcttgcgaagcggttttccctggagggcgacgacctgtatgagcttgaaggtcctttcaacccgggcggacttggcgaattatccggcgttgcgggttttgacgaactgcatgaaaaaacctggaaaatacaccccgttccgggctttagcgatgaaaattcgatttgggatcgtttaagccagggcgaccttatgcttcattttccctatcagtcgtttgatccggtagtccgtttcttccaggaggccgcgtcggatccccaggttatatccattaaaacggcgctttaccgcacgggcggcggctcggggtcttcccagaatatttcacccattgtgcgggcccttgaacaggctgcccttaacggcaaacatgtgacggccctggttgaactcaaggcgcgctttgacgaggaacgcaacatatcctgggcaaaccgcctggaaaaggccggggtgatagtggtgtacgggctttcgcagcttaaggttcacgccaaggtgacaatggtgctgcggcgcgaacacgagcgcgtcaggcgttatgtgcatctttccacgggcaattacaatgacaagacagcgaaggcgtatgaagacctgtgcctgtttacctgccgcgaagacatcgcatacgacgcgagcctgttgttcaatatgattaccggttattcgctgagacagaccatgcagcggctggtgattgccccgtacagcctcaagccccggctgctggaactgattgagcgcgaggcaaagcgttccgatcagaagtaccccagcaagattatgataaagtgtaattccattaccgataccggcatgataaacgccctgtacagcgcttcccgcgcgggagtgaaaatttttctgtgcgtcaggggaatatgcgctctggttcccggcgttccggggctttccgaaaatattcaggtggtcagcgttatcgaccgttatctggaacactcaaggatgtattattttgccaacggcggggcggaggaactctaccttgccagcgccgacctgatgtcgcgtaaccttgaacaccgcgttgaaattatgttccccattcaggatgaaaaaatacggaatgaacttcttgaaacactgagcgcttacttccacgacaactgtcaggcgagagttttggattccggcggcgcatggaaacggctcaaccccgctcctgatgaagcgccgttccgcgttcagaaggatatgctttcccgcgccgccagagattcggatattcccggcccggtaaaacaggaatttattgtccgccgcagcgcggctcagtaa

SEQ ID NO: 44404 - protein, 722 aa, Unknown
  Obtained from environmental sample
  DOMAIN (12)...(702): Polyphosphate kinase
  misc_feature (1)..(722): Xaa is any amino acid
MENKPETIVVSPVYFNRDISWVDFNGRVLEEGLRKDLPLFERFRFLSIVSSNFDEFFMVRVAAIKRAKQSVNAPLLLPDPAEDAGPGPAEQLKIISRKVHAMYGRLYSCLMDEIFPGLAKNGLKLVSPDTYTVPQMDYLESFFIREIYPVLTPLRIEDDKPLPFFESRCINAAFLLIPDAASAMDQERIVMVQIPSSLSRIVWLPAEEGTLRWALLDDIMLTWGGYLFPGYKVRESMLFKVNRDADFSVDERRDEDFIEAMEEVIEGREKSAPVNMIFSPGSGRLRDELAKRFSLEGDDLYELEGPFNPGGLGELSGVAGFDELHEKTWKIHPVPGFSDENSIWDRLSQGDLMLHFPYQSFDPVVRFFQEAASDPQVISIKTALYRTGGGSGSSQNISPIVRALEQAALNGKHVTALVELKARFDEERNISWANRLEKAGVIVVYGLSQLKVHAKVTMVLRREHERVRRYVHLSTGNYNDKTAKAYEDLCLFTCREDIAYDASLLFNMITGYSLRQTMQRLVIAPYSLKPRLLELIEREAKRSDQKYPSKIMIKCNSITDTGMINALYSASRAGVKIFLCVRGICALVPGVPGLSENIQVVSVIDRYLEHSRMYYFANGGAEELYLASADLMSRNLEHRVEIMFPIQDEKIRNELLETLSAYFHDNCQARVLDSGGAWKRLNPAPDEAPFRVQKDMLSRAARDSDIPGPVKQEFIVRRSAAQ

SEQ ID NO: 44405 - DNA, 1380 bp, Unknown
  Obtained from environmental sample
  misc_feature (1)..(1380): n is a, c, g, or t
ttgatcgagaaggagtttgctgccgatccggctaatccggcagctaacagttcgcctacgattgccggtacgggtttgtcccctttgccgactggagtgtcgttctcgcttagcgccattactagttctgtgaatgccgacgacgggtcgttgtttgatggcgccgcgacgctgactgtaacggtgaccactgctgttactgcggctttgacggtgtctgatctgaagttaacggttggtggtacccaatcgggggcacaaacattgaccatcgggtcaccggcgcttactcctacggttacgcttggagctcaaagtgcggcgttgagtgtgggaacggctggaactgcgacatttgccgtgactttgacagggtttgctgccgatccggctaatccggcggctaacagttcgcctacgattgctggtacgggtttgtcccctttgccggctggagtgtcgttctcgcttagcgccattacgagttctgcgaatgccaccgacgcgacgaagtttgatggcgccgcgacgctgactgtaacggtgaccactgctgttactgcggctttgacggtgtctgatctgaagttaacggttggtggtacccaatcgggggcacaaacattgaccattacagaccccaacgcagctgcggttacccttgggaaccaaactgggacgttaacagcgggaacagctggaactgcgacgtttgccgtgactttggcaaggtttgctaccgatccggcaaatccgtcggctaacgcttcgccgacaattaccggtacgggtttgtcccctttgccgactggcgtgtcgttctcgcttagcgccattacgagttctgcgaatgccagcgatgcgacgaagtttgatggcgccgcgacgctaactgtaacggtgaccactgctgccgcggctttgacggtaaatgatctgaaattaacaatttctacaatcgtgtcgggcccgaaaacgctgaccatagggacgactacgactaccgcaggcggttcgatctccggtgtaatctccggtagcgaccagacctcgggcggtattgccgcgactgtgacgttgcagcagaatggcgcagatttgtcttcgccggcgcctgtaaccgctactagcggtaccggtgcctacacgttttccggggtcccggccggtatctacactgtaaaggcgaatcttgcgggttacgtcaccggtgtcaccggcaatattacagttccggctccgactaccgcgaccccgaatcctgcagtcacggggcggaatttggttttggataaagcatatacggtgacttactccgtgacaaaaacatggaccggtacttcgggaacgacgggtcagacaacatttctgccgccctga

SEQ ID NO: 44406 - protein, 459 aa, Unknown
  Obtained from environmental sample
  misc_feature (1)..(459): Xaa is any amino acid
MIEKEFAADPANPAANSSPTIAGTGLSPLPTGVSFSLSAITSSVNADDGSLFDGAATLTVTVTTAVTAALTVSDLKLTVGGTQSGAQTLTIGSPALTPTVTLGAQSAALSVGTAGTATFAVTLTGFAADPANPAANSSPTIAGTGLSPLPAGVSFSLSAITSSANATDATKFDGAATLTVTVTTAVTAALTVSDLKLTVGGTQSGAQTLTITDPNAAAVTLGNQTGTLTAGTAGTATFAVTLARFATDPANPSANASPTITGTGLSPLPTGVSFSLSAITSSANASDATKFDGAATLTVTVTTAAAALTVNDLKLTISTIVSGPKTLTIGTTTTTAGGSISGVISGSDQTSGGIAATVTLQQNGADLSSPAPVTATSGTGAYTFSGVPAGIYTVKANLAGYVTGVTGNITVPAPTTATPNPAVTGRNLVLDKAYTVTYSVTKTWTGTSGTTGQTTFLPP

SEQ ID NO: 44407 - DNA, 720 bp, Unknown
  Obtained from environmental sample
  misc_feature (1)..(720): n is a, c, g, or t
ttgggccttcaggcaaatgattttgatgttgaaattgttgaaacccagcgttccggtttgttcaaaaaaggcttcgtaaaaatcaaggttcacacgaaccatctggaacgaagcgccgcttcggaaccgaagggctcgcttgcagacccgaagagccagcttgcggacgacgacaacaaaagtaaagttggcgtcaaaaaaccagccgggcaaaaacaggtaagccacagcgtatttggggatcctgagcccaaaaatgaatttgaaaagcagctaatcggttttctggaaggactcattgagcgaatgggttattacggaaaggtcgtcgttcttttccgtgaagaacacaagattgggctgaagatcgattcggagtattcatctatcctgattgggaaaaagggaaaaaatcttgacgctcttcagcttctggccaacatttatgccggacgcacggggcgcgaagacatgcgtgtgattctggacagcgaaaattaccgcatccgccgtgaggaatctctggttcgcctggcttatacggttgccgaccgcgtaagggaaaacaggggctcggttcttcttgagccaatgaacccctttgaccgaaggcttattcacaccacgctgaacgacatcgccgatgtggaaaccaagagcgagggcgaagggctttacaagcaggtgagggttttttaccgcgggcttggccgcagttaa

SEQ ID NO: 44408 - protein, 239 aa, Unknown
  Obtained from environmental sample
  DOMAIN (179)...(234): R3H domain
  misc_feature (1)..(239): Xaa is any amino acid
MGLQANDFDVEIVETQRSGLFKKGFVKIKVHTNHLERSAASEPKGSLADPKSQLADDDNKSKVGVKKPAGQKQVSHSVFGDPEPKNEFEKQLIGFLEGLIERMGYYGKVVVLFREEHKIGLKIDSEYSSILIGKKGKNLDALQLLANIYAGRTGREDMRVILDSENYRIRREESLVRLAYTVADRVRENRGSVLLEPMNPFDRRLIHTTLNDIADVETKSEGEGLYKQVRVFYRGLGRS

SEQ ID NO: 44409 - DNA, 549 bp, Unknown
  Obtained from environmental sample
  misc_feature (1)..(549): n is a, c, g, or t
ttgctcggtttggtcacttacaggggttatgtgatcaaagctaccggcaattctaaggagcattcactcatggttaagtttcaattaaagcttgataaactggaaaagaagccgtcgatttgggcaaaaaaccggaaagtccgcatggaattccacatagaccgcgatatgcggcataagtacggcttaaaagacagccttttttccctgaccggcaatgttttccttgccgacatgaagcagacccgcgagcttgccgccaaattcaacgcaaaacaggaccccaaccaccccgaaagattcataaaagccggacatctttacgcgatggggttaattgatgaaattctgcattatgttatcgccctttaccgagaggaagtccagccggacgcttttgaaacggctctggacagactggaaacaaacatagggcgggaagcaaacggacgcgcttctgacatctttttccgaacagttcccgcccaggcccgtgtacaagggcgagaaaaaagtccccgagtacctgaaaagcaaggaaggcggtga

SEQ ID NO: 44410 - protein, 182 aa, Unknown
  Obtained from environmental sample
  misc_feature (1)..(182): Xaa is any amino acid
MLGLVTYRGYVIKATGNSKEHSLMVKFQLKLDKLEKKPSIWAKNRKVRMEFHIDRDMRHKYGLKDSLFSLTGNVFLADMKQTRELAAKFNAKQDPNHPERFIKAGHLYAMGLIDEILHYVIALYREEVQPDAFETALDRLETNIGREANGRASDIFFRTVPAQARVQGREKSPRVPEKQGRR

SEQ ID NO: 44411 - DNA, 1794 bp, Unknown
  Obtained from environmental sample
  misc_feature (1)..(1794): n is a, c, g, or t
atgagccggccttccgcgtcattaaaagaatataaaacccttattccctatgtcgcgcgtttccgcgttcagtatattttcggacttttctgccttattaccgtagacgccgcccagatagccattccgcagtttatccgcgcggcggtagaccttatctcaagcggcaattttcaatggcggcaaataattacgctttccctttgcatgacgggcgttatggcggtagttgcgggcggccgtttcttgtggcgtttttttatcagcggctcgtcaaggcggatagaggcccagttacgtgaaaatatttacggccatttgcagaaactttcctgggatttttatcagaaaaataaaatcggcgacattatggcgcgttcaatttccgatcttgaggccgtgcgtatgtctatcggcatgggcgttgtcgctctctttgattttatttttatggccacctcgattttaataattatatttgtacaggatgcccgttccgcgcttttttcaatcattcccctgccccttgtttccgcgcttatccttcttttcggaaaccttgtcggcaaaaaattccgtacggcgcgcgaagcgtattcaaggttaagcgataacgctcaggaaacattcgccggcatccgcgtggtaaaatcgtttgtcaaagaatggtggttcattaaaaaatttgccgattccaacgacgattaccgcaaggcgaacatggagcttgtgcgcctcttcggttttttctttccgtttattcagtttctttccggatttacggttcttatcatgcttgcaataggcggtatgcgcgttatcaacggtttaatgacgccggggagccttgtatctatgttcagttatctgaatatgctgatctggccgcttatgggagcgggattcatggtaaacatgatccagcgcggggcggtatcgttgggcaggataaacgaaattttggaaactcagccatcgatcagggatccggaaaatccgatgaatgcacagcccgtggacacgctacccgccctggaattatcaaatttgagtttctcgtataacgacggggcagcggctctggacaatatcaaccttgcaatacaacggggtgaatggctgggcataatggggcgtaccggatcgggaaaatcaacattgatcaaaacctttacccgcacgctggatcctcccgccggaacagtggttgtcttcggccttgatgtgagggaatggcctctggacgaactgcgaaagctcttcgcggtaagcccccaggacagctatcttttttcggattcgattcagaataatatcgcctacggccttgagcggggcgatccgcagatgacggctagagcaattgaatcttcttctttggaaaaggacctggcggctttcaaccagggcggtgaaaccctgatcggcgaaaggggcctgacgctttccggcgggcagaaacagcggacggccatagcgcgggcgctggttatggacagcgagtttttgattctggacgattccctttccgcggtggacaatgagactgaacgaaaaatactggaagcgctactgcgacagcgaaagggaaggaccaccatcataatttcccaccgggtttccacgctccgttacgctgacaaagtgctggtcctggacaagggaaaggccgttgaatacggcagtccggcgcagcttgcggcggacggcggtttttatgcccggatggcggctttccagcggctggaaccccaacaggcaagcgccgattcggcggaggacatcaatggctga

SEQ ID NO: 44412 - protein, 597 aa, Unknown
  Obtained from environmental sample
  DOMAIN (25)...(297): ABC transporter transmembrane region
  misc_feature (1)..(597): Xaa is any amino acid
MSRPSASLKEYKTLIPYVARFRVQYIFGLFCLITVDAAQIAIPQFIRAAVDLISSGNFQWRQIITLSLCMTGVMAVVAGGRFLWRFFISGSSRRIEAQLRENIYGHLQKLSWDFYQKNKIGDIMARSISDLEAVRMSIGMGVVALFDFIFMATSILIIIFVQDARSALFSIIPLPLVSALILLFGNLVGKKFRTAREAYSRLSDNAQETFAGIRVVKSFVKEWWFIKKFADSNDDYRKANMELVRLFGFFFPFIQFLSGFTVLIMLAIGGMRVINGLMTPGSLVSMFSYLNMLIWPLMGAGFMVNMIQRGAVSLGRINEILETQPSIRDPENPMNAQPVDTLPALELSNLSFSYNDGAAALDNINLAIQRGEWLGIMGRTGSGKSTLIKTFTRTLDPPAGTVVVFGLDVREWPLDELRKLFAVSPQDSYLFSDSIQNNIAYGLERGDPQMTARAIESSSLEKDLAAFNQGGETLIGERGLTLSGGQKQRTAIARALVMDSEFLILDDSLSAVDNETERKILEALLRQRKGRTTIIISHRVSTLRYADKVLVLDKGKAVEYGSPAQLAADGGFYARMAAFQRLEPQQASADSAEDING

SEQ ID NO: 44413 - DNA, 420 bp, Unknown
  Obtained from environmental sample
  misc_feature (1)..(420): n is a, c, g, or t
atggggcttgccatagaccttttggagtacgcgtacggagacaattcaaaatggagatggacatttgtcgaaatggaagggcgttttgccaccgtcgctaaaaacattttggatcttcgtcgtgttattgaatactcgacttttgaatccccgtattatgaatctacgtcttatcatctaaggttaattaaaaggctgctggcgcagtctgctgatcgttaccgtgaaaaatatgaactttctacggggcagattccagattttaagacaggcatttcatttttaggcgcgttaagaaggctgcatattctaatggcggaaagcgaagaagcggaaaatataaagaaaaaaatggcaatttggaaaactaaattagaggcagaccataagaagcaggaagaagccaaaaaaagagcatga

SEQ ID NO: 44414 - protein, 139 aa, Unknown
  Obtained from environmental sample
  misc_feature (1)..(139): Xaa is any amino acid
MGLAIDLLEYAYGDNSKWRWTFVEMEGRFATVAKNILDLRRVIEYSTFESPYYESTSYHLRLIKRLLAQSADRYREKYELSTGQIPDFKTGISFLGALRRLHILMAESEEAENIKKKMAIWKTKLEADHKKQEEAKKRA

SEQ ID NO: 44415 - DNA, 537 bp, Unknown
  Obtained from environmental sample
  misc_feature (1)..(537): n is a, c, g, or t
gtggcaggcgttggagttccgcagttcacggcaattttggaatgtgccgaagaagcggttaagcaaggagttggcataattggcgatggaggaataaaatattctggcgatattgttaaggcattggcggcaggtgcgcacgctgttatgctgggtagtctttttgcgggcacggaagaaagccctggagaaataattttggcagatggtcgcacattcaaaagctatcgcggaatgggttccattggagctatgaaggctggttccaaagaccgttattttcaagccgaagttggagaggattcaaaattcgttcccgaaggcattgaaggcagagttccatataaaggtcccttaaaagaattggtttatcaattaacaggtggaattcgtagcggtcttggctatgttggtgccgaaaatttggctgacctcagggctaaagcccgttttgtgcagataactagtgcgggattaaaggaaaatcatccgcacgatattactataactaaggaagcgcctaattatcgggcgtga

SEQ ID NO: 44416 - protein, 178 aa, Unknown
  Obtained from environmental sample
  DOMAIN (1)...(165): IMP dehydrogenase / GMP reductase domain
  misc_feature (1)..(178): Xaa is any amino acid
MAGVGVPQFTAILECAEEAVKQGVGIIGDGGIKYSGDIVKALAAGAHAVMLGSLFAGTEESPGEIILADGRTFKSYRGMGSIGAMKAGSKDRYFQAEVGEDSKFVPEGIEGRVPYKGPLKELVYQLTGGIRSGLGYVGAENLADLRAKARFVQITSAGLKENHPHDITITKEAPNYRA

SEQ ID NO: 44417 - DNA, 792 bp, Unknown
  Obtained from environmental sample
  misc_feature (1)..(792): n is a, c, g, or t
atgaaactaggtctcacatttgacgacgtactcctctaccccggtgcttcggagattttgcccgtgcaaacctccattaaaactgaacttggaaaaataaagctcaatattcctattgtaagttctgctatggataccgtttcaacggctccgcttgctattgcactggctttgcaaggcggtatttcagttatacacaaaaatatgagcattgaaaatcaggctgtagaagttcgcaaagttaaaaggtgggaatctggcattgttctagacccaataaccctaaacgcagacgaacccgtttcaaaagccttcgaaatttccgccaagcaaaagattagcggctttccagtgatttccaagggcaaacaactggtaggcataatcactggcagggatttacgcacggttacagacaaaagcgtgaaagtaaaagatgtgatgacaaaaaaacttatcacagcttcgccaaaaatttcgctggcaaaagcaaaagaacttttaaatacaaaccgcatagaaaaattattgctggtggacagtaaaaacaatttaaaaggcttaataaccctcaccgatattttaaaaagagaaattaatcccgaagcctgcttggattcaaacgggcagctttgcgttggggctgccgttggcaccgcagcagatactatggaacgcgccgccgctttggtagaagctggcgttgatatgctggttgtggatacagctcacgggcaccatataaatgttcgcaatatggtaaaaacgcttaaaaaacttatcccaatttaa

SEQ ID NO: 44418 - protein, 263 aa, Unknown
  Obtained from environmental sample
  DOMAIN (3)...(263): IMP dehydrogenase / GMP reductase domain
  misc_feature (1)..(263): Xaa is any amino acid
MKLGLTFDDVLLYPGASEILPVQTSIKTELGKIKLNIPIVSSAMDTVSTAPLAIALALQGGISVIHKNMSIENQAVEVRKVKRWESGIVLDPITLNADEPVSKAFEISAKQKISGFPVISKGKQLVGIITGRDLRTVTDKSVKVKDVMTKKLITASPKISLAKAKELLNTNRIEKLLLVDSKNNLKGLITLTDILKREINPEACLDSNGQLCVGAAVGTAADTMERAAALVEAGVDMLVVDTAHGHHINVRNMVKTLKKLIPI

SEQ ID NO: 44419 - DNA, 438 bp, Unknown
  Obtained from environmental sample
  misc_feature (1)..(438): n is a, c, g, or t
gtgccaacggcagccccaacgcaaagctgcccgtttgaatccaagcaggcttcgggattaatttctctttttaaaatatcggtgagggttattaagccttttaaattgtttttactgtccaccagcaataatttttctatgcggtttgtatttaaaagttcttttgcttttgccagcgaaatttttggcgaagctgtgataagtttttttgtcatcacatcttttactttcacgcttttgtctgtaaccgtgcgtaaatccctgccagtgattatgcctaccagttgtttgcccttggaaatcactggaaagccgctaatcttttgcttggcggaaatttcgaaggcttttgaaacgggttcgtctgcgtttagggttattgggtctagaacaatgccagattcccaccttttaactttgcgaacttctacagcctga

SEQ ID NO: 44420 - protein, 145 aa, Unknown
  Obtained from environmental sample
  misc_feature (1)..(145): Xaa is any amino acid
MPTAAPTQSCPFESKQASGLISLFKISVRVIKPFKLFLLSTSNNFSMRFVFKSSFAFASEIFGEAVISFFVITSFTFTLLSVTVRKSLPVIMPTSCLPLEITGKPLIFCLAEISKAFETGSSAFRVIGSRTMPDSHLLTLRTSTA

SEQ ID NO: 44421 - DNA, 756 bp, Unknown
  Obtained from environmental sample
  misc_feature (1)..(756): n is a, c, g, or t
atggcggctggccagcgcctgcacaccagctttgcgcgcattggtggcctgatgagggacattccaaaggattttgtccccttgtgccaaaagtttttggagagttgtccaaagaccattgacgaaatggaaagacttttgtcgcgcaacgcgatatgggttgaccgcacaaagggcgttggtgcctttacgccagaacaggccatttcatggggctacacgggtccatgtttgagagcctgcggaatggcgcatgacctgcgaaaggcgcagccatacttgggctatgaaacatacgattttgacatccctgtcggcaccaccggcgacgtgttcgaccgctaccttgtgcgcgccgaagaaatgcgccagagcctgctaatcgtcaagcaatgcctacagcgcatcaaagagataggacccggccctgtgctgatccaagactacaaagttgccctgccgccaaaagaaaaggtctattcccgcgcagaatgcctgatgcaccatttcaagctggtgatgcatggaataaatatgcccgaaggtgaaatatatagcgcgactgaagcagcgaatggagaacttggtttctacattgtctctactggtggcaaaagcccgtaccgcatacacgtgcgcccaccatgctatccgatattcagtagcctagacgaaaaaatcaagggccgccttatagccgatgcgcttgcagagctgggttcgatgaacgttattgcgggagaactggatagataa

SEQ ID NO: 44422 - protein, 251 aa, Unknown
  Obtained from environmental sample
  DOMAIN (1)...(251): Respiratory-chain NADH dehydrogenase, 49 Kd subunit
  misc_feature (1)..(251): Xaa is any amino acid
MAAGQRLHTSFARIGGLMRDIPKDFVPLCQKFLESCPKTIDEMERLLSRNAIWVDRTKGVGAFTPEQAISWGYTGPCLRACGMAHDLRKAQPYLGYETYDFDIPVGTTGDVFDRYLVRAEEMRQSLLIVKQCLQRIKEIGPGPVLIQDYKVALPPKEKVYSRAECLMHHFKLVMHGINMPEGEIYSATEAANGELGFYIVSTGGKSPYRIHVRPPCYPIFSSLDEKIKGRLIADALAELGSMNVIAGELDR

SEQ ID NO: 44423 - DNA, 387 bp, Unknown
  Obtained from environmental sample
  misc_feature (1)..(387): n is a, c, g, or t
atgagtacaccattcaacccatttttgccaattctcttgctgctgttgttggccattggtgtgggtgcgttcacgctattcgcctctggctggctgctgccttttttgaggttcaagccacgcaaccctgacccgcacaagaccactacctatgaatgtggcgtgcctctgatgcaagaagatgccaggcagaggtacagcgtcaagttttacctaaccgccgtgctattcatcttgttcgacgtggacatcgcctttttgctgccctgggccgtgaattttaagaacgcgccccacactttcataccgatgcttttgttcttggccacaattttggtcggcttcgtctatgtatggggcaagggcgcgctagagtgggagcgctga

SEQ ID NO: 44424 - protein, 128 aa, Unknown
  Obtained from environmental sample
  SIGNAL (1)...(28)
  DOMAIN (25)...(126): NADH-ubiquinone/plastoquinone oxidoreductase, chain 3
  misc_feature (1)..(128): Xaa is any amino acid
MSTPFNPFLPILLLLLLAIGVGAFTLFASGWLLPFLRFKPRNPDPHKTTTYECGVPLMQEDARQRYSVKFYLTAVLFILFDVDIAFLLPWAVNFKNAPHTFIPMLLFLATILVGFVYVWGKGALEWER

SEQ ID NO: 44425 - DNA, 630 bp, Unknown
  Obtained from environmental sample
  misc_feature (1)..(630): n is a, c, g, or t
atgagccaagcggcaccaaccgaaaaaacgcttagagagaatgtagaatcttggataaccaccaagctggaagtcgtcgtaaactggggccgaaaaaatagcctttggccgttgccttttggcactgcctgctgcgccattgaatttatgagcctgatgaccagccgctacgattttagccgctttggtgcggaggccatgcgctttagcccgcgccagtcggacttgctgctggtgttgggtaccataaccaaaaaacaggcaccagtgctgcggacaattttcgcgcagatgtgcgagcctaagtgggttgtatgcgttggggcctgcgcttcttctggcggcgtgtatcgcacctatggcacgctgcagggcattgaccgcatcatccccgttgacatctatgtccctggttgcccgccgcgcccagaagccatcatcaagggtgtggtggagctgcaagaaaaaatgatgcgcgagacgttcaaggacagagagtcaaatctggcggccttctataagagcatgcatagacagcaggaactagaaaattctggcctgtccgcccaagatgcgctgcagcagatgtacgttgaagcggcggcggctggacagtctaggatttggtag

SEQ ID NO: 44426 - protein, 209 aa, Unknown
  Obtained from environmental sample
  DOMAIN (47)...(154): NADH ubiquinone oxidoreductase, 20 Kd subunit
  misc_feature (1)..(209): Xaa is any amino acid
MSQAAPTEKTLRENVESWITTKLEVVVNWGRKNSLWPLPFGTACCAIEFMSLMTSRYDFSRFGAEAMRFSPRQSDLLLVLGTITKKQAPVLRTIFAQMCEPKWVVCVGACASSGGVYRTYGTLQGIDRIIPVDIYVPGCPPRPEAIIKGVVELQEKMMRETFKDRESNLAAFYKSMHRQQELENSGLSAQDALQQMYVEAAAAGQSRIW

SEQ ID NO: 44427 - DNA, 516 bp, Unknown
  Obtained from environmental sample
  misc_feature (1)..(516): n is a, c, g, or t
ttggtagcggaggcaaggatgatcatcgaacgcattactgaagccatgccaggggcgatagaggcccaccatgactttcgcggcgacaacacaatcgttgtgtcgttgcagaagtactttgacttgatcaagttcatttttgacgaaggctatcaaatgatggttgacttgactgcggttgattggccggacaggcaacctagattcgacttggtggtgcactttcaaaacttggtcagcaaggaaaggctcagagtgaaggctccaacggctaaaggccaggccgtgcctagtatcacgcccatacacaagggcgcgctttggttcgagcgcgaagtctttgacatgttcggcattccctttgaaggacaccccgatctaaagaggctgatgatgtgggaaggcttccagggtcatcccttgaggaaggacttccagcttgacggtggggacgcatggtgtgccttggacatgggcgcatcgtactccgcaagtgccaaatccttggccgaatga

SEQ ID NO: 44428 - protein, 171 aa, Unknown
  Obtained from environmental sample
  DOMAIN (86)...(153): Respiratory-chain NADH dehydrogenase, 30 Kd subunit
  misc_feature (1)..(171): Xaa is any amino acid
MVAEARMIIERITEAMPGAIEAHHDFRGDNTIVVSLQKYFDLIKFIFDEGYQMMVDLTAVDWPDRQPRFDLVVHFQNLVSKERLRVKAPTAKGQAVPSITPIHKGALWFEREVFDMFGIPFEGHPDLKRLMMWEGFQGHPLRKDFQLDGGDAWCALDMGASYSASAKSLAE

SEQ ID NO: 44429 - DNA, 396 bp, Unknown
  Obtained from environmental sample
  misc_feature (1)..(396): n is a, c, g, or t
atgaattatatttactgtatgcaaggcaaaaaacattatgaagagaaatttttcgtgaacttccgtctctccgagcgcatacaagaagacaatttttacaaacgtctaaaaaatgcccttgatttggagtatctgcgtcccctgacagcgaagtactacgggaaggaaggtcagaagagcatagaccctgttgtattcttcaagctcatgcttgtcggctaccttgaaaacatctgcnttgaccgcaaaatcatagagcagtcatcattgcgtatggatgttctttattttctcggntacgacatagacgagcctcttccttggcacagcactttgagccgccccgcaaattgttcggcgaggaagtgtttcttggctttttccgagacatactga

SEQ ID NO: 44430 - protein, 131 aa, Unknown
  Obtained from environmental sample
  misc_feature (1)..(131): Xaa is any amino acid
MNYIYCMQGKKHYEEKFFVNFRLSERIQEDNFYKRLKNALDLEYLRPLTAKYYGKEGQKSIDPVVFFKLMLVGYLENICXDRKIIEQSSLRMDVLYFLGYDIDEPLPWHSTLSRPANCSARKCFLAFSETY

SEQ ID NO: 44431 - DNA, 1149 bp, Unknown
  Obtained from environmental sample
  misc_feature (1)..(1149): n is a, c, g, or t
ttggcacagcactttgagccgccccgcaaattgttcggcgaggaagtgtttcttggctttttccgagacatactgagaaagtgcgtggagaaaggaatggttgatggcaggacccaggcagttgacagtgcattcatcaaagcgaatgcatcaataagcagccttgcggaaaaggaactgtcggagaagagcaaaaattattttgacgagataaccgagaacgaggaagatacagaagatactgctagcgcgaagccgcgcaaaaacaaaaaacctccctccaactacaatgaacgctactcaagccgaaccgaccccgatgctcgcgcctcgcggaagaagggcaagcctctcgcgctgaaccatctgggcataatcagcgttgatgcccgaagccatgtgatctgcggcactgctgttgattatgcggataagaaagactgcgagaccacagaaaagataatgagccagaccatagagaacttggcagaaaacggcatagccgtggaaaacatgctcgcggacaccggctacagcagcggcgatacatacaaatatctggaagagaaaaatataacagcttacattccagccaacgcaaggtacaaagccgcaagggatggtttttcatacgacggcgaaagaggctgctatgtgtgccgcatgggggcggagctctctttcaaaggcatgaaatcccatcacggcggaaatacgcaaggcagggtgtacagaacaagaactgaagactgccgcggctgccccttgaaagcgcagtgctgcaaaaagcagaggttcaggcagatagaggaaactgcggacaagccgtattacgatgcggcaagcgagaggatgagcacggccatagggaaacggatgaggcgtttgcgctccgcgaccgtggaacctgttcttgggacattgctgtgcttcaagcgaatgaggaaaatatacacaaatgggaacaagtcggcttgcaaacagcttctcatggctgccgcagcgtataacctgaagaaattaatgaatgcaataagcttcaaaactgtaaaatcagttgtgaatgtggtgaaaaccttcatttcagacaaaatttggatatgggataaatttgtatcgcttgacaacaaaatatttgctatgcagtaa

SEQ ID NO: 44432 - protein, 382 aa, Unknown
  Obtained from environmental sample
  misc_feature (1)..(382): Xaa is any amino acid
MAQHFEPPRKLFGEEVFLGFFRDILRKCVEKGMVDGRTQAVDSAFIKANASISSLAEKELSEKSKNYFDEITENEEDTEDTASAKPRKNKKPPSNYNERYSSRTDPDARASRKKGKPLALNHLGIISVDARSHVICGTAVDYADKKDCETTEKIMSQTIENLAENGIAVENMLADTGYSSGDTYKYLEEKNITAYIPANARYKAARDGFSYDGERGCYVCRMGAELSFKGMKSHHGGNTQGRVYRTRTEDCRGCPLKAQCCKKQRFRQIEETADKPYYDAASERMSTAIGKRMRRLRSATVEPVLGTLLCFKRMRKIYTNGNKSACKQLLMAAAAYNLKKLMNAISFKTVKSVVNVVKTFISDKIWIWDKFVSLDNKIFAMQ

SEQ ID NO: 44433 - DNA, 570 bp, Unknown
  Obtained from environmental sample
  misc_feature (1)..(570): n is a, c, g, or t
atgggaacagttgatttgcccaaaagcgttaaaaccgtccgcccgcaggcgcgaggcgcggatcttccaaaaacaggcgaaaacaggcaggtttccctggacaggattattcgggaacaagccggcatattttccggccaacttggcgcaaaactgccggcagacgctttacaacgcctggatgaaaaattgtataattatataagccaaaattacagggttatttccggcagtttccctctgagtctccaaagtcataatgaaattgccaatgccattaacggaaaagtgataaaaaataccgcggcagagattaccgcaatgctggaaaacgagggctatcaattcaataccggcgagatcgaaaaatcccacagcagtaagcaatggggcattggcgatctcgaagcccataccaacaatatgctaaggcgaaaggctggaattggctctgttattgattcgcaaaaggcaaaccttgttgttgtctgcgtgtttaaagacacgagaaaaaaccaaaaacagttacggatttatggctttcagtcaacattcctgaaacagagttaa

SEQ ID NO: 44434 - protein, 189 aa, Unknown
  Obtained from environmental sample
  misc_feature (1)..(189): Xaa is any amino acid
MGTVDLPKSVKTVRPQARGADLPKTGENRQVSLDRIIREQAGIFSGQLGAKLPADALQRLDEKLYNYISQNYRVISGSFPLSLQSHNEIANAINGKVIKNTAAEITAMLENEGYQFNTGEIEKSHSSKQWGIGDLEAHTNNMLRRKAGIGSVIDSQKANLVVVCVFKDTRKNQKQLRIYGFQSTFLKQS

SEQ ID NO: 44435 - DNA, 819 bp, Unknown
  Obtained from environmental sample
  misc_feature (1)..(819): n is a, c, g, or t
gtgtacctgatcagggagataatctgcaagcgtctgtctgaaagcgtagaaaacgcggaaattcttaaaaccgggacaaaagaggaagcggttaattttcttgacggcnttctgaacgagcgcctggaaattaatctctcggctcaagatgaatatctgcgaaacagcgacaggagcggcgaaatcgaagagatccgggacaagggtttttcccttgcgtccaatctgattgtttcaatactcaacgcggttaaccttgactgccagtatctggaaaacctgaaagagaggcgcgaaattttgatccgcgaatacgaagacgcggatgattcgattctgcccgacgagcattaccaaataaggctgcgttatttcagccggacgcggcttcttgaggaacgcgcggcttatgacgcgcggttaaagaatttaagcgtcgaaacgctgcgtctttgggatctgctggaagtgatttaccaggattccaaatcggtttttaaggtaaatgattttgaggatctggtcagaaagaacaagaaccgcataaatgatctgttaaaagacgggacgggcgcgtccccatacgatacccaaaaacatcaggaaaagcctgtcgtggcggctcagggagaaaaagaggagatacgcgttctgcttgccagaatggaagagcgtataagaaacatttctgacagcatgtatcctgtggaacggcagatatctgaagagcggctaatgatgcttaaagacgaattttcatttgttaaaaacgaaatagatccgtacaatttacaacnccggcattcttatggacattga

SEQ ID NO: 44436 - protein, 272 aa, Unknown
  Obtained from environmental sample
  misc_feature (1)..(272): Xaa is any amino acid
MYLIREIICKRLSESVENAEILKTGTKEEAVNFLDGXLNERLEINLSAQDEYLRNSDRSGEIEEIRDKGFSLASNLIVSILNAVNLDCQYLENLKERREILIREYEDADDSILPDEHYQIRLRYFSRTRLLEERAAYDARLKNLSVETLRLWDLLEVIYQDSKSVFKVNDFEDLVRKNKNRINDLLKDGTGASPYDTQKHQEKPVVAAQGEKEEIRVLLARMEERIRNISDSMYPVERQISEERLMMLKDEFSFVKNEIDPYNLQXRHSYGH

SEQ ID NO: 44437 - DNA, 843 bp, Unknown
  Obtained from environmental sample
  misc_feature (1)..(843): n is a, c, g, or t
gtggaagacgctttggaggacatcggggtgatgggcctagtgcctccccccgcgcaacccatgcccgctgcgtctaacacatcatcagtcagcactccagcggttagtgcccatgcgcccaggccgcctcttcccagcccacccccgattgtcgcgccgagagctaccaaagtcgccacacctcagcaatcggccgcaaaagccaaagaaacccccacttggcaggccccgacagaccccatcaagaacccgccgcttgcagacctagaaacctgcaaaagcctagacacgctaaacgcccgcatctgccgctgcgaggcctgtccgctgggggcaggaaggataaaatttgtctttggcgagggttcgccaagcgcccagatgatgtttgtaggcgagggcccaggcagcgaagaggacatcatgggccgccccttcgtcggcagggccggagtgctgcttgacaaaatgattggtgccctttgcatggcccgcagcgaagcctacatagccaacatcgttaagtgccgcccgcccgacaacagagtacccacaccggtggaagcccagacctgcatccgttaccttatgaggcaaatagaactaatcaaacccaacgtgatagtgggcttaggcgcaacgccattgagggaaatgataggcatcccaagcggaataaccaagctccgcggcacttggcgttcagtcaaagtggccgacagagagataccctacatgcccaccttccaccccgcctacgtcctgcgctcgtacacaaaagaggtgagacaggccgtctgggaagacctgcaagcggcaaagaagagggcggaggaaggataa

SEQ ID NO: 44438 - protein, 280 aa, Unknown
  Obtained from environmental sample
  DOMAIN (119)...(275): Uracil DNA glycosylase superfamily
  misc_feature (1)..(280): Xaa is any amino acid
MEDALEDIGVMGLVPPPAQPMPAASNTSSVSTPAVSAHAPRPPLPSPPPIVAPRATKVATPQQSAAKAKETPTWQAPTDPIKNPPLADLETCKSLDTLNARICRCEACPLGAGRIKFVFGEGSPSAQMMFVGEGPGSEEDIMGRPFVGRAGVLLDKMIGALCMARSEAYIANIVKCRPPDNRVPTPVEAQTCIRYLMRQIELIKPNVIVGLGATPLREMIGIPSGITKLRGTWRSVKVADREIPYMPTFHPAYVLRSYTKEVRQAVWEDLQAAKKRAEEG

SEQ ID NO: 44439 - DNA, 576 bp, Unknown
  Obtained from environmental sample
  misc_feature (1)..(576): n is a, c, g, or t
gtgcgcgcgtatgccgggctgctgctgcggatgcgcgcttaccccaagctcatcatcgcgcttgtggacggcgaggtgaaggcgggcggtgtcgggatagccgccgccgccgatctcgtgcttgcctccgcgcgttccacctttcagctctcggaaatttttattgggcttatcccggcaaacgttctgccctttctcgcggagcgggtgggcgcgcaccgcgccgccgcgatgacgctctccggcgagacctacgcggcggaagaggcgcggactttggggctggtcgataaggtgctgcccgatgaggcgctggagaaggagacgcgcgccttcatccgcaatctcctgcgcgccgatccattcgcgcttgggcgcgcgaaaagttttgcgcgcgagattacgggcttacctttacaggaagcgtccgatcgcgcccagcgggcattgctcacgattgccgcgcggccggaggttcgggacgcgataacggcattcgcggagggcacgctgccggcatggaacgcccggctcaagcttcgcgaaaatctctggattggagaaaataatggctga

SEQ ID NO: 44440 - protein, 191 aa, Unknown
  Obtained from environmental sample
  DOMAIN (1)...(101): Enoyl-CoA hydratase/isomerase family
  misc_feature (1)..(191): Xaa is any amino acid
MRAYAGLLLRMRAYPKLIIALVDGEVKAGGVGIAAAADLVLASARSTFQLSEIFIGLIPANVLPFLAERVGAHRAAAMTLSGETYAAEEARTLGLVDKVLPDEALEKETRAFIRNLLRADPFALGRAKSFAREITGLPLQEASDRAQRALLTIAARPEVRDAITAFAEGTLPAWNARLKLRENLWIGENNG

SEQ ID NO: 44441 - DNA, 1602 bp, Unknown
  Obtained from environmental sample
  misc_feature (1)..(1602): n is a, c, g, or t
ttgcatattgggcacgcaaagagtatttgcataaattttggcatttcaaaacagttcaatggtatatgcaacttgcgctttgacgatacaaatccggcaaaagaagatgttgagtatgtggatagcataaaagaagatgttaaatggcttggatttgactggatggaatatgaattttatgcgagcgattattatggcttgtgctatgaatttgccgagcagcttattttggcaggcaaggcttatgtttgccacttaaaaggcgatgatgttggcaaatacagaggcactctcacaagcccggggcagccaagcccctggcgagacagacccataaacgaaagtttggagattttccgcaaaatgaaagctggcgaattggaagagggcgatgcctttttgcgcgccaaaatagatatggcaagccctaatatgaatatgcgcgacccggcaatttaccgcattaaaaaaacaagccatcaccgcaccggcaacgagtgggttgtttatcccatgtacgattatgcccatcccataggcgactggatagagaatataactcacagtatatgcaccctggaatttgaagaccaccgccctctttacgaatgggtgctgaacgaaatcaaaaccttgatagacaagggctatgttccaagccgaaaaatgacacctgctttgccacgccaaattgaatttgcccgcctcaatttaacctacacggttatgagcaaaaggcttttgagagaactggttgaacaaggcagcgttattggctgggacgacccacgaatgcccacaataagcggacttcgccgcagaggctacacgccaagctccattcgtgaattcgcagaaagaatgggagttgcaaaaaccgatagcatagtggatattcagcttctttacttttgcataagggaagaactgaataaaagcgctcaaagggctatggttattttagatcctttgaaagttgtgataacaaactgggaagatggcagggaagaagtttttgaagcggaaaacaaccctgaaaatttggagatgggcgcaaggaaaatagtttttggcagggaaatttacatagaacgcgaagattttatggaaaatccgccgaaaaaatactttaggctctcccctggttcagaagttcgcttgaaaggcgcgtattacattcgctgcgagcaagtgattaaagactctgacggaaaaataactgaactgcactgcacttatgaccctgaaagcagaggcggcgaaactgcggatgctcgcaaggtaaagggaaccctgcactgggttaattgcatagatgcagttgatattgaggctagactgtttgaaaatcttttcacattggaaaaccctggggcaatcccggagggcaaaaactatatggactatgtggataagaattccatgataatcaaatgcgccaaggcagagccactgctttcaagcgtaaagctgtgcgacaggtttcaatttgtgaggcacggctatttttgcgttgattacaaagattccactccgcaaaagcccgtgttcaaccgtatagtaaatttgaaggatagctggggcaaaatttctcaaacataa

SEQ ID NO: 44442 - protein, 533 aa, Unknown
  Obtained from environmental sample
  DOMAIN (314)...(506): tRNA synthetases class I (E and Q), anti-codon binding domain
  misc_feature (1)..(533): Xaa is any amino acid
MHIGHAKSICINFGISKQFNGICNLRFDDTNPAKEDVEYVDSIKEDVKWLGFDWMEYEFYASDYYGLCYEFAEQLILAGKAYVCHLKGDDVGKYRGTLTSPGQPSPWRDRPINESLEIFRKMKAGELEEGDAFLRAKIDMASPNMNMRDPAIYRIKKTSHHRTGNEWVVYPMYDYAHPIGDWIENITHSICTLEFEDHRPLYEWVLNEIKTLIDKGYVPSRKMTPALPRQIEFARLNLTYTVMSKRLLRELVEQGSVIGWDDPRMPTISGLRRRGYTPSSIREFAERMGVAKTDSIVDIQLLYFCIREELNKSAQRAMVILDPLKVVITNWEDGREEVFEAENNPENLEMGARKIVFGREIYIEREDFMENPPKKYFRLSPGSEVRLKGAYYIRCEQVIKDSDGKITELHCTYDPESRGGETADARKVKGTLHWVNCIDAVDIEARLFENLFTLENPGAIPEGKNYMDYVDKNSMIIKCAKAEPLLSSVKLCDRFQFVRHGYFCVDYKDSTPQKPVFNRIVNLKDSWGKISQT

SEQ ID NO: 44443 - DNA, 354 bp, Unknown
  Obtained from environmental sample
  misc_feature (1)..(354): n is a, c, g, or t
ttggccgagggttggcttaccccttcgggagcgctggtcacagccgctgaaccgtttgtcaatatcggtaattaccctgaaacggaaagcgttatcgccgccatcaaaagctacccgcattgcagaatcatcgaggcggcggcgctggcaaaagaggcaggccttgcccgggccgtaaatacagtaatggtcggcgcggcctcggcttttcttccgataaaagtgcaaacgctggaagacaccattgccggcgtatttgcggcaaaggaagcagcggtattgacagctaacacaaaagcgtttcagttgggaagacaggcggcggaaaatgcgtctaaaggcggaaatgtatga

SEQ ID NO: 44444 - protein, 117 aa, Unknown
  Obtained from environmental sample
  misc_feature (1)..(117): Xaa is any amino acid
MAEGWLTPSGALVTAAEPFVNIGNYPETESVIAAIKSYPHCRIIEAAALAKEAGLARAVNTVMVGAASAFLPIKVQTLEDTIAGVFAAKEAAVLTANTKAFQLGRQAAENASKGGNV

SEQ ID NO: 44445 - DNA, 450 bp, Unknown
  Obtained from environmental sample
  misc_feature (1)..(450): n is a, c, g, or t
ttggagaaaacagtgatcctgtgtgtcggagaaacggttattgatttaattcaagttgatatcgcaggcgcgaagcaggcttttttacccatacccgggggatgcgcctacaatacatcaatcgcaattggaaggcttggcgctcctgtttcttttttaggacgcatttcaaaaaattttttcggcgatatgcaggtaaatcgtcttcttgaaaacaatgttaacgacagcctgttaattgggggcaatcaaaatcctgtgcttgcgattatcaggattgaagctggaaaagaacctcaatacgctttttatgatgaaggaacctctgaccgggcgttttcgcatgaggaattaccggaacaattaccggaaaaaacaagctgcattgttttcggttcaatatcccttgtaatggaacccatcgggtcaacaatagaagctttcatttaa

SEQ ID NO: 44446 - protein, 149 aa, Unknown
  Obtained from environmental sample
  misc_feature (1)..(149): Xaa is any amino acid
MEKTVILCVGETVIDLIQVDIAGAKQAFLPIPGGCAYNTSIAIGRLGAPVSFLGRISKNFFGDMQVNRLLENNVNDSLLIGGNQNPVLAIIRIEAGKEPQYAFYDEGTSDRAFSHEELPEQLPEKTSCIVFGSISLVMEPIGSTIEAFI

SEQ ID NO: 44447 - DNA, 1035 bp, Unknown
  Obtained from environmental sample
  misc_feature (1)..(1035): n is a, c, g, or t
atgagtaaaaaaatacttgaggttggcaaagaccggcttaatattgaagctcttaacgcggcggtaaaaaaacaaacaacggtacgactgtgccgcagcgccgattttgaggcaaagatcgggaaaggcgcggcccttcttgattcgatgctggcaaaacacggcggaatctacggcgttaccactggttacggcgattcctgtaccgagacggttaatccggaacaataccgggaactgcctgttaatttaacccggttccacggatgcggcatgggggattattttgacgatgaaacggtcagggcattgatgatcgtaagactcaataccctggctatgggttattccggcatcagcatggaactgctgcgttatatcgaattttttattgagcatgacattctgccccttgtcccgcaggaaggctccgtgggcgcgtcaggcgatcttactcccctttcataccttgcgggcgcgctcatcggagagcggcaggtccgctatcagggtaaagtccgctcttccgccgaagcgcttgccgaattgggcaaaccgccctatcaattccgtcccaaagaagccatcgccataatgaacggaaccgccgtaatgaacgcggttgccgccctcgctttttccgatgcggaatatcttgccgatcttgcatgtcgtataaccgcgatgaattccatcgccctcaaaggcaatgcctatcattttaacaaacggctttttgagttaaaaccccattcgggacaggcccttgccgcagacaaaatacgcattagcctgccggaggaaaaccagggcgcgcttgccgctcccgcccgaattcaggatatgtattcgattcgctgcgctccgcacgtgatcggtttgttttacgatatgcgcgataccctgcgtaattttatcgagaccgagatgaacagcgccaacgataatcccctaattgatcctgaaacccaatccgtataccactgcggacattttttacggaggacacatctgctttgcgatggactcgcttaa

SEQ ID NO: 44448 - protein, 344 aa, Unknown
  Obtained from environmental sample
  DOMAIN (5)...(344): Phenylalanine and histidine ammonia-lyase
  misc_feature (1)..(344): Xaa is any amino acid
MSKKILEVGKDRLNIEALNAAVKKQTTVRLCRSADFEAKIGKGAALLDSMLAKHGGIYGVTTGYGDSCTETVNPEQYRELPVNLTRFHGCGMGDYFDDETVRALMIVRLNTLAMGYSGISMELLRYIEFFIEHDILPLVPQEGSVGASGDLTPLSYLAGALIGERQVRYQGKVRSSAEALAELGKPPYQFRPKEAIAIMNGTAVMNAVAALAFSDAEYLADLACRITAMNSIALKGNAYHFNKRLFELKPHSGQALAADKIRISLPEENQGALAAPARIQDMYSIRCAPHVIGLFYDMRDTLRNFIETEMNSANDNPLIDPETQSVYHCGHFLRRTHLLCDGLA

SEQ ID NO: 44449 - DNA, 588 bp, Unknown
  Obtained from environmental sample
  misc_feature (1)..(588): n is a, c, g, or t
ttgatcctgaaacccaatccgtataccactgcggacattttttacggaggacacatctgctttgcgatggactcgcttaaaaacatcatcgcaaatatagcggatcttttagataggcagcttgccctaatcgttgacaccaaatataaccgcggacttccgccaaaccttacgggaacgaaaggagccatcgcgtgcaaccacggattcaaagccgtgcaaatagccgcgtccgcgtggactgccgaagctttaaaaaacacaatgcccatgagcgtattttcccgttctacagaatgtcataaccaggacaaggtaagcatgggtactatcgcagcccgcgactgtgcccggatcaataaattaaccgcgcaggttacagccgccgcgctattagccgcttttcaggcttttgatctgcggcttaaaaaaggcgaactaaaattaagcgacctgggacagacggaaaaaacgtacaacgagattgccgcatacttcaagccgcttgaagacgaccgccagttagaagacgatttacgcaagacgttaaaattaatagaggaacggcatttttgcctatgccaatga

SEQ ID NO: 44450 - protein, 195 aa, Unknown
  Obtained from environmental sample
  misc_feature (1)..(195): Xaa is any amino acid
MILKPNPYTTADIFYGGHICFAMDSLKNIIANIADLLDRQLALIVDTKYNRGLPPNLTGTKGAIACNHGFKAVQIAASAWTAEALKNTMPMSVFSRSTECHNQDKVSMGTIAARDCARINKLTAQVTAAALLAAFQAFDLRLKKGELKLSDLGQTEKTYNEIAAYFKPLEDDRQLEDDLRKTLKLIEERHFCLCQ

SEQ ID NO: 44451 - DNA, 810 bp, Unknown
  Obtained from environmental sample
  misc_feature (1)..(810): n is a, c, g, or t
atgatactgttatcttcagaagaacaccaatcaattgtaatgggcttgtggagtactttctttggtatagcgttttctgttacagcatgggcagggaaacccatcatagaactatattccgtttccgggtttttcttaattcacgcgatattactgtttgtaatattcctaatcttgtttttctcaataagaaaattggatgttccacgtaacaaaaacaataaaatatcgtttttaactgcgcatataaaagtttattcaaattggagaacgctctctccgggcgtactctttttctttcatacctttatgtatattgcgttattcacattcctgccaagactatcccaaaatgaaaacacaaaggatttattgttggtcgttttaccattaataagcattattggcacgatgattgccggaataatatctcaatattttgtatctccttcgaaattaagtgttgtcgcgtatatatcattgttgatattgatttttgtgattaaattatccttcaataataatatgttgtttgttgctgcttcgatggtgttgatattattttccggtataattcaaggcttagtattttcactgataccgaatatctcgcggacaatagaagatcaaacaaacgcaaacggcgcggtcgctcagatgggtaatttgggatcaactttgggctcgcctatattttcatattttataacatttggaagagacagtataatttatattgtgatgctattcagtttattgggagcaataagcgggatgtttattactaaaaagatgaaatacgaacaatag

SEQ ID NO: 44452 - protein, 269 aa, Unknown
  Obtained from environmental sample
  misc_feature (1)..(269): Xaa is any amino acid
MILLSSEEHQSIVMGLWSTFFGIAFSVTAWAGKPIIELYSVSGFFLIHAILLFVIFLILFFSIRKLDVPRNKNNKISFLTAHIKVYSNWRTLSPGVLFFFHTFMYIALFTFLPRLSQNENTKDLLLVVLPLISIIGTMIAGIISQYFVSPSKLSVVAYISLLILIFVIKLSFNNNMLFVAASMVLILFSGIIQGLVFSLIPNISRTIEDQTNANGAVAQMGNLGSTLGSPIFSYFITFGRDSIIYIVMLFSLLGAISGMFITKKMKYEQ

SEQ ID NO: 44453 - DNA, 660 bp, Unknown
  Obtained from environmental sample
  misc_feature (1)..(660): n is a, c, g, or t
atggccagaggctccaataatcccctgtttgccggttctccgacagacggaaacgcgttcttcttctttgacggcgccatgagcgttcttaatccctatatcgacaaaggcgtactcaaagtagtcggcccctatcccaaaacatcagcggacagggaaaatttccagagaatcgcgacagaaaactggcaggctcccattgcgaaaacccgcatggaaaaccttctgaacaacgacgccagcaaagtaacgctcgacgcggtactcgctcccaatgacacgctcggccgcgccattatcgaagcttgtaaagccgatgccaaataccgcggcaaactgcccgtagtaaccggacaggacgcggaatttgattcagccatgtcaatcaagaatggcgaacagtacagcaccgttttcaaagacacagccaaacttgcggaagccgcaatccttttagcggatcaggcccttaagaaccagcccatcaatattccgggcgcagtccttgcgtcaggcgatctggcgaagattggcgacaccggcaagaaagtcgtaaaagcttatcttctggatccaatccttgttaccaaagacaatttgaatgttccggtagaagccggtttcttcgaaaggtcacaagccgtccagcttcagaactag

SEQ ID NO: 44454 - protein, 219 aa, Unknown
  Obtained from environmental sample
  misc_feature (1)..(219): Xaa is any amino acid
MARGSNNPLFAGSPTDGNAFFFFDGAMSVLNPYIDKGVLKVVGPYPKTSADRENFQRIATENWQAPIAKTRMENLLNNDASKVTLDAVLAPNDTLGRAIIEACKADAKYRGKLPVVTGQDAEFDSAMSIKNGEQYSTVFKDTAKLAEAAILLADQALKNQPINIPGAVLASGDLAKIGDTGKKVVKAYLLDPILVTKDNLNVPVEAGFFERSQAVQLQN

SEQ ID NO: 44455 - DNA, 696 bp, Unknown
  Obtained from environmental sample
  misc_feature (1)..(696): n is a, c, g, or t
atgaaaaccaattttggaataatagattggaataaatatatagcggaatcaaaaaagtacctggacatagtcggccttcacgaaccgccggcgactattgtaagcaaacttggagtaggcaaacagcagttggtggaaattgcccgcgccctttccaaaaaagcggaactgttaattcttgacgagccgacttcttcgcttaacgacgatgaaagcgaaaagctgctcaatctgatacttgaatttaaacgccagggtattacctcggtgataatttcccataaattaaacgaagtcttaaaggttgctgataccgtaaccattctgcgcgacggtcagtcaatccgcacttacgacgtaaaaggcgacaagcttaccgaagagatgatcatcaaagacatggtaggccgcgatcttacccaccgcttcccggagcggaaatcggcgcccggcaacacaataatggaagtaaaaaactggagcgtgtaccaccccgaataccacgatataaaagtggtggacaatgtttctttctttttacgcaaaggcgagattctggccttttgcggtcctatgggcgcggggcgcacggaattgatgatgagcatcttcggtaattcctacggaaaccgcagcgaaggcgaatttaatattacggcaaaagacaaaagtttaacagcccccgcgccgcgataa

SEQ ID NO: 44456 - protein, 231 aa, Unknown
  Obtained from environmental sample
  DOMAIN (3)...(112): ABC transporter
  misc_feature (1)..(231): Xaa is any amino acid
MKTNFGIIDWNKYIAESKKYLDIVGLHEPPATIVSKLGVGKQQLVEIARALSKKAELLILDEPTSSLNDDESEKLLNLILEFKRQGITSVIISHKLNEVLKVADTVTILRDGQSIRTYDVKGDKLTEEMIIKDMVGRDLTHRFPERKSAPGNTIMEVKNWSVYHPEYHDIKVVDNVSFFLRKGEILAFCGPMGAGRTELMMSIFGNSYGNRSEGEFNITAKDKSLTAPAPR

SEQ ID NO: 44457 - DNA, 390 bp, Unknown
  Obtained from environmental sample
  misc_feature (1)..(390): n is a, c, g, or t
atggacagccaaaaagagatattggaagcggaacgttaccggaaagaccttaacatcagaatgccgtcggtgaaccagattgtgcggaatctgtccggcggcaaccagcagaaggtcgtggtaagcaagaccttattggcaaatccggacatttttatcgttgacgagccgaccaggggcattgacgttggcgcaaagacggaaatttacgggataatgaacaatatgatcgccgccggaaagagcgttatcatggtcagttcggagcttcccgaagcgctgggtatggcggaccgtatttatgttatgaacgaaggcaagataaaaggggagcttaacaagaacgaggcgacccaggaaaaaataatgcatctggcgctggtcggatga

SEQ ID NO: 44458 - protein, 129 aa, Unknown
  Obtained from environmental sample
  DOMAIN (1)...(106): ABC transporter
  misc_feature (1)..(129): Xaa is any amino acid
MDSQKEILEAERYRKDLNIRMPSVNQIVRNLSGGNQQKVVVSKTLLANPDIFIVDEPTRGIDVGAKTEIYGIMNNMIAAGKSVIMVSSELPEALGMADRIYVMNEGKIKGELNKNEATQEKIMHLALVG

SEQ ID NO: 44459 - DNA, 366 bp, Unknown
  Obtained from environmental sample
  misc_feature (1)..(366): n is a, c, g, or t
ttgattgaggagaaaacaatgggcggaaaggtcattcacactactgatactaaaaacctgataaagagcaatatcagaaactattcaatgtttctcatgctggcgcttattatgttgatttttgccccgctgaccaagtggaacaactggaattcgcgtaactttaccaatattttcttccaatatagttacgtgcttattttggcgattggcatggtgcaggtcatcataatacaggggatcgatctttcggtcggctccgtctgcgcttttgtcggcgtactcagcgcgatggtctacaataccggcgtggaatgttgtaacggttgtagccgctatgccatgggggtgtctcggccgatctga

SEQ ID NO: 44460 - protein, 121 aa, Unknown
  Obtained from environmental sample
  misc_feature (1)..(121): Xaa is any amino acid
MIEEKTMGGKVIHTTDTKNLIKSNIRNYSMFLMLALIMLIFAPLTKWNNWNSRNFTNIFFQYSYVLILAIGMVQVIIIQGIDLSVGSVCAFVGVLSAMVYNTGVECCNGCSRYAMGVSRPI

SEQ ID NO: 44461 - DNA, 360 bp, Unknown
  Obtained from environmental sample
  misc_feature (1)..(360): n is a, c, g, or t
gtgttatttttttattcatcttcggcatcctccttaatcatcgtgttatattccttgccggaaagtaaatgcccggccctgataccaattacttcgtcagcgataagggtcacattttcggaatgggtaacgattatcacgcatttgttatcctcgcgcgccaatcgggagaatatttccagcacggctttttcggtttcagtgtcgaggttgccggtcggttcatcagcgataatgacattcgggtcatgtgataatgcccgcgcgatgcccacacgctgctgttcgccgccggaaagttttaagattttacggtcggcggtttcacggtctatacctaccttgtcaagcagggtgtag

SEQ ID NO: 44462 - protein, 119 aa, Unknown
  Obtained from environmental sample
  SIGNAL (1)...(23)
  DOMAIN (74)...(112): Protein of unknown function (DUF1602)
  misc_feature (1)..(119): Xaa is any amino acid
MLFFYSSSASSLIIVLYSLPESKCPALIPITSSAIRVTFSEWVTIITHLLSSRANRENISSTAFSVSVSRLPVGSSAIMTFGSCDNARAMPTRCCSPPESFKILRSAVSRSIPTLSSRV

SEQ ID NO: 44463 - DNA, 714 bp, Unknown
  Obtained from environmental sample
  misc_feature (1)..(714): n is a, c, g, or t
gtgaaatgtttggaattggtagacgtgtcataccgctacgagggtaacacggaggcagtactgaaaaaagtcagcgcttcctttgagagcggaaagatttacacgattatcggacaatcaggcgcggggaaatcaaccttgctgtcgttgatttccggtctcgatacctgcaaggacggcgatgtttattataacgggaagaatctgcgggaactagatagggatgaataccgctctaaaagtgtgggcgtaattttccaaagttataatttgctgctaaactcaacagcggtttacaacatcactttctccatgaatatcagcgagagcggtattaaggaacggcaggcgaaaaagaatttcgcctacaccctgcttgacaaggtaggtatagaccgtgaaaccgccgaccgtaaaatcttaaaactttccggcggcgaacagcagcgtgtgggcatcgcgcgggcattatcacatgacccgaatgtcattatcgctgatgaaccgaccggcaacctcgacactgaaaccgaaaaagccgtgctggaaatattctcccgattggcgcgcgaggataacaaatgcgtgataatcgttacccattccgaaaatgtgacccttatcgctgacgaagtaattggtatcagggccgggcatttactttccggcaaggaatataacacgatgattaaggaggatgccgaagatgaataa

SEQ ID NO: 44464 - protein, 237 aa, Unknown
  Obtained from environmental sample
  DOMAIN (31)...(218): ABC transporter
  misc_feature (1)..(237): Xaa is any amino acid
MKCLELVDVSYRYEGNTEAVLKKVSASFESGKIYTIIGQSGAGKSTLLSLISGLDTCKDGDVYYNGKNLRELDRDEYRSKSVGVIFQSYNLLLNSTAVYNITFSMNISESGIKERQAKKNFAYTLLDKVGIDRETADRKILKLSGGEQQRVGIARALSHDPNVIIADEPTGNLDTETEKAVLEIFSRLAREDNKCVIIVTHSENVTLIADEVIGIRAGHLLSGKEYNTMIKEDAEDE

SEQ ID NO: 44465 - DNA, 579 bp, Unknown
  Obtained from environmental sample
  misc_feature (1)..(579): n is a, c, g, or t
atgctggcggcgtttgtgacggaactgcggagcaaaggtctgccggacaattacaatgtgagaacggatgaatccgcgtttgatagcgtggcgggaccggtggagggcttaaataacctcgcgttcacttttttgattattgtgctgttgcttggcgcggttattatgacactcctatcggtcatagctatccgtgagcggaaatatgaaatcggtgtcctgcgcgcaatgggcatgaaaaaaaataaagtcgctcttgggctttggacagagacaatcgtaatgacttgtatttgttttgtgctaggcatgggagtgggaacgctgttgtcgcagccggtgtccgacgcgatactgagcaggcaggtaaaatcatccgatacaggttctacatcgttggctgacaggttaaaggggacggatacggaacaaacggataaaatcgacgtttcggtaaacgcggttaccgcccttgagatattcgcggtatccattttgctggcgtctatcgccggcgtcatatcggtcaaccgaatcacaaaatacgaacccatcaagattttgatggaacgtaattag

SEQ ID NO: 44466 - protein, 192 aa, Unknown
  Obtained from environmental sample
  DOMAIN (15)...(184): Predicted permease
  misc_feature (1)..(192): Xaa is any amino acid
MLAAFVTELRSKGLPDNYNVRTDESAFDSVAGPVEGLNNLAFTFLIIVLLLGAVIMTLLSVIAIRERKYEIGVLRAMGMKKNKVALGLWTETIVMTCICFVLGMGVGTLLSQPVSDAILSRQVKSSDTGSTSLADRLKGTDTEQTDKIDVSVNAVTALEIFAVSILLASIAGVISVNRITKYEPIKILMERN

SEQ ID NO: 44467 - DNA, 339 bp, Unknown
  Obtained from environmental sample
  misc_feature (1)..(339): n is a, c, g, or t
atgtacgttgttgagcacgcgctcttgaatcttgggaaaaacaaaagccggaacatcctgctgggtgtgattatctttgctatcatcaccgccacagttgtggctctggcgatttacaacaccacggagcttgtcattgaagaaactagaacggcgctccaatgcgcggtgcgtgtcgtgccgcaaagacaaatggcaggaaacggaggcgcgatttcaccgggcggcggaggacaggaagcggcagtttcattggagcaatacatatcctttgccgaatccgaatatcttgacggcgctgacatcaaagagagtaaccggggcgccgacgggggttga

SEQ ID NO: 44468 - protein, 112 aa, Unknown
  Obtained from environmental sample
  misc_feature (1)..(112): Xaa is any amino acid
MYVVEHALLNLGKNKSRNILLGVIIFAIITATVVALAIYNTTELVIEETRTALQCAVRVVPQRQMAGNGGAISPGGGGQEAAVSLEQYISFAESEYLDGADIKESNRGADGG

SEQ ID NO: 44469 - DNA, 480 bp, Unknown
  Obtained from environmental sample
  misc_feature (1)..(480): n is a, c, g, or t
gtgaaatctcgccgaaataaccgcaaccgttacagggcacagaaagccggaattgtctttcaaggtttgaatctgctgaccaatgccacagccgtcgataacatcgttttatccatgaacatcagcggcgtgacgggagtggataaaaaagcgcgggcgcatgaactcttgaaaaaagtgggtatctccccggaaaaagcgaaccgtaaaatcctcaagctctccggcggcgaacaacaacgcataggtatcgcacgggctttggcacatgatccggttctgattgtagcggacgaaccgacgggaaatctggataaagacatcgaggcaaaagttttgaaaatatttgaatctctcgcgcatagcgaaggtaaatgtgtgattatcgtaactcactcaaaaaaggtaacgactatcgcggatgagatatggggactggacaaaggcgttttccggaagcttccagtaaataaaaaatag

SEQ ID NO: 44470 - protein, 159 aa, Unknown
  Obtained from environmental sample
  DOMAIN (2)...(149): ABC transporter
  misc_feature (1)..(159): Xaa is any amino acid
MKSRRNNRNRYRAQKAGIVFQGLNLLTNATAVDNIVLSMNISGVTGVDKKARAHELLKKVGISPEKANRKILKLSGGEQQRIGIARALAHDPVLIVADEPTGNLDKDIEAKVLKIFESLAHSEGKCVIIVTHSKKVTTIADEIWGLDKGVFRKLPVNKK

SEQ ID NO: 44471 - DNA, 822 bp, Unknown
  Obtained from environmental sample
  misc_feature (1)..(822): n is a, c, g, or t
ttggacactatcgccatatcattcaatgacgcgatggacacactgcagggcggcattactttttggcccagaaaattttccacattcagttacgaggtaattttccagacaggagccatcccccacgcttttctggttactgtagcaagaaccttaattaaccttgtttcaagcgtgttttttacggcaatgatcgcttttgccctttcacgccgtgaatttattttacaaaaaccttttacttttatattggttctttccatgtacataaacgcggggcttatcccgacatattttttaatgctccgtctgggcttaatcaattcgtttcttgtatatattgttcccggaattgttaacgcttttaattttgtcgtaatgaggacatatatgcgcagtattccggaaagcataattgaatcggcgcgtattgacggttacggggatttttatatatttatccgtattatttttcctttatgccttcctgttcttgctacgataggtctttttgtcgccgtaggatcatggaacgcgtggtttgacacgatgatttacaattccggcagggtgaatcttcatacccttcaatacaaactgatggaatacctgcagtcaagccagaatcagggcagatcggcaggagacgcgggagctatggctcttgccgccgccgcgggaggcggaggcatgggcatgataacgccgatgagcatgcgcgcggcaattacagtagttgcggcggctccgattttggcggtttatccgtttatgcagcgttattttgtagtcggattgaatgtcggcggcgtaaaagaataa

SEQ ID NO: 44472 - protein, 273 aa, Unknown
  Obtained from environmental sample
  DOMAIN (40)...(240): Binding-protein-dependent transport system inner membrane component
  misc_feature (1)..(273): Xaa is any amino acid
MDTIAISFNDAMDTLQGGITFWPRKFSTFSYEVIFQTGAIPHAFLVTVARTLINLVSSVFFTAMIAFALSRREFILQKPFTFILVLSMYINAGLIPTYFLMLRLGLINSFLVYIVPGIVNAFNFVVMRTYMRSIPESIIESARIDGYGDFYIFIRIIFPLCLPVLATIGLFVAVGSWNAWFDTMIYNSGRVNLHTLQYKLMEYLQSSQNQGRSAGDAGAMALAAAAGGGGMGMITPMSMRAAITVVAAAPILAVYPFMQRYFVVGLNVGGVKE

SEQ ID NO: 44473 - DNA, 984 bp, Unknown
  Obtained from environmental sample
  misc_feature (1)..(984): n is a, c, g, or t
atgataaactgtaaaatgacgttttttttagccgtttttatgcttttttcccctcttttttccctttgggctgacgacagtcatgataactatggtgatgtgtcggattatttaaatagtatttacggagtcgatgataacgcgggtttaaccgcttttccgatattgaatattccaatgggaggacgttccgaaggcatggcgggagcgttttccgcggtctcggacgatgtttcctttcttgaatttaacccggcaggctcgtcgatgctggaaaaatcggaattggcgttttttcacaataactggatagcggacgtaaagattgagggtatcgcctacgccgcgcgttttggaaattttggtcttgccgccggcgcgaaatggctctacacaccctttaccgaatacaactattacggcgatagagtgtccggcggctattattcggaaggcgtggcgattataaacgcttcctataattttttctcaggttattacttttccgggttgtcccttggagtgaacgtgaaaggcgctttccgctctatgcccgattttaccgacgatcatgacaatataatcaaaggttccggtatggagcagtccgcggcgatggttatggcggatgtcggtctgcttacaaggtttaattttttgaaaggttatacttcaagagacaagaacgcggctgtcgcccttgtcatccgcaaccttggtcctcccgcccttgacgaacctctgccgacagtagctaacgcggcattttcgtataagccgattcgtccgctgactttcggcgttgattttttgatgccggttaacatgacggatttttctctttcagagtcgccttacggggctttaggtatggctgttaatgttacaaagtttttatctatgcgcgccggagtaatggtaaaaccggggaagcagccgtattactgtcggcagcgccatcgacatggaaaaaatttcttttga

SEQ ID NO: 44474 - protein, 327 aa, Unknown
  Obtained from environmental sample
  SIGNAL (1)...(24)
  DOMAIN (6)...(317): Uncharacterised protein family (UPF0164)
  misc_feature (1)..(327): Xaa is any amino acid
MINCKMTFFLAVFMLFSPLFSLWADDSHDNYGDVSDYLNSIYGVDDNAGLTAFPILNIPMGGRSEGMAGAFSAVSDDVSFLEFNPAGSSMLEKSELAFFHNNWIADVKIEGIAYAARFGNFGLAAGAKWLYTPFTEYNYYGDRVSGGYYSEGVAIINASYNFFSGYYFSGLSLGVNVKGAFRSMPDFTDDHDNIIKGSGMEQSAAMVMADVGLLTRFNFLKGYTSRDKNAAVALVIRNLGPPALDEPLPTVANAAFSYKPIRPLTFGVDFLMPVNMTDFSLSESPYGALGMAVNVTKFLSMRAGVMVKPGKQPYYCRQRHRHGKNFF

SEQ ID NO: 44475 - DNA, 915 bp, Unknown
  Obtained from environmental sample
  misc_feature (1)..(915): n is a, c, g, or t
ttgctgttcttttataatatatcggaatataccaaaaaaaacagtatattggaaagaattaaaagaaaaaatacgataatatattatagaatacaaatgataaaggcaaagtctgtccatataacagtttttattaaaattttctctattttgctgtttttttcggcaataactccgctttttggaggcggcagacaggatgccgatctggcaaaagcggacgcgcttattaaaaataaaaaatacgaagaagccatatcgatattaactacttacgcaaaacgaaacccggataactttgatcttgcgcaacaacgcctgcggaaaatttaccaattacgggatgagtttaaccgtaccgccgatgaattaattaacaccctgttaaacgaacctgaaaacgcggaaaaaatccttaatctttcaaaacagcttaactctattgaaaacgataacagtccccttcttgtaaactttgtatccagaactcaggagatcgcgcagtttaacgcaaacagaaacaggttagctgacatttttaacagaggcaaagaattattaaataaaggcgattgcgcgggcgctatccgagtttatgccgaaggtatgaactttatgcgcgatgaatttttttccgcaggctacggaacaaacattgagagcgaagtcagtagggaaaccgaaagaatcaatacgataatcgcttcttttcagcagacaagttctcagatgggaacaatttcggcggaacttgtccgcgtaatcaacgcgggaaatttagccggaacaggcgaaatcataaacagattgacgccccgcatggatagatttatcgcgctaaaacaggatttgtattcggctgacatgaatctttcaagatctcttaacagaataagagaaaagatccggatatag

SEQ ID NO: 44476 - protein, 304 aa, Unknown
  Obtained from environmental sample
  misc_feature (1)..(304): Xaa is any amino acid
MLFFYNISEYTKKNSILERIKRKNTIIYYRIQMIKAKSVHITVFIKIFSILLFFSAITPLFGGGRQDADLAKADALIKNKKYEEAISILTTYAKRNPDNFDLAQQRLRKIYQLRDEFNRTADELINTLLNEPENAEKILNLSKQLNSIENDNSPLLVNFVSRTQEIAQFNANRNRLADIFNRGKELLNKGDCAGAIRVYAEGMNFMRDEFFSAGYGTNIESEVSRETERINTIIASFQQTSSQMGTISAELVRVINAGNLAGTGEIINRLTPRMDRFIALKQDLYSADMNLSRSLNRIREKIRI

SEQ ID NO: 44477 - DNA, 486 bp, Unknown
  Obtained from environmental sample
  misc_feature (1)..(486): n is a, c, g, or t
atgcggcgccgttcgaaacggagagttttttgtcccatggttcacactgaaaaaccgctttcttcggcttcagtttcacataaaataatttggttgcattatctgacagccgacggcatacaaaaacaatcaggtcatttaatcgcctacagagaagccgcgcccgcgcttttttatgaaactaattttaacaaacgcgccgtaaaaccccttgtaaaccattttggtaaaaacccgaaaaaccttatttgtaccggcacagcgcttggtggacaggcggttaaaatgggcgatgccgccgtaacgataaatgttcttccgtatatgccgatgacatttatcatctgggaagaaagtgaggaatttccccccgacggaaacatactttttgatcaaacggcaaaaacatggttagcgtcggaagaccttgcggtattagcgagccttgcggtttgtgagttaattgaagcgggaaaatcaccatga

SEQ ID NO: 44478 - protein, 161 aa, Unknown
  Obtained from environmental sample
  misc_feature (1)..(161): Xaa is any amino acid
MRRRSKRRVFCPMVHTEKPLSSASVSHKIIWLHYLTADGIQKQSGHLIAYREAAPALFYETNFNKRAVKPLVNHFGKNPKNLICTGTALGGQAVKMGDAAVTINVLPYMPMTFIIWEESEEFPPDGNILFDQTAKTWLASEDLAVLASLAVCELIEAGKSP

SEQ ID NO: 44479 - DNA, 432 bp, Unknown
  Obtained from environmental sample
  misc_feature (1)..(432): n is a, c, g, or t
atgttaaataaacaggaagtgttacgtgaagttagagaaaatattcttcccttttggcaaagtatggcggatgaagaaaacggcggcttttacggtgaggcggatttttacggcaaaacagacaaaactgcctcaaaaggctgtattttaaattcgcggatactatggacattttccgccgcataccgaatattaggtgacgatggctataaaacttatgcccaacgcgcgcgggattttctatcatcagcctttcttgacaagacgcacggcggattgtattggctggtagaccataccggaaaagcgttggacacaagaaagcaattttacaacatcgcctttggcatttatgcgttaagtgaaacattatcgcgccacagggagatcaatcttcacttgaattggcgatggctctttcgacgtaactga

SEQ ID NO: 44480 - protein, 143 aa, Unknown
  Obtained from environmental sample
  misc_feature (1)..(143): Xaa is any amino acid
MLNKQEVLREVRENILPFWQSMADEENGGFYGEADFYGKTDKTASKGCILNSRILWTFSAAYRILGDDGYKTYAQRARDFLSSAFLDKTHGGLYWLVDHTGKALDTRKQFYNIAFGIYALSETLSRHREINLHLNWRWLFRRN

SEQ ID NO: 44481 - DNA, 636 bp, Unknown
  Obtained from environmental sample
  misc_feature (1)..(636): n is a, c, g, or t
atgaataccaacctgcacgtactggaagcttatacaaacttggttcgtgtcggcggaagcgagcgggtaatcaaggcgcttgaaacattattgcgcataacactggataaaattataaaccgcgattggcattttaatttattttttgacatgaactggaattcgcttgtaaaggatatttcttacggccatgatattgagggaagctggctgttgtatgaagctgcgcttgcaacaggcgatgaaaaacttatcttaaaggtgaaacaaactgcgctggctattgcggaagttatttataatgttgctattgatcaaaaaaacggcggattaatcagcggttgtgacatggaggggcatattcacagcaaaaaggaatggtggccgcaagcggaagctgtcgtggggttttacaacgcgtatgaattgtccggcgagcggaaattctatgatgcggcggagaggacttgggattatattcaaaaatattttgtggatcgggaacatggtgaatggtataatgaattgaatttagataatacgccggattttggtttgcccaaggccgggttttggaagtgtccttatcataacgcacgcgcttgttttgaagtggcgcggaggatgggggagtga

SEQ ID NO: 44482 - protein, 211 aa, Unknown
  Obtained from environmental sample
  misc_feature (1)..(211): Xaa is any amino acid
MNTNLHVLEAYTNLVRVGGSERVIKALETLLRITLDKIINRDWHFNLFFDMNWNSLVKDISYGHDIEGSWLLYEAALATGDEKLILKVKQTALAIAEVIYNVAIDQKNGGLISGCDMEGHIHSKKEWWPQAEAVVGFYNAYELSGERKFYDAAERTWDYIQKYFVDREHGEWYNELNLDNTPDFGLPKAGFWKCPYHNARACFEVARRMGE

SEQ ID NO: 44483 - DNA, 822 bp, Unknown
  Obtained from environmental sample
  misc_feature (1)..(822): n is a, c, g, or t
atggaagatgtgtacgcagagtgtcccattctcatagcgataacgaaattcagctccaccgcacccttaaaaatggcggccaaaaaatacggcatcagggccgccaccatgcctggcttcagcgaggccatgattcccgcgctcaggctggactatacagaaatcaaccgccgcgtggacatcctcaagcgcctgatggatcgcgccactggggcggacatactattcagccaccaaaggggcgagtctcggctgcacttggatttgcgccaccgaatggcccactgctctgggggcttggtgcatgagccaggaatagcagggaacctgccatctggcgaggcgtacatcgtgccttacgagggagagatagaaggcgatccgagcctgaccgaaggcgcgctgccagtccaatttggggacgaggtggtcatttacagaattgatggcaaccgcgcagtgcaagtgctaacaaaagggccggagtccgagcgggaagccgagcttttggccagagaaccggcatacgccaacttggcggaattgggccttggcattttggcgccatttggcatcaagcccatcggcgccgtattgctggacgaaaagctgggcctgcacatagcctttggccgcagcgagcattttggcggacaggtggggccggaggcattttcatcgccagcggcagtggttcacctcgacagggtgtacgtgccagagatgcagccagatatatgcccagagagcgttgacctcaactttggagccggagagcccttgcccataatgagaaagggcgagtacgtcatagaattttga

SEQ ID NO: 44484 - protein, 273 aa, Unknown
  Obtained from environmental sample
  misc_feature (1)..(273): Xaa is any amino acid
MEDVYAECPILIAITKFSSTAPLKMAAKKYGIRAATMPGFSEAMIPALRLDYTEINRRVDILKRLMDRATGADILFSHQRGESRLHLDLRHRMAHCSGGLVHEPGIAGNLPSGEAYIVPYEGEIEGDPSLTEGALPVQFGDEVVIYRIDGNRAVQVLTKGPESEREAELLAREPAYANLAELGLGILAPFGIKPIGAVLLDEKLGLHIAFGRSEHFGGQVGPEAFSSPAAVVHLDRVYVPEMQPDICPESVDLNFGAGEPLPIMRKGEYVIEF

SEQ ID NO: 44485 - DNA, 714 bp, Unknown
  Obtained from environmental sample
  misc_feature (1)..(714): n is a, c, g, or t
ttgaacaacagtcatcgcatcgtccattctcatcatcattcatcagtgccatcaatgcgcttacttctagcttccagtaatctgcacaaagcgagagagctgggggagcttttgcctggcgttgagctagtggcttgggctgggccagacatccccgaaagcggcgcattttttcaggacaacgccatccaaaaggccgtctttgcgagggactggctcttgcgccaaggcagtggtgctgatgacggaatagatggtgtgttggcagacgattctgggctttgcgtagaggccctgtttggcgggccaggcgtgctttccgcccgctttgccccgtacctttcctaccccgaaaaaaatcggctgctgcttggcatgataaaccaaggagagccaaggacggccatgttcgtgtgcgtcttggcttttgccgcccttgcttcgccaccgccaaatccatttactgtctctggcgtcgtcaggggttccttggcttttgacgtgaggggggagggcggcttcggctatgacccaatattcattcccgatggatatgaccgcacatttggcgaattggacgcagaaacaaagaaccacctgagccaccgcagcaacgcggcaagggccatggcggagaggctggggttaaacattgagcgtctttttgttgctggcgatgcttgcgggtggcgcggcactgggctttatctttag

SEQ ID NO: 44486 - protein, 237 aa, Unknown
  Obtained from environmental sample
  DOMAIN (21)...(214): Ham1 family
  misc_feature (1)..(237): Xaa is any amino acid
MNNSHRIVHSHHHSSVPSMRLLLASSNLHKARELGELLPGVELVAWAGPDIPESGAFFQDNAIQKAVFARDWLLRQGSGADDGIDGVLADDSGLCVEALFGGPGVLSARFAPYLSYPEKNRLLLGMINQGEPRTAMFVCVLAFAALASPPPNPFTVSGVVRGSLAFDVRGEGGFGYDPIFIPDGYDRTFGELDAETKNHLSHRSNAARAMAERLGLNIERLFVAGDACGWRGTGLYL

SEQ ID NO: 44487 - DNA, 900 bp, Unknown
  Obtained from environmental sample
  misc_feature (1)..(900): n is a, c, g, or t
ttgcgggtggcgcggcactgggctttatctttaggaaataccaagcactggctggagcctgtcggcatttggcgcatgcctctatttgggggctgcttgtcgccatgggggccaagctgggcccaaaatcgatcattgtttgccaacgacttgggtgtattatttatcgccgttggttctgctgcggcattgacgctggtctttgctttggtcttttggctggcgggcggaagaaaaaaattgcaggcggaagaaagccaagtagaaaagtcagaagggcctgccggcaagctacgcgaacttctttctgttgtcgccaatgggggctgcatcataattggctttgtggcttttttgcttttgccgcaggccagtgtggaaaatcttccgctggagtccatcattgattggttgttgatggcgctgctcttttttgtaggctttggcctaggccgtgaattgaagagcctgaatttcggcctgttgccgcccatgttgttgttggcgccattcttaaacatggcgctgagcttggcctttgggtattttttcggcttcctttttggcctaggtgcaaggcatggcgcactgttgaccgcagggatgggctggtacagcctttcttcggtgctgctcgccgagcggggtcttgtggtactttctgtgttggcgttcatccacaacgtgttcagggaactatttgctatattgctggcccccatcgctgcaagaatttcgcccctgttgcccatttatttgggcggtgccaccagcggagacgtaatgctgccattcgtgcaaaaatattgcggaaaagaatataccttggtttccttttattctgggattgtgtgcagcatcgccgtgatgccgctggtcaaggcgcttgccgggcagtga

SEQ ID NO: 44488 - protein, 299 aa, Unknown
  Obtained from environmental sample
  DOMAIN (105)...(298): Membrane protein of unknown function (DUF340)
  misc_feature (1)..(299): Xaa is any amino acid
MRVARHWALSLGNTKHWLEPVGIWRMPLFGGCLSPWGPSWAQNRSLFANDLGVLFIAVGSAAALTLVFALVFWLAGGRKKLQAEESQVEKSEGPAGKLRELLSVVANGGCIIIGFVAFLLLPQASVENLPLESIIDWLLMALLFFVGFGLGRELKSLNFGLLPPMLLLAPFLNMALSLAFGYFFGFLFGLGARHGALLTAGMGWYSLSSVLLAERGLVVLSVLAFIHNVFRELFAILLAPIAARISPLLPIYLGGATSGDVMLPFVQKYCGKEYTLVSFYSGIVCSIAVMPLVKALAGQ

SEQ ID NO: 44489 - DNA, 468 bp, Unknown
  Obtained from environmental sample
  misc_feature (1)..(468): n is a, c, g, or t
ttggaaaaagttgaaatatcagagaaggaaaaacaatctaaactagtttttaataatgatttattgtttgtcagatcatctgtaaaatatgaaggagttggtttcccttcattgataaatcctgaaaatgaagaaattgttttttgcggttttttgatcaaatgtactccaaatattaaagttgtattgcctgagtatttactatatttactgcgaacaactgaatatcgtaataaaaccgtattgttatcaaataaagcaaatataactaatatttcacaagaaagtattaaatcactggaaattcctattccgcccctcgaaatccaacgctctatcgttactgaaatcgaaacggagcaaaaagccgttgacggttgccgtgaacttattgctttatacgagggaaaaatcaagactgtgattgagcgtgtttgggggaatgattctaacaaggaaatagaatga

SEQ ID NO: 44490 - protein, 155 aa, Unknown
  Obtained from environmental sample
  misc_feature (1)..(155): Xaa is any amino acid
MEKVEISEKEKQSKLVFNNDLLFVRSSVKYEGVGFPSLINPENEEIVFCGFLIKCTPNIKVVLPEYLLYLLRTTEYRNKTVLLSNKANITNISQESIKSLEIPIPPLEIQRSIVTEIETEQKAVDGCRELIALYEGKIKTVIERVWGNDSNKEIE

SEQ ID NO: 44491 - DNA, 789 bp, Unknown
  Obtained from environmental sample
  misc_feature (1)..(789): n is a, c, g, or t
atgggcagtcccgaaagcgaactaggcagaaatagcgatgaaatacaacattctgtaacattaagcggttttaaaatgagcaagtatcaggtaacgcaggcgcagtggattgctgtaatggggaaaacgatagaggaacagcaggcacttgctatctcatcaactaccgaccgcggcagaggagataattatcctgtttactatgtaagttcgtatgacgttatagtattctgcaacaaactgagcattctggaaggattagaacctgtatatagcataaacgatgtatatcacataaacagcagtaccaatcccacggattggggaaccatacctcctactaatacttctgactcgagatgggatgcggcggtaatggacaagagtaagaacggctatcgattgccgaccgaagcggaatgggaatatgcctgccgcgcgggaacaacgatggcgtacaatacaggagatacgataagtgacaataccgggtggtattctggcaacagtggaggaaaaactcatgcagtgggattgaaacccgctaacgcatggggactgtacgatatgcatggaaacgtgattgaatggtgttgggactggtacggaagttatacgactgactctcagacagatccaaccggagcggttaccgacggtgaacgggttattcgcggcggtgacaacgacaccttcgacaagtatctgcgttcagcgtgtcggggtaaaatccccccgggcttccggggcagagacttcctctacggcttccggcttgtgcgccgttga

SEQ ID NO: 44492 - protein, 262 aa, Unknown
  Obtained from environmental sample
  DOMAIN (1)...(261): Domain of unknown function (DUF323)
  misc_feature (1)..(262): Xaa is any amino acid
MGSPESELGRNSDEIQHSVTLSGFKMSKYQVTQAQWIAVMGKTIEEQQALAISSTTDRGRGDNYPVYYVSSYDVIVFCNKLSILEGLEPVYSINDVYHINSSTNPTDWGTIPPTNTSDSRWDAAVMDKSKNGYRLPTEAEWEYACRAGTTMAYNTGDTISDNTGWYSGNSGGKTHAVGLKPANAWGLYDMHGNVIEWCWDWYGSYTTDSQTDPTGAVTDGERVIRGGDNDTFDKYLRSACRGKIPPGFRGRDFLYGFRLVRR

SEQ ID NO: 44493 - DNA, 825 bp, Unknown
  Obtained from environmental sample
  misc_feature (1)..(825): n is a, c, g, or t
atggtagacggtttttcggtttttaacgcaacttgtacaggcgcgtcacatatacgcgccggaaaaccgtgccaggatttttcaacatgcctgaatacggaaaaagctgcaatcatagccgttgccgacgggcatggctcggacgcgtatttcaggagcgacaggggggcgcgtttcgcggcggaggcggcaatacagtgtatacaggacttatttacgattcatgacgaggtattccgcgaatccctgcgtcagactcctgaaactgttttagagacgctggaaaaaagcattattgccgcatggcataagaaggtcacggatgatttaaaacaggaagcggttgataccgacgggttaacggcctacggaacaacgctgttggcggcggtaatgacagagagctattggtttgcgatccagattggagacggaaaatgcgtaattataaatgaagacaattctgtcatacagcccgtcacctgggatgagcgttgtttcctgaacaggacaacatcactgtgcgatgacgaggcaataggccttttccgtcattattacagcgaaacgccgccgcttgccgtatttttgggaagcgacggaattgacgattcttttcccgtcaatgacaacgggaaataccttgccaatttctacatgagtgtttacaggaattttcttgacgagggactggaaaagggagaattacaactgcgggaaatactgccaaaaattacgctaaaaggctcaggcgatgatgtttccgtagcccggaatataaggaaatacaaatcaggcgccgatcagaatcgaactgatgcataa

SEQ ID NO: 44494 - protein, 274 aa, Unknown
  Obtained from environmental sample
  misc_feature (1)..(274): Xaa is any amino acid
MVDGFSVFNATCTGASHIRAGKPCQDFSTCLNTEKAAIIAVADGHGSDAYFRSDRGARFAAEAAIQCIQDLFTIHDEVFRESLRQTPETVLETLEKSIIAAWHKKVTDDLKQEAVDTDGLTAYGTTLLAAVMTESYWFAIQIGDGKCVIINEDNSVIQPVTWDERCFLNRTTSLCDDEAIGLFRHYYSETPPLAVFLGSDGIDDSFPVNDNGKYLANFYMSVYRNFLDEGLEKGELQLREILPKITLKGSGDDVSVARNIRKYKSGADQNRTDA

SEQ ID NO: 44495 - DNA, 846 bp, Unknown
  Obtained from environmental sample
  misc_feature (1)..(846): n is a, c, g, or t
atgccgagaattttagataccgcagaattgattccactgatcgccgcgcttgcgaaaaaggcctgttacgaactgggtgacgacgtaatagcatccctgcgtgaggcgcaatacagggaggagtcgccctacggcagggactgtctgcgcatgcttgtcgaaaacgccgaatacgcgaaaaaagaacagatcgcctgctgccaggacaccggtacctgcaatgtcctgctggaaatcggtcaggaggtttcctggaaaggcatgcccctgttcgacgcggtcaacgagggtgtgcgtcggggctacgaggaaggatatctcagaaaatctatggtggcggatcccctggaaagaatcaacacgggtgacaatacgccggcaatgctgcatacggagatcgtaccgggcgaaagggtgtcggtaatcgttatgcccaaaggcggcggctgcgagaacatgggggccttttgcacactgctgccctccgacggggcgcagggagtaaaggactttgtgatacaaaccgttgataaggctggaggcaaagcctgcccgcctttagttgtgggtgtagggatcggcggcagcatggacaagtgtgtgtggctcgcaaagaaggccctgctccgtccaataggcagccataatcccgctcccttctactcaagtctggaaactgaactccttgaaaagataaataatctgggtatagggcctatgggaatggggggcaggatcaccgctctagacgtacatgtcgaatactatccatgtcatataacggccctgcccgtggctgtaaacctccagtgccacgccgcccgcgtcgccaggacggaactataa

SEQ ID NO: 44496 - protein, 281 aa, Unknown
  Obtained from environmental sample
  DOMAIN (10)...(281): Fumarate hydratase (Fumerase)
  misc_feature (1)..(281): Xaa is any amino acid
MPRILDTAELIPLIAALAKKACYELGDDVIASLREAQYREESPYGRDCLRMLVENAEYAKKEQIACCQDTGTCNVLLEIGQEVSWKGMPLFDAVNEGVRRGYEEGYLRKSMVADPLERINTGDNTPAMLHTEIVPGERVSVIVMPKGGGCENMGAFCTLLPSDGAQGVKDFVIQTVDKAGGKACPPLVVGVGIGGSMDKCVWLAKKALLRPIGSHNPAPFYSSLETELLEKINNLGIGPMGMGGRITALDVHVEYYPCHITALPVAVNLQCHAARVARTEL

SEQ ID NO: 44497 - DNA, 633 bp, Unknown
  Obtained from environmental sample
  misc_feature (1)..(633): n is a, c, g, or t
atgtcatataacggccctgcccgtggctgtaaacctccagtgccacgccgcccgcgtcgccaggacggaactataatggaaacaaaaattatacagctaacgacacctntaagccgcgcggatattgcggctttggaaataggcgatatcgtcgaactgagcgggtttatttttacggccagggacgcggcgcacaagcgcatggaaagcgcgtggaaacaggagcttcccctgcccgtcgacctcaagggacagcttgttttttacgccggcccctgccccgccaaacccggacacgccgtgggttccatcgcccctacaaccagcatgcgcatggacggctttgtcgagatgacttttgaactgggccttgtcggtatgattggcaagggggatcgctgtgattttgtcccgggcctctgtaaaaaatacggtggaatctatttcctcggcatcggaggcgcttcggcgctcatctcaaaacaggttaaaagctgcgaagttgtcgcctgggaagatttgggaacggagtccgtcaaaaagctggaagttgaaaaattacgcctgatagtgggcatagattcacagggccgtgttttccaggacagggagatcgctaagtaccgtcgctga

SEQ ID NO: 44498 - protein, 210 aa, Unknown
  Obtained from environmental sample
  DOMAIN (4)...(206): Fumarase C-terminus
  misc_feature (1)..(210): Xaa is any amino acid
MSYNGPARGCKPPVPRRPRRQDGTIMETKIIQLTTPXSRADIAALEIGDIVELSGFIFTARDAAHKRMESAWKQELPLPVDLKGQLVFYAGPCPAKPGHAVGSIAPTTSMRMDGFVEMTFELGLVGMIGKGDRCDFVPGLCKKYGGIYFLGIGGASALISKQVKSCEVVAWEDLGTESVKKLEVEKLRLIVGIDSQGRVFQDREIAKYRR

SEQ ID NO: 44499 - DNA, 564 bp, Unknown
  Obtained from environmental sample
  misc_feature (1)..(564): n is a, c, g, or t
atgtcaaaaaatggtggtttattgacacaccccaatttttcctatctttccccaatgatatacggctatgtaagggtatcaacaacccaccaaaatgttgaaaacgggcggtttgaagtggcgaatttcgctcaaaaacaagggttcctgttgaaaaatgggtacggaacaatttcctcgcaaaaagaccttaaaaagcggaaattgagccttttactcaaaaaggtacgcaaaggcgatgtgataatcgcaacggagatttcacgacttggacgaaatatgttggagataatgaatattctaagtttttgcctaaacaaggaatgtcaagtttggactatcaaggaaaattacaaattgggcattgacattccaagtaaggtattggcggttgtgtttgggcttgttgcagaatttgaaaggaatttaatttccgcaagaacaaaggaggctttgacgagaatcaaagctgagggaaaaaaaacttggacgaccaaagggaactcagaagtctatgcagaaattggatatgtcaaaagagagattgcagggtatgcttggtag

SEQ ID NO: 44500 - protein, 187 aa, Unknown
  Obtained from environmental sample
  DOMAIN (20)...(161): Resolvase, N terminal domain
  misc_feature (1)..(187): Xaa is any amino acid
MSKNGGLLTHPNFSYLSPMIYGYVRVSTTHQNVENGRFEVANFAQKQGFLLKNGYGTISSQKDLKKRKLSLLLKKVRKGDVIIATEISRLGRNMLEIMNILSFCLNKECQVWTIKENYKLGIDIPSKVLAVVFGLVAEFERNLISARTKEALTRIKAEGKKTWTTKGNSEVYAEIGYVKREIAGYAW

SEQ ID NO: 44501 - DNA, 786 bp, Unknown
  Obtained from environmental sample
  misc_feature (1)..(786): n is a, c, g, or t
ttgggcattttcatcgcgaaaaaccgcaagtatctggtggaaaatcgttggcccgctcgcctgaaggatctgaatctcaaatcctacggcgactactatcactatctgcgctatgacccgaactgcaaagctgaactgggcaaaatggcggaagtggtgacgacaaatgaaaccagcttttaccgcaaccctccccagcttcagatttttcaagagaaggtgttgcgcaagctcttggacgagggccgtaaaaaaggccggaaacagctgcggatatggtcggccggctgctcgaccggggaagaaccctatacgcttgccatcatcatacttgaagaactcaaggcggaacttgccgcctgggacatcaagatcacggccaatgacctgtccgatgccgtgcttgcggccgccaaacgcggcctgtactccgagtacgccctgcgcacaacgccgccggctattgttgcccgctatttcaccaaggatgagaacggcgtctaccacatcgccccccaggccaagcagcttgtttcctttggcccgatcaacctgaacgacaagttcgccctcaagcgggtggagcgatcgcacatcattttctgccgcaacgtgatcatttattttgacgatgacatgaaaaaacgtgttatcagcgcgttttacgacaatctcctgcccgaaggctatctgatcatcgggcattccgagtccttgcacaatatcagccgtacgttcaaacccgagcatcatccgggcacaatcatctacagcaaacaggattga

SEQ ID NO: 44502 - protein, 261 aa, Unknown
  Obtained from environmental sample
  DOMAIN (56)...(256): CheR methyltransferase, SAM binding domain
  misc_feature (1)..(261): Xaa is any amino acid
MGIFIAKNRKYLVENRWPARLKDLNLKSYGDYYHYLRYDPNCKAELGKMAEVVTTNETSFYRNPPQLQIFQEKVLRKLLDEGRKKGRKQLRIWSAGCSTGEEPYTLAIIILEELKAELAAWDIKITANDLSDAVLAAAKRGLYSEYALRTTPPAIVARYFTKDENGVYHIAPQAKQLVSFGPINLNDKFALKRVERSHIIFCRNVIIYFDDDMKKRVISAFYDNLLPEGYLIIGHSESLHNISRTFKPEHHPGTIIYSKQD

SEQ ID NO: 44503 - DNA, 414 bp, Unknown
  Obtained from environmental sample
  misc_feature (1)..(414): n is a, c, g, or t
gtggcgccgggggggcgccatctgcggctgacagggcgccgtcactcctcccaccactatctcacagtgtccgaggaaccagccgatgccctgtacaagccatcggccacggtgttgatggaaagcgtgggcacgctgctgggcgcgcgcagcgttggcgtcatcatgaccggcataggccgcgacggctgtgacggcatacgggtgctcaaacaaaagggcgggcacgtcatcgcccaaggcaaggcttcgtgcgtggtgtatggcatgccccaagccgtggcaaaagccgggctggcggatgaaattgtcgaacttgacaaactggcggaaacaattgttaaggccatctacaggcagcagcggcaggttcctgacggcgctttccgcccaactgctcacagccggggttag

SEQ ID NO: 44504 - protein, 137 aa, Unknown
  Obtained from environmental sample
  DOMAIN (1)...(116): CheB methylesterase
  misc_feature (1)..(137): Xaa is any amino acid
MAPGGRHLRLTGRRHSSHHYLTVSEEPADALYKPSATVLMESVGTLLGARSVGVIMTGIGRDGCDGIRVLKQKGGHVIAQGKASCVVYGMPQAVAKAGLADEIVELDKLAETIVKAIYRQQRQVPDGAFRPTAHSRG

SEQ ID NO: 44505 - DNA, 906 bp, Unknown
  Obtained from environmental sample
  misc_feature (1)..(906): n is a, c, g, or t
ttggggcatattgttaccgcaaaatactggcactgcgtggaagacaaccgcgtccacctgacgcagactgattcaggttgggcaaaattcgcatggggaaaaatttacggacagtggatttgcggagcggcaattggcgtttatgacactgagaaatttacccccaaaggtatgttagacgctattcagcggttaaagcccacgacattttgcgcccccgccacggtattccgttatctgattaaggaagacatttcacattatgattttagttttatccgccacacgtccgtggccggggagccgttaagccctgaagtttacaataaatttaaggaacttacaaaacttgaaatttacgaaggtttcggccagagtgagacttccgtaatggcggctgtttttaagtggctgccggtaaaacccggttcaatgggaaaacccgcgccgcttttcggttttaaattgttagacgaaaacggtaacgaatgtgacgaaggcattgttggaaacatgagtattacaagcgcgggaaaaaatatgtacgaaaccgaaggccccgccgcggataatattccgcccgtgatcggcaattcggattttccaggtattttccgtggttactggaaagacagggaaataacgttaaataactggaataacggaacatatcaaacgggcgacatggcgtggaaggatgatgacggctatctgtggtttgtggggcgtaatgacgacgtgataaagtgttcaggctaccgtattggcccatttgaagttgaaagcgccctgatggagcacccttccgtacttgagtgcgccgtcaccgccgcccccgatccaatgcgaggtcaggtagtgaaagcgaccatcgttcttgcgcgtggttacacggccctcgaatga

SEQ ID NO: 44506 - protein, 301 aa, Unknown
  Obtained from environmental sample
  DOMAIN (1)...(275): AMP-binding enzyme
  misc_feature (1)..(301): Xaa is any amino acid
MGHIVTAKYWHCVEDNRVHLTQTDSGWAKFAWGKIYGQWICGAAIGVYDTEKFTPKGMLDAIQRLKPTTFCAPATVFRYLIKEDISHYDFSFIRHTSVAGEPLSPEVYNKFKELTKLEIYEGFGQSETSVMAAVFKWLPVKPGSMGKPAPLFGFKLLDENGNECDEGIVGNMSITSAGKNMYETEGPAADNIPPVIGNSDFPGIFRGYWKDREITLNNWNNGTYQTGDMAWKDDDGYLWFVGRNDDVIKCSGYRIGPFEVESALMEHPSVLECAVTAAPDPMRGQVVKATIVLARGYTALE

SEQ ID NO: 44507 - DNA, 474 bp, Unknown
  Obtained from environmental sample
  misc_feature (1)..(474): n is a, c, g, or t
atgggcgaactacaacacctgttagagcgcggttgcatatatgtcgcgaccggcgagggcgccgtgcaaacggtgttgggtagttgcgtctcggtgtgcctgtgggatccggaggcgcgttgcggcgggatgaaccacttcatttacccgcagactatgcgcaaagagcaggccacgccgaagtacggaaacgtggccacgatggcgctgatcaagcttatgtgcgaggaaggttgcagtacaagcagcctaaccgcccacataataggcggcggccatcccgacggcgccacagacagtacgggtatgcgcaatgtggaagtagccagaaagattttgaacgaaaagggaataactataatgtccgaagacgtgggaggcagggtaggccgaaaagtcgtctttgatttatcgaccggccaagttgcggtgctgaaagtgacaaaactgcgggctgaggattggatcaattga

SEQ ID NO: 44508 - protein, 157 aa, Unknown
  Obtained from environmental sample
  DOMAIN (37)...(156): CheD
  misc_feature (1)..(157): Xaa is any amino acid
MGELQHLLERGCIYVATGEGAVQTVLGSCVSVCLWDPEARCGGMNHFIYPQTMRKEQATPKYGNVATMALIKLMCEEGCSTSSLTAHIIGGGHPDGATDSTGMRNVEVARKILNEKGITIMSEDVGGRVGRKVVFDLSTGQVAVLKVTKLRAEDWIN

SEQ ID NO: 44509 - DNA, 489 bp, Unknown
  Obtained from environmental sample
  misc_feature (1)..(489): n is a, c, g, or t
ttgcaccagggcctgtccggcttcggcgtggagatgcgccagttgatggacgcatggcggtgcctgtgcgcctcggatggcgggacgctgctgctgatggacgaattcgccaggaccaccagttcgggcgaggccgaggccatactggccgccgtgctggaggccgtagcgcgaaagactggcgccgtggccctatgctccacgcactttcacggtgtcccgcgacttcctggcgtgcgctacctgcggatggccggtctgcggaaagacatcggcgcggttggcatggatggccaagacgccgacccaatagccgcaatagccaagaccatgacctaccgcctagtggaagacgacaacgacgaagggcgcgcgtccgacgccatcgccgtggccaggatgctgggcctagatgaaagcctggcccaacgcgccgaagagatgttcagagctaataccaagttgcattcaaagaatgcaacttggtag

SEQ ID NO: 44510 - protein, 162 aa, Unknown
  Obtained from environmental sample
  misc_feature (1)..(162): Xaa is any amino acid
MHQGLSGFGVEMRQLMDAWRCLCASDGGTLLLMDEFARTTSSGEAEAILAAVLEAVARKTGAVALCSTHFHGVPRLPGVRYLRMAGLRKDIGAVGMDGQDADPIAAIAKTMTYRLVEDDNDEGRASDAIAVARMLGLDESLAQRAEEMFRANTKLHSKNATW

SEQ ID NO: 44511 - DNA, 474 bp, Unknown
  Obtained from environmental sample
  misc_feature (1)..(474): n is a, c, g, or t
ttgtccgcaggtagggctttgggtgccgccgaacccatttgtgcaacccacacggggaatggctataatggtctgcggacgcgcttccattggcggaggggggacggcatggccacgacgggcaagctcacgagggtcggtctggccaggtacttggtggacaggctgggatacacaaaaaaggacgcgaccctgcttgtgaacacgtttttcaggagcatgaccgaggcgttgctgtcaggcgagggcgtcgagctgcgcggcttcggcagtttcagggtgcggagcagggcgccgaggacggggcgcaacccaaggaacggccaaccagtccacgtgcccgccaagcaggtggtgtatttcaaaataggcaaggagatgcgggaaaagctggttgcggcgaaagagggcggcgacgggcaagctcccagggaacccgatgcgtcggtagaagacgtatcaccgcccgcttga

SEQ ID NO: 44512 - protein, 157 aa, Unknown
  Obtained from environmental sample
  DOMAIN (43)...(132): Bacterial DNA-binding protein
  misc_feature (1)..(157): Xaa is any amino acid
MSAGRALGAAEPICATHTGNGYNGLRTRFHWRRGDGMATTGKLTRVGLARYLVDRLGYTKKDATLLVNTFFRSMTEALLSGEGVELRGFGSFRVRSRAPRTGRNPRNGQPVHVPAKQVVYFKIGKEMREKLVAAKEGGDGQAPREPDASVEDVSPPA

SEQ ID NO: 44513 - DNA, 858 bp, Unknown
  Obtained from environmental sample
  misc_feature (1)..(858): n is a, c, g, or t
gtgttaagccagcctgcggtttttaaaatatatataagaggagaagtacggaggactgtggaagtaaccgcttgggctttaaatcgtctttcaggtgtcttgggggggcatttaactccattttcatctacacgaaatgtatcaattagatctagtaacggtcaggtacgagtctatgatttatttaaagcggatcgtatgggagatttaagtcagaatccttttgtacgtcctgatgatgttattacggtgaatcgaattgaaaggcaagttactattggcggcgcagtagaacgtccaggtacatatcaattattagcgggagaaaattttaaagaattggtagaaatatatgccagtggctatacgataacagcggataaaactagaattcaattggtacgacgtgtaggcagtaatgagatttctggtgatataatgtacttaacggaacaggatattaccgataattttacattgctacattttgataccataacgatcccatcaataactgatttgcgtcctgcggtacctgttaatcggctcgagaggagaattactatcgagggtgctgtaagaagaccgggaacatatgatttaatgccacatgaaaacctcagagagttgatagaagtatatggtgatggctataccccaatagcagacagttccagaatcgaattagtgcgtcatgtggatagtgctgaagcttcaggtgacaaaatattcttgacagaaaaagatgttactaacaattttatattacaacattttgacactataatgatcccagatattactactctacgtccagttatttttgtggaaggcgcactttggtggtacggaaggtga

SEQ ID NO: 44514 - protein, 285 aa, Unknown
  Obtained from environmental sample
  misc_feature (1)..(285): Xaa is any amino acid
MLSQPAVFKIYIRGEVRRTVEVTAWALNRLSGVLGGHLTPFSSTRNVSIRSSNGQVRVYDLFKADRMGDLSQNPFVRPDDVITVNRIERQVTIGGAVERPGTYQLLAGENFKELVEIYASGYTITADKTRIQLVRRVGSNEISGDIMYLTEQDITDNFTLLHFDTITIPSITDLRPAVPVNRLERRITIEGAVRRPGTYDLMPHENLRELIEVYGDGYTPIADSSRIELVRHVDSAEASGDKIFLTEKDVTNNFILQHFDTIMIPDITTLRPVIFVEGALWWYGR

SEQ ID NO: 44515 - DNA, 924 bp, Unknown
  Obtained from environmental sample
  misc_feature (1)..(924): n is a, c, g, or t
atgttcccattttcttttgatactgctacaaatgcggttttaaaccgcccttctgtcccgtgctggattacctatactaatacaaaaacccatgaaattattaggaataatattcaccgctcgcctttgtatggaggaaaaatcattggagcgggtcctcgttattgtccttcgattgaggataaggttgttcgttttcccgaaagggatcgtcatcatatttttattgaaccagaaagcctcgaaactaatgaaatgtacttaaacggagtttcaacttctttgcccgaagatgtgcaaagggattttgtaaatagtattgctggattggaaaaggcgtttattgtaaagccggggtatgctgtcgaatatgattatatcgatcctttggctctttatcctactttggaatcaaaacgtatttctgggctttttattgcggggcaaactaacgggagttcagggtatgaagaagcaggggcgcaggggcttattgcaggaattaatgctgctatgaagctattaaattctccccctttaattttaggaaggcatgaggggtatataggagttttgatcgatgatcttacaacacttggaacaaaagagccctatcgtatgtttaccagcagggctgaacataggcttgccttgcgtcatgataatgctgatagccgtctcacaccgaaaggtaaggaaatagggcttgtcagcgaaattcgttgggagaggtttagggaaaaagcaaaaggtttggaagctattcaggaacttttaaggaatcgcagagtttctagcataagtgagcacagagaaataggtttaaatgaaaatcttatatctcatattggtgattcttttgaaaaaacaataactgattctactatttctcttgataatgttcttccttttatccctgaataa

SEQ ID NO: 44516 - protein, 307 aa, Unknown
  Obtained from environmental sample
  DOMAIN (1)...(178): Glucose inhibited division protein A
  misc_feature (1)..(307): Xaa is any amino acid
MFPFSFDTATNAVLNRPSVPCWITYTNTKTHEIIRNNIHRSPLYGGKIIGAGPRYCPSIEDKVVRFPERDRHHIFIEPESLETNEMYLNGVSTSLPEDVQRDFVNSIAGLEKAFIVKPGYAVEYDYIDPLALYPTLESKRISGLFIAGQTNGSSGYEEAGAQGLIAGINAAMKLLNSPPLILGRHEGYIGVLIDDLTTLGTKEPYRMFTSRAEHRLALRHDNADSRLTPKGKEIGLVSEIRWERFREKAKGLEAIQELLRNRRVSSISEHREIGLNENLISHIGDSFEKTITDSTISLDNVLPFIPE

SEQ ID NO: 44517 - DNA, 1044 bp, Unknown
  Obtained from environmental sample
  misc_feature (1)..(1044): n is a, c, g, or t
gtggtagtcggcggatatattgccacggcggcaaacgatttcattcagggcataatcatgcttatcgggattgtcgttattatcggcgcggttcttgccagtaacggcgggttaatagaggctttgacaagactcgccaatattgaaggaaaaaatgtaaacaatgtcgccgttcccggcatatttacttcattcttcggtccggatcccttaaacttgttaggcgttataattttaacgtctctcggcacctggggattgccgcagatggtttccaaattttacgccattaaatccgaaaaaatgatagcgaagggcactattgtatcgacgttctttggtcttgttgttgcgggcggatgttatttcctgggcagtttcggccgcttatactccaactcgaatatatataatcccggcggcggcgtagtctttgacgccattatacccgccatgctttcccggtttcctgattttttgataggcgttgttatcgttctggtgttcgccgcgtccataagcacgctctcgtcccttgtcatggcctcggcgtcaactttaacgctggatttcctgaaaggcaatgttattaaaaagatgagcgagaaagtacaactgatgatcatccggatgctgatcgtggtatttataatcatttcttcctgtatagcgacgatccagtacaaagggcaaatttcttttatcgcccagcttatgggcgtttcatggggcgcgctcgccggctccttccttgcccccttcctctacgggctgtattggaagcgcgttacaaaaccggccgtctggtgcaactttgttttcagcactgtccttatgatcctaaacatctttttcagggctaaattcccgtcgctgttacagtcgccgatcaacgccggggcctttaccatgctcgccgggtttatcattgtacccgtcgtgagcataatcaccggaacgccggacaaagcctcggtggataaatgtttctcctgttatgaggaaacagtcagcgttaaggtcagggacgatctgggaaattag

SEQ ID NO: 44518 - protein, 347 aa, Unknown
  Obtained from environmental sample
  DOMAIN (1)...(274): Sodium:solute symporter family
  misc_feature (1)..(347): Xaa is any amino acid
MVVGGYIATAANDFIQGIIMLIGIVVIIGAVLASNGGLIEALTRLANIEGKNVNNVAVPGIFTSFFGPDPLNLLGVIILTSLGTWGLPQMVSKFYAIKSEKMIAKGTIVSTFFGLVVAGGCYFLGSFGRLYSNSNIYNPGGGVVFDAIIPAMLSRFPDFLIGVVIVLVFAASISTLSSLVMASASTLTLDFLKGNVIKKMSEKVQLMIIRMLIVVFIIISSCIATIQYKGQISFIAQLMGVSWGALAGSFLAPFLYGLYWKRVTKPAVWCNFVFSTVLMILNIFFRAKFPSLLQSPINAGAFTMLAGFIIVPVVSIITGTPDKASVDKCFSCYEETVSVKVRDDLGN

SEQ ID NO: 44519 - DNA, 300 bp, Unknown
  Obtained from environmental sample
  misc_feature (1)..(300): n is a, c, g, or t
atgatcagattcggcacgagaatccaaagcacggcggaactactggaagcaatggaagatgtatcatcgggaaaattcagttttcctcccgatatgttacaacgccacgcattaacatctgacaaactgcaaggcttgaacaaacgtgaacacacaatattttttttgatacaacaaggcaaaaccaataaagaaatagccgccgaaatgggcgtaacactgcgcacaatcgaaaacaatttaagcatactctacgataagacaggcgtaaaagaccgtcaggaactagaaaaactctaa

SEQ ID NO: 44520 - protein, 99 aa, Unknown
  Obtained from environmental sample
  DOMAIN (43)...(99): Bacterial regulatory proteins, luxR family
  misc_feature (1)..(99): Xaa is any amino acid
MIRFGTRIQSTAELLEAMEDVSSGKFSFPPDMLQRHALTSDKLQGLNKREHTIFFLIQQGKTNKEIAAEMGVTLRTIENNLSILYDKTGVKDRQELEKL

SEQ ID NO: 44521 - DNA, 486 bp, Unknown
  Obtained from environmental sample
  misc_feature (1)..(486): n is a, c, g, or t
gtgatgtttatggacaatacatcagcaaccaaaatcgcgaacttcgaatacttcgatgaggagtttcccacggaaaaagcagccttggagtattgggagaagataaagtggaacgggcaccccgtatgccccaaatgcagctcactcaaggtcagcaagtggcgggacgaccgaccaggatggtaccgttgcaagaagtgccgcaaggaattcaccgcgaggcatgataccatctttgcctgcaccaaaatacccctgcgcacctggttcaaagcttggtacaatatggtgcagcacggcgggatcagcatgaggctagccgaggacattggagtcgtgcaggaaacggcgtggttcatgacccacaggattcgcgaagcgatgcgaacccataaggaaaacatgatgctcggggggcctggcatcatagtggagattgacgagacgtacccgggcgggcttggaaagattcaagcattgcgataa

SEQ ID NO: 44522 - protein, 161 aa, Unknown
  Obtained from environmental sample
  misc_feature (1)..(161): Xaa is any amino acid
MMFMDNTSATKIANFEYFDEEFPTEKAALEYWEKIKWNGHPVCPKCSSLKVSKWRDDRPGWYRCKKCRKEFTARHDTIFACTKIPLRTWFKAWYNMVQHGGISMRLAEDIGVVQETAWFMTHRIREAMRTHKENMMLGGPGIIVEIDETYPGGLGKIQALR

SEQ ID NO: 44523 - DNA, 663 bp, Unknown
  Obtained from environmental sample
  misc_feature (1)..(663): n is a, c, g, or t
ttgacgagacgtacccgggcgggcttggaaagattcaagcattgcgataagaggctgttccctggcggcggtcccggcggcaagaaaggtggtgtgagcctagtggagagaggcgacaatggcaggaggataacaataaagctaccagtcaaatgggtgaagaacaaaaaaggaaagaaaataaagactccttaccttagcaagaaaatggcgcgagatatagcgctgcggtatatcaagcctggcaccgtagtcgtaaccgataccgccgaagtatatgatatattgaaggggctgggatattcgcatttcaccgtgaaccacaaaaggcatcagtatgccaagaaggagaatagccctttaatcaagaaatcctatacgaacactgttgaaagctcccacaagggagtgaaaacaaggcaccgtaactatgtgcactacagcagaaaacacgagcagagatattatgacgagacagatttcaagtggaatcaatgcaggaaactcaaggagaaggatggctccctcgttttcgccaagcgcaggtcgccaacggtaaaggcgttcaatgatttcttgagggggtgtctgggaaaaactttgtcgtacaagcagcttacggggaagtacaggaattccaagaaacgcaggaaagctagatag

SEQ ID NO: 44524 - protein, 220 aa, Unknown
  Obtained from environmental sample
  misc_feature (1)..(220): Xaa is any amino acid
MTRRTRAGLERFKHCDKRLFPGGGPGGKKGGVSLVERGDNGRRITIKLPVKWVKNKKGKKIKTPYLSKKMARDIALRYIKPGTVVVTDTAEVYDILKGLGYSHFTVNHKRHQYAKKENSPLIKKSYTNTVESSHKGVKTRHRNYVHYSRKHEQRYYDETDFKWNQCRKLKEKDGSLVFAKRRSPTVKAFNDFLRGCLGKTLSYKQLTGKYRNSKKRRKAR

SEQ ID NO: 44525 - DNA, 420 bp, Unknown
  Obtained from environmental sample
  misc_feature (1)..(420): n is a, c, g, or t
gtggagcgcggcatgaacgcctcgttccagtccggcattgtccttggatacccctgcattgacataggcgttacagtaacaggcgttgagtattccgagcttacaggaaccgagtttgcctttgaagcgtgtgcttcgctgggttttgacgaagcctgcaaaaacgcctctcccattcttcttgagccgattatggctgtgaacatggtatcgcccaaggaatccgtgggagacgcaatcagcctgatgacccaacgcggggggcaggtgttgagcatggattccaagcctggcggggacgaagtaaaggccctggccccgatggcaaagatgttcggctttatgacagccctccgcagtgtaagccagggacgtgcggtttttacaatggaattttcgcatttcgagaaaaaagcctaa

SEQ ID NO: 44526 - protein, 139 aa, Unknown
  Obtained from environmental sample
  DOMAIN (59)...(139): Elongation factor G C-terminus
  misc_feature (1)..(139): Xaa is any amino acid
MERGMNASFQSGIVLGYPCIDIGVTVTGVEYSELTGTEFAFEACASLGFDEACKNASPILLEPIMAVNMVSPKESVGDAISLMTQRGGQVLSMDSKPGGDEVKALAPMAKMFGFMTALRSVSQGRAVFTMEFSHFEKKA

SEQ ID NO: 44527 - DNA, 1290 bp, Unknown
  Obtained from environmental sample
  misc_feature (1)..(1290): n is a, c, g, or t
ttgacgctcctggatggacgcttcttgcatggagagggaatttgcgtaaaactctcttttcatatccagtggggctatgcggcctataacgcaaaccccgctttctacggggaggccgtgcagggtgtttttataaaggttaaaaggatgaatagccaagaaagaaagaaagcccgttttgaaagacggataaaaaagagggaagcaaaaagacaagagaaagtctctctttatgacaattttgaaaatgtcgccgacccggataatatatatttggctttcaagaaatcccgctgtgaggtttcgtggaaggagtcaattcaacgctatgagatgaatttgcttaaaaatattaccgaaacaagccgtagattattagccggggaggatattacgcgcggatttgtagaatttgacatttttgagcgtggacggccacggcatatcaagagcgtgcatatatacgagcgttcagcacaaaaaagcttttgcgattatgcgctggttccgatgatctcccgttcattgatatatgacaatggggcaagccttaaaaataaagggctgcattttgccataaaccggctgatagcccacataggaaaattctaccggacaaacggatattccaatgatgggtactgcctgttaatagatttttcaaaatattttgataatatccggcacgatatattattcaaacaatacgacagtgtatttagcgataagcggatagtaaaactgctccgtgattttattactcccttcggtgataataagtccctgggcttaggcagccaggtatcccaaatatcagctatcttctacccaaataaaatggatcattacataaaagaagtattgcgaattaaatactacgggcgttatatggacgacctgtatttaattcacaaggataaaaaataccttgaatattgcctaatggatataaaaaaaatatgcaccagcttaggaataacggtaaatctaaaaaaatcaaaaataataaaattaaaagacggcattaaatttttgaagggtatatatgcccttacggacacgggccgcattatacgccgggccgatccaagctcacgaaagcgaatgaggcgaaagcttgtaaaatttaaaacgctatatgaagcgggtaaaatgtcccagagcgatgtttatactgcctaccagtcatggcggggcaactaccttaaacggtttgatgctttccatacggtacgcagaatggacgggctttataatgggcttttcatatttgacaggagggtacaataa

SEQ ID NO: 44528 - protein, 429 aa, Unknown
  Obtained from environmental sample
  DOMAIN (145)...(358): Reverse transcriptase (RNA-dependent DNA polymerase)
  misc_feature (1)..(429): Xaa is any amino acid
MTLLDGRFLHGEGICVKLSFHIQWGYAAYNANPAFYGEAVQGVFIKVKRMNSQERKKARFERRIKKREAKRQEKVSLYDNFENVADPDNIYLAFKKSRCEVSWKESIQRYEMNLLKNITETSRRLLAGEDITRGFVEFDIFERGRPRHIKSVHIYERSAQKSFCDYALVPMISRSLIYDNGASLKNKGLHFAINRLIAHIGKFYRTNGYSNDGYCLLIDFSKYFDNIRHDILFKQYDSVFSDKRIVKLLRDFITPFGDNKSLGLGSQVSQISAIFYPNKMDHYIKEVLRIKYYGRYMDDLYLIHKDKKYLEYCLMDIKKICTSLGITVNLKKSKIIKLKDGIKFLKGIYALTDTGRIIRRADPSSRKRMRRKLVKFKTLYEAGKMSQSDVYTAYQSWRGNYLKRFDAFHTVRRMDGLYNGLFIFDRRVQ

SEQ ID NO: 44529 - DNA, 861 bp, Unknown
  Obtained from environmental sample
  misc_feature (1)..(861): n is a, c, g, or t
atggccgagaacatcgatttaatgaaaaatgttgcgggcctttcttccgctgaaatgggcgatgtttttgacgaatggaacaagggcagtctgggcagttaccttatcgaaataaccagagacatactccgttataaagatactgatggacagccattagttgaaaaaattcttgatactgccggacaaaaaggcacgggtaaatggaccggcattgccgcgctggatttgggagtaccgttgacccttatcggcgaggcggtttttggccgctgtctttccgccgccaaagcggagcgggtacaggccgcgcggattttttcagggcccaaagccgcgcccccggcggacaaggctggttttatcaaagatttggaaaaggcgctgtacgccgccaaagtggtttcctacgcgcagggttatctgttaatgcgggaagcggcgcaggagtataagtggaatctgaattacggcggcatcgcgctgatgtggcgcggcggttgtattatccgctcggtgttcctgggcaaaataaaagaagcgtttgacaaaaagccggatttggaaaatctgctgcttgatcctttctttaccggaataattgaagacgcgcaggcttcatggcggcgggttgtttcggcggcggtgcaaaatggaatcgcggttccggcattgtccagcgccctcgcctactttgacggctaccgcagcgagcggcttccggcgaatcttttgcaggcgcagcgggattatttcggcgcgcatacctacgagcgcattgatcagccccgcggtaaatttttccataccaactggaccggccatggcggtactaccagcgcgtcaacctatacggtgtag

SEQ ID NO: 44530 - protein, 286 aa, Unknown
  Obtained from environmental sample
  DOMAIN (2)...(273): 6-phosphogluconate dehydrogenase, C-terminal domain
  misc_feature (1)..(286): Xaa is any amino acid
MAENIDLMKNVAGLSSAEMGDVFDEWNKGSLGSYLIEITRDILRYKDTDGQPLVEKILDTAGQKGTGKWTGIAALDLGVPLTLIGEAVFGRCLSAAKAERVQAARIFSGPKAAPPADKAGFIKDLEKALYAAKVVSYAQGYLLMREAAQEYKWNLNYGGIALMWRGGCIIRSVFLGKIKEAFDKKPDLENLLLDPFFTGIIEDAQASWRRVVSAAVQNGIAVPALSSALAYFDGYRSERLPANLLQAQRDYFGAHTYERIDQPRGKFFHTNWTGHGGTTSASTYTV

SEQ ID NO: 44531 - DNA, 315 bp, Unknown
  Obtained from environmental sample
  misc_feature (1)..(315): n is a, c, g, or t
ttgccggggccgataaccgcaagctccgccgcgcggaaaacatcggcaatgcccattgcaaggggcagttccgggccaaccacggtaaggtcgattttttcccgcaggacgaattgtttaagcgcttcctgcccttcaacagtggcagggtctcccggcgaaacatttttacatttggcttcgatattggtcccgctgtttcccgatgcgatgaacacctgttccacctggggggattgggcaaatttccaggcaagggcgtgttcgcggcctcccgaaccaattatgagaattttcatgttctacaccgtatag

SEQ ID NO: 44532 - protein, 104 aa, Unknown
  Obtained from environmental sample
  misc_feature (1)..(104): Xaa is any amino acid
MPGPITASSAARKTSAMPIARGSSGPTTVRSIFSRRTNCLSASCPSTVAGSPGETFLHLASILVPLFPDAMNTCSTWGDWANFQARACSRPPEPIMRIFMFYTV

SEQ ID NO: 44533 - DNA, 1353 bp, Unknown
  Obtained from environmental sample
  misc_feature (1)..(1353): n is a, c, g, or t
atgaaaattctcataattggttcgggaggccgcgaacacgcccttgcctggaaatttgcccaatccccccaggtggaacaggtgttcatcgcatcgggaaacagcgggaccaatatcgaagccaaatgtaaaaatgtttcgccgggagaccctgccactgttgaagggcaggaagcgcttaaacaattcgtcctgcgggaaaaaatcgaccttaccgtggttggcccggaactgccccttgcaatgggcattgccgatgttttccgcgcggcggagcttgcggttatcggccccggcaaacaggcggcgcagcttgaagccagtaaaatttattccaaagcgttcatggcaaagtacggagtccgcgccgcaaagggcagcaattttaccaatcttgaagcagcccgaacttttgcggctgaacattttaacgccaacggcatggccgccggcatggccgccgccgccccgctggtgataaaagccgacggtcttgccgccgggaaaggcgttgtcattgcggaaaatttagccgatgccaaagcggcgcttgtttcttttatgcagaataagagcctcggcgctgccgggaattcggtattgttggaggagtttcttaaagggaaagaagtctcggtgctggcggcggtcagtgttaccgggggtaaaggctacattgcgccctttatttccgcgcgggatcataagcggcggtttgaaggcgggcaggggccgaataccgggggcatgggcgccattgcgccagtgcccgattttacggcggttgcgcgtaacgattttgaaaaggtaattctcgcccctaccttaaagggtatggaagaagaaaaaatggactaccgtggctttatcttttttggccttatggtgcgggaagagcgctgttaccttttggaatacaacgctcgcctgggagacccggaaacgcaggcggtgcttcccctaatggattcggatctcgcgggactctgcgcggcgattctggacggaacgcttcaggacttcccgctcaaatggaaaaagggcgctgtctgcgcgcctgtggccgttgccgagggctatccgggcccttaccgaaaaggagatccgatagcgacaaaccccgaagaactcgaaaaaaccggcgcaaagctgtttgtagccggcgcaagccgcggggcaggcggcccccttggttccgggctgcggacagcaggcggccgggtgctttcggtatccgccctgggaggcgacgcggacgacgcttttgcaaaggcctaccaggcgctccgttatgtcagttttgagggcatgggttaccgcgctgacataggccgggaacacggacaatcatga

SEQ ID NO: 44534 - protein, 450 aa, Unknown
  Obtained from environmental sample
  DOMAIN (349)...(447): Phosphoribosylglycinamide synthetase, C domain
  misc_feature (1)..(450): Xaa is any amino acid
MKILIIGSGGREHALAWKFAQSPQVEQVFIASGNSGTNIEAKCKNVSPGDPATVEGQEALKQFVLREKIDLTVVGPELPLAMGIADVFRAAELAVIGPGKQAAQLEASKIYSKAFMAKYGVRAAKGSNFTNLEAARTFAAEHFNANGMAAGMAAAAPLVIKADGLAAGKGVVIAENLADAKAALVSFMQNKSLGAAGNSVLLEEFLKGKEVSVLAAVSVTGGKGYIAPFISARDHKRRFEGGQGPNTGGMGAIAPVPDFTAVARNDFEKVILAPTLKGMEEEKMDYRGFIFFGLMVREERCYLLEYNARLGDPETQAVLPLMDSDLAGLCAAILDGTLQDFPLKWKKGAVCAPVAVAEGYPGPYRKGDPIATNPEELEKTGAKLFVAGASRGAGGPLGSGLRTAGGRVLSVSALGGDADDAFAKAYQALRYVSFEGMGYRADIGREHGQS

SEQ ID NO: 44535 - DNA, 525 bp, Unknown
  Obtained from environmental sample
  misc_feature (1)..(525): n is a, c, g, or t
gtgctttccaatcctgatttcacaagcgcagtggcaatggcaagcgcaataaacggggttttcccaaataccgcaatagcagaagatgcttccaccgtattggtgaaagtgccagacgccatgcgaaacgactatatgtcttttatagctcgcgcagaagttgccgagttcaacccaaatacaaattcccgcattgtgcttaacggaaaaacaggaacaattgtgagcggggcaagcgttcaaatagacgaagttgccgtttctcacgggagcatcaccattcaggttgccaatgcgcaaacagcaacaaccccaactttcatagggcaggcaactgcgataaacaatcagcaattaaatgtgcaagaaccacgcacggaaacacgagttttgccagcagtctcaaatgcaggtcagttagcgcaagccctgaacagccttggagttgcaccgcttgatataatctcaattttccaagcgattaagaaagctggagcattgcacgcggaattggtggttatgtaa

SEQ ID NO: 44536 - protein, 174 aa, Unknown
  Obtained from environmental sample
  SIGNAL (1)...(27)
  DOMAIN (1)...(174): Flagellar P-ring protein
  misc_feature (1)..(174): Xaa is any amino acid
MLSNPDFTSAVAMASAINGVFPNTAIAEDASTVLVKVPDAMRNDYMSFIARAEVAEFNPNTNSRIVLNGKTGTIVSGASVQIDEVAVSHGSITIQVANAQTATTPTFIGQATAINNQQLNVQEPRTETRVLPAVSNAGQLAQALNSLGVAPLDIISIFQAIKKAGALHAELVVM

SEQ ID NO: 44537 - DNA, 741 bp, Unknown
  Obtained from environmental sample
  misc_feature (1)..(741): n is a, c, g, or t
ttggaaaacataccnccggacagtacggcaactaacatacaagacacactagaggaaaaagaaccggcgggaggaagactttcgccggaggaaaggcagcgtgccgaacttgaaattaagtcctcaaccatgccggagcttgcggtatggtgccgcttactgggactttccgaaagcggtacaaaagaggaacttgccaaacgaatcagggatcattttggaatgccggaaccgaagaataacaatgaaaaccggaaaataataaatattgaatccgcccaatctaccgaatattttacggttgacgttatagacgaagattacgcgagacttaaaggcgacgtgcgccttgttctgcatgataaagaggacatacataaaataaaagctgacgaagtcctttttaaccgtaccagaaatatcattaccgccaaaggaaaagttgaatatataaaagaaaaaggggacacgaccgaaatttttcgaggagaaaatataaccgttaatattgacgattgggacagtgtttttcttgacggcgattcggaaaaaaccctttcaagcgaaaataccgcataccgttttgagggaaccgtaatctcacgcagttatgacgacgtaatgattcttaataacgccagaataagcaacgcaaacaatgatgaggctctttggtcaataagcgcgacaaaactttggcttctgcccggttccgatttcgcgatatttaatatgtgttaa

SEQ ID NO: 44538 - protein, 246 aa, Unknown
  Obtained from environmental sample
  misc_feature (1)..(246): Xaa is any amino acid
MENIPPDSTATNIQDTLEEKEPAGGRLSPEERQRAELEIKSSTMPELAVWCRLLGLSESGTKEELAKRIRDHFGMPEPKNNNENRKIINIESAQSTEYFTVDVIDEDYARLKGDVRLVLHDKEDIHKIKADEVLFNRTRNIITAKGKVEYIKEKGDTTEIFRGENITVNIDDWDSVFLDGDSEKTLSSENTAYRFEGTVISRSYDDVMILNNARISNANNDEALWSISATKLWLLPGSDFAIFNMC

SEQ ID NO: 44539 - DNA, 636 bp, Unknown
  Obtained from environmental sample
  misc_feature (1)..(636): n is a, c, g, or t
ttgattaccgaccttggaaccgcggacttttccgcaaggctgatgcgggcccttgccgagattttcgcgccccgccagagcattcacggggtacttgtggaagttttcggtttgggaatactgattctaggggattcgggggtcgggaagagcgagaccgccctggatctgatccacaggggccacaggctggtagccgacgacgtggttaacattcattgcgtgaacggcaatatgctgatgggaacaggggcgaataaaatcataggccaccacatggaaatccggggcctggggataataaacatcacccatatgttcggggtgcgggcgatccgcgacagaaaagaaatacaactggttgtaaatctggatacatgggattccagaaaggcatatgaccggctgggaacggacgagcaggtaatggaatttctgggcgtcagcatccccaagctggagataccggtaaagcccggacggaatattcccatcattatcgagacggccgcgatgaacgagcggcttaaatcaatggggtacaacgccgccagggaattcaacaagaatatcctcaagtggatagaaagcgatacgtcacgctcggtttttttcgggcatgatgatattatataa

SEQ ID NO: 44540 - protein, 211 aa, Unknown
  Obtained from environmental sample
  DOMAIN (20)...(201): HPr Serine kinase C-terminus
  misc_feature (1)..(211): Xaa is any amino acid
MITDLGTADFSARLMRALAEIFAPRQSIHGVLVEVFGLGILILGDSGVGKSETALDLIHRGHRLVADDVVNIHCVNGNMLMGTGANKIIGHHMEIRGLGIINITHMFGVRAIRDRKEIQLVVNLDTWDSRKAYDRLGTDEQVMEFLGVSIPKLEIPVKPGRNIPIIIETAAMNERLKSMGYNAAREFNKNILKWIESDTSRSVFFGHDDII

SEQ ID NO: 44541 - DNA, 582 bp, Unknown
  Obtained from environmental sample
  misc_feature (1)..(582): n is a, c, g, or t
gtggccgaagtgaacacagaaaagaaagttctggtaaccggggcaagcaggggcataggccgggccattgccctggccgtatccgacgccgggtatcagctaacggcacattatcataaggggaaggaagccgccgaatccctgcggcaagagattcttcaaaaaggcggaagcgttgaattgattcagtttgatgtaagtaaccgggaagaatgtcaggaaaaacttgagcaatggtcagaaaaaaacggggccttttggggaattatctgcaacgcgggaatatccgccgatgattcctttcccggcatgagcggggaatactgggacaacgttcttcgcaccgatcttgacagtttttataacgtgcttcatcccctcataatgccggtctgccgtanaaaacagggacgtatcattaccatttcttcggtatcgggtatcacgggaaaccgggggcaggtaaattacagcgccgccaaagcgggcattatcggggcgaccaagctctggcaactgaacttgcccagcgttcccatacggtcaactgtatcgcgccgggaattattgaaacggaaatga

SEQ ID NO: 44542 - protein, 193 aa, Unknown
  Obtained from environmental sample
  DOMAIN (8)...(176): short chain dehydrogenase
  misc_feature (1)..(193): Xaa is any amino acid
MAEVNTEKKVLVTGASRGIGRAIALAVSDAGYQLTAHYHKGKEAAESLRQEILQKGGSVELIQFDVSNREECQEKLEQWSEKNGAFWGIICNAGISADDSFPGMSGEYWDNVLRTDLDSFYNVLHPLIMPVCRXKQGRIITISSVSGITGNRGQVNYSAAKAGIIGATKLWQLNLPSVPIRSTVSRRELLKRK

SEQ ID NO: 44543 - DNA, 1221 bp, Unknown
  Obtained from environmental sample
  misc_feature (1)..(1221): n is a, c, g, or t
atgaagcgggtagttattaccggcggttcgatagtcagcgcgttgggctgcgaatggccggatatattggcgaaactcaaagcgggaaaaaactgcgtccgccgtatggatgactgggacaaatatgaacgcatgaataccaggcttgccgctccggttgatcttaccctccccgattatccccgcaaaaaaacccggggattgggcagggtcgccatgcttgccctggtttccgcggacagagctctggcgcacgccggcataaacgcggacgacccggaactgaaaaacggccgttgcggagttgcttacggctcatcaatgggcagcgttgattcgctgatggatttttacagtatgcttgttctggacgatctttccaaaatgagcgccactacttatatcaaggcaatgccccaaacctgcgccgcaaatatcggcgtacttttcggtttgaccggaagaataattaccactaacacggcctgtacgtcaagcagtcaggccattggttttgcctatgagacaataaagcagggcattcaggacattatgctggcgggcggcgctgaagaattaagccccgcggacgcggcggtctttgacaccttgtttgccgcaagttccaaaaacgacacccctgataaaactcccgccgcttatgataaaaaccgcgatggtcttgttatcggagaaggatcgggaacatttattctggaagaatatgaacacgcggtaaaacgcggggcaaagataatcgccgaaattgccggctttggaacaaatacagacggcactcacattactcagccgaaccgcagtaccatgggcattgccatgaaacttgctttggaagacgcgaaactggaccccgcctccatcgcttatgtgaatactcacggaaccgccaccgacgccggtgatgtggccgaaagctgggctaccgcggatgtctttcaaagaccgattccggcaagcaccttaaagagctacataggccacacattgggagcctgcggcgttattgaagcgtggattgccattaacatgatgaaggaaaaatggttctgtcccaaccttaaccttgaagaacttgacccgcgctgcggaccgcttgattatattaccgggaacggacgggagattgacggagaatacataatgtccaataatttcgcttttggtggaatgaatacatcgcttatcttcaggaaagcatga

SEQ ID NO: 44544 - protein, 406 aa, Unknown
  Obtained from environmental sample
  SIGNAL (1)...(16)
  DOMAIN (2)...(245): Beta-ketoacyl synthase, N-terminal domain
  misc_feature (1)..(406): Xaa is any amino acid
MKRVVITGGSIVSALGCEWPDILAKLKAGKNCVRRMDDWDKYERMNTRLAAPVDLTLPDYPRKKTRGLGRVAMLALVSADRALAHAGINADDPELKNGRCGVAYGSSMGSVDSLMDFYSMLVLDDLSKMSATTYIKAMPQTCAANIGVLFGLTGRIITTNTACTSSSQAIGFAYETIKQGIQDIMLAGGAEELSPADAAVFDTLFAASSKNDTPDKTPAAYDKNRDGLVIGEGSGTFILEEYEHAVKRGAKIIAEIAGFGTNTDGTHITQPNRSTMGIAMKLALEDAKLDPASIAYVNTHGTATDAGDVAESWATADVFQRPIPASTLKSYIGHTLGACGVIEAWIAINMMKEKWFCPNLNLEELDPRCGPLDYITGNGREIDGEYIMSNNFAFGGMNTSLIFRKA

SEQ ID NO: 44545 - DNA, 1713 bp, Unknown
  Obtained from environmental sample
  misc_feature (1)..(1713): n is a, c, g, or t
atggcgcgaaaaaaacaagccgaacagaagacagccaaagaacgcaaccgctacgatgtcgatgaatacctggacgagaaagtcagcctttttaacgtgaggcgctgcctggggtatatagcgaaagcccaggggcatttgaaactgtgcctgctgttgagcgtcgttgaaaatatagtaggtctctcggggccgctttttgtagagcacgcgctggacgtggcggttcccaataaagacatccgcctgctgcttttgatggcggccggccttggcgcgtccatcgtcatcagcatcggcctgggaacgatacgcagcgttttgattgcccgcgccggcgccggcataatccacgacatacgctacgatttgttttcccacctgcaaaggctcgcctttagcttttacgactcgaggcctcacgggaaaatttttgtgcgggtggtgccgtatgtgaacaacgtttccgacgcgctttccaacggaatcatcaactttgttattgaagttctaaatattgttttcatcatcttttttatgttcaaggtaagccaccagctggcattggttaccattttcgggctgccccccctgatcctttttatgtttaccattaagcctgaacagcgccgcgcctggcagcgggtttccaacaagaactccaaccttaacgcctatattcaggaatccatcgacggggttaacgttacccaggcttttgaccggcagaaaaaaaacatagacataatgaaccagcttaccggcgagcggaactttgaatggatgaaagcaatctacatctccaatacagtgtggttttcggttgagaccatctcgcagnctgttttttgttttttgtatattacaggcgcttactggatgaaccctatggccagtttcggaatgctgcttgttatgggaaactacgcgtggcgtttctggcagcctataattaaccttgccaacatttacaacacgtttataaccgcgatggcatatcttgacagaatcttcgacacgatagcggaacccataacaattaaggacattcccaacgcggtggaatttccttttgttcgcgggcatgtcgagttcaggaacgtaagtttcagctatgacggagtccgtaaagttctgaacaatgtctgttttaacgggcatcccggacaaagcatcgcgattgtagggcctacgggagcggggaaaacaacaatcgtgaaccttctttcgcgtttttacaacattgaggaaggacaggtattaattgacggtcaggacataatgaaggttacgcttcactccttaagaagccagatgggaataatgcttcaggacagttttttattcacgggaacgatagccgacaacatccgttacgggaaacttgacgccaccgacgaagaaatccgcgccgccgcaagtttaataggcgcaaaccacttcatagaaaaactgcccgacagctacaatacccgcataacggagcgcggaagcggcatttccgccggcgaaaggcagcttttagcctttacccgcacccttatttccaacccgcgaattcttattcttgacgaagcgacaagcagtatagacaccggcacggaacagcttgtccagcagggaatccagacattaatgaagggccgcacctcattcatcatagccccacaggctttccacaatacgcaactgcaccccaaatatgtttcgtaa

SEQ ID NO: 44546 - protein, 570 aa, Unknown
  Obtained from environmental sample
  DOMAIN (47)...(313): ABC transporter transmembrane region
  misc_feature (1)..(570): Xaa is any amino acid
MARKKQAEQKTAKERNRYDVDEYLDEKVSLFNVRRCLGYIAKAQGHLKLCLLLSVVENIVGLSGPLFVEHALDVAVPNKDIRLLLLMAAGLGASIVISIGLGTIRSVLIARAGAGIIHDIRYDLFSHLQRLAFSFYDSRPHGKIFVRVVPYVNNVSDALSNGIINFVIEVLNIVFIIFFMFKVSHQLALVTIFGLPPLILFMFTIKPEQRRAWQRVSNKNSNLNAYIQESIDGVNVTQAFDRQKKNIDIMNQLTGERNFEWMKAIYISNTVWFSVETISQXVFCFLYITGAYWMNPMASFGMLLVMGNYAWRFWQPIINLANIYNTFITAMAYLDRIFDTIAEPITIKDIPNAVEFPFVRGHVEFRNVSFSYDGVRKVLNNVCFNGHPGQSIAIVGPTGAGKTTIVNLLSRFYNIEEGQVLIDGQDIMKVTLHSLRSQMGIMLQDSFLFTGTIADNIRYGKLDATDEEIRAAASLIGANHFIEKLPDSYNTRITERGSGISAGERQLLAFTRTLISNPRILILDEATSSIDTGTEQLVQQGIQTLMKGRTSFIIAPQAFHNTQLHPKYVS

SEQ ID NO: 44547 - DNA, 495 bp, Unknown
  Obtained from environmental sample
  misc_feature (1)..(495): n is a, c, g, or t
atgcgcggctcagaactcattctggtctacaacaagataggcgccgaggtggacgccgccccgattacggacctgatcatcaactccggcctaggagtagccctcccctactgccgcaaagacggggaactgggcatcggtcgggtactcaacccacgcgacgacctcgtggagggcgcgcacggcgccatggaaccggcggacagattcaaggacaacatcaacccctcccaactctccgctatcgtctgccccggcatcgccttcgacaaagaacttaccaggctaggccgcggcgccggatactatgaccgcttcctaaaaaaactcaccggaaaagccctaatcgtaggttgcgccttcgactgccagatatccgaagaaccgttgccgcgtgaatcccacgacgtcccaatggacgcggtaatcaccgaaacgctggcattcccaatcgggtgctgcccggcgataaaaccgccggaggaggagggttga

SEQ ID NO: 44548 - protein, 164 aa, Unknown
  Obtained from environmental sample
  DOMAIN (1)...(145): 5-formyltetrahydrofolate cyclo-ligase family
  misc_feature (1)..(164): Xaa is any amino acid
MRGSELILVYNKIGAEVDAAPITDLIINSGLGVALPYCRKDGELGIGRVLNPRDDLVEGAHGAMEPADRFKDNINPSQLSAIVCPGIAFDKELTRLGRGAGYYDRFLKKLTGKALIVGCAFDCQISEEPLPRESHDVPMDAVITETLAFPIGCCPAIKPPEEEG

SEQ ID NO: 44549 - DNA, 876 bp, Unknown
  Obtained from environmental sample
  misc_feature (1)..(876): n is a, c, g, or t
ttgcagatgatgctggcctacgcggcagtggccaacggcggcgtcctgctcacgccggttatctgcgagcggatagagaagaagaacgggacgactgcggaatccgcgacggtgaggccggtacgcagggtggtttccgaagagacggcgagaaggctgcgtaagatgatgcaaggcgtggtggaaaccggcaccggcaaacaggccgtcgtccccggaattcccgtcggcggtaagacgggtacgagccgcaagtcggagggcggcggctacacgagacagaggcactggtcgtcgttcatcggctttctgccggttgacgagcccacgttgctatgcggagttgtgatagacgaaccggccggcggaacgggcggcggcgcagcggcggcccccgcgttcagaaaaataatgtcgctggcgctggcgcatccggaattggagttcagcgacaaaatacttaaaccgaccgccacccaggattcgcagagcctgaaaataaaattgccggatttctcaggacgcaagacggctacggccacggcgcagttggacagcatgaagataacttttcgagtagtaggcgacggcaaagtagtccgccaccaaacgccggccgccggctcctttgccggagataggataggggaggtagtgttgtttacggacgagacccagcccgtaagcgacggcgcggtcagggtaatgccggacggcataggaaaagagctgcgcgacgcgttcaatatattcaacgcgaaaggaatcccgatttacgcggttggaagcggcaaagtgctcaaacagagtattgcgccgggagagataatgaacaaagcggtggtctgtacgctttattgcgaaaggaagaagtag

SEQ ID NO: 44550 - protein, 291 aa, Unknown
  Obtained from environmental sample
  DOMAIN (167)...(224): PASTA domain
  misc_feature (1)..(291): Xaa is any amino acid
MQMMLAYAAVANGGVLLTPVICERIEKKNGTTAESATVRPVRRVVSEETARRLRKMMQGVVETGTGKQAVVPGIPVGGKTGTSRKSEGGGYTRQRHWSSFIGFLPVDEPTLLCGVVIDEPAGGTGGGAAAAPAFRKIMSLALAHPELEFSDKILKPTATQDSQSLKIKLPDFSGRKTATATAQLDSMKITFRVVGDGKVVRHQTPAAGSFAGDRIGEVVLFTDETQPVSDGAVRVMPDGIGKELRDAFNIFNAKGIPIYAVGSGKVLKQSIAPGEIMNKAVVCTLYCERKK

SEQ ID NO: 44551 - DNA, 1458 bp, Unknown
  Obtained from environmental sample
  misc_feature (1)..(1458): n is a, c, g, or t
atgattgcgttaaaaaaacttttggacgagaagaaaataaacctttcctcctttccgcaggtggaatataccggagacagcgcggaacgcgccgctgggtttcccataccggggggacttttggataccgccgagcgttttgaaccgggcatcaggcggaataccgaaaagattgaaggggtttataacatctatccttatttgaaagaaatctccgcaatattgaacaccgatgatgaattacccctgttaatagactgccttaattgcgaaaaaggctgcattggcggacccggcacagggaacgccgaaaaaccactggctgatcttaaagcccctgtacgaaaacgcatggctaaactggaaaaagatcataatcccaaaaaagaaaaaaacgcatacaaaaaatatcacgatgttttaaaaaagtattggaaaaacggcctgtataaccgaagctatcgtaatctttcaggaaataatacaatcaaacagccgggcgaaactgaaataactgaaattttccgcagtatgaaaaaattcggaaaagaagatatatacaactgtacctgctgcggttacggaagctgtaaagcgatggcgacggcaatttacaataaactgaacaaacctgaaaattgcgcccattatatactcaccctgctcacggaaaaaactaataccgaagaacttaaccgccagcttgaggaacacattgaccaggcgtcagagcttattgagggaataaataaattaataaacaaactgaatgccgctatcggtacacaagcggagacaatcgcccaatcttcggattcaaccgaaaaaatgatcaactcgctcagggaaacttcggaaatttcccgaagcaaacaggaggcgataaaagggttgatagaaaacaccgctaaaagtgaagaatccatgcgggaaaccattcaatcaattgagggtatttccaaatcggtggaaggcatagcgcaggcgattaaaataatcagttcaatagcggctaacaccaatttattgtccatgaacgcggcgatagaatccgctcacgctggcgaggcgggcaggggctttagcgtggttgccggcgagatacgccgcctttctgaaactaccagggaaaattcagtgaacatttccagaacgctgaaaagcattattgacggagtggccgttactgaaaaacaatcggacgacaccggaacgcgtattagcaaaatgtcaaaggaaatcaacagttttgccgaaactatatccggtttaatcaatacattcggagagctttcggcgcanagcggcgagattacctccgctctggataaccttcaaagtcaaagcgaaatggtaaaaaccgactatgccgagatactgtccatgacggacaagctgcgcgcggcaatgcttaatttgactatgctgtcgaaaaaaaacgcatcgcctggcgcctga

SEQ ID NO: 44552 - protein, 485 aa, Unknown
  Obtained from environmental sample
  DOMAIN (240)...(476): Methyl-accepting chemotaxis protein (MCP) signaling domain
  misc_feature (1)..(485): Xaa is any amino acid
MIALKKLLDEKKINLSSFPQVEYTGDSAERAAGFPIPGGLLDTAERFEPGIRRNTEKIEGVYNIYPYLKEISAILNTDDELPLLIDCLNCEKGCIGGPGTGNAEKPLADLKAPVRKRMAKLEKDHNPKKEKNAYKKYHDVLKKYWKNGLYNRSYRNLSGNNTIKQPGETEITEIFRSMKKFGKEDIYNCTCCGYGSCKAMATAIYNKLNKPENCAHYILTLLTEKTNTEELNRQLEEHIDQASELIEGINKLINKLNAAIGTQAETIAQSSDSTEKMINSLRETSEISRSKQEAIKGLIENTAKSEESMRETIQSIEGISKSVEGIAQAIKIISSIAANTNLLSMNAAIESAHAGEAGRGFSVVAGEIRRLSETTRENSVNISRTLKSIIDGVAVTEKQSDDTGTRISKMSKEINSFAETISGLINTFGELSAXSGEITSALDNLQSQSEMVKTDYAEILSMTDKLRAAMLNLTMLSKKNASPGA

SEQ ID NO: 44553 - DNA, 879 bp, Unknown
  Obtained from environmental sample
  misc_feature (1)..(879): n is a, c, g, or t
atgagaaaattcaaaaaggaagatatatacaattgtacctgctgcggttacggaagctgtaaagcgatggcgacggcaatttacaacaaactgaacaaacatgaaaattgcgcccattttatcctcgccctgctcaaggagaatcaggaacacattgccagcgcttcagaccttattgaagggataaacaatttaatacaggaattaaacgatattatcagctcacaggcggaggcggttgatcactcctcagcggaaaccgaagaaatagtcgcctcgattaaaaacacttcggaaatgtcccttaaacagcaagaatcagtaaaaggtttgatggaagtcgcgggacatggacaggaatccatgaaaaaaactattcaatcaataagtgaaatctctaaatctgttgaaggcataagttcagcaatccacataatttcttcaatagcggcaaataccaatttgctgtcaatgaacgcggcgattgaagccgcccatgccggagacgccggaaaaggctttgctgtagtcgccggagaaatacgccgcctttctgaaaacaccagagaaaacgcggtaagtatttcccatacgcttactaatattatcaacggaatatcggacacgacaaaacagtccggcgaaacagacacgcgaatagcccaaatgtccaaagagataagcgggtttgccgaaaccatgtctgcttttatgaacacgtttaatgaattatcagcaaaaagcggaaacattaccgcctctcttgtaagcctgaaagagcaaagttcggcggttaaaacaagttatgcgcaaatgattgaaatgacagagaaacttgccaaagcgttgaaagacttatccgacttgtcaaaaagataa

SEQ ID NO: 44554 - protein, 292 aa, Unknown
  Obtained from environmental sample
  DOMAIN (74)...(287): Methyl-accepting chemotaxis protein (MCP) signaling domain
  misc_feature (1)..(292): Xaa is any amino acid
MRKFKKEDIYNCTCCGYGSCKAMATAIYNKLNKHENCAHFILALLKENQEHIASASDLIEGINNLIQELNDIISSQAEAVDHSSAETEEIVASIKNTSEMSLKQQESVKGLMEVAGHGQESMKKTIQSISEISKSVEGISSAIHIISSIAANTNLLSMNAAIEAAHAGDAGKGFAVVAGEIRRLSENTRENAVSISHTLTNIINGISDTTKQSGETDTRIAQMSKEISGFAETMSAFMNTFNELSAKSGNITASLVSLKEQSSAVKTSYAQMIEMTEKLAKALKDLSDLSKR

SEQ ID NO: 44555 - DNA, 672 bp, Unknown
  Obtained from environmental sample
  misc_feature (1)..(672): n is a, c, g, or t
atggctgcgccaatgcggaagcagcgcgggaaattcttttccctgaccgatgccgccaacatagaccttaaatgcttttccacggatacctatgcgaaagttttagggggcgttgttatatctgaaaaaaaattttctaccacggaggtcacagagtttcacggaggaaaagatgcttcccatatcaaaactccgtgttcctccgtgtactccgtggttaattcttgctttgaaaccgtgcttgattttatccggctggcctgttcaatgggcgttcatgttgaaattaccacgctgatagtacccgatctgaacgacacggtagaggaattggactcatgcgcggattttatcgcctcgttggggggtgtatcttcgggacagatcccctggcacctttcagcctatcatcccgattaccgctggaacgccccgcccaccaatcccgcgtttttaagggaaataaaaaaccgcgccgcccaaaaacttgcctttgtatacgccgggaatattgccggcgacgaaaataccaccttctgccctcattgcgaagcggttctgatacgccgcagaggttaccaaaccgacatatcaggccttgccgccccggcggacggtgaaagttttttccgctgcacgcgatgcggcgaggaaacgccggttaaacggtaa

SEQ ID NO: 44556 - protein, 223 aa, Unknown
  Obtained from environmental sample
  misc_feature (1)..(223): Xaa is any amino acid
MAAPMRKQRGKFFSLTDAANIDLKCFSTDTYAKVLGGVVISEKKFSTTEVTEFHGGKDASHIKTPCSSVYSVVNSCFETVLDFIRLACSMGVHVEITTLIVPDLNDTVEELDSCADFIASLGGVSSGQIPWHLSAYHPDYRWNAPPTNPAFLREIKNRAAQKLAFVYAGNIAGDENTTFCPHCEAVLIRRRGYQTDISGLAAPADGESFFRCTRCGEETPVKR

SEQ ID NO: 44557 - DNA, 537 bp, Unknown
  Obtained from environmental sample
  misc_feature (1)..(537): n is a, c, g, or t
atgcaccgggcggctctgtttcttgaagaagaggctgacagtattgtccgttgcagcctgtgtccccgccgctgcgcgataccaagcggctctttggggggctgcggcgtacggggcaataaaaacggcaaaggcatagtgcccctgtacggtcatattaccgccctcgcccttgaccccatcgagaaaaaacccctgttccatttccgccccggttcaatgatcctttcggcgggttttgccggctgcaacctccgctgtcccttttgccagaactggcatatttcccaatccgccgatgcccccggcaaacaaatgcagcccggcgatattatttccgccgccctgcatgaagattcctcaatgatcgcctatacctattccgagccgctggttcacgctgaatttttgattgactgcatgatactggctcaccgtcacggcattgccaatgtgctggtgaccaatggctgcgccaatgcggaagcagcgcgggaaattcttttccctgaccgatgccgccaacatagaccttaa

SEQ ID NO: 44558 - protein, 178 aa, Unknown
  Obtained from environmental sample
  misc_feature (1)..(178): Xaa is any amino acid
MHRAALFLEEEADSIVRCSLCPRRCAIPSGSLGGCGVRGNKNGKGIVPLYGHITALALDPIEKKPLFHFRPGSMILSAGFAGCNLRCPFCQNWHISQSADAPGKQMQPGDIISAALHEDSSMIAYTYSEPLVHAEFLIDCMILAHRHGIANVLVTNGCANAEAAREILFPDRCRQHRP

SEQ ID NO: 44559 - DNA, 1080 bp, Unknown
  Obtained from environmental sample
  misc_feature (1)..(1080): n is a, c, g, or t
atgaaaaattgtatatttatctgtattttcatcagttttataaatcttgggttatattcacaggatttaaccatttcttccagggatttgcttttggaactgagggctgacggcggttatcacctgtttataaggaagaaacccggcatcgcctcggtgcttttgacggagactacaagagacccgaatatgcaagccgataattacgcttaccgcgcgggggagtggaaccccattaacggcgatgaggtgcgaattctaaacggcgttcctattccaaaggaaagtaaaatctattctcttatttcttccaccgtcgaaaaccaccctattttaggacaggcttttcacatatatattccttatatactttattacggctacgaaccgaatcggcacggggaagtttatttatccgacgggactttcctgaatattcgagctttcgccctgccctacgccgattatcgaggcactttcagagacaacccttttatccttgaagcaagacaagaacctctgcccggtcctatcgaaggcaagtacacgaaggaaactctggacgcattttcagatatagcaaaagcgggaagcggagaattgattttatcccgcagtcccgatgatgtggttgaccttatcaaagccgctcttgataaagaaaaaggcaagacgctcgatattgttatctgccttgacacaaccagcagtatgaaaaaatatatcgactctgttcgtctaaaacttattccgatgttaaacgaaactttaagcggtttcccgaatttcagaataggtatggtgctttttaaggattattatgagtcatatcttacgaaggtggttccgtttacaggtaatttttcggtttttcagaaggacttaaacgacattaaagtacagggcggcggcgatattcccgaagcggtatacgaagcgttacacgacggagcggcaaaatttgactggtcggcgcaatccagaataatgatattgataggggacgctcctccgcatccgaaccgagaggaaagattacaaaagaaatggcggaaaaagccgctattgagaaaaatataa

SEQ ID NO: 44560 - protein, 359 aa, Unknown
  Obtained from environmental sample
  SIGNAL (1)...(20)
  misc_feature (1)..(359): Xaa is any amino acid
MKNCIFICIFISFINLGLYSQDLTISSRDLLLELRADGGYHLFIRKKPGIASVLLTETTRDPNMQADNYAYRAGEWNPINGDEVRILNGVPIPKESKIYSLISSTVENHPILGQAFHIYIPYILYYGYEPNRHGEVYLSDGTFLNIRAFALPYADYRGTFRDNPFILEARQEPLPGPIEGKYTKETLDAFSDIAKAGSGELILSRSPDDVVDLIKAALDKEKGKTLDIVICLDTTSSMKKYIDSVRLKLIPMLNETLSGFPNFRIGMVLFKDYYESYLTKVVPFTGNFSVFQKDLNDIKVQGGGDIPEAVYEALHDGAAKFDWSAQSRIMILIGDAPPHPNREERLQKKWRKKPLLRKI

SEQ ID NO: 44561 - DNA, 1002 bp, Unknown
  Obtained from environmental sample
  misc_feature (1)..(1002): n is a, c, g, or t
ttgcttttcccctgttatttctcgcctgcgccgaggcgggagttggtagtacccgataaagaatacgaacgcagatacaatgagaaacaggagctccaatataatcatcggttgttgaaggcttatttttaccatcctgaagatgtaaaggaatacgaggagtataaaggaatggaagttgatactatgtataagagcttaaaggattatttttgtggagttcattatgaaggttccttagaagattgcccgagtagatatacgcgctattatccgccggaaaaatctgacaatgagataggcaatattgagaatacaaaaagatattattcctttggttttcagagagaaacggaaaaagaaaaatctggagataccatgattgtttggtgggtttatcccaattcgccagccaactccgctggtttaagaaaaaaagataaacttttgtctgcaaacgaaaaatctttaattggcttaactagcgcagatttagatgcttatttgaaaaacgatgatccatttgatgataaaacggtttttacagttttgcgtgatggtaaaaccaaaattttggattccatgcaaaaagcagaagttccagatccaacggtatatttagattctcttgaaggtgttccatatataagagtttacacatttaaggtaaatacaaatcatccgaggggaacttattacgaattcaaagaagttttgaaggagattaaaggggcaaaagtagctattatggatcttcgcagcaatggcggcgggaatatatggcattgcacagcaatggcagcggaattagtcccgttagacagaatgctactttatgacgtgcagcattatcgcgataacgaaaggggcaacgtggtgggtattttccctgattttgcctgggaatatttaaatgaagagggggaagggctaggtataaaatggattatcctgataaataattggactgctagttgttcggaacgtttacagccgctgtga

SEQ ID NO: 44562 - protein, 333 aa, Unknown
  Obtained from environmental sample
  misc_feature (1)..(333): Xaa is any amino acid
MLFPCYFSPAPRRELVVPDKEYERRYNEKQELQYNHRLLKAYFYHPEDVKEYEEYKGMEVDTMYKSLKDYFCGVHYEGSLEDCPSRYTRYYPPEKSDNEIGNIENTKRYYSFGFQRETEKEKSGDTMIVWWVYPNSPANSAGLRKKDKLLSANEKSLIGLTSADLDAYLKNDDPFDDKTVFTVLRDGKTKILDSMQKAEVPDPTVYLDSLEGVPYIRVYTFKVNTNHPRGTYYEFKEVLKEIKGAKVAIMDLRSNGGGNIWHCTAMAAELVPLDRMLLYDVQHYRDNERGNVVGIFPDFAWEYLNEEGEGLGIKWIILINNWTASCSERLQPL

SEQ ID NO: 44563 - DNA, 1287 bp, Unknown
  Obtained from environmental sample
  misc_feature (1)..(1287): n is a, c, g, or t
gtgtgctcgattgtggcgaattaccttaaccgcgtggttgggaatcgtaccataggcggaaagattttccttcagggcggcgttgcgaaaaacccagcggtgccgcttgctttcgccatgctccttgacaaggaaatccttgtgcctccttccccggagctcatgggctgttttggcgtggcgctgctttcaaaacgcaagcacgccgacggtcttttggaagaacgcccggtggtagagggcggttcgcccatcgatgatctgttaaaccgggagataggttacgaacgggtctttacctgtcaggcctgcgagaatctctgccccattcaggttttgtcgattgactctgcaagcgcttcaaaaagctccgcaccagttacagcgagccgcaagtacatgttcgggggccgctgtaacaagtacaccaacatgcgaaaacaggttaaggatgtgccggtctttgactatgtggaaaaaaggcagaaactcatcttcgaggaatatgccgcaccggtggatgataataaaaaaagaaattttactgtcggtattccccgcgcgttctcaactcacaccctctatccgctgtactcatggttcttccatgaactcggcataaaaacttttctttcatctgaggtggcccacgaaggcgtggcgagggcggagtccacttactgttttcccgctgagattgcacacggggcggtgcaggactgtctgaacaagggggcggactttgtactcttgccgcatttccgtgatatgccaagttacgaggaaaaagttcacgccaatttttgtcctataacgcaaggtcttccttattacatcgaaaaagcttttcccgatgttgacaaaaaaaagtggctcccccttgtggtgagttttaagttcggcgaggaaaaggcgctggaacttttccaggtgatgaatgaaaaactaggtattggcgaggaagaaacaaaagcggctttcgggaaagccctggcaaaacaaaacgagtattttgcggcggcaaagaaaatgggactccaggctcttgaagacgcccgcaaagcagaccgtccggttatcgcggttttgggcaggccatacaacgcgttcacccccgaagccaacatggggattcccaggaagtttaccacgcggggttattccattgtgccgtttgatattcttccttttgatgatgaagaaatcttttccaatatgtactggtactacggccagcaggatgttaaggccgcgagtcttctaaaaacgaggacaatgtttatataa

SEQ ID NO: 44564 - protein, 428 aa, Unknown
  Obtained from environmental sample
  misc_feature (1)..(428): Xaa is any amino acid
MCSIVANYLNRVVGNRTIGGKIFLQGGVAKNPAVPLAFAMLLDKEILVPPSPELMGCFGVALLSKRKHADGLLEERPVVEGGSPIDDLLNREIGYERVFTCQACENLCPIQVLSIDSASASKSSAPVTASRKYMFGGRCNKYTNMRKQVKDVPVFDYVEKRQKLIFEEYAAPVDDNKKRNFTVGIPRAFSTHTLYPLYSWFFHELGIKTFLSSEVAHEGVARAESTYCFPAEIAHGAVQDCLNKGADFVLLPHFRDMPSYEEKVHANFCPITQGLPYYIEKAFPDVDKKKWLPLVVSFKFGEEKALELFQVMNEKLGIGEEETKAAFGKALAKQNEYFAAAKKMGLQALEDARKADRPVIAVLGRPYNAFTPEANMGIPRKFTTRGYSIVPFDILPFDDEEIFSNMYWYYGQQDVKAASLLKTRTMFI

SEQ ID NO: 44565 - DNA, 843 bp, Unknown
  Obtained from environmental sample
  misc_feature (1)..(843): n is a, c, g, or t
atggggcagaagccgtttttagtgctggagctggattcacattccgcagatgccggtgtggatacaagggtcgaggcttttctggacatcatcgacgggtaccgcgccaagaaaagcgaactggaagcggagcgcttcgataatggctggaggtatgtttacgatccagccgcgtcttcgccggaagatcagctcaggcttgacaatctcaaaagcggcgagaaggtgaggatacgaaacaacaagcgggttaagattttattgtcgaatatgggcgcaatttccaccgagtacatgggcgccgcggtgcggagctttgggatcaaagccgaaccattgcctgttgcgactggaaagaccatccagatagcacgcgctcatgcttcaggcaaagagtgcgtgccaagccacctggtgcttggaagcgcgcttcaatttatctggagcgagaagtaccgcaaggacgagctataccttctctttgtgccgattacaaccggcccgtgcagaaccggccagtactacattttttacgaaaacctcttcagggatctgcgcttggaaaacgtggtggtctttatcctttcggcggacaattcctacaatgagttggggcccggcttcgcaaaggaaatgtggaagggcctggtgctttctgactacctgaaagatattcaaaacgcacttttgacagtcgcggttgatcctgtttcggcaaccacggcgtttgaaaagtcctggcgtaaggtaatgcacgcggttgagcacaagccgaaaggcctctggaaagagcttgaaaatgtggcgaaggacgttaagaaaataccgctaaaaagaaagtag

SEQ ID NO: 44566 - protein, 280 aa, Unknown
  Obtained from environmental sample
  misc_feature (1)..(280): Xaa is any amino acid
MGQKPFLVLELDSHSADAGVDTRVEAFLDIIDGYRAKKSELEAERFDNGWRYVYDPAASSPEDQLRLDNLKSGEKVRIRNNKRVKILLSNMGAISTEYMGAAVRSFGIKAEPLPVATGKTIQIARAHASGKECVPSHLVLGSALQFIWSEKYRKDELYLLFVPITTGPCRTGQYYIFYENLFRDLRLENVVVFILSADNSYNELGPGFAKEMWKGLVLSDYLKDIQNALLTVAVDPVSATTAFEKSWRKVMHAVEHKPKGLWKELENVAKDVKKIPLKRK

SEQ ID NO: 44567 - DNA, 915 bp, Unknown
  Obtained from environmental sample
  misc_feature (1)..(915): n is a, c, g, or t
atgaaaggtccgattttagtagtgcttgccgcgggtatggccagccgttacggcggcttaaaacaaatggatgttatcggaaagaacggcgaagtactgcttgattattctgtatacgacgcggtaaaatccggttttgaaaaaattgtatttattatccgccatgacatagaaaaagattttagggagattgtgcttgcgcggatgggttcaaaggtaaaatacgaattggcttttcaggaagcggacagcttaataccgccggatttattccgcgccgccaaagaagccggaagaacaaaaccgtggggaacaggccacgccctgctttgcgccgcggataaacttgacgcgcctttcacggttataaacgccgatgatttctacggcagagaagcttttgccgttatgtgcaaacacctcaattcttccgccgaagccgccatagtgccgtaccgccttgataaaacgctcagccctcagggaacggtagcgcgcggcgtctgcaaagtttccggcggctatcttgccggcgttgaagaacttaccgctattgaaaaaaaagacggccgaatcattaacaccgctcccgatggctctgttcgcgagcttcttcctgaaacgcccgtgtcgatgaatttctgggggtttctgccgggtatactcccggaattcaagaaatattttgatgattatttaaaagaatttgcggcggatgtgaaggggaagattaaaagcgaatgttttattcccaaagcggctgattattttattaataagggaataattaaaataaaatcgttggatgccaattcagactggtttggcgtgacttataaggaagacaaggaagcggcaattaaaaagattgaagagttaaccgacaaaggcgtgtatccggcgaaactttggtaa

SEQ ID NO: 44568 - protein, 304 aa, Unknown
  Obtained from environmental sample
  SIGNAL (1)...(18)
  misc_feature (1)..(304): Xaa is any amino acid
MKGPILVVLAAGMASRYGGLKQMDVIGKNGEVLLDYSVYDAVKSGFEKIVFIIRHDIEKDFREIVLARMGSKVKYELAFQEADSLIPPDLFRAAKEAGRTKPWGTGHALLCAADKLDAPFTVINADDFYGREAFAVMCKHLNSSAEAAIVPYRLDKTLSPQGTVARGVCKVSGGYLAGVEELTAIEKKDGRIINTAPDGSVRELLPETPVSMNFWGFLPGILPEFKKYFDDYLKEFAADVKGKIKSECFIPKAADYFINKGIIKIKSLDANSDWFGVTYKEDKEAAIKKIEELTDKGVYPAKLW

SEQ ID NO: 44569 - DNA, 576 bp, Unknown
  Obtained from environmental sample
  misc_feature (1)..(576): n is a, c, g, or t
atgaataatttaaatctaatgttggaatacaaaagtgatgcaattataggcataggtctgggcggcgctgaaaaatcaggcccatcaaagaattatgcggaagtatttcaaaaagcgcacgaacatggaattcattttgtggctcattcaggagaagacatggggtgggaagagatcggtgaaacattaacttatcttgatccggaacgtatagggcacgggataagcgcaattcaaaatcccaatctggttaaatatattgccgaaaaaaaaatccctcttgaaatatgccctacgagtaatttatttacacgcaaatatgtgtcagaaatagaaacacatcctgtaaaacagttttatgaaaacaatctttttgtaactattaattcagatgatcctgcgctgttttccacgtctcttgttgatgaatatatgctgctttttaataaaggagttttttctcaaaatgaaattcttgctcttataaaaaacaatatatatgccagctttttaaccgaagataaaaagaataagctttggagaaattgcaatacgatatttaataatacttggtag

SEQ ID NO: 44570 - protein, 191 aa, Unknown
  Obtained from environmental sample
  DOMAIN (1)...(182): Adenosine/AMP deaminase
  misc_feature (1)..(191): Xaa is any amino acid
MNNLNLMLEYKSDAIIGIGLGGAEKSGPSKNYAEVFQKAHEHGIHFVAHSGEDMGWEEIGETLTYLDPERIGHGISAIQNPNLVKYIAEKKIPLEICPTSNLFTRKYVSEIETHPVKQFYENNLFVTINSDDPALFSTSLVDEYMLLFNKGVFSQNEILALIKNNIYASFLTEDKKNKLWRNCNTIFNNTW

SEQ ID NO: 44571 - DNA, 666 bp, Unknown
  Obtained from environmental sample
  misc_feature (1)..(666): n is a, c, g, or t
ttgggggaaatttttaaaaatttgttgggcccttttttggtttttgaaattggggtttttttgaggccggcccgagtttttaaaaccctacgggcgggagagccctttcagaattttccttgtaaatcaggaggatcccttcgatctgttaatagaaaaagagatgacggggaagcactacgcgaacctgccgggaaccccgggagtgttaccttcaacggcatgagagatgttatcaatgtcaaaccttttaccctgatagataaattcgcgtacattgtaaacattgactgggtggatcatctttccataagcgggggggagaaaaatctcagcgcggatttacggaaagaaggcgatgacagtgttttttttctgaacgggagaaagacggactcagattcatttaggacgttttaccaggccgttattggccttctgacagacgccgaataccccggcccggcccggcaaagcgaaaattcaggggaactgaccgtcgaatacctgcttaacaatccgccgggagaaaaggcgaccttcaccctaatcccctataaccgggatttttacgccctgaggcaggatggggcgatggagtttctgatttccagaaaccaggttcgccgcatttacgaaaccgccgacgcggtgatctatgattag

SEQ ID NO: 44572 - protein, 221 aa, Unknown
  Obtained from environmental sample
  misc_feature (1)..(221): Xaa is any amino acid
MGEIFKNLLGPFLVFEIGVFLRPARVFKTLRAGEPFQNFPCKSGGSLRSVNRKRDDGEALREPAGNPGSVTFNGMRDVINVKPFTLIDKFAYIVNIDWVDHLSISGGEKNLSADLRKEGDDSVFFLNGRKTDSDSFRTFYQAVIGLLTDAEYPGPARQSENSGELTVEYLLNNPPGEKATFTLIPYNRDFYALRQDGAMEFLISRNQVRRIYETADAVIYD

SEQ ID NO: 44573 - DNA, 1599 bp, Unknown
  Obtained from environmental sample
  misc_feature (1)..(1599): n is a, c, g, or t
gtgaacattgtcatacagacccttagagagcatatcgccaatcgaaacatgcgctttgtgtttccttcccagatcgcttccgatctgtgggcccggaaaacctgcacccttggaatagcccgctcggtcgagaagaaccgcttccttgcatgggacgattttaaaaaagaggcaatccaggaaaaggaagcaaaacgccagcccgctacggcggtaatgcgcgatctctttgccgacgccctcacaaaaagaaattccgaaaggagctttttaaaagccctcatcccgcctgaatattccggcaacggaaggatctttgccccgtttatagcccggctgctgccttcgcttaagcattgggaaacattgtggataaaattgatgcaaaaatttcccgcccgtcagagggacgctgaagacgaagactacgaaacggtaaaaaaagaatatgccgcttttcttgatcgctatgatctttttgagccttcctgggaagagcttgaaacccatgaaggaaaaacgagttacattattttctttcctgaacttatcgaagacttcgctgaatacgatgctttgcttttacccccgcaattttcccgcatatcggtaaaagaattggatagcgaaatatcaggcgctcggtgtttgttgttctataaatccgcaaaggcagagattcgggatgctgtcatggaactacgaaggcttcacgaggaagaaggggtcccctacgaagatatggcggtcagcgttccagagcttgaagaaatggaagccgatttattgaaggaattttttctaaggcaggttccggttacgcgcagggcggggaagaaacttggggaaacaggcgctggcaggctttttgctcttgctaacgaatgtgccgcttccgatttttcttttaacagcttaaaggcccttattctgaacgatcatattccctggaaagagccggaaaaaaacagggcgcttgtaagcttcggcataaagtacaactgcgtttctgcttatgttcaggacgggaaggatgtcgatatctgggaagaagctttcagggaagcttatagctcaagcggcagggaattgcgggattattaccgtaaaataaaaaatagcgtaaagcaaattgccgcatcaaaaaatttttccgatatacaaaaaaattattttatctttcgcagaagccttttggatatgaaaaaaataactgctgaagataacgatgtattgggccgctgcatagctgaactcggttctcttatcgagctggaagaaaagtttatcgacccgcctatagttccttcttcagctttcgggttttttctatcatacctgagcgggaaggagtatgtaagaaaagaacaaaaaagcggcgtgaacatattcaggtggcgggtagcggcggcggccccttttgcctgccactttgtgcttaacgcgtcccagagcgccgcgtcggtgctttaccagcctttaaagtttttgcgtcanggacagcgaagggcactgggccttgaggacaccgacgcgtcgggcgcttttttccttctatgcaacacagggcgcgatacaagagaagatgggggcttttaa

SEQ ID NO: 44574 - protein, 532 aa, Unknown
  Obtained from environmental sample
  misc_feature (1)..(532): Xaa is any amino acid
MNIVIQTLREHIANRNMRFVFPSQIASDLWARKTCTLGIARSVEKNRFLAWDDFKKEAIQEKEAKRQPATAVMRDLFADALTKRNSERSFLKALIPPEYSGNGRIFAPFIARLLPSLKHWETLWIKLMQKFPARQRDAEDEDYETVKKEYAAFLDRYDLFEPSWEELETHEGKTSYIIFFPELIEDFAEYDALLLPPQFSRISVKELDSEISGARCLLFYKSAKAEIRDAVMELRRLHEEEGVPYEDMAVSVPELEEMEADLLKEFFLRQVPVTRRAGKKLGETGAGRLFALANECAASDFSFNSLKALILNDHIPWKEPEKNRALVSFGIKYNCVSAYVQDGKDVDIWEEAFREAYSSSGRELRDYYRKIKNSVKQIAASKNFSDIQKNYFIFRRSLLDMKKITAEDNDVLGRCIAELGSLIELEEKFIDPPIVPSSAFGFFLSYLSGKEYVRKEQKSGVNIFRWRVAAAAPFACHFVLNASQSAASVLYQPLKFLRXGQRRALGLEDTDASGAFFLLCNTGRDTREDGGF

SEQ ID NO: 44575 - DNA, 360 bp, Unknown
  Obtained from environmental sample
  misc_feature (1)..(360): n is a, c, g, or t
ttgctcattgctcatttttatttgttacctgattggttggtgtttatggcggtggcaagaagattcacaaaagctgatattgtggattccctgtatgacaatactgggatagaccgtaaagatatccgcaaaataattgacctctttttcgttgagatcaaaaattcgttgacccgtcgtgaagttattgaactaaggggctttggcacttttgagatcaaagtgcgaaaaggccgatccagggcccgcaatccaaaaaccggcgagactatttcggttcgtccacatggcattgtctgtttccgtccgggacgggaattaaagcaggatgcctggatcatcaaagatgaaaactcctga

SEQ ID NO: 44576 - protein, 119 aa, Unknown
  Obtained from environmental sample
  DOMAIN (22)...(112): Bacterial DNA-binding protein
  misc_feature (1)..(119): Xaa is any amino acid
MLIAHFYLLPDWLVFMAVARRFTKADIVDSLYDNTGIDRKDIRKIIDLFFVEIKNSLTRREVIELRGFGTFEIKVRKGRSRARNPKTGETISVRPHGIVCFRPGRELKQDAWIIKDENS

SEQ ID NO: 44577 - DNA, 942 bp, Unknown
  Obtained from environmental sample
  misc_feature (1)..(942): n is a, c, g, or t
ttggttagtaagctttgcgtgtttctttcacgattagattgcaaacaacgatcccagaccccagaccccagaccccagaccctactccccagtccccagtcccttctccctttcttcgcatggttagccgcgctcatcgcctctttgatttacggcctcgcgcagccaacagatttttccgccgaaaaacaagcgaacatcgccttgatacagcataataccgatccctggaagggaggcattgaggaataccggaataatctcgttgttctgaaaaggctttccaatgaggcgctggcggtacagccgcggcctgatatggtggtgtggtcggagacggcgtttgttccgaggatttactggcatgaaacctaccgcgacgacccttcctcatggctattggttaaggagcttatggattatctgtcaaaacaggaagtccctttcctgataggcaatgatgatgcccgtaaggatccggcgaaaaatcccaatgccgatgaaggctaccgtattgattataatgctgcgatactttttgaaaatgggcgggaaaccggcatttaccgtaagctccacctggttccatttaccgagcactttccataccaaaagcaattcccggcaattcaccgggctttggtaaacgcggacacccatttttgggaaaaagggacggatgcgaaggtttttcagggcccgggctttactttttccacgcctatctgctttgaggacacttttggctatctttcccgtaaattcgcgcaaaacggtgcccagattatagtaaatatatcaaatgacgcatggtcgaggagccttccggcgcaaaatcagcatctttcaatggctgtttttcgcgctgtggaaaaccgcttatccatggccagggcgacttcgtcaggccaaacctgcggaatagcccctcggccaatctga

SEQ ID NO: 44578 - protein, 313 aa, Unknown
  Obtained from environmental sample
  DOMAIN (66)...(268): Carbon-nitrogen hydrolase
  misc_feature (1)..(313): Xaa is any amino acid
MVSKLCVFLSRLDCKQRSQTPDPRPQTLLPSPQSLLPFFAWLAALIASLIYGLAQPTDFSAEKQANIALIQHNTDPWKGGIEEYRNNLVVLKRLSNEALAVQPRPDMVVWSETAFVPRIYWHETYRDDPSSWLLVKELMDYLSKQEVPFLIGNDDARKDPAKNPNADEGYRIDYNAAILFENGRETGIYRKLHLVPFTEHFPYQKQFPAIHRALVNADTHFWEKGTDAKVFQGPGFTFSTPICFEDTFGYLSRKFAQNGAQIIVNISNDAWSRSLPAQNQHLSMAVFRAVENRLSMARATSSGQTCGIAPRPI

SEQ ID NO: 44579 - DNA, 507 bp, Unknown
  Obtained from environmental sample
  misc_feature (1)..(507): n is a, c, g, or t
gtggccgtgacgctcccgatccacgcgggcgcggtatccggcgagaacgcgtcgggcaaggcaaaggcggccccggctacgagcgggctaaacaatccaaccgcgaaagacgccgcgccggagagcgcggccggcaagacgcgcgggacgatcctccttgtagacgacgacaacggcatccgagagagcatctcggccttcctcaggggcaacgactacagcgtcttcacggcggtcgacgggctggacgccgtggagaagtacgagaaaacaaacggcagcgccatcgacctcgtgatactcgatatggtaatgccgcgaatggacggcaaggaggccttcgtcaggatgaaagcgatcaacccgtctataaaagccataggcataaccggctacacgaactacacgcaggaggagatggcggcgctcgggatgaagaagatgctgcacaagcccttcgcgttcgaggacctgctgagcgtagtggcggcgcacattcagcgctga

SEQ ID NO: 44580 - protein, 168 aa, Unknown
  Obtained from environmental sample
  DOMAIN (49)...(163): Response regulator receiver domain
  misc_feature (1)..(168): Xaa is any amino acid
MAVTLPIHAGAVSGENASGKAKAAPATSGLNNPTAKDAAPESAAGKTRGTILLVDDDNGIRESISAFLRGNDYSVFTAVDGLDAVEKYEKTNGSAIDLVILDMVMPRMDGKEAFVRMKAINPSIKAIGITGYTNYTQEEMAALGMKKMLHKPFAFEDLLSVVAAHIQR

SEQ ID NO: 44581 - DNA, 801 bp, Unknown
  Obtained from environmental sample
  misc_feature (1)..(801): n is a, c, g, or t
ttgggtgaaccggacagtcccggcgtatcggaaaaggttgcgggcgacacgctcgtcacctcgtataatgatttagcggcggttgaggagttattaaagaaaaacgacgtagcctgcgtaatcgtggaaccggtcgccgctaatatgggcgtggtattgccgaggaacggatttttaagcggactgaaagaactgtgcggtacgtacggggcgctgttggtattcgacgaggtgatcaccgggtttcgcctctgtaaaggcggcgctcaggagcgctacggcgttgaggcggatttaaccgcctacggcaagatcatcggcggcgggatgccggtgggagcctacggcggcagaagggagatcatggaactcatcgccccaagcggacccgtataccaggccggaacgctttcaggcaatccggtggcgatggcggcggggcttgcccaacttgaagccctcgaaaatcggaacgtttacaatcatatcaacaagatgggtgaaagattagccgacgggcttttagagatcgcgcaaaaatcagggctgaaagcctgcgtgaatcgtgcgggctcgctcgtctgcctatttttcggtattgataacgcaaacgattacaactccgtcaaacaagcggacgcggcgctttacgctgaatatttccacggaatgctggataacggcgtctacctcgccccgtcgcagtttgaggcgatgttcgtctcaaacgcgcatacggagagcgatattgacgagacgcttgacaaagcggaactggttatcgggaggctgcggcgataa

SEQ ID NO: 44582 - protein, 266 aa, Unknown
  Obtained from environmental sample
  DOMAIN (1)...(204): Aminotransferase class-III
  misc_feature (1)..(266): Xaa is any amino acid
MGEPDSPGVSEKVAGDTLVTSYNDLAAVEELLKKNDVACVIVEPVAANMGVVLPRNGFLSGLKELCGTYGALLVFDEVITGFRLCKGGAQERYGVEADLTAYGKIIGGGMPVGAYGGRREIMELIAPSGPVYQAGTLSGNPVAMAAGLAQLEALENRNVYNHINKMGERLADGLLEIAQKSGLKACVNRAGSLVCLFFGIDNANDYNSVKQADAALYAEYFHGMLDNGVYLAPSQFEAMFVSNAHTESDIDETLDKAELVIGRLRR

SEQ ID NO: 44583 - DNA, 960 bp, Unknown
  Obtained from environmental sample
  misc_feature (1)..(960): n is a, c, g, or t
gtggccgatacttcggcggtaggctccctgatgattccctccatggtcgaaaaaaaatataagccggggttcgccgcggtgatccaggcgagcggggggacgctgggccccatcatcccgcccagcattctcatggtgctgtatggctccattaccaacgtgtccattggcgggctttttcttgcgggcgtcatccccggcattctgattggtcttttgtgcatgggcgtgacctggtccttcgccacggacaaattccagcccggcatccagcaggaggcctggcagggcttcggcgccatcattgacaccgtgaaaccggctttgcccgccctgatgatgccgattatcatcattgccggcattatctccggcattttcaccgcgactgaggccagcgccgtggcggtgctctatgcctttttcgtgggcatggtcatacacaaggaactgaaattcagccacttgcccaaaatttttctggatgccgcagcaaccacctgcatgatcatgctcatcatctcttgcgccgcctgtttcggctggttgctggcctgggcggaatttcccgccgatgtgagcgcatggctgaaggccttcacggacaacaagtatgtctttctgttcatgctggttgtctttctcatgttgctcggcatggttatcgaggtgctggccatcgccaccatcttcggcccgctgctcagcattctgggcgtgggatacggctttgatccggtgcattacggcctgattatcctcatcatcatgcagatcggcggcatcactccccctgtgggcatcgtgctgcaaatcacctgtggaattgcgaaaatcggcttcgggccgaccatccgctacctggtctggtacattctggccatgttgggcatcgtattgctggtggtgtttgttccggatctcgccttgtatctgccgcggattttcctcggcgcgtaa

SEQ ID NO: 44584 - protein, 319 aa, Unknown
  Obtained from environmental sample
  DOMAIN (1)...(309): DctM-like transporters
  misc_feature (1)..(319): Xaa is any amino acid
MADTSAVGSLMIPSMVEKKYKPGFAAVIQASGGTLGPIIPPSILMVLYGSITNVSIGGLFLAGVIPGILIGLLCMGVTWSFATDKFQPGIQQEAWQGFGAIIDTVKPALPALMMPIIIIAGIISGIFTATEASAVAVLYAFFVGMVIHKELKFSHLPKIFLDAAATTCMIMLIISCAACFGWLLAWAEFPADVSAWLKAFTDNKYVFLFMLVVFLMLLGMVIEVLAIATIFGPLLSILGVGYGFDPVHYGLIILIIMQIGGITPPVGIVLQITCGIAKIGFGPTIRYLVWYILAMLGIVLLVVFVPDLALYLPRIFLGA

SEQ ID NO: 44585 - DNA, 696 bp, Unknown
  Obtained from environmental sample
  misc_feature (1)..(696): n is a, c, g, or t
gtgctgcgttatgtgaaagaatggcgccaaacaataacccgcctcggccgctgggtagattttgacaacgattacaaaaccatggaacccccttacatggaaacaatatggtgggtaatgaagtccctccacgaaaaaggcctgttatacgaaggccactacatactcccctactgcccccgctgcgccacagtcctctccaaccacgaactgaacctcggcggctacagggatgtgcatgatccggcgatcaccctgaaattcaaagtaaaagggtccggggttcagggttcagggttcaggggggatgtttacttcctggcgtggactacaaccccgtggacgctgccttcaaatctagccctcgtcctcggtccagacatcgactatgtactaatcgaagctcttaccggaccccgaaccccgaaccccgaaccccgtacctacccttattacattctagccgaggcccggctccccgcctatttcaaagacagcgccgaatatcgaatcgtatggcgcaaaaaaggctgtgatctgttaggcgtagaatatgagccgctgtttccgtactttaagaagccgccgcgcagaacgccttccgcacctatccgggtgattttgtttcgaccacggacggcacgggcattgtccacaccgcgcccggcttcggcgaagacgacgcgagggtgctga

SEQ ID NO: 44586 - protein, 231 aa, Unknown
  Obtained from environmental sample
  DOMAIN (1)...(218): tRNA synthetases class I (I, L, M and V)
  misc_feature (1)..(231): Xaa is any amino acid
MLRYVKEWRQTITRLGRWVDFDNDYKTMEPPYMETIWWVMKSLHEKGLLYEGHYILPYCPRCATVLSNHELNLGGYRDVHDPAITLKFKVKGSGVQGSGFRGDVYFLAWTTTPWTLPSNLALVLGPDIDYVLIEALTGPRTPNPEPRTYPYYILAEARLPAYFKDSAEYRIVWRKKGCDLLGVEYEPLFPYFKKPPRRTPSAPIRVILFRPRTARALSTPRPASAKTTRGC

SEQ ID NO: 44587 - DNA, 783 bp, Unknown
  Obtained from environmental sample
  misc_feature (1)..(783): n is a, c, g, or t
gtgctgaagaacaccggcatccccgtgatctgccccatagacgcggaatgtaaattcaccgaagaagtaagcgacttcgccgggatctttgtcaaaaacgccgacaaggggatcatggaaaagctgaaaaatgaaggcaaacttttcaggcgcgagcaaatcctccacgcctacccccactgctggagatgcggtcatccgctgatttacagggcggtcggctcgtggttcgtcaatatcgaaaaaatcaaaaaagacatgcttcgggcgaacagcgaaatcctctgggtgcccgatcatataagggatggaagattcggaaagtggctggagggcgcgagggactgggccatcagccgcaaccgttactggggaaacccacttcccatatggcgctgcgaggactgcggaaagatcatctgcgtcggcagccgaaaagaattgcaggaactctccggcacataccccgaagacctccacaagcattttgtcgacaacataacgattccctgttcatgcaaaggcgttatgcgcagaattcccgaagtattggactgctggtttgagtcgggggccatgccttacgcgcaaagccactacccctttgaaaacaaggatttttttgaaagccacttcccctcggactttatcagcgaggggctcgaccagacgcggggatggttttacacattgacgattctcgcggccgctctgttcaaaaaaccggcatttaaaaactgtatagtcagcggcctggtgctcgcctcggatggaaagaaatga

SEQ ID NO: 44588 - protein, 260 aa, Unknown
  Obtained from environmental sample
  DOMAIN (1)...(260): tRNA synthetases class I (I, L, M and V)
  misc_feature (1)..(260): Xaa is any amino acid
MLKNTGIPVICPIDAECKFTEEVSDFAGIFVKNADKGIMEKLKNEGKLFRREQILHAYPHCWRCGHPLIYRAVGSWFVNIEKIKKDMLRANSEILWVPDHIRDGRFGKWLEGARDWAISRNRYWGNPLPIWRCEDCGKIICVGSRKELQELSGTYPEDLHKHFVDNITIPCSCKGVMRRIPEVLDCWFESGAMPYAQSHYPFENKDFFESHFPSDFISEGLDQTRGWFYTLTILAAALFKKPAFKNCIVSGLVLASDGKK

SEQ ID NO: 44589 - DNA, 402 bp, Unknown
  Obtained from environmental sample
  misc_feature (1)..(402): n is a, c, g, or t
atgatttgtttattggatactcacacattcatttggacgacattacaaacaaataatttgggtaaaaaaagcaaagaaataatttcaaatagaagtaacgaaatttgcgtaagtactgtttcattttgggaaatatcattaaaaacaaaaataaacaaattttctttcaaagatataaacataaatgattttccaaaatatgcaaaaaatatgggttttacaataatggatatgcaagaaaatgaaactataacatttcataaactgccgctgaaaaaaaatcataaagacccatttgacagaatgttaatatggcaggcaataactaaaaatatgaccatgataagcaaagacgaattattcgatcaatacaaaaaagacggcttaaaactgatttggtaa

SEQ ID NO: 44590 - protein, 133 aa, Unknown
  Obtained from environmental sample
  DOMAIN (3)...(133): PIN domain
  misc_feature (1)..(133): Xaa is any amino acid
MICLLDTHTFIWTTLQTNNLGKKSKEIISNRSNEICVSTVSFWEISLKTKINKFSFKDININDFPKYAKNMGFTIMDMQENETITFHKLPLKKNHKDPFDRMLIWQAITKNMTMISKDELFDQYKKDGLKLIW

SEQ ID NO: 44591 - DNA, 579 bp, Unknown
  Obtained from environmental sample
  misc_feature (1)..(579): n is a, c, g, or t
atgggaaacgcggcggcggatattggccttatcgggctggctgtaatgggtgaaaacctggtgcttaacatggaaagcaaagggttttccgtggcggtgtacaacaggactacctcaaaagtagacgattttataaagggcagaggagccggcaagaaaattaccggttgccataccgtggcggaactggcggcaaacttgagtaacccgcgcaaagccttcatcatggtcaaggccgggcaggcggttgatgacgccattgaacagcttttgggagtctttgagaaaggcgatataatcattgacggcggcaattccaattaccaggatacgatcaggcgcacagcttatgtcgaatcaaaaggcctactgtatatcggcaccggggtttcaggcggtgaggaaggggccttgaaagggccttcgatcatgccgggcggatctccgtcggcatggaatctggtaaagcccgttttccaggcgattgccgcaaaagtagaaacaggagagccctgctgcgactgggtgggcgaaaacnggcgcgggtcattttgtaaagatggttcacaacggaattga

SEQ ID NO: 44592 - protein, 192 aa, Unknown
  Obtained from environmental sample
  DOMAIN (5)...(178): NAD binding domain of 6-phosphogluconate dehydrogenase
  misc_feature (1)..(192): Xaa is any amino acid
MGNAAADIGLIGLAVMGENLVLNMESKGFSVAVYNRTTSKVDDFIKGRGAGKKITGCHTVAELAANLSNPRKAFIMVKAGQAVDDAIEQLLGVFEKGDIIIDGGNSNYQDTIRRTAYVESKGLLYIGTGVSGGEEGALKGPSIMPGGSPSAWNLVKPVFQAIAAKVETGEPCCDWVGENXRGSFCKDGSQRN

SEQ ID NO: 44593 - DNA, 573 bp, Unknown
  Obtained from environmental sample
  misc_feature (1)..(573): n is a, c, g, or t
atgaaagcggcaagagaagagttcaaggagaaaaatcccgaatataaatccacattcaaaccaaagccgctcccaaaagaagatttgccattggttgggagaataccagaacctcaaattggacgttcaaaagaggatattttaaaaaaggttcaagaaaaatttccttacataacaaacgaaaaagaattgtccgttaaaaaagaagactgggttgaattcgcaaagtttttgcaaagcgagttgaattgcgattatctaatagatgtagtggcagcagactggactgagcattttgatgttattctgcaaactatgagtttgaaagaggggcataagattttcgcaaaatgtagcttgccaaaaccagaagcccaagaagaattgccagccattccaagcctcaccgaaatttatcccgcagcggaatggaaagagcgcgaagtttacgatatgtttggaatttcctttgaaggtcaccccgatttgcgccgcattttcaccgaagacagctttgagggctggcccctccgcaaggattttacaaattctagtatgcttattaagccttaa

SEQ ID NO: 44594 - protein, 190 aa, Unknown
  Obtained from environmental sample
  DOMAIN (122)...(189): Respiratory-chain NADH dehydrogenase, 30 Kd subunit
  misc_feature (1)..(190): Xaa is any amino acid
MKAAREEFKEKNPEYKSTFKPKPLPKEDLPLVGRIPEPQIGRSKEDILKKVQEKFPYITNEKELSVKKEDWVEFAKFLQSELNCDYLIDVVAADWTEHFDVILQTMSLKEGHKIFAKCSLPKPEAQEELPAIPSLTEIYPAAEWKEREVYDMFGISFEGHPDLRRIFTEDSFEGWPLRKDFTNSSMLIKP

SEQ ID NO: 44595 - DNA, 912 bp, Unknown
  Obtained from environmental sample
  misc_feature (1)..(912): n is a, c, g, or t
atgccaaagacagacttcgttttccgccacgcgctcgccgccattcttgggcggcgggggatggcgtacgtgatgcacatgcggcctctggagtggcccataatgacagtccacttcatctttggcgcgttgctggctgttggcctcggtctgccgtggtggaatctgctgctaggctggttcatttttgtcgtgctgatgaacggcgggacactggccatcaacagcgcattcaatatggacgagggcgacgtgggctacctgcacgcaccccatcaagagnngaaatatctggcgcacgtttcaggcgctatgctggttgccgcctttttgctgggctacctgctgccttgggtgttcgcttgggccaccgcggcatgtgtgcttatgagcgtcctctactccgtcccgcctgcgcgcctgaagtccagggcggggtgggacatactcatcaacatgctgggctacggtcttctcactccacttgcgggctggggggccacgggcgagcagcttgccccctggttttggatgatctgcatcggcttcgggttcctgttcggctcgctctaccccgccacgcagatatatcaggccgaggaagacggggcgaggggcgacacgaccttcgtcattgcgttgggcgtacccaaaagccttatcgccgcgttcctgctggcggttgccgcacacgccatgttctattgggctgccgtggagcgcggcctgtgctttccccaccttcttgtgccgttgctctccctgattccttgggcagccgtcttcgtgcagtggctggtcaagtggcgcggtctgacggggggtcagcacgaaaagaggatgtactggctgctggtctgctgggccgtgacggaagtcgccctgctgtggatgttttggccgaaagcatag

SEQ ID NO: 44596 - protein, 303 aa, Unknown
  Obtained from environmental sample
  DOMAIN (32)...(299): UbiA prenyltransferase family
  misc_feature (1)..(303): Xaa is any amino acid
MPKTDFVFRHALAAILGRRGMAYVMHMRPLEWPIMTVHFIFGALLAVGLGLPWWNLLLGWFIFVVLMNGGTLAINSAFNMDEGDVGYLHAPHQEXKYLAHVSGAMLVAAFLLGYLLPWVFAWATAACVLMSVLYSVPPARLKSRAGWDILINMLGYGLLTPLAGWGATGEQLAPWFWMICIGFGFLFGSLYPATQIYQAEEDGARGDTTFVIALGVPKSLIAAFLLAVAAHAMFYWAAVERGLCFPHLLVPLLSLIPWAAVFVQWLVKWRGLTGGQHEKRMYWLLVCWAVTEVALLWMFWPKA

SEQ ID NO: 44597 - DNA, 636 bp, Unknown
  Obtained from environmental sample
  misc_feature (1)..(636): n is a, c, g, or t
atgctgacgccgaccgttgccacgccctttccgctgcgctggggcttctccacgcgcagcagcgaccaggcggaactgccagagaggacgctggcgcaggtgcatggttgtgtcatctgggaagcatcagacaccctgcgggaaggggacgggcactggacgcaggagcctgggcggcgcataggcgtcagggtggccgactgcgtccccatactgctggcagggcttgtcgcgggaaaaccatgggtggccgcgctccacgctggctggcgcggggcagtccaaggcatactgcggcgcggcgtcgaaacattcatggaaatgggcggcgcgaccgacggcctctgctacgcctttggtccatgcatccaagcctgccactttgaagtgggtctggaagtcatcgaggccgcaaaacgcgacgccgcctggcgggaagacttggtcacgatgggtctaaacggaagaccccacctggacttgcacggactgttgcgggcgcaagctttggacatgggattggacccagagaaggacggctccataagatgctgcacactctgcgagagggacacgttctactcgcaccgtggcggcgacagcgggagacagtgggggtgggtggagattgtttga

SEQ ID NO: 44598 - protein, 211 aa, Unknown
  Obtained from environmental sample
  DOMAIN (3)...(209): Uncharacterised ACR, YfiH family COG1496
  misc_feature (1)..(211): Xaa is any amino acid
MLTPTVATPFPLRWGFSTRSSDQAELPERTLAQVHGCVIWEASDTLREGDGHWTQEPGRRIGVRVADCVPILLAGLVAGKPWVAALHAGWRGAVQGILRRGVETFMEMGGATDGLCYAFGPCIQACHFEVGLEVIEAAKRDAAWREDLVTMGLNGRPHLDLHGLLRAQALDMGLDPEKDGSIRCCTLCERDTFYSHRGGDSGRQWGWVEIV

SEQ ID NO: 44599 - DNA, 516 bp, Unknown
  Obtained from environmental sample
  misc_feature (1)..(516): n is a, c, g, or t
gtgtgcgttcaatccggtacgccgggtatcgccattggcgggctttccgtgggagaacctgctggactttttatcgaaacgttggcgtatacaatacaggagcttcctgaggataaacctcgctatgttatgggtatcgggacgcnccagtacattttatccgctattgagcagggaattgacatgtttgactgcgttcttcttacaagagaagcgcgaaacggcaggatatacacgcataaagggccttttgcgcttaaaaagtgcgaaaacgcccttgattttacgccgatagataaggagtgcggatgtaaagtttgcagggagtattcccgcgcttatttgcgccacctttttaagacaaaggagattctttgttccatgctggcaagttaccataatttgtattttatcaataaacttgttgaaaacagccgtaacgcaataaaggaaggaaggtttttacagtataagaaggaatttttgtccgcctacatggaggaaaggaatgattaa

SEQ ID NO: 44600 - protein, 171 aa, Unknown
  Obtained from environmental sample
  DOMAIN (1)...(163): Queuine tRNA-ribosyltransferase
  misc_feature (1)..(171): Xaa is any amino acid
MCVQSGTPGIAIGGLSVGEPAGLFIETLAYTIQELPEDKPRYVMGIGTXQYILSAIEQGIDMFDCVLLTREARNGRIYTHKGPFALKKCENALDFTPIDKECGCKVCREYSRAYLRHLFKTKEILCSMLASYHNLYFINKLVENSRNAIKEGRFLQYKKEFLSAYMEERND

SEQ ID NO: 44601 - DNA, 669 bp, Unknown
  Obtained from environmental sample
  misc_feature (1)..(669): n is a, c, g, or t
atgaaactattcgaaccattaatgctaaaatttgaagacgggaattgggccggcgatcctgaattgggcctgatggatacaatacttgaacaaaatcccaagctcataaaaatgctggaaagcgacatcacgcaagggaaaccgggctcaaccttcgggaggcaggatacgccaagcgtggaacaaatagtgagggcggcgatctataaggagatgaaaaatcttgattacagggcattggaatacgcgcaggaagattccaggatatgcgagaagtttgtaaaaataaacccgctgaggccgtatagctttcaagcatggcaaaaatacataagccggataagcgaagaaaaattagaaaagttcatgatagcgatgaacaagatagcgataggggaaggcctggaagacatgcaggaatttcggcaggacactacggtaatagagacggacatccattacccgacgaacaacagccttgtatgggactgcataaaagaatgcgaaaggctattaaggcgccttaaggaagagatagaaactcttgattatgaggaataccggaggaaggcgaagaaggtttattttaaaataaacgtggagaaagacgaagaaaaacngggtaaaacntgttcaaaaagcagcttgaaatgttcgcaaactgcataa

SEQ ID NO: 44602 - protein, 222 aa, Unknown
  Obtained from environmental sample
  misc_feature (1)..(222): Xaa is any amino acid
MKLFEPLMLKFEDGNWAGDPELGLMDTILEQNPKLIKMLESDITQGKPGSTFGRQDTPSVEQIVRAAIYKEMKNLDYRALEYAQEDSRICEKFVKINPLRPYSFQAWQKYISRISEEKLEKFMIAMNKIAIGEGLEDMQEFRQDTTVIETDIHYPTNNSLVWDCIKECERLLRRLKEEIETLDYEEYRRKAKKVYFKINVEKDEEKXGKTCSKSSLKCSQTA

SEQ ID NO: 44603 - DNA, 663 bp, Unknown
  Obtained from environmental sample
  misc_feature (1)..(663): n is a, c, g, or t
gtgacaggttttgcccttgatgaaatggtactccgcaaatatggaagaacttgggattcagctccagtaccgcacgtcaaacctaaggatttttaccacgacgcttttgacgttttcagaaaaaaagcggtttccagtgaacgccttgcccctgaagacgtagcgggcagtgatgaaaaattactccaggcgctgaaattggtagacggcaaatatctcttgaaagccgctcttctcctgtttcaccaggatcctgagcagtggtgtctgggttcttatgttaaaatcggctactttaagaatgacgtcgatttaatgtatcaggatgagatcaacggtccgcttatcagtattgcagatcgcataatagacacaatttacaccaagtattttaagggtttgatccattatgaaggtctccagagggtagacaaatttcctatgccacgcgaagttctgcgagaagcggttctgaacgcagttatacatagagattacagtacaggaaacccgattcacataaaaatttatgacgataaagtcatcgtttataatgatttcctgcttcctcccaatacaaccacaaaaaaccctgctaaaaaagttggttccaggccgcataatccgctaattgcgaatggattttttcgtcaggacaaatga

SEQ ID NO: 44604 - protein, 220 aa, Unknown
  Obtained from environmental sample
  misc_feature (1)..(220): Xaa is any amino acid
MTGFALDEMVLRKYGRTWDSAPVPHVKPKDFYHDAFDVFRKKAVSSERLAPEDVAGSDEKLLQALKLVDGKYLLKAALLLFHQDPEQWCLGSYVKIGYFKNDVDLMYQDEINGPLISIADRIIDTIYTKYFKGLIHYEGLQRVDKFPMPREVLREAVLNAVIHRDYSTGNPIHIKIYDDKVIVYNDFLLPPNTTTKNPAKKVGSRPHNPLIANGFFRQDK

SEQ ID NO: 44605 - DNA, 1206 bp, Unknown
  Obtained from environmental sample
  misc_feature (1)..(1206): n is a, c, g, or t
atgaaaaaattgaaaagcttttttttccttatacctgtaattatcattttttcctgcgcaagacaggagcctgtagtaaaagaaacagaaactcagcttccgatagtggaacaggagttaccaacccaggtagtaatagcaccgcctgaggatgattatttttccatcgaagatgattatttaacaatcatcgcggtaggagacaacctgtaccacgcgccgatgatgagattgggggaagatggcgactacgaaaccgcctacctggagattcgttcccttgccaaaaacgcggacattgcctttataaatcaggaaacgcttttggcgggcagtaaatttggattttcagattatcctatctttaatacccctcaaagtgtggggcgggctattgaaaaaacaggctttaatgtggtaaatcacgcgactaaccatataatggacaaaggggaagacgcggttttcgcgacattggatttttgggacgattttccggaggtaaccgtccttggtatccaccgttccgaagaaaagcggaaacttcctgttctgttgaaaaaaaacaatataaccgtggggtttctttcttacacatacggtacaaacggcattcgggttcctgcggataaacctttcttaatctcgctcatcaataccgagataatggcaagggaaattgacgccatccgccccctgtgcgattttcttgtggtttccatgcactggggggatgagtaccagctcgactataacagaagccaaaaaaaccttgccgttctgctagctgaacacgccgtggatctggttataggtcatcatccccatgtaattcagaaaatcgaaaacataccaaggccggacgggaagaatatgctctgtttttattcccttggaaattttatctcggctatgaatgaaagcgaaaatatgctgcttggcgcgatggcgttcgtaaggctaaaaaaaaccgcctcggaggggacagtctctattgtagaatacggcgcaatcccgatggttacccattatgataaaagttattcgggtttcaaagtctatccgctgtacgcctataccgaagaacttgcgaaaaagcactggaaaatcaatctgacgacggattacttcaaaagcctgtcgtcaaagatctttggagacagggtgatgcttgaggatcctttcctgacaatgccacaacattag

SEQ ID NO: 44606 - protein, 401 aa, Unknown
  Obtained from environmental sample
  SIGNAL (1)...(21)
  misc_feature (1)..(401): Xaa is any amino acid
MKKLKSFFFLIPVIIIFSCARQEPVVKETETQLPIVEQELPTQVVIAPPEDDYFSIEDDYLTIIAVGDNLYHAPMMRLGEDGDYETAYLEIRSLAKNADIAFINQETLLAGSKFGFSDYPIFNTPQSVGRAIEKTGFNVVNHATNHIMDKGEDAVFATLDFWDDFPEVTVLGIHRSEEKRKLPVLLKKNNITVGFLSYTYGTNGIRVPADKPFLISLINTEIMAREIDAIRPLCDFLVVSMHWGDEYQLDYNRSQKNLAVLLAEHAVDLVIGHHPHVIQKIENIPRPDGKNMLCFYSLGNFISAMNESENMLLGAMAFVRLKKTASEGTVSIVEYGAIPMVTHYDKSYSGFKVYPLYAYTEELAKKHWKINLTTDYFKSLSSKIFGDRVMLEDPFLTMPQH

SEQ ID NO: 44607 - DNA, 1596 bp, Unknown
  Obtained from environmental sample
  misc_feature (1)..(1596): n is a, c, g, or t
ttgggttttattgaagaagaatttaaaaggcctctcatcgggattgcctgcgcaaagagcgagatagtgccgggtcatctgcacttggacaacattgctcgtgcggttgcggacggtgttcgcatggcgggcggagcgcctgttgtctttccagtaatcggagtttgcgacggaattgcgatgggtcacgagggaatgagatactccctgccgacaagggaacttatcgccgactctgttgagtgtatggcgaccgctcacgcctttgacgcccttgtcttaatcccaaattgcgacaagatagtgcctggtatgctgatggcgtcggcccggcttaaccttccttccgtttttgtttcaggcggtccgatgcttgccgggcgcaaggacgggaaaccgttaacgcttaccacaatgtttgaggcggtaggcgctctcgctgcgggaaagctcagcgaggcagagcttgaagaacttgaaaatctttcttgcccgggctgcggttcctgcgcgggaatgtttacggcgaactcgatgaactgcgtaaccgaagcgcttggtatggctctgcctggcaatggtactattccagccgtcatggctgagcgtattcgtctcgcaaagaaaacaggaatgttgatcatggacgttcttaaaaaaaatctgcgtccaaaaaatatacttactcaagcggcgtttatgaacgcccttgctctcgacatggcgctgggctgttccacaaatacagcgcttcatcttccggcggtagcgggggaggccggtgttaaactcgatctggaacttcttaacaaggtaagcgctgtaactcccaacctttgcagacttgctcccgcgggaaaggacgcgattgaagacttgcacacggccggcggaattccggctgtcttaaaggagctttccaaaaagaaccttgtcgatctcaaagccgcgactgtgtacggctgtctcggcgacgcattaaacaaggcggagaaccgtaatccagatgtcataaggccgctggaaaatccctattcggcgacaggcgggcttgccgcgttaaagggtaacatcgcgcaggatggctgtgtcgtaaagcgcagcgctgtagctccttccatgttaaagcatgaaggccctgccagagttttcgattccgaggaatcagcttttgacgccataatggtaaagaagattaacgcgggagatgtcatcgttatccgttacgagggaccgaggggcggacccggtatgaaagagatgcttgctccaactgcggcgcttgccggtatgggtcttgacgacaaagtcgctttgattacggacgggcgtttttcaggcgcatccaagggcgcgtctatcggacacgtatcgcctgaggccgcgttgggcggaaacataggcatcatcaacgaaggagacataatcgcgattgacattgacggactttcgataaatgtgaagattaacgaagaagaaatcgcgcggcggaaaaagaattggaagcctctttccaaaacacacataggctaccttgcccgttatgccgcgcaagtaggctcggccgcgcagggcgcggttttacagagccgctaa

SEQ ID NO: 44608 - protein, 531 aa, Unknown
  Obtained from environmental sample
  DOMAIN (10)...(529): Dehydratase family
  misc_feature (1)..(531): Xaa is any amino acid
MGFIEEEFKRPLIGIACAKSEIVPGHLHLDNIARAVADGVRMAGGAPVVFPVIGVCDGIAMGHEGMRYSLPTRELIADSVECMATAHAFDALVLIPNCDKIVPGMLMASARLNLPSVFVSGGPMLAGRKDGKPLTLTTMFEAVGALAAGKLSEAELEELENLSCPGCGSCAGMFTANSMNCVTEALGMALPGNGTIPAVMAERIRLAKKTGMLIMDVLKKNLRPKNILTQAAFMNALALDMALGCSTNTALHLPAVAGEAGVKLDLELLNKVSAVTPNLCRLAPAGKDAIEDLHTAGGIPAVLKELSKKNLVDLKAATVYGCLGDALNKAENRNPDVIRPLENPYSATGGLAALKGNIAQDGCVVKRSAVAPSMLKHEGPARVFDSEESAFDAIMVKKINAGDVIVIRYEGPRGGPGMKEMLAPTAALAGMGLDDKVALITDGRFSGASKGASIGHVSPEAALGGNIGIINEGDIIAIDIDGLSINVKINEEEIARRKKNWKPLSKTHIGYLARYAAQVGSAAQGAVLQSR

SEQ ID NO: 44609 - DNA, 303 bp, Unknown
  Obtained from environmental sample
  misc_feature (1)..(303): n is a, c, g, or t
atgtgtgttttggaaagaggcttccaattctttttccgccgcgcgatttcttcttcgttaatcttcacatttatcgaaagtccgtcaatgtcaatcgcgattatgtctccttcgttgatgatgcctatgtttccgcccaacgcggcctcaggcgatacgtgtccgatagacgcgcccttggatgcgcctgaaaaacgcccgtccgtaatcaaagcgactttgtcgtcaagacccataccggcaagcgccgcagttggagcaagcatctctttcataccgggtccgcccctcggtccctcgtaa

SEQ ID NO: 44610 - protein, 100 aa, Unknown
  Obtained from environmental sample
  misc_feature (1)..(100): Xaa is any amino acid
MCVLERGFQFFFRRAISSSLIFTFIESPSMSIAIMSPSLMMPMFPPNAASGDTCPIDAPLDAPEKRPSVIKATLSSRPIPASAAVGASISFIPGPPLGPS

SEQ ID NO: 44611 - DNA, 345 bp, Unknown
  Obtained from environmental sample
  misc_feature (1)..(345): n is a, c, g, or t
atggccagggcgctgaagacgataaagatcaatcctaagatcaaaatcgaggagaaggacggcgtcagtttcgccgtttcatgccggcactgcaatgagcctttgtgcgtcaagggctgcatcaccggggcgctgaccatatcggccgacggcgtcatcacgataaaccatgaccgttgcgtgagctgcttcacctgcattctgagctgcccttacggcgcggtctccccttccgacgacggcgcggtgcagaagtgcgagctgtgcgtcaaaacggccaagggccagcccgcttgcgtctccgggtgtcccaacggcgcgattgtctttgaggagagagggtga

SEQ ID NO: 44612 - protein, 114 aa, Unknown
  Obtained from environmental sample
  DOMAIN (53)...(76): 4Fe-4S binding domain
  misc_feature (1)..(114): Xaa is any amino acid
MARALKTIKINPKIKIEEKDGVSFAVSCRHCNEPLCVKGCITGALTISADGVITINHDRCVSCFTCILSCPYGAVSPSDDGAVQKCELCVKTAKGQPACVSGCPNGAIVFEERG

SEQ ID NO: 44613 - DNA, 1254 bp, Unknown
  Obtained from environmental sample
  misc_feature (1)..(1254): n is a, c, g, or t
ttgtctttgaggagagagggtgataatatgaaatacgtcataataggaaattcggcggcgggaatcggcgcggtggagggcatacggcaggtcgataagaacggcgaaatcaccatcgtcacgaacgaaccgcaccacacgtactcccgcccgctcatatcgtacctgcttctcggcaaggtcacggaagagaagatgaagtaccgcaacgacggtttttactcggagaacggcgtcaatatgatgcacgccgtcgccgccggcatcgataccggcaaacagcaggtgattctgtcggacgacaagcgggtgccttacaacaagctcttggtcgccacgggatcgcaacctttcgtgccgccgttcgaggggctggactccgtcacgaacaaggttacgtttatgagcctagacgacgctcggaaattggacggcatgatcgacgcgaacaagcgcgtattgatcgtaggcgctggccttataggtttgaagtgcgcggaggggatttcgggcagggtcgcgcttatcacggtgattgatctcgctccgagaatcctgtcaagcattctcgatgacgacggggcggctatggttcagagccatctcgaaagccgcggggttaagttcaggctctccgcgagcacgaagaagtttgaggggaacaccgccgtccttgacaacggcgacagaatcgatttcgacgttctcgtccttgccgtcggcgtgcgccccaatacggcgattctaaaggacatagcgcaaatagaccgcgggatagtcgtgaacgaaaagtctcaaacgaccgcggcggacatctacgccgccggcgactgcacgcagacgaccgatgcgtccagcggtcagagcaagataatggcgctgctgcccaacgcctacatgcagggagagtgcgccggaatcaacatggcgggcggcgaggcggcgtttaacaaggcgatcccgatgaacgcgatagggttcttcggcctgcacatcgtaacggccggcaactataccggagacgtctattccggcggcggtaaaggcgattacaagaagttgttttacagcgataataaactgaacggctacatcctcataggcaatgtcgagaaggcgggaatatacacgagtttgattcgtgagcgcacgccgctcgactccatagacttcgcgcttgtctgcgagaagccggggcttatggcgttcactaaggaagatagaaagattaaactgggaggcgttgcgtcatga

SEQ ID NO: 44614 - protein, 417 aa, Unknown
  Obtained from environmental sample
  DOMAIN (152)...(241): Pyridine nucleotide-disulphide oxidoreductase
  misc_feature (1)..(417): Xaa is any amino acid
MSLRREGDNMKYVIIGNSAAGIGAVEGIRQVDKNGEITIVTNEPHHTYSRPLISYLLLGKVTEEKMKYRNDGFYSENGVNMMHAVAAGIDTGKQQVILSDDKRVPYNKLLVATGSQPFVPPFEGLDSVTNKVTFMSLDDARKLDGMIDANKRVLIVGAGLIGLKCAEGISGRVALITVIDLAPRILSSILDDDGAAMVQSHLESRGVKFRLSASTKKFEGNTAVLDNGDRIDFDVLVLAVGVRPNTAILKDIAQIDRGIVVNEKSQTTAADIYAAGDCTQTTDASSGQSKIMALLPNAYMQGECAGINMAGGEAAFNKAIPMNAIGFFGLHIVTAGNYTGDVYSGGGKGDYKKLFYSDNKLNGYILIGNVEKAGIYTSLIRERTPLDSIDFALVCEKPGLMAFTKEDRKIKLGGVAS

SEQ ID NO: 44615 - DNA, 726 bp, Unknown
  Obtained from environmental sample
  misc_feature (1)..(726): n is a, c, g, or t
atgagcgtattgaacatatcggcgctggagctagactttaaagagttgaataggcaggtaagggcggccaagggcgacgtgcgcatagacgagtgctacggccagcggtttataggcagcgcgctgtccggccgtacaatcaccataaacggaacgcccggcaacgcgctcggcgcctatcttgacggcggcgtgatagaggtaaacggcaacgcgcaagacgccgccggcgacacgatgaacgacggcaaaatcatcgtacgcggcaacgccggagacgcgctgggctacgctatgcgcggcggcaaaatccttgtcaagggcaacgccggatacagaaccggcatacacatgaaagagtacaaggacaagaagcctgtaatcgtaataggcggcagggtgggcagctttttgggcgaatacctcgccggcgggcttatagtggtactgggcatagactgcgaagccgttccggtcggcaatttcacgggaaccggtatgcacggggggaaaattttcatcaggacaaacaaagagctgtcgaacctgccggagcaggtcgcggcggagaaggcctccggcgagaacttgaaggagatagagccatacgtctcggaattcgccgaccacttcggcgtaagcgcggcgtcgcttttgaaagacaagttctatatgcttaggccgaacgcgaagaatccgtataaacagctgtacacggcgaattag

SEQ ID NO: 44616 - protein, 241 aa, Unknown
  Obtained from environmental sample
  DOMAIN (14)...(213): GXGXG motif
  misc_feature (1)..(241): Xaa is any amino acid
MSVLNISALELDFKELNRQVRAAKGDVRIDECYGQRFIGSALSGRTITINGTPGNALGAYLDGGVIEVNGNAQDAAGDTMNDGKIIVRGNAGDALGYAMRGGKILVKGNAGYRTGIHMKEYKDKKPVIVIGGRVGSFLGEYLAGGLIVVLGIDCEAVPVGNFTGTGMHGGKIFIRTNKELSNLPEQVAAEKASGENLKEIEPYVSEFADHFGVSAASLLKDKFYMLRPNAKNPYKQLYTAN

SEQ ID NO: 44617 - DNA, 378 bp, Unknown
  Obtained from environmental sample
  misc_feature (1)..(378): n is a, c, g, or t
ttgtctttcaaaagcgacgccgcgcttacgccgaagtggtcggcgaattccgagacgtatggctctatctccttcaagttctcgccggaggccttctccgccgcgacctgctccggcaggttcgacagctctttgtttgtcctgatgaaaattttccccccgtgcataccggttcccgtgaaattgccgaccggaacggcttcgcagtctatgcccagtaccactataagcccgccggcgaggtattcgcccaaaaagctgcccaccctgccgcctattacgattacaggcttcttgtccttgtactctttcatgtgtatgccggttctgtatccggcgttgcccttgacaaggattttgccgccgcgcatagcgtag

SEQ ID NO: 44618 - protein, 125 aa, Unknown
  Obtained from environmental sample
  misc_feature (1)..(125): Xaa is any amino acid
MSFKSDAALTPKWSANSETYGSISFKFSPEAFSAATCSGRFDSSLFVLMKIFPPCIPVPVKLPTGTASQSMPSTTISPPARYSPKKLPTLPPITITGFLSLYSFMCMPVLYPALPLTRILPPRIA

SEQ ID NO: 44619 - DNA, 1122 bp, Unknown
  Obtained from environmental sample
  misc_feature (1)..(1122): n is a, c, g, or t
atgaaacgttgtacggctattttcgttacggtcgctacggcagttctctttctttcgagttgcaagcaatccggttcctcgtcttcaagcggcgcgctgataggcatcgcgatgccggagacgcaggttacgcattgggtaaaagacggagccacgctaaaggcggaggcggagaagcgcgggtaccgtgcggaggttcagttcgcggacgccgaccaagccatacagaatcggcagattcagaccttgctcggattggacgccaagatgctaatcgtcggtagcgtaagcgcggaggtcgcccccgcgatcgccgaaacggcgaaaaagaatgtttcggttatcgcattcgacaggctgatccaaaactcggcggactacgactacttcatcactttcaacggcgacaagatcggggagttgcaggggcggagcctcgcggaggcgctcggacttgaaaacgccgatccaaaagcgccaaagagcgtcgccttgttcgccggttcgataaccgacgcaaacgccttctctttctacgacggcgctatgggcgttctcaacccgtatatagagaaaggcgttcttaaagtagtagggccgtaccccaagacctcagccgacaaagaggttttcgagaagatcgccaccggttggcagagttcaaccgccaaggaacttatgagcgccctcctgaaaaacgaggcgaagaacctgacattggacgccgtgctctcccccaacgacaacatagcccgcgccataatagaggtctgccggactgacgcgaaatacaagaacaaactgccgttaatcaccggtctggacggggagttcgagtcaatgatgctcgtgaagagcggggatcagctctgcaccgtattcaaaaacaccacgcagctctccgaagcggcgatcatcctcgccgatcaaatactgaaagggcaaacgccggacatccccggcgcgtacttggccgaggggccgcaagcgaagctgggggatacggggaaaaaaaccgtgaagacgtatttgatagacccgatcttgataactaaagagaatataaacattccggtcgacgctgggttctatacggcttcggagagcgaagctttgaaatag

SEQ ID NO: 44620 - protein, 373 aa, Unknown
  Obtained from environmental sample
  SIGNAL (1)...(24)
  misc_feature (1)..(373): Xaa is any amino acid
MKRCTAIFVTVATAVLFLSSCKQSGSSSSSGALIGIAMPETQVTHWVKDGATLKAEAEKRGYRAEVQFADADQAIQNRQIQTLLGLDAKMLIVGSVSAEVAPAIAETAKKNVSVIAFDRLIQNSADYDYFITFNGDKIGELQGRSLAEALGLENADPKAPKSVALFAGSITDANAFSFYDGAMGVLNPYIEKGVLKVVGPYPKTSADKEVFEKIATGWQSSTAKELMSALLKNEAKNLTLDAVLSPNDNIARAIIEVCRTDAKYKNKLPLITGLDGEFESMMLVKSGDQLCTVFKNTTQLSEAAIILADQILKGQTPDIPGAYLAEGPQAKLGDTGKKTVKTYLIDPILITKENINIPVDAGFYTASESEALK

SEQ ID NO: 44621 - DNA, 651 bp, Unknown
  Obtained from environmental sample
  misc_feature (1)..(651): n is a, c, g, or t
gtgacgataaagtccccgtcgtttgagcgcggcgcgcccattccgcctatcgtgcccgccatagcaaaatatatagtaccgactgttccgacgccgtccgcgttgacgacggacccggcggtaccgctatcaacgccgcccgtatcgtcagtatccgcgccgcccgtatcaacgcagcccgcaacggcggcgccgccgccgatcgtggttatgcccatagacaccgccaccgccaagccggccaagatcaaccccttggtcaaacccgaccccgaccccaccttcaacgccgacgtctacgacctcggcatgaccgtggcccccggcggctccagcgtccgcgtccgcgtatcggtagacgagtccatcggacgcttcgccgagtggatgcgtgtcaacatcagcgatatacgcaccgccaacaacatggctgagaacgaggctctgcagcttggggcgttcatatctattcccataaaatcatcaacaaacataaaacgcttcgaggtcaaccgcctgcagtaccacttggcgatagaggaggacttcttcgcgaacttcaacgttattgactttgagaagcgtacggtcaagcccggcatcaacctatggaagatatgccgtgaggcgcagattcccatgtggctttga

SEQ ID NO: 44622 - protein, 216 aa, Unknown
  Obtained from environmental sample
  misc_feature (1)..(216): Xaa is any amino acid
MTIKSPSFERGAPIPPIVPAIAKYIVPTVPTPSALTTDPAVPLSTPPVSSVSAPPVSTQPATAAPPPIVVMPIDTATAKPAKINPLVKPDPDPTFNADVYDLGMTVAPGGSSVRVRVSVDESIGRFAEWMRVNISDIRTANNMAENEALQLGAFISIPIKSSTNIKRFEVNRLQYHLAIEEDFFANFNVIDFEKRTVKPGINLWKICREAQIPMWL

SEQ ID NO: 44623 - DNA, 324 bp, Unknown
  Obtained from environmental sample
  misc_feature (1)..(324): n is a, c, g, or t
ttggatatacgcagtttttctgtttctgatctttttaaaaaatataggcacgaatattcaggcgccgaccttgaagctgtccttgtgcgcgcaaaactgcttgccgctatggatgagcgcgtttttgtaaagcgcgaagacatggaagaggcaatgaacgactttgttcccgcggcatatcctcacgaagtggaactgcaaaaccttgtggctgttttggaatgtacttccaaggaaatgatacctaaggagtttcagaaacttccccgcactaaaattatcagcgacattcaggaattaaaagcgctgcttggagagaggtaa

SEQ ID NO: 44624 - protein, 107 aa, Unknown
  Obtained from environmental sample
  misc_feature (1)..(107): Xaa is any amino acid
MDIRSFSVSDLFKKYRHEYSGADLEAVLVRAKLLAAMDERVFVKREDMEEAMNDFVPAAYPHEVELQNLVAVLECTSKEMIPKEFQKLPRTKIISDIQELKALLGER

SEQ ID NO: 44625 - DNA, 771 bp, Unknown
  Obtained from environmental sample
  misc_feature (1)..(771): n is a, c, g, or t
atgacggaaaaacttcaggcgcaaaagcttgatttatggtacaaaaaaatctgcactcaggtttttatcaaagacgatcctgttcagtttccgcgccgtttcaaaaagaaagaagatattgaaattgccgcctttcttacggctacaatagcgtggggaaggcgcgatatgattctgcgttcctccgagcgcctgtttgcgataatggggaaaagtcctttttcctacataacttctcaagaatataaaaatttaaaaaacaaaaacatacaccgcactttttttgaaaacgatcttaaatatttttgcagaggctttgatcactgttacgcaaaatacggaaatctcgaaaaactgttcgcgggcaggaaaaacacatgggaaggcattgcgctgttccgcgaagagatggcaaaaggaaacaaggggcagtattcaaaacacatttccaatcccggcaaggcggacgaggaaacgagagagaaagaaagcaacggctccgcgtgcaagcggcttaatcttgccctgcgctggctggtgcgcaaggggccggtggatttaggcttgtggaaaaacattaagcccgcgtccctttttattccgctggacgtgcatgtcgcgcggacggcgcggaaacttgggcttttagaacgtaagtccaacgacaagagagcggttattgagttgacggaaagattaagaggattttgcgcggatgatcctgtcaaatatgacttcgcgcttttcggcatgggcgtggagagtaaataa

SEQ ID NO: 44626 - protein, 256 aa, Unknown
  Obtained from environmental sample
  misc_feature (1)..(256): Xaa is any amino acid
MTEKLQAQKLDLWYKKICTQVFIKDDPVQFPRRFKKKEDIEIAAFLTATIAWGRRDMILRSSERLFAIMGKSPFSYITSQEYKNLKNKNIHRTFFENDLKYFCRGFDHCYAKYGNLEKLFAGRKNTWEGIALFREEMAKGNKGQYSKHISNPGKADEETREKESNGSACKRLNLALRWLVRKGPVDLGLWKNIKPASLFIPLDVHVARTARKLGLLERKSNDKRAVIELTERLRGFCADDPVKYDFALFGMGVESK

SEQ ID NO: 44627 - DNA, 1122 bp, Unknown
  Obtained from environmental sample
  misc_feature (1)..(1122): n is a, c, g, or t
gtgaaagcgcttattgaaaagcacggcgtatctggtttgcccgtagtaagcggcagcgggcagcttaaagggataattaccagccgtgatttacgtttttgccgtgatgacgcgctgccggtcatcgaagtaatgaccaaagacccaattgtagtgcagggagagccttccgttgacgaggcgcggaaaaaatttgacaagcaccgtattgaaaaattgccgatagtggacggtgaaggccgcctgaccggactcattaccgtaacagatatgggaaaacatcaaagccatccttatgcggcaactgacaaatcaggccggctgattgtaggggcggcggtgtctccgcaggattatgcggttcggctgcccctgttaaaagaagcgcgggtagactttgtagtgctggatacagctcacggcgattcaaaaaatgtcatggaagcggttacaagtattaaaaaagaatttaacatccccgtgattggtggaaatgttgcgtcaaaagagggaacccgccgcctgattgacgcgggcgctgacgcggtaaaagtcggcatcggccccggttcaatctgcaccacgcggattgtcgcgggcattggcgtaccgcagtttaccgcggtattggactgcgccgaagaagcggcaaagtcgggtatccccgttattgccgacggcggcataaaattttccggcgatattaccaaggccataggcgccggggccagcgtagtgatgatcggcaatctttttgccggactcaaggaagcgccgggcagggaaattatttttgacggaagaatttacaaggaataccgcggtatgggcagtatgggcgccattgcggacggcgcgggcgaccgttaccaaatcggcaaagacgaagaacccgtacctgagggcatcgaagggcgcgtaccttacaagggcgagcttcgcacctacttaaaccagcttgtagccggattgcgcaaaggcatgggctactgcggctgcaaaagcataccggagcttaataaatacagaaggtttgtaaagattaccgccgccggccttcgcgaaagccatccgcacgacattacaatcacgcaggaagcgcccaattattcgccgtcctga

SEQ ID NO: 44628 - protein, 373 aa, Unknown
  Obtained from environmental sample
  DOMAIN (1)...(96): CBS domain pair
  misc_feature (1)..(373): Xaa is any amino acid
MKALIEKHGVSGLPVVSGSGQLKGIITSRDLRFCRDDALPVIEVMTKDPIVVQGEPSVDEARKKFDKHRIEKLPIVDGEGRLTGLITVTDMGKHQSHPYAATDKSGRLIVGAAVSPQDYAVRLPLLKEARVDFVVLDTAHGDSKNVMEAVTSIKKEFNIPVIGGNVASKEGTRRLIDAGADAVKVGIGPGSICTTRIVAGIGVPQFTAVLDCAEEAAKSGIPVIADGGIKFSGDITKAIGAGASVVMIGNLFAGLKEAPGREIIFDGRIYKEYRGMGSMGAIADGAGDRYQIGKDEEPVPEGIEGRVPYKGELRTYLNQLVAGLRKGMGYCGCKSIPELNKYRRFVKITAAGLRESHPHDITITQEAPNYSPS

SEQ ID NO: 44629 - DNA, 351 bp, Unknown
  Obtained from environmental sample
  misc_feature (1)..(351): n is a, c, g, or t
ttgagtccggcaaaaagattgccgatcatcactacgctggccccggcgcctatggccttggtaatatcgccggaaaattttatgccgccgtcggcaataacggggatacccgactttgccgcttcttcggcgcagtccaataccgcggtaaactgcggtacgccaatgcccgcgacaatccgcgtggtgcagattgaaccggggccgatgccgacttttaccgcgtcagcgcccgcgtcaatcaggcggcgggttccctcttttgacgcaacatttccaccaatcacggggatgttaaattcttttttaatacttgtaaccgcttccatgacattttttgaatcgccgtga

SEQ ID NO: 44630 - protein, 116 aa, Unknown
  Obtained from environmental sample
  SIGNAL (1)...(21)
  misc_feature (1)..(116): Xaa is any amino acid
MSPAKRLPIITTLAPAPMALVISPENFMPPSAITGIPDFAASSAQSNTAVNCGTPMPATIRVVQIEPGPMPTFTASAPASIRRRVPSFDATFPPITGMLNSFLILVTASMTFFESP

SEQ ID NO: 44631 - DNA, 864 bp, Unknown
  Obtained from environmental sample
  misc_feature (1)..(864): n is a, c, g, or t
gtggcgggtttctggcaggataaggaagtccgccgccgcatggacgtgtggatgagggccgccgcggcgagaaaagacggaatggattctaccgttatgcgatttggagacaatatgcgggaagtggctgtaaccgaaggcgacaaggtagaagctcaaatcaggtttggctggcaggtgaacacatggggaatcggcgaccttgccgcccgttacgcgaaaatcagcggggagcgggcgggaaaacttgcggaagaatacgcagcgggctatgagcttgcgccggaacttaaacaggacggcaaggcaagaaccgcgatgcttgaacaggcaaaaatcgagattgcccttaaagaaatgcttgaagcggaacacgccggggcttttaccacaactttccaggaccttcacggcctgccccaacttccgggccttgcctgtcagaggctcatggaacagggctacggcttcggcgcggaaggagactggaaacagtccatgctgacaagagccgccaaagttatggcttcgggactgcccggcggcgtttcctttatggaagattacacctaccactttgagccgggcaaagaagccgctctgggcgcccacatgcttgaggtatgcccttccatcgcggacggcaaaccgcgcatagaggttcacccgctgggaatcggcggcaaggcggatccggcgcgtatggtgtttgacgccgccccgggtcccgcggtgctggcgacgctcattgatcttggcagccgtttcagaatgatcgttaatgaaattgagactgttaaaattgaaatgccatgcctaagctgcccgttgccagagccctctggaaaccgtatccgagtttaa

SEQ ID NO: 44632 - protein, 287 aa, Unknown
  Obtained from environmental sample
  DOMAIN (1)...(287): L-arabinose isomerase
  misc_feature (1)..(287): Xaa is any amino acid
MAGFWQDKEVRRRMDVWMRAAAARKDGMDSTVMRFGDNMREVAVTEGDKVEAQIRFGWQVNTWGIGDLAARYAKISGERAGKLAEEYAAGYELAPELKQDGKARTAMLEQAKIEIALKEMLEAEHAGAFTTTFQDLHGLPQLPGLACQRLMEQGYGFGAEGDWKQSMLTRAAKVMASGLPGGVSFMEDYTYHFEPGKEAALGAHMLEVCPSIADGKPRIEVHPLGIGGKADPARMVFDAAPGPAVLATLIDLGSRFRMIVNEIETVKIEMPCLSCPLPEPSGNRIRV

SEQ ID NO: 44633 - DNA, 726 bp, Unknown
  Obtained from environmental sample
  misc_feature (1)..(726): n is a, c, g, or t
ttgttatgcgaaaacggattgagtatggatatatataaaacactgcgggaagaatcattcgaggctaaccttgaaataaaacggcggaatcttgccatttacacatggggcaacgcttccgcttttgattctgacaaaggagtatttgccataaaaccctccggcgtagcttatgatgagttaaagccggatttgatggtgctggtcgatttggacggcgcccttgtcgaaggcaggctcaaaccctcatcggatacaaaaacccatcaggtattataccgggaatttaaggatatacgaggcattacccatacccattcgccttacgccgtatcctgggcgcaggccggcaagccggtacctgttttcggcactacccacgccgatcactgcgcgagggagattccctgtacagaatacataagccccgaagcggttaaaaacaactacgagcttgagacggggaatcttattgcagaaaacttcagaaagggtaatttagaccccgcccaaataactatggttttgacagccggacacggcccctttacctggggcgcaagcgccgcgcaatcggtttaccacagcgttattttggaagagatctgtaaaatggctttatttaccctaatgattgatccaaaagcaaaacgtctgcctgagcatatcatcaggaaacactgggaacgcaagcatgggccaaacgcatattacggtcagaaataa

SEQ ID NO: 44634 - protein, 241 aa, Unknown
  Obtained from environmental sample
  DOMAIN (17)...(227): Class II Aldolase and Adducin N-terminal domain
  misc_feature (1)..(241): Xaa is any amino acid
MLCENGLSMDIYKTLREESFEANLEIKRRNLAIYTWGNASAFDSDKGVFAIKPSGVAYDELKPDLMVLVDLDGALVEGRLKPSSDTKTHQVLYREFKDIRGITHTHSPYAVSWAQAGKPVPVFGTTHADHCAREIPCTEYISPEAVKNNYELETGNLIAENFRKGNLDPAQITMVLTAGHGPFTWGASAAQSVYHSVILEEICKMALFTLMIDPKAKRLPEHIIRKHWERKHGPNAYYGQK

SEQ ID NO: 44635 - DNA, 489 bp, Unknown
  Obtained from environmental sample
  misc_feature (1)..(489): n is a, c, g, or t
ttgaataaattaaaccgtttattatttttattttctctttttttaatactggcgttgtcttcttgttcaaagctgggttacggcgttttactgtggtctattgacgaaccgccggttgattcaggcactgttctgcccgtttatatcaaatcaaatatcgaaaaaatatgggtagtgggaatacctgaaaaagccggaacatacaaggggaacaaaaaagaaattccgcttacccagcttgaatttatcggcagtaaacgaaaagccgaaaaatgggctgaaagtttttcgccgtacgctacgctctacgctgaaaatttacaggacgggcttccgatacgctcctccaccgataataattccaagcgcgtataccgtctgcgtcttggagaaattgtcaaagtcctgggcgtagcaaaaggcgttccccccataagcacaacgggcgatccccttaccccgcgaatggtacaaagtgctgacaaatga

SEQ ID NO: 44636 - protein, 162 aa, Unknown
  Obtained from environmental sample
  SIGNAL (1)...(26)
  misc_feature (1)..(162): Xaa is any amino acid
MNKLNRLLFLFSLFLILALSSCSKLGYGVLLWSIDEPPVDSGTVLPVYIKSNIEKIWVVGIPEKAGTYKGNKKEIPLTQLEFIGSKRKAEKWAESFSPYATLYAENLQDGLPIRSSTDNNSKRVYRLRLGEIVKVLGVAKGVPPISTTGDPLTPRMVQSADK

SEQ ID NO: 44637 - DNA, 1014 bp, Unknown
  Obtained from environmental sample
  misc_feature (1)..(1014): n is a, c, g, or t
atgcggcacgagggccagatagaggcggacccgccggatttggtgctcatggacatcatgatgcccaaaatgaacggcttcgaggtggtcaccgaactgaaatcccggccgcacctggccttgattcccatcgtcatggtcacggcgctccaggacataaacgaccggatcacggccctggaagtgggggccgacgacttcctggccaagccggtggaccgcatggaactccgggcccgggtgcgttcccttttgaaggtcaaggcctataatgaccacatggccaattaccggcgggagctggaacgggaagtggccgcccggaccgaggaactccggcgggtcaacgccaagctgcgcgacgcctccctcgagaccatcttccgcctggcccgggccgctgaatacaaggacgaggacaccggggcccacatcatcagcatgagccgcatctcggcctacctggccgagcgcctgggcctcaactccacggtggtcgagagcatactttacgcctcgcccatgcacgatatcggcaagatcggcattcccgaccgcattctctccaagaacggccccctggacgacgaggaatgggaaataatgcgcatgcaccccattttcggcggccagattctggagggctcggacatcggctttttgaacctgggcgaggtcatctccctgacccatcacgaaaaatgggatggttccggctatccccacggcctggccggagaccagatccccctggccggccgcatcacggccgtggccgacgtctttgacgccttgcgctccaagcgcccctacaagccgcccttgagcgtggagaagaccgtggacatcatccgggccggccggggcacccacttcgaccccctggtggtcgatgcgctccctcaatacctggacggcgtcttaaagctctgggaaaacgcccaggccagccacaccggcagcttgaccttgctgcaccatagccaccacaccctgggattcattcatgtctga

SEQ ID NO: 44638 - protein, 337 aa, Unknown
  Obtained from environmental sample
  DOMAIN (2)...(82): Response regulator receiver domain
  misc_feature (1)..(337): Xaa is any amino acid
MRHEGQIEADPPDLVLMDIMMPKMNGFEVVTELKSRPHLALIPIVMVTALQDINDRITALEVGADDFLAKPVDRMELRARVRSLLKVKAYNDHMANYRRELEREVAARTEELRRVNAKLRDASLETIFRLARAAEYKDEDTGAHIISMSRISAYLAERLGLNSTVVESILYASPMHDIGKIGIPDRILSKNGPLDDEEWEIMRMHPIFGGQILEGSDIGFLNLGEVISLTHHEKWDGSGYPHGLAGDQIPLAGRITAVADVFDALRSKRPYKPPLSVEKTVDIIRAGRGTHFDPLVVDALPQYLDGVLKLWENAQASHTGSLTLLHHSHHTLGFIHV

SEQ ID NO: 44639 - DNA, 324 bp, Unknown
  Obtained from environmental sample
  misc_feature (1)..(324): n is a, c, g, or t
atgaacagagtgatggtgtacgccgcggagataccgcttccggaatggatcaaatctctcaagctttttgttcttaaagttcttttgcttttgaaaaaggataaatgggatctttccattctgctctgcggcgacaagatgataaaagatctcaataagatatacaggggaaaagatgaagccacggatgttctctcatttccattggacgaaagcgcggattttccctctaaggagaaacgacattccaaccgtcatctgcccggagacgtagtcatctcgcttgacaccctgcgggaaaacagcgcgccgctttcaggttag

SEQ ID NO: 44640 - protein, 107 aa, Unknown
  Obtained from environmental sample
  DOMAIN (43)...(106): Uncharacterized protein family UPF0054
  misc_feature (1)..(107): Xaa is any amino acid
MNRVMVYAAEIPLPEWIKSLKLFVLKVLLLLKKDKWDLSILLCGDKMIKDLNKIYRGKDEATDVLSFPLDESADFPSKEKRHSNRHLPGDVVISLDTLRENSAPLSG

SEQ ID NO: 44641 - DNA, 417 bp, Unknown
  Obtained from environmental sample
  misc_feature (1)..(417): n is a, c, g, or t
ttgaagctgggcatagaaaaagccagaagcctaggtctgccggcggatgtcatagatattatcgccgaacaccacggcaactcccttataatgtggttttacaagaaagcctcccagttggaagatcaggttaattccgacgatttcgcctatccgggaaccccgccccgttcaagggaatccgccgtggtcatgcttgccgacgttaccgaagccgcggtcaggactatggtaaagccctctgtggcaaaaatggaaaaatttatccagcagctttttgacggaaaagtcgagaacgggcagcttgcccagtgcgatcttactttccgggaacttgagataattaaaaaagcctttgtaaaagtacttgcgggatactatcattccagaattgaatatcccaaggaagaagaatga

SEQ ID NO: 44642 - protein, 138 aa, Unknown
  Obtained from environmental sample
  misc_feature (1)..(138): Xaa is any amino acid
MKLGIEKARSLGLPADVIDIIAEHHGNSLIMWFYKKASQLEDQVNSDDFAYPGTPPRSRESAVVMLADVTEAAVRTMVKPSVAKMEKFIQQLFDGKVENGQLAQCDLTFRELEIIKKAFVKVLAGYYHSRIEYPKEEE

SEQ ID NO: 44643 - DNA, 1254 bp, Unknown
  Obtained from environmental sample
  misc_feature (1)..(1254): n is a, c, g, or t
atgggctatgtcgatctggggggctataacccggacctggcggaacttcttgttacccgcggcgaccgggtagaaagggagcgcgtcagctactcaggcattaccaccatagcgaacgccgcggacgcgataatccaggccgccgagtccgaacaactgccggcgaatttcaaggccatagcggttcccctgctcctgccctttatacgcgagaacgtgttcttttccatagaagattccaaactaagggtcgcgcaggcgatggaacgcgttcccgcggtaatgaaacatatagaaaaaggcaagcgcgttatacgaaaaggctttgtcataacaaatgaggatataaaagaccttcaggccctgaacgacgcccatcaaaagaaagacccccgcagcattatcgggctggttctgctgttggggcttttgtatgtgcttttcctgcttttacaggaaaaacttgttatgggcagggagttctccggcaatgagaagagccttcttttcatattggtcttcctgtatcttgcgggcgcgggcattgtaaagaatatagctccggtcatgaacgacgcgcctgtttcgcttttatttcctacagcccttattgtgatgatccccgcggtttttatgggcccgctcctcgctctcgcccttgccctcgcccttccgctgggagccagtcttgccggtttctttgacattcccgcgtatattttcgcgctcatatcaggcatagccgcttccgtcgtgcttaaaggcgcggagaaacgcatggacataatcaaggctggattgacaatcggcgccgccaactgtgttgccatcgtggttatccttttaatgcgggccgcggccatagccgaatacccgtccatgctgttctgggccgccattaacggcattgtgtcggggatgctggttctcggtgtgctgccgcctttggagcatgtcatgaaagccgccaccacgttcaggctaatcgagctttccgacctcaacgcgccgatccttcgcaagctttttaccaccgcgccgggcacttacagccattcgctgatggtggcgacgcttgcggaacaggcctgccaggacattggcgcgaacgccctgctggcgagagtcgggggttattaccatgacatcggcaaaatggataaccccgattactttattgaaaatcagaccgaccacaaccggcatgacgatatcgccccccggctctccgctaccgttatacgcagccattga

SEQ ID NO: 44644 - protein, 417 aa, Unknown
  Obtained from environmental sample
  DOMAIN (349)...(412): HD domain
  misc_feature (1)..(417): Xaa is any amino acid
MGYVDLGGYNPDLAELLVTRGDRVERERVSYSGITTIANAADAIIQAAESEQLPANFKAIAVPLLLPFIRENVFFSIEDSKLRVAQAMERVPAVMKHIEKGKRVIRKGFVITNEDIKDLQALNDAHQKKDPRSIIGLVLLLGLLYVLFLLLQEKLVMGREFSGNEKSLLFILVFLYLAGAGIVKNIAPVMNDAPVSLLFPTALIVMIPAVFMGPLLALALALALPLGASLAGFFDIPAYIFALISGIAASVVLKGAEKRMDIIKAGLTIGAANCVAIVVILLMRAAAIAEYPSMLFWAAINGIVSGMLVLGVLPPLEHVMKAATTFRLIELSDLNAPILRKLFTTAPGTYSHSLMVATLAEQACQDIGANALLARVGGYYHDIGKMDNPDYFIENQTDHNRHDDIAPRLSATVIRSH

SEQ ID NO: 44645 - DNA, 459 bp, Unknown
  Obtained from environmental sample
  misc_feature (1)..(459): n is a, c, g, or t
gtggggatcgcgccttcactgttttctaatctacccagccgtttaattttaattagacggctgggggctttccagccacggactggcggaaagacaggtttttttgcctgttttacatggaggtataaaatgtcagtaataagtgtagtgaatacacctgtctcatcggtgtcctctcctgaaattttcgggacagtaaaatatagtgacacagttcaacagagaacaacggtaaaacctcacgaaatccattcaacaactgaagatttaaaacgaatcactaccgtttttaacagaaaacttcaatttgttgtagatcacaattcaaacgaagtgatagtcaaggtaatagacaaagaaaccgataaggtgatcaaggagcttccgcctgaagaattgcagaagctgcacagaaaccttaaggaagctataggtcttttatttgatgaaatggtctag

SEQ ID NO: 44646 - protein, 152 aa, Unknown
  Obtained from environmental sample
  DOMAIN (44)...(151): FlaG protein
  misc_feature (1)..(152): Xaa is any amino acid
MGIAPSLFSNLPSRLILIRRLGAFQPRTGGKTGFFACFTWRYKMSVISVVNTPVSSVSSPEIFGTVKYSDTVQQRTTVKPHEIHSTTEDLKRITTVFNRKLQFVVDHNSNEVIVKVIDKETDKVIKELPPEELQKLHRNLKEAIGLLFDEMV

SEQ ID NO: 44647 - DNA, 858 bp, Unknown
  Obtained from environmental sample
  misc_feature (1)..(858): n is a, c, g, or t
atggctataaatgagagtacaaacgcgggagattcctcccaaataaccagagactactttgattccctgttggtggaaatgaggcacattgacggagttatgccttcaaccagaatggaattatacggcgaaagattttctaccccaatcatgctggcggcgctgtctcatttaaaagagacgcatcagggaggcatggtggaagcggcaaagggcatcaaagccgcaggggctgtaatgtgggcaggcatgggagacgaggcggaacttgaggccattaccgcgacaggagcgaaaacaatcaagatcataaaaccctatgcagataacaaagtaatatttaaaaaaattgaacacgcgcaaaaatgcggctgtatcgcggtgggcatggacattgatcacgccttcagtaaaaaaggaaaatacgattttgtccaaaccattgaaatgaggccgaaaagccttgatgaaatcagggaatttgtaaaggccgccaaaatccctttcattgtcaagggaattttgagcgaacaggacacacataaatgtcttgacgccggcgtgcgcggaatcgtagtatcccatcatcacggccacattgattacgccctgccgccgcttcgcatacttcccgacattgcgcgaatcgtaagaaaacagattcctgtttttgtggactgtagtattgaacgcggaatggacgctttcaaagccttggcgcttggcgcggacgcggtttctttgggacgcattatcttgccgccgctgaaagcggaaggctccgacggagtaaaaaaacntggttacagaaatgacagacgaacttgcaggcgttatggcggcaaccggctgccgtga

SEQ ID NO: 44648 - protein, 285 aa, Unknown
  Obtained from environmental sample
  DOMAIN (5)...(278): FMN-dependent dehydrogenase
  misc_feature (1)..(285): Xaa is any amino acid
MAINESTNAGDSSQITRDYFDSLLVEMRHIDGVMPSTRMELYGERFSTPIMLAALSHLKETHQGGMVEAAKGIKAAGAVMWAGMGDEAELEAITATGAKTIKIIKPYADNKVIFKKIEHAQKCGCIAVGMDIDHAFSKKGKYDFVQTIEMRPKSLDEIREFVKAAKIPFIVKGILSEQDTHKCLDAGVRGIVVSHHHGHIDYALPPLRILPDIARIVRKQIPVFVDCSIERGMDAFKALALGADAVSLGRIILPPLKAEGSDGVKKXGYRNDRRTCRRYGGNRLP

SEQ ID NO: 44649 - DNA, 843 bp, Unknown
  Obtained from environmental sample
  misc_feature (1)..(843): n is a, c, g, or t
atggcggatatacgtaaattaaatcctgttgcccttttttttatgtatgccctggtggttttatttacgattcttgcggtttatccaatcttctgggtcataatgagctctttcaaaacaacacaggaatatatgcttacaagtaagcttgccctcccaaaagtgtactttttcaaaaattatcccatagcatggcgtgacgctaatttcagtatgctgatttcaaatagcattatctatacaaccgtaacggtgatttccataatcatattaagctttatggcgggttttgcctttgccaaacttccgtcgaaaataacgcctgtccttcatggcagttttattataggtatactaattacccttcaatgcattatgatccctctttttattttaatcagaggaatagggttgattaatacgaggctgggggtactcatcccctatattggcattgggcttcccacggcagtttatctttccacagaatacatcaagtctatacccaatgaggttgttgaatctgcccgtatggacggtgccaagtatctgtcaatttttagacgcattattttgcccatggccgcgccggtagctacgactgttgcgatactatccgttaccggaacctggaacgaattcatgctgattaatattctggtttcttcagacaatttaaaatccatacctgtcgggatgaatatgtttgccggtgctctggctacagattacggcaagcagtttgccgccctgaccatcggtatgattccgatgattgtcttttatgttattttcagaaaacaaatcactaaaggagtttccgcaggggctgtaaaaggctga

SEQ ID NO: 44650 - protein, 280 aa, Unknown
  Obtained from environmental sample
  DOMAIN (74)...(275): Binding-protein-dependent transport system inner membrane component
  misc_feature (1)..(280): Xaa is any amino acid
MADIRKLNPVALFFMYALVVLFTILAVYPIFWVIMSSFKTTQEYMLTSKLALPKVYFFKNYPIAWRDANFSMLISNSIIYTTVTVISIIILSFMAGFAFAKLPSKITPVLHGSFIIGILITLQCIMIPLFILIRGIGLINTRLGVLIPYIGIGLPTAVYLSTEYIKSIPNEVVESARMDGAKYLSIFRRIILPMAAPVATTVAILSVTGTWNEFMLINILVSSDNLKSIPVGMNMFAGALATDYGKQFAALTIGMIPMIVFYVIFRKQITKGVSAGAVKG

SEQ ID NO: 44651 - DNA, 861 bp, Unknown
  Obtained from environmental sample
  misc_feature (1)..(861): n is a, c, g, or t
ttgaaaaagacagatcctcaaactttttactggccttcttctccgtcttctggcgggagctttgacgagccaaatgaccccaaccggggggatgtgcatttctgggatgtttggcacggattaaagcctttcagcgaatacaggaaaaactatttcagatattgctctgaattcggttttgagtctctgccggatttggaaacgattcaaagttttgcaaaaggcgaagacataaatcttttttcgccggtaatggaaatccaccagcgtaaccccagcgggaacggaaaaattctatattacatttctgaaacttaccgctacccgaaagactttgcttctctcgtttacatctcccaggttttgcagatggagagtatacagtccggggtggatcactggaggcggaaccgcggccgctgcatgggggccatttactggcaactaaacgactgctggcccgtgtgttcatgggcaagcattgattattttggccgctggaaagcgcttcactacggggcgcggcggttttttgcaccgcttcgcgctacgctgttcatcgatgaaactgtgcgggtttatgtccacaacgacacgttaaaagcggcgaagggcaggataaagctgtatcttcgcgacaagagttttaacaccctggccgaagaaaccgtcgacgttgagctgtcgccaatggccgcttcggaaatccttgtccgcgactatcgcggcatggtgaataccgtcgagcttgagcgttcctgctttgtgactgcggagcttttaatggaaaccctggtttcttcggatacttcggtttccagggaaaccgtgttatttgtcccgcccaagtattttttttga

SEQ ID NO: 44652 - protein, 286 aa, Unknown
  Obtained from environmental sample
  misc_feature (1)..(286): Xaa is any amino acid
MKKTDPQTFYWPSSPSSGGSFDEPNDPNRGDVHFWDVWHGLKPFSEYRKNYFRYCSEFGFESLPDLETIQSFAKGEDINLFSPVMEIHQRNPSGNGKILYYISETYRYPKDFASLVYISQVLQMESIQSGVDHWRRNRGRCMGAIYWQLNDCWPVCSWASIDYFGRWKALHYGARRFFAPLRATLFIDETVRVYVHNDTLKAAKGRIKLYLRDKSFNTLAEETVDVELSPMAASEILVRDYRGMVNTVELERSCFVTAELLMETLVSSDTSVSRETVLFVPPKYFF

SEQ ID NO: 44653 - DNA, 600 bp, Unknown
  Obtained from environmental sample
  misc_feature (1)..(600): n is a, c, g, or t
atggttattaaaaccgttatttatttttggattccgcagcttttaaaaggcgccagggttactgtcgggttaactgttacggcggcgtgcgcggggctggtaataggtttttttctggcgcttgggaaaatgtcgaaaaagtttattttgaaaaaattatgcgccgcgtatatttttttctttcggggcactccgcttttaatgcagcttttttttatctattacgctcttccgcaaatttttccgccttttacgattaaaagccgttttctcgcggcatttaccgcttttgcgctgaactccgccgcctactgcgcggaaataatcagggcggcgattcaaagcatagacaagggccagtttgaagcgtcccgcgtcctgggtctttcccgcgcccaaaccctgcgttacgtgataatcccccagtccgtaagaaggttaatccctcctgtgggaaacgagtttataatgatgttaaaagacgcttcccttgtgtccataatagcgttagtagacatcacaaaggcaatgaacaatatttttaactcaacatcttcggcactcgtatacatcccggcatggcaattactctcgcgataa

SEQ ID NO: 44654 - protein, 199 aa, Unknown
  Obtained from environmental sample
  DOMAIN (14)...(190): Binding-protein-dependent transport system inner membrane component
  misc_feature (1)..(199): Xaa is any amino acid
MVIKTVIYFWIPQLLKGARVTVGLTVTAACAGLVIGFFLALGKMSKKFILKKLCAAYIFFFRGTPLLMQLFFIYYALPQIFPPFTIKSRFLAAFTAFALNSAAYCAEIIRAAIQSIDKGQFEASRVLGLSRAQTLRYVIIPQSVRRLIPPVGNEFIMMLKDASLVSIIALVDITKAMNNIFNSTSSALVYIPAWQLLSR

SEQ ID NO: 44655 - DNA, 366 bp, Unknown
  Obtained from environmental sample
  misc_feature (1)..(366): n is a, c, g, or t
atgaaatacttcaatcctgcaaatttagccattattgcctgtcccggcggggacatttttgcaaatgaagtaattcaacaccttcgccatagataccgtttaagccgcaaacagacagtagaagaactttccaaacgttacaatatagacgcggagaggattggtcttcaaatagacctgataaacaagattgtcgcgcggggaacattatcccaaagcggatctgaaaaaaataacggacctgttaaagttcccgttaaatttacattatttccaaacggcgaaataaaatccgaaattcaggaatctatccggggaaaagagcgtgtatatttttcaggagtgttgaaaatcattatcctgtaa

SEQ ID NO: 44656 - protein, 121 aa, Unknown
  Obtained from environmental sample
  misc_feature (1)..(121): Xaa is any amino acid
MKYFNPANLAIIACPGGDIFANEVIQHLRHRYRLSRKQTVEELSKRYNIDAERIGLQIDLINKIVARGTLSQSGSEKNNGPVKVPVKFTLFPNGEIKSEIQESIRGKERVYFSGVLKIIIL

SEQ ID NO: 44657 - DNA, 1482 bp, Unknown
  Obtained from environmental sample
  misc_feature (1)..(1482): n is a, c, g, or t
atgggaaagtacattctttcgctggatcaggggactacaagctcccgcgcgattctttttgatcatgagcagaatattgtcgcggtaaagcagaaagagtttacccaaatttatccgcatgaaggctgggtggagcatgatccaatggaaatattttccacccaacacgcggtaatgacggatattatttccaaggcgaatataaaagcaagcgatatagccgctatcggcataacaaaccagcgtgagactacaattctttgggataaaaatacgggcaagcccgtttataacgcgatagtgtggcaatgcagaagaacatctgcaattgtcgatgctcttgcaagagacggacttggcgatcatattaaaaaaactacggggcttatccacgacgcttatttttcagggactaaaattaaatggatactagataacgtggaaggcgttagggagagggcgcaaaagggcgagatacttttcggcactgtcgatacatggcttatctggaagttatcgggcggcaaagcccatgttacggattacaccaacgcaagcagaacgatgatctttgatattcataaacttgattgggacgatacgcttcttaaagccttggatattccgcgcgcaatactcccgcaggtaaagccgtcgggcgcaatgttcgcgtccgcaaacataaacggcgttgaaataccgatttcgggtaacgcgggagatcaacaggcggcgttattcgggcaatgctgttttgaaaaaggcgacacaaaatgcacttacggaaccggctgttttctgctgatgaacacaggtacagacgccgccgtgagcgcaaacggtcttttaactacaatcgccgcggggttaagcgaaaaagttcaatacgcgcttgagggttcagtctttacgggcggcgcggttattcaatggttacgggatgaattgcgtattattaccgacagcgcggacagcgaatattatgcggagaaagtaaagaataccggaggcgtctatcttgtcccggcgtttacgggacttggcgcgccgtattgggatatgtacgcgcgaggctgtataatcggaattacgcgcggaacaaaaagagcgcacattatcagggcggcgcaggagtccattgcgtatcaggtaatggatcttttaaacgccatggaaaacgatcttggagtaaaactaaaagagttaaaagttgacggcggcgcgagcagggataaattccttatgcagtttcaggcggatatgtgccgcgcgcggattatacgccctattgtccgcgaaacaacggctctcggcgcggcgtgccttgcgggaattaccgttggtttttggaaagacttggacgaaatcaaaaaatgctggcgggaggatactgttttttcgcctgaaatggacaatgaaaaacgcgataaattaatagccggatggcataaagcggtggaaagaagccgcggctgggcttga

SEQ ID NO: 44658 - protein, 493 aa, Unknown
  Obtained from environmental sample
  DOMAIN (251)...(477): FGGY family of carbohydrate kinases, C-terminal domain
  misc_feature (1)..(493): Xaa is any amino acid
MGKYILSLDQGTTSSRAILFDHEQNIVAVKQKEFTQIYPHEGWVEHDPMEIFSTQHAVMTDIISKANIKASDIAAIGITNQRETTILWDKNTGKPVYNAIVWQCRRTSAIVDALARDGLGDHIKKTTGLIHDAYFSGTKIKWILDNVEGVRERAQKGEILFGTVDTWLIWKLSGGKAHVTDYTNASRTMIFDIHKLDWDDTLLKALDIPRAILPQVKPSGAMFASANINGVEIPISGNAGDQQAALFGQCCFEKGDTKCTYGTGCFLLMNTGTDAAVSANGLLTTIAAGLSEKVQYALEGSVFTGGAVIQWLRDELRIITDSADSEYYAEKVKNTGGVYLVPAFTGLGAPYWDMYARGCIIGITRGTKRAHIIRAAQESIAYQVMDLLNAMENDLGVKLKELKVDGGASRDKFLMQFQADMCRARIIRPIVRETTALGAACLAGITVGFWKDLDEIKKCWREDTVFSPEMDNEKRDKLIAGWHKAVERSRGWA

SEQ ID NO: 44659 - DNA, 432 bp, Unknown
  Obtained from environmental sample
  misc_feature (1)..(432): n is a, c, g, or t
atggattatacggtaatcggagatgcggtaaatttagcgtcgcgtatggaaggacttacaaaaacatatcactcggaaatattgatttctgaaagtctttttgatgaattgcggcaaaccgcgccgaatgccggtttggcttacagactccttgacactgtggcggtaaagggcaaaacaaagggagtaagaatttttacggtaaaaaaatccctcacgccttcggaacagaaagggtggcaattgcataatcagggaatgaaactttattatgcgcgttcctttgccgaagccgcgcaaaaattcaaggaagcgcttgaaacattacccgatgattttaacgctgacaatctgtataaaagatgcgtggaatacgcttccgcgccgccgcccgcggactggaacggcgtggaagtaatgaagaccaaataa

SEQ ID NO: 44660 - protein, 143 aa, Unknown
  Obtained from environmental sample
  misc_feature (1)..(143): Xaa is any amino acid
MDYTVIGDAVNLASRMEGLTKTYHSEILISESLFDELRQTAPNAGLAYRLLDTVAVKGKTKGVRIFTVKKSLTPSEQKGWQLHNQGMKLYYARSFAEAAQKFKEALETLPDDFNADNLYKRCVEYASAPPPADWNGVEVMKTK

SEQ ID NO: 44661 - DNA, 513 bp, Unknown
  Obtained from environmental sample
  misc_feature (1)..(513): n is a, c, g, or t
gtgtacaccaactgcgaagaagtcgaactctggatcaacaataaaaaagtaggccgcagaagacttgaagattcccaaaacaatataatagactggcctttcgattacacgccgggagaattaaagctgattggttttcgtaacggtaaagaggctgttacgcaggaaatcaaaacctctggccctccagcggttatcagcctaaaagcggataagaccgcgctggaaccgggaacacttgcccacatagaaataaacatcacagatgaagccggcatacccaacccggctgaaaatttgctgattggcttttccctcgcaggcgacggtgatataatgggggcgtcttcgcccagccttaacaactgtttgggttttgaccttcccagggtctatacctcgtttggccgggcattggcaataatcaaagccggggactctgcgggggaattggttttttcagcttacggtgaaggcctaaagacaggaaccttgaagtttaccgtcgggtag

SEQ ID NO: 44662 - protein, 170 aa, Unknown
  Obtained from environmental sample
  misc_feature (1)..(170): Xaa is any amino acid
MYTNCEEVELWINNKKVGRRRLEDSQNNIIDWPFDYTPGELKLIGFRNGKEAVTQEIKTSGPPAVISLKADKTALEPGTLAHIEINITDEAGIPNPAENLLIGFSLAGDGDIMGASSPSLNNCLGFDLPRVYTSFGRALAIIKAGDSAGELVFSAYGEGLKTGTLKFTVG

SEQ ID NO: 44663 - DNA, 684 bp, Unknown
  Obtained from environmental sample
  misc_feature (1)..(684): n is a, c, g, or t
atgtttccgcaaggaaaaatgaaggcccttactttgagttatgacgacggtgtggaacaagaccgaaaacttgtcgaaattttaaaccgttacgacattaaggcgacatttaacctgaacagcggaattcaatcaggctcaagtcagtgggaaagaaatggcataatcatacggcgcatgaatgtgaataaacttccagaattatataagggacacgaaatagcggtacacagccttactcatccccgtcttgaaaacttggatgaagaaaccgtctttaacgagctggagcaggacaagattaatctggaaagaatatttggtacaaaaatgtacggaatggcctatccctacggaacctttaacgatgaagtaaagaaaatcgccgcccgctgcggccttctttacgcacggggcgtggtgagcactttttctttcgatattccaaaagatctgcttgcttttcagcccacggcaaaacatacggataccaatttaatggaactggctgaagcctttataaaactaaagccggaaaacccgcaggtcttttacctttggggccacagttacgaattcgacacagataacaactggcaggttatcgaggatttttgtaaacttgtgtcaaacaaggatgatatatactacgcgaccaacgcccaggctctgttgggagtgtaa

SEQ ID NO: 44664 - protein, 227 aa, Unknown
  Obtained from environmental sample
  DOMAIN (3)...(137): Polysaccharide deacetylase
  misc_feature (1)..(227): Xaa is any amino acid
MFPQGKMKALTLSYDDGVEQDRKLVEILNRYDIKATFNLNSGIQSGSSQWERNGIIIRRMNVNKLPELYKGHEIAVHSLTHPRLENLDEETVFNELEQDKINLERIFGTKMYGMAYPYGTFNDEVKKIAARCGLLYARGVVSTFSFDIPKDLLAFQPTAKHTDTNLMELAEAFIKLKPENPQVFYLWGHSYEFDTDNNWQVIEDFCKLVSNKDDIYYATNAQALLGV

SEQ ID NO: 44665 - DNA, 795 bp, Unknown
  Obtained from environmental sample
  misc_feature (1)..(795): n is a, c, g, or t
atgaaatacggcgaagaatggtttaatgacgcaaatttttggaaaaattttgccccgataatatttgacgacaaacactggtcggaagttcccgaggttgcggacagcgtaaccaggcttgcggggcttcagctttacagagcttctgccggcactggcggccccagggcgctggatctttgctgcggcatgggacgaatcacggcggagctggcgcgccggggttttgccatgacaggggtggacatcaccgaatcgcttttggaaacagcccgcgaggacgcgctctacgagggccttgatatcgagtatgttcaggccgacgcccgtacttttgtcaggcgcggtttttttgacacggcggtgaacctctatatttcatttggctattttgaaaatcccaaagatgaccttttgttggcgcggaatgtgtatgaatccctaaagtctggcggaagtttcatcgttgaaacccttggcaaggaaattgccgtcagggattttacgccgggggaatggtttgaaagggcgggttacacggtgcttaccgaatacgaagcggtggattcctgggcggctcttaaaaaccgctggattctgattcccaaagacgataggcccaatggaaccagaattgagaaaaccttcacccaaagactgtacgcggcaacggaactgcgggctttgctccttgaggccggctttgcggacgtggagctttatggcggctgggacgagcgggaatacgatcagaacgcggaaattctaatcgccgttggaagaaaaaaggggtga

SEQ ID NO: 44666 - protein, 264 aa, Unknown
  Obtained from environmental sample
  DOMAIN (19)...(195): ubiE/COQ5 methyltransferase family
  misc_feature (1)..(264): Xaa is any amino acid
MKYGEEWFNDANFWKNFAPIIFDDKHWSEVPEVADSVTRLAGLQLYRASAGTGGPRALDLCCGMGRITAELARRGFAMTGVDITESLLETAREDALYEGLDIEYVQADARTFVRRGFFDTAVNLYISFGYFENPKDDLLLARNVYESLKSGGSFIVETLGKEIAVRDFTPGEWFERAGYTVLTEYEAVDSWAALKNRWILIPKDDRPNGTRIEKTFTQRLYAATELRALLLEAGFADVELYGGWDEREYDQNAEILIAVGRKKG

SEQ ID NO: 44667 - DNA, 429 bp, Unknown
  Obtained from environmental sample
  misc_feature (1)..(429): n is a, c, g, or t
ttgcctgttatgggaaacaggctgaaaaacaagaccatctggctgtgcagcggtgaaaaagaagcagtagcgggattttttcaaacacaggcaggcgcgggcgaagagcctgacatactgcgggtttgcggccttgaaaacgaagctctttaccgcgtggcgacgcgtccccaaaggctgtacattaaccgtttcggcggcctcgtaaaacacctgcttcctgtaacgctaaatccctcaggatttattctgcggactgttaaccgccattacgcgcttaccgattgtgtagaaacttatgaatgccgggggagcttgctttcgtcaggcattcagctaaataatcaatttacgggcagttactacaacaataaaacgaggcttttgggcgattacggctcaagcttatatacaatagagaggatgtaa

SEQ ID NO: 44668 - protein, 142 aa, Unknown
  Obtained from environmental sample
  misc_feature (1)..(142): Xaa is any amino acid
MPVMGNRLKNKTIWLCSGEKEAVAGFFQTQAGAGEEPDILRVCGLENEALYRVATRPQRLYINRFGGLVKHLLPVTLNPSGFILRTVNRHYALTDCVETYECRGSLLSSGIQLNNQFTGSYYNNKTRLLGDYGSSLYTIERM

SEQ ID NO: 44669 - DNA, 669 bp, Unknown
  Obtained from environmental sample
  misc_feature (1)..(669): n is a, c, g, or t
gtgtcatcattcttttccacgataataataacggtagtttccgtcgcgcttcttgtattgatctcctcaatggcggcgtgggttcttgtacgcacaaaaacaaaactgtcaaacgcggtttttatggtatttgtcgcggctatggtaattccgtttcaggttgtaatgtttccgttgattagctggtttcatcttttggaagtaaaactcgggctttttgaaacaccgttccggctgctgcaaaactatccgggaattgtttttgcgtacctcggttttggctcgtcgctttcaatattcctcttccacgggtttatcaaatctgttccgcttgagcttgaggaagccgctaccattgacggctgcacgaaaccagaaacttttttcaagattgttttcccgatactcaccccaatcgcagttacggtaatgatcttaaacggcatgtggatttggaacgattatcttctgcccttgctggtgctcggctccggtaacgcggtgaggacgctgccgctggctgtggccggttttgtcggctcttttgtaaagaagtgggatttaatacttaccgcgacattaatgacgatgctgccgattgttattgtgttcctgatactgcaaaagcacatcattaaaggaatggtggacggatcagttaagggttaa

SEQ ID NO: 44670 - protein, 222 aa, Unknown
  Obtained from environmental sample
  SIGNAL (1)...(25)
  DOMAIN (1)...(217): Binding-protein-dependent transport system inner membrane component
  misc_feature (1)..(222): Xaa is any amino acid
MSSFFSTIIITVVSVALLVLISSMAAWVLVRTKTKLSNAVFMVFVAAMVIPFQVVMFPLISWFHLLEVKLGLFETPFRLLQNYPGIVFAYLGFGSSLSIFLFHGFIKSVPLELEEAATIDGCTKPETFFKIVFPILTPIAVTVMILNGMWIWNDYLLPLLVLGSGNAVRTLPLAVAGFVGSFVKKWDLILTATLMTMLPIVIVFLILQKHIIKGMVDGSVKG

SEQ ID NO: 44671 - DNA, 1176 bp, Unknown
  Obtained from environmental sample
  misc_feature (1)..(1176): n is a, c, g, or t
atgggaacacaatggtggaaaaaggcggttgtatatcaaatttacccgcgcagtttctgtgattccaacggagacggcatcggcgatataaacggcatcacgtcaaaactcagctacataaaagagctgggcgttgacgtgatctggttttcccctttttaccaaagcccaatgtatgataacggctacgacataagcgattacaccgctataaatcccgagttcgggacaatggcggattttgacaggctcttaaaagaagcgcatgctcttggcttgaaggttgtaatggatttggttgttaatcatacttccgatcagcattcttggtttctcgaaagccgaaacggcaaagaaaatcccaagcgggattattacatttggcgcgacggcaaaggcggcagaccgccgaataattggcaggcatggttcggcggatcagcgtggacattagatgaaacaacaggacagtactttcttaacattttttcaccgtatcagcctgatttgaattgggaaaatcccgttacacgatcctctatttacgatatgatgcgctggtggctggacaagggcattgacggttttcgaatggacgcaatcagtcttatttccaaacccaaagaatttattgacggcgatataaaaaaaattatccccaatggtcatagtgttcatgaatttttgcgggagatgaggcgcgaggtattatcaaaatacgacattatgaccgtaggcgaaacaggcggagtaactgctgacgaagcggtaaaatacgcaaacgccgacggcacggaacttgatatggtatttcaatttgaacaaatagaattggacggcggggaaacgtttaagtggaatgatcgcaaaatcaatcttgtcgaattaaaagaagtattttcccgctggcagacaaaattgcacgaccgcgcatggaacagcttgtactggagcaaccacgatcagccccgtattgtttctcggcttggaaacgacaaaaagcaccgcgataaatcggcgaaaatgatcgctacatatctgcactttttgcagggtacgccgttcgtttatcaaggcgaaaaaatcggcatgaccaacgctcctttttgcgacataagcgattaccgtgatattgaaagcatcaacgcttacaacgaacttgtggtgcgggaataa

SEQ ID NO: 44672 - protein, 391 aa, Unknown
  Obtained from environmental sample
  DOMAIN (13)...(390): Alpha amylase, catalytic domain
  misc_feature (1)..(391): Xaa is any amino acid
MGTQWWKKAVVYQIYPRSFCDSNGDGIGDINGITSKLSYIKELGVDVIWFSPFYQSPMYDNGYDISDYTAINPEFGTMADFDRLLKEAHALGLKVVMDLVVNHTSDQHSWFLESRNGKENPKRDYYIWRDGKGGRPPNNWQAWFGGSAWTLDETTGQYFLNIFSPYQPDLNWENPVTRSSIYDMMRWWLDKGIDGFRMDAISLISKPKEFIDGDIKKIIPNGHSVHEFLREMRREVLSKYDIMTVGETGGVTADEAVKYANADGTELDMVFQFEQIELDGGETFKWNDRKINLVELKEVFSRWQTKLHDRAWNSLYWSNHDQPRIVSRLGNDKKHRDKSAKMIATYLHFLQGTPFVYQGEKIGMTNAPFCDISDYRDIESINAYNELVVRE

SEQ ID NO: 44673 - DNA, 606 bp, Unknown
  Obtained from environmental sample
  misc_feature (1)..(606): n is a, c, g, or t
atgatcagatcggccgaggattacctgcgcgacgcccagtcaatggatctcaatgaaacatccgaattccacgcattggcggcagaactgctgttgaccaagtcccgtaccctgctgccggtagaaatggatgactcaggcgattttcttgacccgaggcaggaactggtcgaccgccttatcgaataccagaaattcaaaaaattgtccgaggaaatggaagagaaggaaaaagacgcggaatgggtgatagaacgccgtaaactccagcacaacctgccgttcagcgacgaagaggacctttgggaaaacgcggatatatggagcctgatgaaaactttctccgcgataatacggaaaatacctggcgaaagaatacttgacatgtacgaagaagttacagttaacgaaaaagtcaccctccttgcagaattgctggaagaaaaaggagagtgctattttaccgatctgattatccgctcaaaatcgatcatggacgtggtctgtaccatactggcaattttggaatccgttaaaacgcgcatgattgttatttcacagcacgtcatgttcggcgatataaaaataaaactgcgggaaaattaa

SEQ ID NO: 44674 - protein, 201 aa, Unknown
  Obtained from environmental sample
  DOMAIN (1)...(199): ScpA/B protein
  misc_feature (1)..(201): Xaa is any amino acid
MIRSAEDYLRDAQSMDLNETSEFHALAAELLLTKSRTLLPVEMDDSGDFLDPRQELVDRLIEYQKFKKLSEEMEEKEKDAEWVIERRKLQHNLPFSDEEDLWENADIWSLMKTFSAIIRKIPGERILDMYEEVTVNEKVTLLAELLEEKGECYFTDLIIRSKSIMDVVCTILAILESVKTRMIVISQHVMFGDIKIKLREN

SEQ ID NO: 44675 - DNA, 552 bp, Unknown
  Obtained from environmental sample
  misc_feature (1)..(552): n is a, c, g, or t
atggaagaaaatttacagagggaaaccgcgctggtcgaggcggttctttacatggaagcggatccaatagacgaagcgggcataagccgaatttgcggcctctcaaaagaaatggtcaaggccgcccttgacaggctcggcgagcgttacgcgatggccgactgcggcgtcgaactttcacgcattgacggcggcgtgatgatctccccgaaacgggaatactgggaaaacctgaaggaccgttacggcaaaaaaaacgaggggaaaatatccagagcggcgatagaaacattgacgattatcgcctattcccaacctataaccagagccgaaataaaagacatacgcggggttaatcccgacaatatgatccatctgcttatggaacaggatttgatccacgaagtagggaagaaagacattcccggaaaaccggcgcagttcggcacgaccaggaaattcctgaagcagttcaggttgaatacaatcgccgatctgcccaagttgaatgaacgcgatatggacaagttcgagcttgaggtagagcaatga

SEQ ID NO: 44676 - protein, 183 aa, Unknown
  Obtained from environmental sample
  DOMAIN (10)...(169): Putative transcriptional regulators (Ypuh-like)
  misc_feature (1)..(183): Xaa is any amino acid
MEENLQRETALVEAVLYMEADPIDEAGISRICGLSKEMVKAALDRLGERYAMADCGVELSRIDGGVMISPKREYWENLKDRYGKKNEGKISRAAIETLTIIAYSQPITRAEIKDIRGVNPDNMIHLLMEQDLIHEVGKKDIPGKPAQFGTTRKFLKQFRLNTIADLPKLNERDMDKFELEVEQ

SEQ ID NO: 44677 - DNA, 606 bp, Unknown
  Obtained from environmental sample
  misc_feature (1)..(606): n is a, c, g, or t
atgagggttgaaaataagaagaatttcaaccacagaggacacggagaacacggagaacacggaggaagaaggaagaaagaagttaatcttcttcctctccgtgaaactccgtgtaactccgtggtaaatattcttcctgaaaaacccgttcgcttgcaggtctaccttgctcatgcagggattgcgtcccggagagccgcggaggagattatcgcgcaaggcagggtaagcgtgaacggcgtcgtcataagcgggcagggaagcagggtttttcccggagacaaggttctgctggacggaaaagaaatacaaacagaaagctgccaggtctaccttgccctgaacaagccgcccggattcatttgcagttcctctgacccgcagggacgtccccttgccattgaactattgccggatgaaatcagggagaggctgtacaatgtcggcaggctggattttatgtcctgcggccttatcttttttaccaatgacggagaattcgccgcccggctgggcatccccgatccggccttgagaaggaatacatggtggaagcgaccggccatatccccgacgccctcattgaggcttttgaaaaagggataa

SEQ ID NO: 44678 - protein, 201 aa, Unknown
  Obtained from environmental sample
  DOMAIN (50)...(96): S4 domain
  misc_feature (1)..(201): Xaa is any amino acid
MRVENKKNFNHRGHGEHGEHGGRRKKEVNLLPLRETPCNSVVNILPEKPVRLQVYLAHAGIASRRAAEEIIAQGRVSVNGVVISGQGSRVFPGDKVLLDGKEIQTESCQVYLALNKPPGFICSSSDPQGRPLAIELLPDEIRERLYNVGRLDFMSCGLIFFTNDGEFAARLGIPDPALRRNTWWKRPAISPTPSLRLLKKG

SEQ ID NO: 44679 - DNA, 438 bp, Unknown
  Obtained from environmental sample
  misc_feature (1)..(438): n is a, c, g, or t
atggtggaagcgaccggccatatccccgacgccctcattgaggcttttgaaaaagggataagcatagaagacgtatattacaaagcgcaggccgttgaaaggcttggttccagactaataagggtagtgctggtagagggcaagaacagggaaatccgccgggtgttttcccatttccatctgcaccccttccgcctgcgccgcgtacgcataggcccggtaaaactggaagacctgccggaaggagaatcccgcccgctaaaaaaatttgaactggaagccttaaaaattaggaatgaggaacggaataaaattaggaatgaggaattaggaatgaggaataaagagagaaaagaaagcggaagattaagcagaaagcctattcctaattcctcactcctaattcctcattccccgaaggggagccttacatggtaa

SEQ ID NO: 44680 - protein, 145 aa, Unknown
  Obtained from environmental sample
  misc_feature (1)..(145): Xaa is any amino acid
MVEATGHIPDALIEAFEKGISIEDVYYKAQAVERLGSRLIRVVLVEGKNREIRRVFSHFHLHPFRLRRVRIGPVKLEDLPEGESRPLKKFELEALKIRNEERNKIRNEELGMRNKERKESGRLSRKPIPNSSLLIPHSPKGSLTW

SEQ ID NO: 44681 - DNA, 735 bp, Unknown
  Obtained from environmental sample
  misc_feature (1)..(735): n is a, c, g, or t
atgagaattgttcccgaatttttagatcgccacccaatgctctatgcagttgctttttgggtatttgcgttaattttggctgccattgcaataaattggttagctatgcctgttatagccggccgctttgcaaacaccatgatcgttcccagcgttgtggacatgccagcagaagaggcagaaaaagtcttgaaaaaagcgggcttgaattataaatgggctaaggaaggtagatatagctttgaaattgccgccaacaatgtgatgattcaaataccagaagcgggcaggacggtgaaagagaacaggactattttcttaactatctccaaaggcaggcaagaggtagttgtcccggatttgcgcggagcgagccagaggcaggcggaaatatcgttgcaaaggcttgagcttgtgctgggtgctaaaatagaaggcgctcatgcggaaatcccaagaggcgtggttattcgcaccgaacccgaagttggcaaaaaggttcgcataggttcaaaggtggacctcgttatatcttctggcaatagcgagggaaaagttttattgccaaatttaaaggagatgtcgctggataaagcgattgagactataaagtcgctgggttttaaagtaggtgaggtaacaaccgttccgcatgataataaattgccgaacaccgttttggacttaaatcccaaatctggcgaatacttagaagagggaactacaatacattaa

SEQ ID NO: 44682 - protein, 244 aa, Unknown
  Obtained from environmental sample
  DOMAIN (186)...(244): PASTA domain
  misc_feature (1)..(244): Xaa is any amino acid
MRIVPEFLDRHPMLYAVAFWVFALILAAIAINWLAMPVIAGRFANTMIVPSVVDMPAEEAEKVLKKAGLNYKWAKEGRYSFEIAANNVMIQIPEAGRTVKENRTIFLTISKGRQEVVVPDLRGASQRQAEISLQRLELVLGAKIEGAHAEIPRGVVIRTEPEVGKKVRIGSKVDLVISSGNSEGKVLLPNLKEMSLDKAIETIKSLGFKVGEVTTVPHDNKLPNTVLDLNPKSGEYLEEGTTIH

SEQ ID NO: 44683 - DNA, 1266 bp, Unknown
  Obtained from environmental sample
  misc_feature (1)..(1266): n is a, c, g, or t
ttgtggacaaaaaacagacgcatcaggcagcataatgttcaaggacggaataattttccgatgtacacaccgggggtcncgctgccctatgaaaaaatcagcggcgcggcgatgatcattgacggcaaaagcctttcagcctccggtgagcttcccgtccttatgcccgcttttgttgatctccacgcgcatttccgtgaccctggcctgnaaggaaacgtcgaacttccttcagaacttttagagtccgcctgcatggctgccgccgcgggaggttttggtaccgtggtctgcatggcaaatacaaagcctgccatagatacaattgaaaaagcggcgtcacttaaaaaacgctcgaacactcttggccttatcgatctttttcctgtattgtcccttacgaaaaggatggaaggcagggagctatcaggaatcacggccattactaaaagtggcagttcctgcataccactgatgctttctgaagacggaaaggatccggaaaatgacgatctttttcttgcggccatgaaagaggcaaagcgcatcggtatcccagtttcctgccactgtgattttggcggcgatgaaaataacgctgttcgcagggttatagaactgggcaaaaaggccggttgccggcttcacattgcccatgtgtccacaaaaaaagcgctcgaaaccattcgcgaggcaaaacaggaaattcaggctcaaactgcgcctgacggctttacgcttagctgcgaggccatgccccaccatctttgtcttacagaagaagtcgccagtaagctgggagcaaaaacctggggcaaggttagtccgcctctgcgccacgaagacgacaggcaagcacttatccaggcgcttaaagatggaacgatagacgctatcgccaccgatcacgcgccacattcaaccgctgataaggaatcaggctcgcctggcttttccggttttgagaccactatcgccgctttatacaccgagcttgtgcgcagtggcttagatattgatcttaaacgcctttcgtccctgttaagcgcaggccctgcaaggcttttgagctttgggaattcacgtggccgccttcttccaggtagcgtggcagactttgttatactggacatagatgccgcctggattgcagaaccgaaaaaatttttcagccgaggaaaaaactctccatttactggcagtaaactatacggaaaaatattaatgacacttcacaggggaagaattgtgtttctgaatagttaa

SEQ ID NO: 44684 - protein, 421 aa, Unknown
  Obtained from environmental sample
  DOMAIN (53)...(375): Amidohydrolase family
  misc_feature (1)..(421): Xaa is any amino acid
MWTKNRRIRQHNVQGRNNFPMYTPGVXLPYEKISGAAMIIDGKSLSASGELPVLMPAFVDLHAHFRDPGLXGNVELPSELLESACMAAAAGGFGTVVCMANTKPAIDTIEKAASLKKRSNTLGLIDLFPVLSLTKRMEGRELSGITAITKSGSSCIPLMLSEDGKDPENDDLFLAAMKEAKRIGIPVSCHCDFGGDENNAVRRVIELGKKAGCRLHIAHVSTKKALETIREAKQEIQAQTAPDGFTLSCEAMPHHLCLTEEVASKLGAKTWGKVSPPLRHEDDRQALIQALKDGTIDAIATDHAPHSTADKESGSPGFSGFETTIAALYTELVRSGLDIDLKRLSSLLSAGPARLLSFGNSRGRLLPGSVADFVILDIDAAWIAEPKKFFSRGKNSPFTGSKLYGKILMTLHRGRIVFLNS

SEQ ID NO: 44685 - DNA, 651 bp, Unknown
  Obtained from environmental sample
  misc_feature (1)..(651): n is a, c, g, or t
atgattgttgtttttgccttgagcattattattggcattgcgctttttggttttcttaaatacaagaagcggtattttttctggatggtgtacgcttttactattattgttttttcgttgggcgcttcatacgccgcccgcatactgcttaagaattaccagatcatgaggcttattgtgtttctcgatccgaatatagatccacggggagcgggctggcatattatacaatccgtcacggccattggatcgggagggcttacggggcagggctatttgaagggcacccagagccactaccgcttcctccccgagcagagtaccgactttatcttttcgattttttccgaggagatgggttttatcggcgggattgtggtatttatcctgttcctgatcatctgtctgaggatattgcaggtaataaaaattacatcagacccctttgccgcgtacatctgcgccggcctggcggggatgtacagtttccacttcattattaacgtgggcatgaccatgggcattatgccgattacaggtattcccttgctgtttatatcttacggcggttccgccatgttttcggcaatgataggaatagggctcgcgctgagtatacacatcagaaggtacatcccacccgcgttatga

SEQ ID NO: 44686 - protein, 216 aa, Unknown
  Obtained from environmental sample
  DOMAIN (1)...(212): Cell cycle protein
  misc_feature (1)..(216): Xaa is any amino acid
MIVVFALSIIIGIALFGFLKYKKRYFFWMVYAFTIIVFSLGASYAARILLKNYQIMRLIVFLDPNIDPRGAGWHIIQSVTAIGSGGLTGQGYLKGTQSHYRFLPEQSTDFIFSIFSEEMGFIGGIVVFILFLIICLRILQVIKITSDPFAAYICAGLAGMYSFHFIINVGMTMGIMPITGIPLLFISYGGSAMFSAMIGIGLALSIHIRRYIPPAL

SEQ ID NO: 44687 - DNA, 1098 bp, Unknown
  Obtained from environmental sample
  misc_feature (1)..(1098): n is a, c, g, or t
atgagttttcacagtaccggatatgttgatcccgttaacgatattggcccgcttctgttgggggtggacaaacccggacgttattgcggcggcgagcatggccgccttgccaaagaagatgcgcctctgcaaactcttatcgctttccccgatttgtatgaattgggcatgtctaaccaggccctgcggattatctacaacgggcttaaccgtattcccggcatttcctgcgacagggcctttgctcccgcgccggatttcgagcagttgctcagaacaaaagggctgcccctgtacggccttgataccggcattagcctgaagcggcttgatcttctgctttttacacttggctatgagcttggaattaccggcatactcaccatgcttgatgtttccggcatccccctgcgctgcgatcagcgcggtgaggatgatcctctggttatagcgggcggccccgccgtatcgaatccgctgccgtacagcgctttcattgacgcgttctggattggcgaggcggaagccggtttttttgacgaggcgtgggtacttatggagataaagcgggcagggggttcccgatccgctttgctggaaagaatgagggagtattcccatttctgggttaggggaaaagagacagcctctcgcgctgtagatgcctgttttgccactcgtgggatgtggcctgctaacaaagacgcgccttccagggaaggcgctgtgtaccctgtcccgagcatgaaaactgtccagcaccacggcctgcttgaaataatgcggggctgtccgaacggctgccgtttttgccacgcgggctactggtaccgtccaatgcgccaaaaaaagcctgaaaccattatccgcgaggccgaggcctttgttacgctgggcggttaccgcgagataagcctttcctctctttccagcggggactatcccggtatcggcgatcttgtcgatgcgttaaatgatcaattttcaaacagacatgtatctttccagatgcctctctcaaggtttctacgtttgcgctgggtctgctggaaaaaatctcccaaacgcgcaaaaaccggccttacctttgcccgttga

SEQ ID NO: 44688 - protein, 365 aa, Unknown
  Obtained from environmental sample
  misc_feature (1)..(365): Xaa is any amino acid
MSFHSTGYVDPVNDIGPLLLGVDKPGRYCGGEHGRLAKEDAPLQTLIAFPDLYELGMSNQALRIIYNGLNRIPGISCDRAFAPAPDFEQLLRTKGLPLYGLDTGISLKRLDLLLFTLGYELGITGILTMLDVSGIPLRCDQRGEDDPLVIAGGPAVSNPLPYSAFIDAFWIGEAEAGFFDEAWVLMEIKRAGGSRSALLERMREYSHFWVRGKETASRAVDACFATRGMWPANKDAPSREGAVYPVPSMKTVQHHGLLEIMRGCPNGCRFCHAGYWYRPMRQKKPETIIREAEAFVTLGGYREISLSSLSSGDYPGIGDLVDALNDQFSNRHVSFQMPLSRFLRLRWVCWKKSPKRAKTGLTFAR

SEQ ID NO: 44689 - DNA, 1065 bp, Unknown
  Obtained from environmental sample
  misc_feature (1)..(1065): n is a, c, g, or t
ttgcgggagacggtaacaatgaaagtaagagtcttggtagtagacgattccgccgtagtgcggcaaatactgactcgcgagttttccaaggacaaagatattgaggtcgtgggcacggcccccgacccctacgtggcgcgcgacaaaatcgtacagttgaaacccgatgtcataacgctcgacgtcgaaatgccgcgcatggacggcgtgaccttcctgcgcaaactgatgaaacatcaccctataccggtcatcatcgtctcctcgcttaccgtcgccggcagcgaactcgcaatggaggcgctccaatacggcgccatagacgttatgtgcaaacccggtaccgcctacagcgtgggcgacatgtccgaaatactgatacaaaagataaaagccgccgcgatggtcgatatgaaaaaacgcgccgacatgataaaagaaagagccgctttgtctacggaaccgcctaagcgcctcgccatgaccaaaacgaccaacaaaatcatagccataggcgcctccaccggcggcaccgaggccataaaagacgtgcttgtctccttccccgccggcgcccccggaacggtgatcgtccagcacatgccggagtacttcaccaaatccttcgccgagaggctcaacagcacctgcgagataaacgtcaaggaagccgagaacggcgaccgcgttatccccggcagggcgcttctcgcccccggcaacaaacacatggtgctcaaaagatccggcgcgcagtatttggtcgaactcaaagacggcccgctcgtcttccaccagcgcccggcggtagaggtgctcttcaactccgtggcccagtacgccggcgcgaacgcggtcggcatgatcctgaccggcatgggcaaagacggagccaaaggtctgctcgccatgaaagaggccggcgcgtacacgatagtgcaagacgaagcctcaagcgtggtgtggggcatgcccggcgaagctttcaagttaggcgccgccacaatagtcctccccctcaaaaagatcgcggcggaagctatcaaaagagcggagtcggagtaa

SEQ ID NO: 44690 - protein, 354 aa, Unknown
  Obtained from environmental sample
  DOMAIN (9)...(127): Response regulator receiver domain
  misc_feature (1)..(354): Xaa is any amino acid
MRETVTMKVRVLVVDDSAVVRQILTREFSKDKDIEVVGTAPDPYVARDKIVQLKPDVITLDVEMPRMDGVTFLRKLMKHHPIPVIIVSSLTVAGSELAMEALQYGAIDVMCKPGTAYSVGDMSEILIQKIKAAAMVDMKKRADMIKERAALSTEPPKRLAMTKTTNKIIAIGASTGGTEAIKDVLVSFPAGAPGTVIVQHMPEYFTKSFAERLNSTCEINVKEAENGDRVIPGRALLAPGNKHMVLKRSGAQYLVELKDGPLVFHQRPAVEVLFNSVAQYAGANAVGMILTGMGKDGAKGLLAMKEAGAYTIVQDEASSVVWGMPGEAFKLGAATIVLPLKKIAAEAIKRAESE

SEQ ID NO: 44691 - DNA, 1020 bp, Unknown
  Obtained from environmental sample
  misc_feature (1)..(1020): n is a, c, g, or t
gtggcccaaaaagcgcgcttgatagagtacctctgcgccgccgccgaaaacggcaaggacgtcacagtgctgatagagttacgggcgcgcttcgacgagcagaacaacatcaactggtctgagcggctcgaggaggccggatgccgtcttatcttcgggttcgacgaaatcaaggtgcacgccaaactatgcctcatcacccgcaaagaacgcggtgaaatactgtacatcacgcaggtggggacgggcaactacaacgagatcaccgccgagttctacaccgacctcacgctcatcaccgccgaccagaagatcggcgcggaggctaaccgcttcttcagaaacatggccgtggcaaacctaaacgacaactacgaacacctgttagtcgcgccagccaacctaaaaagcggcgtcttggctctaatagacgagcaaattgcgcttggtgagaaagggcgcataatcatgaagctaaactccatgaccgatatagacgttatccaaaagctctccgaggcctcctgcgccggcgtaaagacagacctaatcatccgcggcatctgctgcctgataccgggactgcccggggctaccgaaaacatatcggtaataagcattgtgggccgcttcttagagcactcgcgcgtctacagtttcggcgcaggcgcggcgcagaagatgtacatcgcgtccgccgacatgatgacgcggaacacgacgcgccgcgtagaggtagccgcccctatcctagacgagcagataaaggcgctcatcaacaagatgatagaaacggaactctacgacaacgtaaaagcgcgccgcctgcgcagcgacggctactacgaaaagatacgccgcgacagcgaaccggtagacagccaagagctgcttataaaagaggcggcggaaagaataaaactcgcgcggcgccaagaggcgggcgcgacggacaagagaaagagcatggtgcgttccacgctcaaggattggctggggcggttgacggattggatttga

SEQ ID NO: 44692 - protein, 339 aa, Unknown
  Obtained from environmental sample
  DOMAIN (1)...(304): Polyphosphate kinase
  misc_feature (1)..(339): Xaa is any amino acid
MAQKARLIEYLCAAAENGKDVTVLIELRARFDEQNNINWSERLEEAGCRLIFGFDEIKVHAKLCLITRKERGEILYITQVGTGNYNEITAEFYTDLTLITADQKIGAEANRFFRNMAVANLNDNYEHLLVAPANLKSGVLALIDEQIALGEKGRIIMKLNSMTDIDVIQKLSEASCAGVKTDLIIRGICCLIPGLPGATENISVISIVGRFLEHSRVYSFGAGAAQKMYIASADMMTRNTTRRVEVAAPILDEQIKALINKMIETELYDNVKARRLRSDGYYEKIRRDSEPVDSQELLIKEAAERIKLARRQEAGATDKRKSMVRSTLKDWLGRLTDWI

SEQ ID NO: 44693 - DNA, 1224 bp, Unknown
  Obtained from environmental sample
  misc_feature (1)..(1224): n is a, c, g, or t
atgcttgtctcctttttttttctattatataatgaaattcacttattaaataggggtgttttcttggcgcagaaaaagaatagagttaaaatcttcataataattttgatttttattgtctattttcttatagccgcgcgtccgattccccgcgaaacagttctttcttacaaatggataagatcattgtcggcaagctctcaagcctcttattcggatgataataattctttagacggcgatataggcgtttcctctttatcaggcgcgcctcttcctttcaccttaggttcgcggttcggctatgttgacgagcagggacaatttgccgtaaacagatcaaagattaacgatatttatcttagtccgaatatgtggacagagtacagcgcggaaccttcgaatattgtgattaatgatattttaagcgacaaaaaaattaacattgaaaacacaaaaggctatcctgttttgcttgacgacagaatttttattctgggcagcgagcagaattcgttatctcaggtaaacgagaacggaaatgttttgtggacttatgaattcggcgctccccttacctgcatggacgccgcttcggagcttgtagtgacaggctctcttgacggcgcggttgaggtttttaattcgagcggagagcgtatttattactttgaacccggcggttcgcgctattcggtgattcttggctgcgcgatttccaaagacggctcgtatatcggcgttgtatgcggcgtagagcagcagcgtttcctgttgtttgaacgttttgaaagcgcgggcggcgaatataaagttgtataccacgaatttttgggagacggattcagacgacccgtatatattttatttgtcgacgatgatcgcagagttgtttttgaacgcgccggaggactcggctgttacacgattaagcaaaggcacggaatattgattccgttagacggaaatattgccgccgttgacggttcgggagaacagggagttttctttttaattacttcacatccgggtcaggaaaaaaagcttacgggaattcagttcccgcgcgaaggtttgttcgggtttttgggaaacgcggaatcggaatcggtttttttaagagcggcgtttaaaagcgacgatatataccttggcagaaaaatatcgacagttgtaacaggcgggggatcgtcgttaatttccttttctttggaggaaaaataa

SEQ ID NO: 44694 - protein, 407 aa, Unknown
  Obtained from environmental sample
  misc_feature (1)..(407): Xaa is any amino acid
MLVSFFFLLYNEIHLLNRGVFLAQKKNRVKIFIIILIFIVYFLIAARPIPRETVLSYKWIRSLSASSQASYSDDNNSLDGDIGVSSLSGAPLPFTLGSRFGYVDEQGQFAVNRSKINDIYLSPNMWTEYSAEPSNIVINDILSDKKINIENTKGYPVLLDDRIFILGSEQNSLSQVNENGNVLWTYEFGAPLTCMDAASELVVTGSLDGAVEVFNSSGERIYYFEPGGSRYSVILGCAISKDGSYIGVVCGVEQQRFLLFERFESAGGEYKVVYHEFLGDGFRRPVYILFVDDDRRVVFERAGGLGCYTIKQRHGILIPLDGNIAAVDGSGEQGVFFLITSHPGQEKKLTGIQFPREGLFGFLGNAESESVFLRAAFKSDDIYLGRKISTVVTGGGSSLISFSLEEK

SEQ ID NO: 44695 - DNA, 324 bp, Unknown
  Obtained from environmental sample
  misc_feature (1)..(324): n is a, c, g, or t
ttgatcgaacaggaagaactgcaaaccctgattccgcacagaggaaaaatgatgctcctcaacagggtaatagattacgatattgaacatagtatcagggcggaatatactgtcaccagggattgtattttttacgatcctgctttggacggggtgcccgcctgggttggctttgaatttatggctcaggcgatttcaactcttacaggaatcaggaaaagggcaaagggagagaaacctaanatcgggtttatcttaagcatcccgtccatgcgtatggaaattccattttttagagcggcagtttggcggagattcgtgtaa

SEQ ID NO: 44696 - protein, 107 aa, Unknown
  Obtained from environmental sample
  misc_feature (1)..(107): Xaa is any amino acid
MIEQEELQTLIPHRGKMMLLNRVIDYDIEHSIRAEYTVTRDCIFYDPALDGVPAWVGFEFMAQAISTLTGIRKRAKGEKPXIGFILSIPSMRMEIPFFRAAVWRRFV

SEQ ID NO: 44697 - DNA, 684 bp, Unknown
  Obtained from environmental sample
  misc_feature (1)..(684): n is a, c, g, or t
atgctgattaattacgcggcgggtattttatcgctgttttttatttttgagtttgtccatgaaataaacggatggatgctgcaacaggtattattcttgtatggattgaatcttacagactattctttgtggtcatgtttctttatcaatacaattacccttccatattacattcgtaacggagaatttgataaatttcgacttaggcctgtagaaccgatttttcaaatcatgatggatggctttgatgacgattcatggggagaattgatagtcggcgtcattgtgcttacatattcctggattagccttaaaataccggctgtatatgctttgttttttccggttgttgcagtatccggctgccttgtttacgctggaatgtcaattgcgctgtcaacggtatctttctttacaatagcccaggctgacgtggcaaacttaaccaaccagataaaagaattggcacaataccctatttcgatatacccaaaagttatccgcataatttttacctttttatgccctgtcgcttttattgcctttatccccagcttaatcgtgtttcgcatggttagtgtttgggtaattatcgcagtcccgcttgtgtcgctaatattctttttgttgtcaataaaaatctggatgataggagtaaaacactatggtggaacaggcacatag

SEQ ID NO: 44698 - protein, 227 aa, Unknown
  Obtained from environmental sample
  DOMAIN (2)...(227): Protein of unknown function (DUF990)
  misc_feature (1)..(227): Xaa is any amino acid
MLINYAAGILSLFFIFEFVHEINGWMLQQVLFLYGLNLTDYSLWSCFFINTITLPYYIRNGEFDKFRLRPVEPIFQIMMDGFDDDSWGELIVGVIVLTYSWISLKIPAVYALFFPVVAVSGCLVYAGMSIALSTVSFFTIAQADVANLTNQIKELAQYPISIYPKVIRIIFTFLCPVAFIAFIPSLIVFRMVSVWVIIAVPLVSLIFFLLSIKIWMIGVKHYGGTGT

SEQ ID NO: 44699 - DNA, 615 bp, Unknown
  Obtained from environmental sample
  misc_feature (1)..(615): n is a, c, g, or t
ttggcaaaggaaaataaaaagtttatctattcggaaatcagaaagggcgcaagcgcaaaaacctttgaagccgcgctggaatggctgttaagatgcggcttgatacaccgtgtttcccgcgtatcaaaacccgcgataccattaaaagggtatgccgactctaccggcgcgtttaagctattcttgtgcgacataggactcatgtcggcaatgtcaaaaattgacgtgcgtgtgttattggaaggcgacgctcttttcacagaatttaaaggcacgctaaccgaacaatttgtttgccaggaattaaaattaatagaagatattgatttggcatattggtcaaacgaagcccctgcccgctcagaaatagattttatactgcagacgggaatgcgaattatcccgcttgaagcaaaatcgtccaccaacctgaaagctaaaagcctttcagtgtatcgtgaaaaatttcggcctgaaacagaaatcagaacctcgctggcggactacaagaaaaccggcaatctgtacgatattcccctgtacgcgttgggcgggttaatggaaattatcaatcctgatatcgagcctaaaaccgccccgaacgctttaccataa

SEQ ID NO: 44700 - protein, 204 aa, Unknown
  Obtained from environmental sample
  misc_feature (1)..(204): Xaa is any amino acid
MAKENKKFIYSEIRKGASAKTFEAALEWLLRCGLIHRVSRVSKPAIPLKGYADSTGAFKLFLCDIGLMSAMSKIDVRVLLEGDALFTEFKGTLTEQFVCQELKLIEDIDLAYWSNEAPARSEIDFILQTGMRIIPLEAKSSTNLKAKSLSVYREKFRPETEIRTSLADYKKTGNLYDIPLYALGGLMEIINPDIEPKTAPNALP

SEQ ID NO: 44701 - DNA, 708 bp, Unknown
  Obtained from environmental sample
  misc_feature (1)..(708): n is a, c, g, or t
gtggtgtacctcgtagcgttctttaagcccgcgcaggatcgcgatggtatcctcaaccgagggctccgccgtgtacacctgctggaagcggcgttccagggccgcgtctttttcaatgtgcttgcggtactcatcaagcgtggtggcgccaatgcagcgcagttcgccgcgcgccagagccggcttgagcaggttggaagcgtctgtcgcgccttccgccgcgcccgccccgaccagggtatgcagttcgtcaataaagaggattatcttcccctcggcggcctgcacctcgtgtatcagagccttgaggcgttcctcaaattcgccgcggaattttgtcccggcgacaagctggcccaaatccagggcaaggagctttttgtctttcagcccttccggcacgtcccccgcgactatgcgccgcgcaagaccctccacgatggcggtcttgcccacgcccggctcgcctatcagtatggggttgttttttgtacgccgggacagcacctgcatacagcggcgtatttcctcgtcgcgtccgatgacagggtctattttttcctgcctcgccagcgcggtaaggtcgcggcagaagcgttccagcacctggtacttgttttcggggttttgatcggtcacgcgctggttgccccggacttgcttaagcgcgtccagaatcgcttttttggtaacgccggctttttttaa

SEQ ID NO: 44702 - protein, 235 aa, Unknown
  Obtained from environmental sample
  misc_feature (1)..(235): Xaa is any amino acid
MVYLVAFFKPAQDRDGILNRGLRRVHLLEAAFQGRVFFNVLAVLIKRGGANAAQFAARQSRLEQVGSVCRAFRRARPDQGMQFVNKEDYLPLGGLHLVYQSLEAFLKFAAEFCPGDKLAQIQGKELFVFQPFRHVPRDYAPRKTLHDGGLAHARLAYQYGVVFCTPGQHLHTAAYFLVASDDRVYFFLPRQRGKVAAEAFQHLVLVFGVLIGHALVAPDLLKRVQNRFFGNAGFF

SEQ ID NO: 44703 - DNA, 2157 bp, Unknown
  Obtained from environmental sample
  misc_feature (1)..(2157): n is a, c, g, or t
gtgaccgatcaaaaccccgaaaacaagtaccaggtgctggaacgcttctgccgcgaccttaccgcgctggcgaggcaggaaaaaatagaccctgtcatcggacgcgacgaggaaatacgccgctgtatgcaggtgctgtcccggcgtacaaaaaacaaccccatactgataggcgagccgggcgtgggcaagaccgccatcgtggagggtcttgcgcggcgcatagtcgcgggggacgtgccggaagggctgaaagacaaaaagctccttgccctggatttgggccagcttgtcgccgggacaaaattccgcggcgaatttgaggaacgcctcaaggctctgatacacgaggtgcaggccgccgaggggaagataatcctctttattgacgaactgcataccctggtcggggcgggcgcggcggaaggcgcgacagacgcttccaacctgctcaagccggctctggcgcgcggcgaactgcgctgcattggcgccaccacgcttgatgagtaccgcaagcacattgaaaaagacgcggccctggaacgccgcttccagcaggtgtacacggcggagccctcggttgaggataccatcgcgatcctgcgcgggcttaaagaacgctacgaggtacaccacggcgtgcggattaaagacgaggcgctggtcgccgcggcaacgctttccagccgctatataacaagccgctttatgccggacaaggccattgaccttgtggacgaggcggcgagccgtctgaaaatggaactggacagccgccccactgaactggacaaacttgaacgcaagctgcttcagttctccattgaaaaacaggcgctttcccgcgaggaagaccccgcgtcaaaagaacgccttgccaaacttgaaaaagaaatagccgacattacggcggaacgcgacgccgtgaaagcccgctgggaagctgaaaaaatagacatccagggcatccgcgaattaaagcagaggattgaagaattaaaaatagaagagacccgttacgagcgtgaagggaatcttttaaaagcagccgaggtaaagcacggaaaaattcccgaggcccaaaaacagcttgccgcgcttgcggctcttatggaaaagaagcgggataaagcgggatctggcggggcggccttactaagggaagaagtgagcgaggaagacattgccgccgtggtatccgcatggacggggattcccgtttcaaaaatgctctcaggcgaaatgcagaagtaccttgatctggaaaaagtgctggagcagcgggtggtcgggcaggacaaagcgcttgccgcggttgccgacgcgatcaggcggaacaaggcgggcctttccgatgctgcgcggcccctggggtctttcctgtttttggggccaaccggcgtgggcaaaaccgaattggcgaagactctggcggactttttgttcaacgacgagaaagcccttgccagaatcgacatgagcgagtacggcgaaaaacattcggtcagccgccttataggcgcgccgccgggctatgtgggctacgagcagggcggtcagcttaccgaagtcgtgcgcaggcggccctacagcgtggttctttttgacgaaattgaaaaggcccatcctgaagtgtttaatgtttttttgcagattctcgacgacggacggcttaccgacggccagggccgtattgtggatttcaaaaatgttataatcattatgacaagcaacatcggatcggatttaattcttgaggaagaaaacaccggggcaataagggattcacttttggaattgctcaagcggaatttcaggccggaattcctcaaccgcatcgacgagacggtgatcttcaaccggctcggcaagaacgaaatcggcaaaatcgttgaaattcagcttgcccgcctgtcgcagcggctggccgaacgtaaaattacacttaacacctcgcgagcggcaaaagaattcctcgccgaacggggctatgatcccatgtatggggcgcggcccctcaagcggacaatacaggcggaactggaaaaccccctggcgaaattcgtcatttccggaaaaatccacgaaggcgacgttgtcaccgctgacaaaaaaggcgaaggactggaatttcaggtaacaaataataagtaa

SEQ ID NO: 44704 - protein, 718 aa, Unknown
  Obtained from environmental sample
  DOMAIN (460)...(614): ATPase family associated with various cellular activities (AAA)
  misc_feature (1)..(718): Xaa is any amino acid
MTDQNPENKYQVLERFCRDLTALARQEKIDPVIGRDEEIRRCMQVLSRRTKNNPILIGEPGVGKTAIVEGLARRIVAGDVPEGLKDKKLLALDLGQLVAGTKFRGEFEERLKALIHEVQAAEGKIILFIDELHTLVGAGAAEGATDASNLLKPALARGELRCIGATTLDEYRKHIEKDAALERRFQQVYTAEPSVEDTIAILRGLKERYEVHHGVRIKDEALVAAATLSSRYITSRFMPDKAIDLVDEAASRLKMELDSRPTELDKLERKLLQFSIEKQALSREEDPASKERLAKLEKEIADITAERDAVKARWEAEKIDIQGIRELKQRIEELKIEETRYEREGNLLKAAEVKHGKIPEAQKQLAALAALMEKKRDKAGSGGAALLREEVSEEDIAAVVSAWTGIPVSKMLSGEMQKYLDLEKVLEQRVVGQDKALAAVADAIRRNKAGLSDAARPLGSFLFLGPTGVGKTELAKTLADFLFNDEKALARIDMSEYGEKHSVSRLIGAPPGYVGYEQGGQLTEVVRRRPYSVVLFDEIEKAHPEVFNVFLQILDDGRLTDGQGRIVDFKNVIIIMTSNIGSDLILEEENTGAIRDSLLELLKRNFRPEFLNRIDETVIFNRLGKNEIGKIVEIQLARLSQRLAERKITLNTSRAAKEFLAERGYDPMYGARPLKRTIQAELENPLAKFVISGKIHEGDVVTADKKGEGLEFQVTNNK

SEQ ID NO: 44705 - DNA, 588 bp, Unknown
  Obtained from environmental sample
  misc_feature (1)..(588): n is a, c, g, or t
atggtatcctcaaccgagggctccgccgtgtacacctgctggaagcggcgttccagggccgcgtctttttcaatgtgcttgcggtactcatcaagcgtggtggcgccaatgcagcgcagttcgccgcgcgccagagccggcttgagcaggttggaagcgtctgtcgcgccttccgccgcgcccgccccgaccagggtatgcagttcgtcaataaagaggattatcttcccctcggcggcctgcacctcgtgtatcagagccttgaggcgttcctcaaattcgccgcggaattttgtcccggcgacaagctggcccaaatccagggcaaggagctttttgtctttcagcccttccggcacgtcccccgcgactatgcgccgcgcaagaccctccacgatggcggtcttgcccacgcccggctcgcctatcagtatggggttgttttttgtacgccgggacagcacctgcatacagcggcgtatttcctcgtcgcgtccgatgacagggtctattttttcctgcctcgccagcgcggtaaggtcgcggcagaagcgttccagcacctggtacttgttttcggggttttga

SEQ ID NO: 44706 - protein, 195 aa, Unknown
  Obtained from environmental sample
  misc_feature (1)..(195): Xaa is any amino acid
MVSSTEGSAVYTCWKRRSRAASFSMCLRYSSSVVAPMQRSSPRARAGLSRLEASVAPSAAPAPTRVCSSSIKRIIFPSAACTSCIRALRRSSNSPRNFVPATSWPKSRARSFLSFSPSGTSPATMRRARPSTMAVLPTPGSPISMGLFFVRRDSTCIQRRISSSRPMTGSIFSCLASAVRSRQKRSSTWYLFSGF

SEQ ID NO: 44707 - DNA, 393 bp, Unknown
  Obtained from environmental sample
  misc_feature (1)..(393): n is a, c, g, or t
atgggccttttcaatttcgtcaaaaagaaccacgctgtagggccgcctgcgcacgacttcggtaagctgaccgccctgctcgtagcccacatagcccggcggcgcgcctataaggcggctgaccgaatgtttttcgccgtactcgctcatgtcgattctggcaagggctttctcgtcgttgaacaaaaagtccgccagagtcttcgccaattcggttttgcccacgccggttggccccaaaaacaggaaagaccccaggggccgcgcagcatcggaaaggcccgccttgttccgcctgatcgcgtcggcaaccgcggcaagcgctttgtcctgcccgaccacccgctgctccagcactttttccagatcaaggtacttctgcatttcgcctga

SEQ ID NO: 44708 - protein, 130 aa, Unknown
  Obtained from environmental sample
  misc_feature (1)..(130): Xaa is any amino acid
MGLFNFVKKNHAVGPPAHDFGKLTALLVAHIARRRAYKAADRMFFAVLAHVDSGKGFLVVEQKVRQSLRQFGFAHAGWPQKQERPQGPRSIGKARLVPPDRVGNRGKRFVLPDHPLLQHFFQIKVLLHFA

SEQ ID NO: 44709 - DNA, 321 bp, Unknown
  Obtained from environmental sample
  misc_feature (1)..(321): n is a, c, g, or t
ttgatcgtgtcaaagatttatttaaaggtagagacaggcgttcagactaagagcatcgaattcaaagaacggtttgaagctgaaaaagcagccgcccaaatgacgattggggcgagttcctccgtccgctacgacttggtagggagaatagtcgcggaaaccggattgaccagaaaagcggtggcaaagattttgatagggatcgaaaaacgcgtattcgaccaattcggcggtaaccccgaagaattcattatccgagccgccggtatagtgaacgaacagaaagttgcggctattaagggacaaacaaatgccggataa

SEQ ID NO: 44710 - protein, 106 aa, Unknown
  Obtained from environmental sample
  misc_feature (1)..(106): Xaa is any amino acid
MIVSKIYLKVETGVQTKSIEFKERFEAEKAAAQMTIGASSSVRYDLVGRIVAETGLTRKAVAKILIGIEKRVFDQFGGNPEEFIIRAAGIVNEQKVAAIKGQTNAG

SEQ ID NO: 44711 - DNA, 1068 bp, Unknown
  Obtained from environmental sample
  misc_feature (1)..(1068): n is a, c, g, or t
ttgcggctattaagggacaaacaaatgccggataagccgaaatttgagactccgaatctcgccgccgaaaacgcggcgaaaatagcggaattttttccgggcgcggtcgttgagggcaaggttaattttgacctgcttagatcgctgctcggcgacgacatcttcggcgatgaagcgtatgagttcacatgggtcggaaaacgcaaggcaatcgcggaaactttacggcctatacgaaagacgttgcggccttgtttggaagagagcaaggattggaacactacggagaatttgtatattgagggagataatttggatgtgctgaagttgttgcaggagagctatttggggaagattaaaatgatttatatcgatccgccttataataccgggaatgactttatatacaacgataagtgggtgatggatagcgagcggtgggcgaaggaggcgtgggagtacgatgaggaaacaggtgagaggttgtttcgtaataccgagagcagcgggaggtttcactcggattggtgctcgatgatttatccgcggttggtgttggggagaaatttgttggctgccaacggggtggtgtttatcagtattgatgataacgaggtgcataatctgaggaaaatttgcgacgaagtattcggggagagtaattttgtgggacaggtttgcagagcgacaggcacgactacaggacaagatgcgaataaaatggggtcgtcattggattatttgttggtttacagaaagtctgcgaaatttacattgtcaggcgttgaattgagcaacaatgatatttcgcgattctcatatgaggacgctaagggtaaatattcgttgttgcaaatgcgtaagacaggaaatgccgatagacgcgaggatagaccgagtatgtattatgccgctatttcaccggacggcaaagaggtttttcccatcggcccgactggatacgaaagccggtggcgaatcggctatgacacttatcaagaatatcttgtcaatgatatgatagtatggcaaaaatcaccaaaacggcgaagtcccccccctatgtga

SEQ ID NO: 44712 - protein, 355 aa, Unknown
  Obtained from environmental sample
  DOMAIN (119)...(343): DNA methylase
  misc_feature (1)..(355): Xaa is any amino acid
MRLLRDKQMPDKPKFETPNLAAENAAKIAEFFPGAVVEGKVNFDLLRSLLGDDIFGDEAYEFTWVGKRKAIAETLRPIRKTLRPCLEESKDWNTTENLYIEGDNLDVLKLLQESYLGKIKMIYIDPPYNTGNDFIYNDKWVMDSERWAKEAWEYDEETGERLFRNTESSGRFHSDWCSMIYPRLVLGRNLLAANGVVFISIDDNEVHNLRKICDEVFGESNFVGQVCRATGTTTGQDANKMGSSLDYLLVYRKSAKFTLSGVELSNNDISRFSYEDAKGKYSLLQMRKTGNADRREDRPSMYYAAISPDGKEVFPIGPTGYESRWRIGYDTYQEYLVNDMIVWQKSPKRRSPPPM

SEQ ID NO: 44713 - DNA, 483 bp, Unknown
  Obtained from environmental sample
  misc_feature (1)..(483): n is a, c, g, or t
ttggagttcaaagtgaataagaaaaagtttgttacttttataattattctccttattatattgtttgccctttttatcgtattttcatttattccgcaaaagaacatatttgaaaatatatatgcaaatatattttcaagattgtcaggcgctcaaccgcagggaacaggaggcgctcaaagaggcgttggcgaaaacagaggcggaagcggcgctcctgcccagcagcagggagcgggaggcgctcaaagaaacgtggcgggcagagacggaacgcgtaatgcagccgctatccgcactgtaactgtagcgccgggaaccatagaaaaaagcgtaattattaacggtgaaatcctagcgcgtaatcaggttacgatttaccccactgtaggcggcaggcttgttgaatgcaactacagtgtcggagacagggttgtaagaggcgctgtggttgcaagggttgatcccgtcaagacccggtga

SEQ ID NO: 44714 - protein, 160 aa, Unknown
  Obtained from environmental sample
  SIGNAL (1)...(29)
  misc_feature (1)..(160): Xaa is any amino acid
MEFKVNKKKFVTFIIILLIILFALFIVFSFIPQKNIFENIYANIFSRLSGAQPQGTGGAQRGVGENRGGSGAPAQQQGAGGAQRNVAGRDGTRNAAAIRTVTVAPGTIEKSVIINGEILARNQVTIYPTVGGRLVECNYSVGDRVVRGAVVARVDPVKTR

SEQ ID NO: 44715 - DNA, 705 bp, Unknown
  Obtained from environmental sample
  misc_feature (1)..(705): n is a, c, g, or t
ttgattcttattgttgctggtattgcgttgtctggggtggcggcttttatggtgaaaatccggtttaagagcggcgaaaaaatagccatttccagcggttataccggagcgcaggttgctaaggctattttgcagagctgcggaattagcgatgtgagcgttcacgagcataaagggtttctttctgaccattacaatccgctaaacaaaacgcttaatttaagcccagaggtttataacgggcgttctgcttcggcggctggggtggcggcgcacgaggtggggcacgctattcagcacgcgcaaaattattttcctatgtggattcgctcaactattgtgccggcggcaaatattgggagcaatttggggccttggattattatagtgggcattatgctgggggcaggggcagaaattaactccggcattgggcattatattgccgctataggcgttgccctgtttgccatggcaacggcgtttactttggttaccgttccagttgagtttgatgcctcttcgcgggcaaaaaaacagttggagagtttgagcattgttaagccgggcacagaggcaaataccgtttcttctgttttgactgcggcggggctaacttacgtggcggcagccataaattccattttaatgcttttgtactgggcttataaagccggtttgattggcggcagaaggaatgattga

SEQ ID NO: 44716 - protein, 234 aa, Unknown
  Obtained from environmental sample
  DOMAIN (1)...(229): Putative neutral zinc metallopeptidase
  misc_feature (1)..(234): Xaa is any amino acid
MILIVAGIALSGVAAFMVKIRFKSGEKIAISSGYTGAQVAKAILQSCGISDVSVHEHKGFLSDHYNPLNKTLNLSPEVYNGRSASAAGVAAHEVGHAIQHAQNYFPMWIRSTIVPAANIGSNLGPWIIIVGIMLGAGAEINSGIGHYIAAIGVALFAMATAFTLVTVPVEFDASSRAKKQLESLSIVKPGTEANTVSSVLTAAGLTYVAAAINSILMLLYWAYKAGLIGGRRND

SEQ ID NO: 44717 - DNA, 1305 bp, Unknown
  Obtained from environmental sample
  misc_feature (1)..(1305): n is a, c, g, or t
gtgatcaagatagagtctaccacagaaaccatagaaagtaaaggcgggttgctccttgccggaaaaatagcggtgaaggctgggctggagcggataaagagcgcgtttgtaaacaatgccgcagccgtcatcgtcagcctgtacgggcttatgatggaagggaagagcgattttgaaagcatgggggaaaaacgcgggagcctgtttttcaaggaggcgctgaggctgccgtttgtatacgcgaaagaaacagtgaggctgtaccttgagcagatgtcggcggacgccgacacgattatcgtacaattgagggaaagctccgcaaagataatatcgcaagcgccgttacacgggttgtggatagaagggaggcattatctccctgtggacatcgacacagcggcaatggacaactcaaaaacaaaaaaagaaggagtaagccggacataccggaagtacgacgggtttcatccgatatttgcgtatgtggggaaggaagggtatatgctggactgcgaattgaggcccggcagccagcattgtcagaaggggacggtggcatttatagaagggtttatgggtcggctgcggggcatacaaccaggcgggcgtttgttgttccgcatggatgccggaaacgacgcttttgaaacgctgaaagcggtaacggggaaagggagttattgcattctaaagcggaacaaacgccatcaaaacgttgaaaaatggcttaaaatagcaaaacggcgcgggaaacgggttgcatcaagaaaagggaaaaaagtctggataggaacggcacggatacacccgcacaagaaagacgaagtccttgaagatgtcacctgcgtattcgaagttatagaacgcaagagggacgcccaggggaaccggtatttaatccctaaaatagaagcaaacatctggtggacgaacctgacatgcggggctgaaaaagtgatagaactgtatcatggccatgcaaccagcgaacaatttcacagtgaattgaaaaacgacatggacattgagcgtctgccgtccgggaaacttgcggtaaacaaaatactgcttgcggtggcgatgaatgcgtataacgcgttgaggttgcttggtcaaagttctgtagagcaaaaaagtcctgtgaagcaccggcgcaaacggctgggaaaggtaatccgcgatttgatatgcgttgcgggaaaattgatacaacacggacgggaactgatattcaaaatgaatgagaatgacccggtatatccggtgtttttacggctgaatgccgcattgggctgtccatag

SEQ ID NO: 44718 - protein, 434 aa, Unknown
  Obtained from environmental sample
  DOMAIN (128)...(367): Transposase DDE domain
  misc_feature (1)..(434): Xaa is any amino acid
MIKIESTTETIESKGGLLLAGKIAVKAGLERIKSAFVNNAAAVIVSLYGLMMEGKSDFESMGEKRGSLFFKEALRLPFVYAKETVRLYLEQMSADADTIIVQLRESSAKIISQAPLHGLWIEGRHYLPVDIDTAAMDNSKTKKEGVSRTYRKYDGFHPIFAYVGKEGYMLDCELRPGSQHCQKGTVAFIEGFMGRLRGIQPGGRLLFRMDAGNDAFETLKAVTGKGSYCILKRNKRHQNVEKWLKIAKRRGKRVASRKGKKVWIGTARIHPHKKDEVLEDVTCVFEVIERKRDAQGNRYLIPKIEANIWWTNLTCGAEKVIELYHGHATSEQFHSELKNDMDIERLPSGKLAVNKILLAVAMNAYNALRLLGQSSVEQKSPVKHRRKRLGKVIRDLICVAGKLIQHGRELIFKMNENDPVYPVFLRLNAALGCP

SEQ ID NO: 44719 - DNA, 777 bp, Unknown
  Obtained from environmental sample
  misc_feature (1)..(777): n is a, c, g, or t
atgggaggggaggcttttgcntggtgtaccaaccttaccagcgtaactatccccaacaccgttactaccattgagtacaatgcgtttgctgacaacaaactgaccaacgttaccattccaaacagtgttactcatctttcaggtttttccggcaaccaactaaccagtattaccatcccaaacagtgttactcatctttcaggtttttccggcaaccaactaaccagtattaccatcccaaacagtgttaccactattgatggagctgcgtttatgagtaaccaactgaccagtattaccatcccaaacagcgttaccactattgatggagctgcgtttatgagtaaccaactgaccagtattaccatcccaaacagcgttaccacaattgggtatcaggtgtttcgcgacaaccaactgaccagcgttactctcccaaacagcattacttccattggggtaggggcgtttatggacaatcaactaaccagcattaccatcccaagcagcattacacgcattggagaaagcgcgtttcacaataacctgctaaccagcgttactataccagacaatgttaccgcaattgggcaatctgcgtttgtagacaaccaactgatcagtattaccatcggggcaaatgtagcacttgaaggtaatagtgcttatccatatccattttacaacggttttgatgtggtttataccaacggcggtaagcaggcgggaacctatacgcggcctaatgccaatagtacggtgtggacaaaacagtaa

SEQ ID NO: 44720 - protein, 258 aa, Unknown
  Obtained from environmental sample
  misc_feature (1)..(258): Xaa is any amino acid
MGGEAFAWCTNLTSVTIPNTVTTIEYNAFADNKLTNVTIPNSVTHLSGFSGNQLTSITIPNSVTHLSGFSGNQLTSITIPNSVTTIDGAAFMSNQLTSITIPNSVTTIDGAAFMSNQLTSITIPNSVTTIGYQVFRDNQLTSVTLPNSITSIGVGAFMDNQLTSITIPSSITRIGESAFHNNLLTSVTIPDNVTAIGQSAFVDNQLISITIGANVALEGNSAYPYPFYNGFDVVYTNGGKQAGTYTRPNANSTVWTKQ

SEQ ID NO: 44721 - DNA, 786 bp, Unknown
  Obtained from environmental sample
  misc_feature (1)..(786): n is a, c, g, or t
atgtccgatcaatatatatataattacgatgatattataaaaattctgccggcatgggctgaggagcttgcgaaaaaataccgttcaaaaacggcaaacgtatatattttacacggtaatattagggattttcttccacacgaaaatattgaaggtgagttcacttttacaagggtgcaggattatatctctgaaatcttattcggcaataaggaaataatcgcgttctacgacagttcgaggggactgacattttgcgaaccgcatatggaaaggaattaccttgcggccaccccccagttcgcggtaagccccgattttgattcagccgattttgtttcaaatgatcccgagcggtgttttccgtatcttgaaaaatattttctctctcagatacctgaagataagaaggttaaaggcagaaaggttttaattgttgattttgcggaacatattgttcccgccggggatcgtctgtcagacagggacaggtactgtatggttacgtttaaccgttgggcgactgaccctaaatttattaagggcgatatttccattattctgctgactgaaaatctatccgatatttcttcgcgtcttacaagttctccggctattgtaaagatcagcgttccgtttcccaacgcgaaaatcagggaaagttatctgcgttcggaagaagaaaaaggaaaactccttttggaacgcggattaactcctgaaaggcttgcggcgattacgtccggcctaaatctgatgaacctgtaccgttctcggccgatctga

SEQ ID NO: 44722 - protein, 261 aa, Unknown
  Obtained from environmental sample
  misc_feature (1)..(261): Xaa is any amino acid
MSDQYIYNYDDIIKILPAWAEELAKKYRSKTANVYILHGNIRDFLPHENIEGEFTFTRVQDYISEILFGNKEIIAFYDSSRGLTFCEPHMERNYLAATPQFAVSPDFDSADFVSNDPERCFPYLEKYFLSQIPEDKKVKGRKVLIVDFAEHIVPAGDRLSDRDRYCMVTFNRWATDPKFIKGDISIILLTENLSDISSRLTSSPAIVKISVPFPNAKIRESYLRSEEEKGKLLLERGLTPERLAAITSGLNLMNLYRSRPI

SEQ ID NO: 44723 - DNA, 1077 bp, Unknown
  Obtained from environmental sample
  misc_feature (1)..(1077): n is a, c, g, or t
atgataaataaagaggtattatatataaaggggaacgatataaaaccggagggtattgttgaaaagaattttcataattggaaagaacattttacagttatggaggagagcggaaaagaaggcagcattaaatgcgacgaaaaactgatattaaaagtaattaataaagaaagtttaaattttgagcaactattggatatatatgtaaattataattacaaggaacaacgaaaaaaactgcgcacgattatttgccaacatcatttagagtggaacaaagatttgtacaagggaccatttcagaaacacttggaagccaagctgggaaaattggatttgtgggcaacccccaatggaggtaaagcggaagaaaaagaattaccacccaaggagcaggtgtggtttgcgcaccctgtgtattttataaatcacctgaatgaagcgaaactgctggataggacttttaatccgtattatggggaaaacaaaaaagaagcattaaaaggaaaacgttttaattgttttgataaccctggatttgctcctatatatcataaaagagaaaagagtgtggatgaagacaaggatcaaacatttaaatatgaaggaaaacggtatggggttattaccggattgtttaatcaggattacacagatttatatgaaactcataaatattatccgcatgaaggagttgattttagaggagatattggaagagagataaaatcctttatacatggaaaagtaataatggttggagtaatgggtggttttggaactacaatcatcgtaagaccgttgtatgaaaatggtattatatatttattaggacatttatcagagtcattggtaaaggaagttgacgaatttaagcctggtgaaacagtagcgaaggttggtaaaagcggaggtactgcccatccacatttacatgttagtgtagtggaaacaagtttcatagacaaagatgatattgttaaaaaaaaagaaggtgtatataaatgggatataattcccgaatatcgtgatccgtttaaccatcacataaaacgacataatccgaggccattttaa

SEQ ID NO: 44724 - protein, 358 aa, Unknown
  Obtained from environmental sample
  DOMAIN (227)...(323): Peptidase family M23
  misc_feature (1)..(358): Xaa is any amino acid
MINKEVLYIKGNDIKPEGIVEKNFHNWKEHFTVMEESGKEGSIKCDEKLILKVINKESLNFEQLLDIYVNYNYKEQRKKLRTIICQHHLEWNKDLYKGPFQKHLEAKLGKLDLWATPNGGKAEEKELPPKEQVWFAHPVYFINHLNEAKLLDRTFNPYYGENKKEALKGKRFNCFDNPGFAPIYHKREKSVDEDKDQTFKYEGKRYGVITGLFNQDYTDLYETHKYYPHEGVDFRGDIGREIKSFIHGKVIMVGVMGGFGTTIIVRPLYENGIIYLLGHLSESLVKEVDEFKPGETVAKVGKSGGTAHPHLHVSVVETSFIDKDDIVKKKEGVYKWDIIPEYRDPFNHHIKRHNPRPF

SEQ ID NO: 44725 - DNA, 915 bp, Unknown
  Obtained from environmental sample
  misc_feature (1)..(915): n is a, c, g, or t
gtgcagacgatagcggaggagtctacggcgtggccgatggtctcgcgtccggcctacgtgggggggcttggtttcgggatgaagtggaacatgggttggatgcacgacacgctcgtgtatatgtccaaggactccatctataggaaataccaccacagcgagctgacgttcagcatgctgtacgcttttacggaaaactacgtgctgccgctctctcacgacgaagtcgtccacgggaaaaactcccttgtcaacaagatgccgggggatgactggaggcggcttgcgaatttgcggctgctgctcagctatcagttcaatcatcccggtaaaaagctgctctttatgggcggcgagttcgcgcagttcgttgagtggaatcacgaccgtcagctcaactgggagttgacgcagtgggataggcacaacggcatacagcggatggtgagcgatttgaataaaatttataggaaagagccggcgttgcactattacgactttgagcctaagggttttgagtggatagactgcaacgattgggagcagagcattctcggctttatcaggaaggggccggatgattttgatcgtatgctgatagtgttgaatttcacgccggagccgcgcaggggttaccatgtgggcgtgccggtcgccggattttgggaggagatattcaacagcgacgcgcttgagtacggcgggagcggcgtcggcaacgcgggcggcatggagacggaggagaagccgtggcacgggcacagccagtcgctgccgctgacgctgccgccgctcggcgcggtgctgttcaagatcaggaagccggaacctaaggcggcggaggtcgttcaggcggatacggcggatacggcggataagtccggcgggacggagccggcgggtcagggtcagtaa

SEQ ID NO: 44726 - protein, 304 aa, Unknown
  Obtained from environmental sample
  misc_feature (1)..(304): Xaa is any amino acid
MQTIAEESTAWPMVSRPAYVGGLGFGMKWNMGWMHDTLVYMSKDSIYRKYHHSELTFSMLYAFTENYVLPLSHDEVVHGKNSLVNKMPGDDWRRLANLRLLLSYQFNHPGKKLLFMGGEFAQFVEWNHDRQLNWELTQWDRHNGIQRMVSDLNKIYRKEPALHYYDFEPKGFEWIDCNDWEQSILGFIRKGPDDFDRMLIVLNFTPEPRRGYHVGVPVAGFWEEIFNSDALEYGGSGVGNAGGMETEEKPWHGHSQSLPLTLPPLGAVLFKIRKPEPKAAEVVQADTADTADKSGGTEPAGQGQ

SEQ ID NO: 44727 - DNA, 471 bp, Unknown
  Obtained from environmental sample
  misc_feature (1)..(471): n is a, c, g, or t
atggccggcggccgaggtagtaaaataggcggcaaagcgtggatggctgagaatctgaattataagacaggtaaatcttggtgttacggtaatgatgattcaaaatgtaagcaatacggcagactatacgatagatacacagcaatggttgcttgtcctgcccaatggcatttgccatcgcgtgatgagtggaataatttgataactgcggcaggtggtgaaatggcaggtagggcacttaaatcagctataagtggttgggaagatggtaaagatgatttcggtttttcggccctacctggcggttatcgcgaaatcgatggccgcttcagcaatattggtggctatggatattggtggacggcaagtggcaacgcttactatctagtcatgtacgatggtatcaatcatgtacatgagggcaacgatgtcgagagtttcggtttttctgtgcgttgtttgcataattga

SEQ ID NO: 44728 - protein, 156 aa, Unknown
  Obtained from environmental sample
  misc_feature (1)..(156): Xaa is any amino acid
MAGGRGSKIGGKAWMAENLNYKTGKSWCYGNDDSKCKQYGRLYDRYTAMVACPAQWHLPSRDEWNNLITAAGGEMAGRALKSAISGWEDGKDDFGFSALPGGYREIDGRFSNIGGYGYWWTASGNAYYLVMYDGINHVHEGNDVESFGFSVRCLHN

SEQ ID NO: 44729 - DNA, 1278 bp, Unknown
  Obtained from environmental sample
  misc_feature (1)..(1278): n is a, c, g, or t
atgccggcaattaattctctgttaaaaaaaatatcgccaaagcgccctttgtatgtgcagataatatttacgatcttttcgtacttaataatggttgttttaagttatgtctttacaagaaatattgttgacaagtatttaaaacaaaacacggaaaatatttttgtttctttagaatcacaggtcattactgacattatggaaccgcagctgactctggaaagcttttcacgtacggtgcggaatatgattataaacggcgataacgcggacaaattgcgggaatatttcaatgacatgtcgaattatttgtcgcaggacaaacaaagctatttgaattttaacggctttatggggtattttgaaacgttttcaggcggccctgtttttatagaaagcttgctcgggtcaaggcctgccgattatgatccttcggaacgcgaatggtacaaggacgcaatcaaggcggacggtaaaatcgccgaaacgttgatgcatcacgattttatttatgacgatgtcatgtttatatattcgtactgtatttttgacgacgcaggccggcgtttgggcgttgtcgcccttagggtaaaaattgataatataaaaaaatacattgttaataccgttctggtccagggcgcgtacgggatactgatcagcaaggattggattgttcttgcccatccgaacgaggcgtttgtaggcgaagacgcgcataattctaaaattcctttttcaatttttatcaacgaattaagcggcggaatagaaattacggagcgtccgcttgtaacgtataaaggcgaacgcgctttggcctctttccggtttctcccaaacgggtgggttatgggcattgtaacgcctaaagggcagtattataaaagcatattctacatggccgtaattttgattatcctgggaaccgtgctttcatcggtacttatttttgttctgattcgtgttgatgcggcaagaaataaatcggaaatggagaacaagcaaaaatccacttttttagccaacatgagccacgaaatacggacgcccatgaacgccattataggcatgacggatcttttgaattatgagccgcttaacaagcggcagatgggttttgtcaacgatatcaaagtgtccgcccattctctcctttccataataaacgatatattggatatgtcaaaaatagaggcgggtaaattggagattaacccgataactacgattttcatatgttcctggataatattttttccatgttcagctatgtaa

SEQ ID NO: 44730 - protein, 425 aa, Unknown
  Obtained from environmental sample
  DOMAIN (336)...(401): His Kinase A (phosphoacceptor) domain
  misc_feature (1)..(425): Xaa is any amino acid
MPAINSLLKKISPKRPLYVQIIFTIFSYLIMVVLSYVFTRNIVDKYLKQNTENIFVSLESQVITDIMEPQLTLESFSRTVRNMIINGDNADKLREYFNDMSNYLSQDKQSYLNFNGFMGYFETFSGGPVFIESLLGSRPADYDPSEREWYKDAIKADGKIAETLMHHDFIYDDVMFIYSYCIFDDAGRRLGVVALRVKIDNIKKYIVNTVLVQGAYGILISKDWIVLAHPNEAFVGEDAHNSKIPFSIFINELSGGIEITERPLVTYKGERALASFRFLPNGWVMGIVTPKGQYYKSIFYMAVILIILGTVLSSVLIFVLIRVDAARNKSEMENKQKSTFLANMSHEIRTPMNAIIGMTDLLNYEPLNKRQMGFVNDIKVSAHSLLSIINDILDMSKIEAGKLEINPITTIFICSWIIFFPCSAM

SEQ ID NO: 44731 - DNA, 1302 bp, Unknown
  Obtained from environmental sample
  misc_feature (1)..(1302): n is a, c, g, or t
atgggaaaaacgctgactcaaaaaattttcgacactcatacggcggacaagccttttgagggcatctttgtccttaagcttgatcgcgtgttctgtcatgagataacaactcctgccgcgataaacgatctggtttccaaaaacctcgacaaggtttttgatcctgataaaatcaaggcggtgatagatcatgtaacgccggcaaaggattcgctgacggcgcagcaggggaaaaccttgcgcgactgggcgcggcggcacaatataaaagactttttcgacattgggcgcaacggggtctgccacgcgatttttccggaaaagggatttgtccgtcccggttatacgattatcatgggcgacagccacacctgcacccacggcgcgttcggcgcgtttgccgccggggttggaactaccgatcttgaggtggggatactgaaaggcgtctgcgccttccgcaaaccggaaactttgcgcattgatctgcttggggaactgccgcccggcgtttctcctaaagacgtaattcttgctgtcatagcaaaaataagcgtttccggcgcgtcgggaaaagttatggaattgcgcggacctgtaatttcatccatgagcatggaaggcagaatgacaatctgcaacatggcaattgaggcgggagcaacctgcggcgtatgtatgcccgatatgacaactgtaaattatctgtggcaatttatcggtcccgaaggcgataaatcatattcaagcaaagaagaagcgttaaaagatttttcaaaatggacaagtgatgacgacgccgaatattccggtgttgtcgatattgactgctcaaaactggagccgcttgcgactgtcggctataaacccgacgaagtaaaaccggtgcgggaacttgccggaacaaaaattgatcaggtgtacatcggctcttgcaccaacggcagaatagaagatttgcgcgccgccgccgatgtactgcggggcaaaaaaatagccgactctgtacgcgcaatcatcgcgcccgctaccacagacatttacgcacaggctatcaaagaggggcttattcaagttttccttgacgcgaattgctgtgtaacaaacgccacttgcggagcgtgtcttggaatgtccaacggggtgcttgccgaaggtgaagtttgcgcttccaccacaaaccgcaatttttacggacgcatgggtaagggcggcatggttcaccttgtcagtcccgttgtcgccgcggcttccgccattgcgggcgcaattgccgcgccgggtaatattgggaggcagtaa

SEQ ID NO: 44732 - protein, 433 aa, Unknown
  Obtained from environmental sample
  DOMAIN (4)...(422): Aconitase family (aconitate hydratase)
  misc_feature (1)..(433): Xaa is any amino acid
MGKTLTQKIFDTHTADKPFEGIFVLKLDRVFCHEITTPAAINDLVSKNLDKVFDPDKIKAVIDHVTPAKDSLTAQQGKTLRDWARRHNIKDFFDIGRNGVCHAIFPEKGFVRPGYTIIMGDSHTCTHGAFGAFAAGVGTTDLEVGILKGVCAFRKPETLRIDLLGELPPGVSPKDVILAVIAKISVSGASGKVMELRGPVISSMSMEGRMTICNMAIEAGATCGVCMPDMTTVNYLWQFIGPEGDKSYSSKEEALKDFSKWTSDDDAEYSGVVDIDCSKLEPLATVGYKPDEVKPVRELAGTKIDQVYIGSCTNGRIEDLRAAADVLRGKKIADSVRAIIAPATTDIYAQAIKEGLIQVFLDANCCVTNATCGACLGMSNGVLAEGEVCASTTNRNFYGRMGKGGMVHLVSPVVAAASAIAGAIAAPGNIGRQ

SEQ ID NO: 44733 - DNA, 525 bp, Unknown
  Obtained from environmental sample
  misc_feature (1)..(525): n is a, c, g, or t
atgaaagcattcggcggcgaagttttatttcttgatcgcggcgatattaacaccgatgaaattatcccggccaaatatttaaccgaggacacaagaatagcgttaaagccccatcttctggaagacttaaaaataaaaggctttgatccggcgaaagatattgccggaaaaggcgcggtgctgacgcgggcaaatttcggctgcggatcctcgcgcgaacacgccccctgggcgcttgaggtaaacggcatcaatatcgtaatcgcggaaagtttcgcccgtatcttccggcagaatatgtataactgcggcatgatcgcctgcgaagtttccgccgcggttttggaagaattgtttagggaattttccaatgtcaaaacgacattgacggtggatacagacaaaggcactctgatcttcaaagcgggcggaaaagaaaaaacagtttctttcattcttggaaattttgaaaaagcgctggtggaagccggcggctgggtcgagtacgcggcaaagcattattga

SEQ ID NO: 44734 - protein, 174 aa, Unknown
  Obtained from environmental sample
  DOMAIN (1)...(113): Aconitase C-terminal domain
  misc_feature (1)..(174): Xaa is any amino acid
MKAFGGEVLFLDRGDINTDEIIPAKYLTEDTRIALKPHLLEDLKIKGFDPAKDIAGKGAVLTRANFGCGSSREHAPWALEVNGINIVIAESFARIFRQNMYNCGMIACEVSAAVLEELFREFSNVKTTLTVDTDKGTLIFKAGGKEKTVSFILGNFEKALVEAGGWVEYAAKHY

SEQ ID NO: 44735 - DNA, 1608 bp, Unknown
  Obtained from environmental sample
  misc_feature (1)..(1608): n is a, c, g, or t
atgccgggcggagacaaggtttcccagggcgcagcttcatcgccattcccctttacgcagcgtccggctgttgcggtaggcagggtagggggcaagcaggttggcagaaagttccatgatgataaccgaggcggatcttccgccggcagcggatcaggaggtccggtccagcgttccgccaacaagggtgcgggccaacccaggcatccatcatcatcgccgccgccaagacaggggcagggcggaggcttcaggcagaatttcggcactcctcagcacaacgcgccgcgtcccggcggctctcagggcaggccgggctttgcgccgcgttcccctcagggtagaggggggcagtcttccggttctccgccgccaagcatattgccggaaggaaaaagcggagcaaaacgtacttttagggcaaagaagcccacttacaaccgcaaagaaaaagaacttgagatggaggagaaactccgccagaccaggaaaaaaataacttatgttgccaatccggttcccaagtcaatcgaaatcatggaaaatatttcggtgtcggaattggcaagaaagatgaacctaaaggcgtcggatttaatccagaagctgatgaagcttggcatgatggttacaattaaccagcagatagacgccgataccgcgactatacttgcccgcgaattcggggccgacgtaaaaattatcagcctgtatgatgagacaatcatagacaccgggacagacgagggcgccgatatgttgccaaggccgccggttgttaccgttatgggacatgttgaccacggtaaaaccaagctgctggacgctatacggaaggcggatgtagtgtcgggcgagtttggagggataacccagcacatcggcgcgtatatggtagagacgccgcatggcagaatcaccttccttgacacgccgggtcacgaggcctttacgcgcatgagggcgcggggcgcgcaggttactgacatcgtggtgctggttgtcgccgcggatgacggggtcatgccccagaccatcgaggcgatcaaccacgcaaaggaagccggggttccaatcattgtcgcggtaaacaaaatcgacaagccggaggcaaaccctgaccgcgttaaaagccagctttccgaactcggccttatgcccgaggaatggggcggacagacgatgtttgtcgagctttcggccctgcaaaagacgggaatagacaaacttattgacactatactcctagaggcggagcttcttgatctcaaggccaatttccatcggagcgccgaggggaagattcttgaatcgagaatcgatcacgggcggggcattgtagctaccgtcattgtagaaagagggactatttccgtgggcgattcttttgtcgccggtatatggcccggaaaagtacgcgcgatctttaatgaccggggcgaaaaactcaagcacgcttctccctccatgcccgttgaaattctcgggtttgagggaatccccaatgccggcgatcccctgcaggctgtagaggatgagaagatagcccgcgagttttcatcanaacgccaggaattgaaacgttttgaagacgccaagaaactttag

SEQ ID NO: 44736 - protein, 535 aa, Unknown
  Obtained from environmental sample
  DOMAIN (258)...(367): GTPase of unknown function
  misc_feature (1)..(535): Xaa is any amino acid
MPGGDKVSQGAASSPFPFTQRPAVAVGRVGGKQVGRKFHDDNRGGSSAGSGSGGPVQRSANKGAGQPRHPSSSPPPRQGQGGGFRQNFGTPQHNAPRPGGSQGRPGFAPRSPQGRGGQSSGSPPPSILPEGKSGAKRTFRAKKPTYNRKEKELEMEEKLRQTRKKITYVANPVPKSIEIMENISVSELARKMNLKASDLIQKLMKLGMMVTINQQIDADTATILAREFGADVKIISLYDETIIDTGTDEGADMLPRPPVVTVMGHVDHGKTKLLDAIRKADVVSGEFGGITQHIGAYMVETPHGRITFLDTPGHEAFTRMRARGAQVTDIVVLVVAADDGVMPQTIEAINHAKEAGVPIIVAVNKIDKPEANPDRVKSQLSELGLMPEEWGGQTMFVELSALQKTGIDKLIDTILLEAELLDLKANFHRSAEGKILESRIDHGRGIVATVIVERGTISVGDSFVAGIWPGKVRAIFNDRGEKLKHASPSMPVEILGFEGIPNAGDPLQAVEDEKIAREFSSXRQELKRFEDAKKL

SEQ ID NO: 44737 - DNA, 615 bp, Unknown
  Obtained from environmental sample
  misc_feature (1)..(615): n is a, c, g, or t
ttgcagggccgaaagctcgacaaacatcgtctgtccgccccattcctcgggcataaggccgagttcggaaagctggcttttaacgcggtcagggtttgcctccggcttgtcgattttgtttaccgcgacaatgattggaaccccggcttcctttgcgtggttgatcgcctcgatggtctggggcatgaccccgtcatccgcggcgacaaccagcaccacgatgtcagtaacctgcgcgccccgcgccctcatgcgcgtaaaggcctcgtgacccggcgtgtcaaggaaggtgattctgccatgcggcgtctctaccatatacgcgccgatgtgctgggttatccctccaaactcgcccgacactacatccgccttccgtatagcgtccagcagcttggttttaccgtggtcaacatgtcccataacggtaacaaccggcggccttggcaacatatcggcgccctcgtctgtcccggtgtctatgattgtctcatcatacaggctgataatttttacgtcggccccgaattcgcgggcaagtatagtcgcggtatcggcgtctatctgctggttaattgtaaccatcatgccaagcttcatcagcttctggattaa

SEQ ID NO: 44738 - protein, 204 aa, Unknown
  Obtained from environmental sample
  misc_feature (1)..(204): Xaa is any amino acid
MQGRKLDKHRLSAPFLGHKAEFGKLAFNAVRVCLRLVDFVYRDNDWNPGFLCVVDRLDGLGHDPVIRGDNQHHDVSNLRAPRPHARKGLVTRRVKEGDSAMRRLYHIRADVLGYPSKLARHYIRLPYSVQQLGFTVVNMSHNGNNRRPWQHIGALVCPGVYDCLIIQADNFYVGPEFAGKYSRGIGVYLLVNCNHHAKLHQLLD

SEQ ID NO: 44739 - DNA, 339 bp, Unknown
  Obtained from environmental sample
  misc_feature (1)..(339): n is a, c, g, or t
ttggccttgagatcaagaagctccgcctctaggagtatagtgtcaataagtttgtctattcccgtcttttgcagggccgaaagctcgacaaacatcgtctgtccgccccattcctcgggcataaggccgagttcggaaagctggcttttaacgcggtcagggtttgcctccggcttgtcgattttgtttaccgcgacaatgattggaaccccggcttcctttgcgtggttgatcgcctcgatggtctggggcatgaccccgtcatccgcggcgacaaccagcaccacgatgtcagtaacctgcgcgccccgcgccctcatgcgcgtaaaggcctcgtga

SEQ ID NO: 44740 - protein, 112 aa, Unknown
  Obtained from environmental sample
  SIGNAL (1)...(26)
  misc_feature (1)..(112): Xaa is any amino acid
MALRSRSSASRSIVSISLSIPVFCRAESSTNIVCPPHSSGIRPSSESWLLTRSGFASGLSILFTATMIGTPASFAWLIASMVWGMTPSSAATTSTTMSVTCAPRALMRVKAS

SEQ ID NO: 44741 - DNA, 537 bp, Unknown
  Obtained from environmental sample
  misc_feature (1)..(537): n is a, c, g, or t
ttgatcgccgatctgtacgtcgtcaaaaccctccagccctatgccgcactcgtaaccggccgcaacttcgcggacgtcgtccttgaaacgcctgagcgaagcaattttgccggagtggatcactatctccgcgcggattacattgacgctggcgctgcgctttacagtgccgctttgcacaaagcatccggcgatggttccgaccttcggcaccttgaaggtattccgcacctccaccgaagcgataacttcctctttggtgtcgggcttgagcatgccttccattgcctgatggatttcctcaaccgctttgtagatgatgttgtatttgcgtatatcgactttttcctgctccgccaaaaccttcgccttgggaaggggccgcacgttaaagccgatgatgattgccttggacgcgattgcgagatcgacgtcgccttcgttaatcggcccgggcagcgcctgtatgacatgcagacggatttccttggtggaaagtttttcaggctgctcttgagcgcctccgccgaaccttga

SEQ ID NO: 44742 - protein, 178 aa, Unknown
  Obtained from environmental sample
  misc_feature (1)..(178): Xaa is any amino acid
MIADLYVVKTLQPYAALVTGRNFADVVLETPERSNFAGVDHYLRADYIDAGAALYSAALHKASGDGSDLRHLEGIPHLHRSDNFLFGVGLEHAFHCLMDFLNRFVDDVVFAYIDFFLLRQNLRLGKGPHVKADDDCLGRDCEIDVAFVNRPGQRLYDMQTDFLGGKFFRLLLSASAEP

SEQ ID NO: 44743 - DNA, 444 bp, Unknown
  Obtained from environmental sample
  misc_feature (1)..(444): n is a, c, g, or t
gtgcggccccttcccaaggcgaaggttttggcggagcaggaaaaagtcgatatacgcaaatacaacatcatctacaaagcggttgaggaaatccatcaggcaatggaaggcatgctcaagcccgacaccaaagaggaagttatcgcttcggtggaggtgcggaataccttcaaggtgccgaaggtcggaaccatcgccggatgctttgtgcaaagcggcactgtaaagcgcagcgccagcgtcaatgtaatccgcgcggagatagtgatccactccggcaaaattgcttcgctcaggcgtttcaaggacgacgtccgcgaagttgcggccggttacgagtgcggcatagggctggagggttttgacgacgtacagatcggcgatcaatttgaggtgatcgagattgtagaggtcgcaaggaagttaagcagcaaccagggttaa

SEQ ID NO: 44744 - protein, 147 aa, Unknown
  Obtained from environmental sample
  DOMAIN (63)...(131): Elongation factor Tu domain 2
  misc_feature (1)..(147): Xaa is any amino acid
MRPLPKAKVLAEQEKVDIRKYNIIYKAVEEIHQAMEGMLKPDTKEEVIASVEVRNTFKVPKVGTIAGCFVQSGTVKRSASVNVIRAEIVIHSGKIASLRRFKDDVREVAAGYECGIGLEGFDDVQIGDQFEVIEIVEVARKLSSNQG

SEQ ID NO: 44745 - DNA, 702 bp, Unknown
  Obtained from environmental sample
  misc_feature (1)..(702): n is a, c, g, or t
ttgcaacagccgttctttgtcgcactttgtccttattcccgaaagcgttcacgcaaaggaataatagccgatcttttagacgcggcaaaggattttgacggccttcaaatcgactttgagaatattcccgcgcgggacgcggatgctttcttatcctttttaaaagatttacgccaggggcttccttccgataaaaaatttacaatcgccctccccgccaggaataaaaaagttaacaatgatcaatatgattatgagaaaataaaaccatacgttgaccgtatccttgtaatggcttatgacgaacattggtcgggaagcaagccgggctccgtcgcgtccatgaagtggtgcaaacgggtcgccgaatactcaataaacgtaatcggaaaggaaaagttgatcatggggcttccgttctacggacgcgcatggggcgattataccccttcccgcgcccttatctatcctaccaccgaaaaaataatcaatgagcacaacgtagaagagatccggcgcgaaaacggaatacctatctttgaatatacaagaaacgtaaaaataacggtttattatgaagacgcatattcgctttgcgcccgaatggatatgtataaaacaatgggtgtcgcttcaatcggcttctggcgtatcggacaggaaaccgccgaagtatggaactacctgaaactggaaaaataa

SEQ ID NO: 44746 - protein, 233 aa, Unknown
  Obtained from environmental sample
  DOMAIN (6)...(221): Glycosyl hydrolases family 18
  misc_feature (1)..(233): Xaa is any amino acid
MQQPFFVALCPYSRKRSRKGIIADLLDAAKDFDGLQIDFENIPARDADAFLSFLKDLRQGLPSDKKFTIALPARNKKVNNDQYDYEKIKPYVDRILVMAYDEHWSGSKPGSVASMKWCKRVAEYSINVIGKEKLIMGLPFYGRAWGDYTPSRALIYPTTEKIINEHNVEEIRRENGIPIFEYTRNVKITVYYEDAYSLCARMDMYKTMGVASIGFWRIGQETAEVWNYLKLEK

SEQ ID NO: 44747 - DNA, 588 bp, Unknown
  Obtained from environmental sample
  misc_feature (1)..(588): n is a, c, g, or t
ttgcggtgcgcgggctttacgtcggctttccggcgcgagtgtttcgagaaagccgccgccctttcgcgggaggttaatgttaacctgcttaatgagccggttaacaaagctgtcgtataccttgagcctgaagaataccgcacgacatggcttggtaataaggcgatatacagaacgcggatggcgattgcggacggaggggagcttataatactcgcccccgcccttgaacgcttcggcgaagacatgggcgtggacgcccttatcagaaaaaacggctaccgtcccggaaaggaaatcatcgccaaaacaaaaacggacgcggaacttggaggcaatttaagcgccgccgcccacctgatacacggctcaagcgaggggcgctttacagtccgctactgtcccggcggtaaacttacccgcaaggaaatagaatcggtcggcttccaatggggcgatttaaacgagcagatgaaacgctacgatataaaaacccttgccgccggctggaacacagttaacggagagcgaatcttctttgtaccgaatcccgccctcggactgtgggcggaaaaacgtaagttttaa

SEQ ID NO: 44748 - protein, 195 aa, Unknown
  Obtained from environmental sample
  misc_feature (1)..(195): Xaa is any amino acid
MRCAGFTSAFRRECFEKAAALSREVNVNLLNEPVNKAVVYLEPEEYRTTWLGNKAIYRTRMAIADGGELIILAPALERFGEDMGVDALIRKNGYRPGKEIIAKTKTDAELGGNLSAAAHLIHGSSEGRFTVRYCPGGKLTRKEIESVGFQWGDLNEQMKRYDIKTLAAGWNTVNGERIFFVPNPALGLWAEKRKF

SEQ ID NO: 44749 - DNA, 846 bp, Unknown
  Obtained from environmental sample
  misc_feature (1)..(846): n is a, c, g, or t
atggatagattggccgagaacagcgtaatcctgacgcacggacaccttgaccattgcggactgctgcccctgttggtcaagaggggctacaaaggcaatatttacgcgacacccgcaagcagggacatcgcaagccttatcatgatggattcggcgcatatacaggccaatgacgctgagtatctacgtaaagagtcccaaaaaaaaggcgaaaaatttgactggactccgctttacacggaagcggacgcaatcaccgcgacaagccagatggtcggagtaccgtataacaggcctatttcaataggcgacggtataacgctggagttttttgacgcgggacacatactcggctcggcgatggcgtatattacgattaagcggggcggcgaggaactgcgtattcttgccacaggcgatcttggccgcaagggtaagcctataatccgcaacccctcgattccgggccccgcgccggattacattatcgtggaaagcacctacggcgaccgccgccatgacaaaaccagcgacgccacggaaaaactggcggaaatggcaaaacgcgccgtagagaccaagggaagaattatcatcccctcgtttgccattgagcgcacacaggagctggtgtattatttccatctgcttgttgacgacgggataataccggaaatcccgatctatgtggattccccaatggcgactaacgcaacaacgatttttcaggtacaccccgaatgttacgacgaggaaataaaaaaggcatttgtcaaacaccaccaaaacccctttggttttacagcctgcactttacaaccagcgtccaggaatctaaagcgttaa

SEQ ID NO: 44750 - protein, 281 aa, Unknown
  Obtained from environmental sample
  misc_feature (1)..(281): Xaa is any amino acid
MDRLAENSVILTHGHLDHCGLLPLLVKRGYKGNIYATPASRDIASLIMMDSAHIQANDAEYLRKESQKKGEKFDWTPLYTEADAITATSQMVGVPYNRPISIGDGITLEFFDAGHILGSAMAYITIKRGGEELRILATGDLGRKGKPIIRNPSIPGPAPDYIIVESTYGDRRHDKTSDATEKLAEMAKRAVETKGRIIIPSFAIERTQELVYYFHLLVDDGIIPEIPIYVDSPMATNATTIFQVHPECYDEEIKKAFVKHHQNPFGFTACTLQPASRNLKR

SEQ ID NO: 44751 - DNA, 552 bp, Unknown
  Obtained from environmental sample
  misc_feature (1)..(552): n is a, c, g, or t
atgttacgacgaggaaataaaaaaggcatttgtcaaacaccaccaaaacccctttggttttacagcctgcactttacaaccagcgtccaggaatctaaagcgttaaacgatcataaaggcccgcttattatcatctcagcggacggtatgtgcgaggctggacgtatacagcaccacttgatccacagcatacaggatcccaacacaacaattcttctcgtgggctacatggcggaaaatacccttggccgtagaatacgcaaccgcgaaggagaggtaaagatacacgggatgtggctcaagctaaaggcccatgtcgaggagataaacgcgttcagcgcacatgcggattatgtggaaacggtagaatggctcaacgagctggataaatcgcgcttaaagggaattttaatggttcacggcgaaaagaaggcgcaagccgcgttaaaaaaataccttgccgaacaagggtatgccaacacagaaatagtcaaatacggcgaaacctatgaaatgcagggaacggggaacagggaacagggaacagattaa

SEQ ID NO: 44752 - protein, 183 aa, Unknown
  Obtained from environmental sample
  DOMAIN (100)...(144): RNA-metabolising metallo-beta-lactamase
  misc_feature (1)..(183): Xaa is any amino acid
MLRRGNKKGICQTPPKPLWFYSLHFTTSVQESKALNDHKGPLIIISADGMCEAGRIQHHLIHSIQDPNTTILLVGYMAENTLGRRIRNREGEVKIHGMWLKLKAHVEEINAFSAHADYVETVEWLNELDKSRLKGILMVHGEKKAQAALKKYLAEQGYANTEIVKYGETYEMQGTGNREQGTD

SEQ ID NO: 44753 - DNA, 873 bp, Unknown
  Obtained from environmental sample
  misc_feature (1)..(873): n is a, c, g, or t
atgaatatcaaatcggtcatttcaagcatttttaaccccataagatccaaaataaaactgggggaggcatcaaggcacgcaaaacgcgcgtacagaaggcgtttttcattttcccacgccgtgtttacggttacgaatatctttctctttctgcccttactggttcttgtagtttactcatttaacgcttctacaagcatgaattggaccggattttccntgcggtggtatgaaaaacttttaggctctcgtgaattgtggcgggctttaagaaacagccttattatagctgtatcatccgcggctacagcgacagtaattgggaccatcggcgcgattggaattaactggtacagatttaaaatgcgcggctacgtacagacaatttcattccttccaatgatcctaccggaaataattatcggcgtttcactttcaattttcttcgcgggcatcggcatcccgctcgggcttttcactatttttgtagcgcatactacttttaaccttccgttcgtgtttttaatggtaatggcgcggcttgatgaatttgacttttccataatagaagcagccgccgatcttggcgcaaacgaaaaacaaacgctttttaaggtaacccttccgatatgtatgccgggtatcatttccggacttcttaccgcgattacattatcgctggaagactttgtaatcacattctttgtcgccggtcccggctcttccactcttccgatttttatatattcggctattacaagaaagggaggcgttacaccgctgataagcgcactttccgtagtaatgatattaggcaccgtacttctttgcgttatgcttagaaaattcttaaagtacattgccgccaaataa

SEQ ID NO: 44754 - protein, 290 aa, Unknown
  Obtained from environmental sample
  DOMAIN (86)...(289): Binding-protein-dependent transport system inner membrane component
  misc_feature (1)..(290): Xaa is any amino acid
MNIKSVISSIFNPIRSKIKLGEASRHAKRAYRRRFSFSHAVFTVTNIFLFLPLLVLVVYSFNASTSMNWTGFSXRWYEKLLGSRELWRALRNSLIIAVSSAATATVIGTIGAIGINWYRFKMRGYVQTISFLPMILPEIIIGVSLSIFFAGIGIPLGLFTIFVAHTTFNLPFVFLMVMARLDEFDFSIIEAAADLGANEKQTLFKVTLPICMPGIISGLLTAITLSLEDFVITFFVAGPGSSTLPIFIYSAITRKGGVTPLISALSVVMILGTVLLCVMLRKFLKYIAAK

SEQ ID NO: 44755 - DNA, 750 bp, Unknown
  Obtained from environmental sample
  misc_feature (1)..(750): n is a, c, g, or t
atgggactgtctctggacgcttaccgctatcttggggacaaagttcttctcaatataacgctgcgcacaataacaacttcagtaatcgccacaattattacaatattaatcgcactgccgtgcggttactgcattgcaagaagcaaacatcaaacggtttttcttgtgcttatcatcattccgttctggacaaattttcttatcagggtcttcgcgtggatgaatattttgggcagtaacggttttttaaatgaatttcttctgcatattggggtaatcagcgattttattaattttttatataatcaaaaaaccgtcatattagtgcttgtttatatgtacctgccctacgctatcttgcctttgttttccaccatagataaatttgatttttcgcttctggaagcggctcgggaccttggcgctaaccagcttgtttcaattataaagatacttattccgaacatcagaagcggcatttttacggcgatacttttcacgttcattcccattttcggcgcttacgccgttcctcttttggtcggcggcatggattcctatatgctagggaacgttatcgccgaccagctttcaaaatcgcgtaactggccgcgcgccgccgcaatttccatggtgcttacccttgttaccactcttggagtgctgataatgatgcacattcaaaagcgcgacgcttccagaattgccgaagtaaaaggcgcggagggaaaacttgggggcgctgaatga

SEQ ID NO: 44756 - protein, 249 aa, Unknown
  Obtained from environmental sample
  DOMAIN (20)...(237): Binding-protein-dependent transport system inner membrane component
  misc_feature (1)..(249): Xaa is any amino acid
MGLSLDAYRYLGDKVLLNITLRTITTSVIATIITILIALPCGYCIARSKHQTVFLVLIIIPFWTNFLIRVFAWMNILGSNGFLNEFLLHIGVISDFINFLYNQKTVILVLVYMYLPYAILPLFSTIDKFDFSLLEAARDLGANQLVSIIKILIPNIRSGIFTAILFTFIPIFGAYAVPLLVGGMDSYMLGNVIADQLSKSRNWPRAAAISMVLTLVTTLGVLIMMHIQKRDASRIAEVKGAEGKLGGAE

SEQ ID NO: 44757 - DNA, 1050 bp, Unknown
  Obtained from environmental sample
  misc_feature (1)..(1050): n is a, c, g, or t
atgggtcagggcgaagctgtttatttttgtaccttttttctatcttatgtagtatattataaatatgacaaatataacaataaaaaaattcaaaatgaggtatttgggctaatgggtgaaccgtgctttttcggtattgacggcggcggtactcattctcgtctggccctggttgacagggagagaaaggttctggcccgttcggaagcgggaagcacgaatatttattccgtaaccaaagaagaagtttttgcaaatatttcaacgcttttggattcggccctgaaaagcgcagggcgaaatatgcaggacgtggccgcgggttgttttggcagcgcggggctgggtagagaagaagagcagaaactgtttcgtggcttttttgacagccttctggggaaagattttccggttaaactctgtaccgacggggagatcctgctctgcggtggcctggaaagtctcgaaggctactgcctaatcgcgggaacaggctccattgccctgggcagatctcaggccggtgaattggtacgttccggcggacacggctatatgctgggcgacgaagggtctgccgcctggataggaagaacagccattgcccggactctccgcagtctggaagaccgggacatatccacgggtatgctgcctgatattctggaaaccacgggcctgaccaaaagcgacgagcttgttaaatatgtgcatcatgacgctgataaatctaaaatagcgaaattggcccccgtggttacgcaggccgcgcgaaaaggggatcccctggccctggacatactccgtatcggcgccggggaacttgctttattggtaaaaagcgtaatcggccagtcccccttgataaaacacatggaactggtattagccgggggtgtaatggaacatgacgaaatagtcacgagtaaactaagggaatctttagccaaagattttcccggccttttagtctcatctcccaaaagcagcgcgctggaaggagcctgtatgcttgccttaagtcaggggaattcttatgaatgtacttaa

SEQ ID NO: 44758 - protein, 349 aa, Unknown
  Obtained from environmental sample
  DOMAIN (49)...(342): Glucokinase
  misc_feature (1)..(349): Xaa is any amino acid
MGQGEAVYFCTFFLSYVVYYKYDKYNNKKIQNEVFGLMGEPCFFGIDGGGTHSRLALVDRERKVLARSEAGSTNIYSVTKEEVFANISTLLDSALKSAGRNMQDVAAGCFGSAGLGREEEQKLFRGFFDSLLGKDFPVKLCTDGEILLCGGLESLEGYCLIAGTGSIALGRSQAGELVRSGGHGYMLGDEGSAAWIGRTAIARTLRSLEDRDISTGMLPDILETTGLTKSDELVKYVHHDADKSKIAKLAPVVTQAARKGDPLALDILRIGAGELALLVKSVIGQSPLIKHMELVLAGGVMEHDEIVTSKLRESLAKDFPGLLVSSPKSSALEGACMLALSQGNSYECT

SEQ ID NO: 44759 - DNA, 312 bp, Unknown
  Obtained from environmental sample
  misc_feature (1)..(312): n is a, c, g, or t
atgggaaagaaaggcataaaacggcgtgtccacacgaaggagttcaaagccgaagtggtagcattggccgagaagaaagaaaaaccggtaagccggatcgcggcggatctgggaatcaacgagaacatgctgcaccggcgggtgcaggcttcccgggagtcggcgggaagcggcctgcaggcgttcccaggccacgggcggccaaaggatgcggagctcgcctgcttgcggaaagagaacaaggcgctcaaggaggccaatgaaatcctaaaaaaagcggcggtcatcttcgcgcaaggggaaccccaataa

SEQ ID NO: 44760 - protein, 103 aa, Unknown
  Obtained from environmental sample
  DOMAIN (8)...(90): Transposase
  misc_feature (1)..(103): Xaa is any amino acid
MGKKGIKRRVHTKEFKAEVVALAEKKEKPVSRIAADLGINENMLHRRVQASRESAGSGLQAFPGHGRPKDAELACLRKENKALKEANEILKKAAVIFAQGEPQ

SEQ ID NO: 44761 - DNA, 1104 bp, Unknown
  Obtained from environmental sample
  misc_feature (1)..(1104): n is a, c, g, or t
atgagaagcggggaaaagcgttttaatcaattgcttgaactgttgcctgaaggctgggaagaaaaagcaaaagaactgggcgcattgcagagggcgcgtgaaataaagacgccggaagaactgctgcggcttaatctattatacctgactgaagggaaatccatggctgggaccagcgcgataactaacctgtcaggcgctgcaacgatgagcaaagtagcggtattcaaacgaatacaaaactcaggagagtggctgaaatggatgtgcacccatatataccacaatgcaggattgctcgtcgaaaaacccggatggcttaaagagcggaacgtattattggtagacggaagcgaagacgcgcgtgacggcacggagcggctatattttatgctgcactattgcatgaacctgtttacgcttgaggcacgggagtttgcgataaccgatgaggagaccggggaaaaactggccaacttcacaaaactggggccgcaggacatcgttattggcgatcgggcgtactgcactttggcagggcttgagcacctaaaagagcatggtgcaggttatgtactgcgcatgagaggccgggcattcaacctctatgatgagaaagggggcaaaatagacctgatgaaggagttttccgggctcatgtcatggaaatacggcgaaataacgacttggtgtgtcataaatggggaaaaagagcctgtgcgcgtttgcgctttgcgtaaggatgccataaatgagtggaagggactgcaacggttgaaaagcagcggaatacatgtgagcgcgttaagggaggaatacaacaaatatatcatcgtgataacttctcttgggaaggatgtcagggctgaacaagtgcttgacttgtatcgggcacggtggcagatagagatagcgttcaaacgcctgaaatcattatttcggtataacgaaatgcctgccaggaaaacagaaaatataaagacatggttttatgggaagctgctgcttgccgccctgtgtgaaacgttagtgaacacaggggcgtttttccccctcgggagggaacaggcggcgcgagcgagcttccgccgcctgaacagatga

SEQ ID NO: 44762 - protein, 367 aa, Unknown
  Obtained from environmental sample
  DOMAIN (112)...(339): Transposase DDE domain
  misc_feature (1)..(367): Xaa is any amino acid
MRSGEKRFNQLLELLPEGWEEKAKELGALQRAREIKTPEELLRLNLLYLTEGKSMAGTSAITNLSGAATMSKVAVFKRIQNSGEWLKWMCTHIYHNAGLLVEKPGWLKERNVLLVDGSEDARDGTERLYFMLHYCMNLFTLEAREFAITDEETGEKLANFTKLGPQDIVIGDRAYCTLAGLEHLKEHGAGYVLRMRGRAFNLYDEKGGKIDLMKEFSGLMSWKYGEITTWCVINGEKEPVRVCALRKDAINEWKGLQRLKSSGIHVSALREEYNKYIIVITSLGKDVRAEQVLDLYRARWQIEIAFKRLKSLFRYNEMPARKTENIKTWFYGKLLLAALCETLVNTGAFFPLGREQAARASFRRLNR

SEQ ID NO: 44763 - DNA, 450 bp, Unknown
  Obtained from environmental sample
  misc_feature (1)..(450): n is a, c, g, or t
ttgaagataattgcggatatacatattcattccccctggtcaagagccacgagttcccggcttagtcccgcaagccttgagcgatgggcggggatcaagggcatcgaccttctgggaaccggcgattgcacccatcccaggtggatagaggaactacgggataatcttgaggacgcggagggcggcttttatcggctgaaaggaaaaacccgttcggaatttgacgccggccccgcgcttgcggaagggctgcccagaccggggcagcaggacagcaatgtgcattttgtcctttccggtgagatcagcacgatctataaaaaagccggaaagacccggaaagtccaccatgtggtcgtactgccggatttcaagccgccgctgttttcacgcgaaactggaacggctggggaacatccattcggacggaaggcccatattgnggcttga

SEQ ID NO: 44764 - protein, 149 aa, Unknown
  Obtained from environmental sample
  misc_feature (1)..(149): Xaa is any amino acid
MKIIADIHIHSPWSRATSSRLSPASLERWAGIKGIDLLGTGDCTHPRWIEELRDNLEDAEGGFYRLKGKTRSEFDAGPALAEGLPRPGQQDSNVHFVLSGEISTIYKKAGKTRKVHHVVVLPDFKPPLFSRETGTAGEHPFGRKAHIXA

SEQ ID NO: 44765 - DNA, 423 bp, Unknown
  Obtained from environmental sample
  misc_feature (1)..(423): n is a, c, g, or t
ttgcacatcggcaagaaggcagagtgcctttgtcttcagcgcttcgaggacgtattcaagcgtccgaccatctctctgtactgcggcaaggcagattgcctcggtcttcgtcgcttcggggacgtattccagcgcactgccgtttttctgcactgcgacaaggcaaattgcctcggtcttcaatgcttcggggacatattccagcgcactgccattttgctgtactgcgataaggcaaattgcatcggtcttcgtcgcttcggggacatattccagcgcacagccgttttgctgcacggcggcaaagcacatgtccccggtcttcagcgcttcggggacatatttcagcgcagagccattgcgttgcactgcggcaaggtagaaggcctcggtcttcatctcctcgggcacgtgttccagtaa

SEQ ID NO: 44766 - protein, 140 aa, Unknown
  Obtained from environmental sample
  misc_feature (1)..(140): Xaa is any amino acid
MHIGKKAECLCLQRFEDVFKRPTISLYCGKADCLGLRRFGDVFQRTAVFLHCDKANCLGLQCFGDIFQRTAILLYCDKANCIGLRRFGDIFQRTAVLLHGGKAHVPGLQRFGDIFQRRAIALHCGKVEGLGLHLLGHVFQ

SEQ ID NO: 44767 - DNA, 939 bp, Unknown
  Obtained from environmental sample
  misc_feature (1)..(939): n is a, c, g, or t
atggacgaagccgtaaaaattctgcggaaagccctggacggcggcatcaatttttttgacagcgcccggggttattctgacagtgaagagaagataggtacggctctttcttcacggcgcggagatttttttatagctacaaagacccctgcaaaaagcggcatcgctctgaaaaaagatttggaaaccagtcttggcaaacttaaaacagatcatattgatgtttatcagttccataaccccggatttgttccgcggcccggcgatgaaaccggtctttacgacgcggccctggaagcgaaagcccaaggcaagatccgctttatcggaatcagcaaccacaggttaacggtggccagagaagcggttgagagcgggctgtacgatacactccagttcccgttcagctatctttcaacagaagaagagatcggccttacaaaactctgcgcggaaaaaaatgtcggcttcatagccatgaaggccttaagcggagggcttatcaccgatatttttgcagcccaggtatggatggcacaatacgccaatgtagtgcccatttggggaatccagcgggaaagcgagctggacgagcttcttcaggctatgaaacaaaccggcggcattactcccgaacaacaggccaaaatcggaaaagaccgttcggagctgggcggggaattttgccggggctgcggctactgtctgccctgtcccgctgaaatccccatcaacatggccgcgagaatttccctgcttatgatgcgtgcaccgcttgccaggttcctgacagaagattttcagaagaccatgagcaggattgaaaattgtcagcgctgcggccattgtacttccggctgcccatataatctggacaccccggcactgcttaaaaaaaacctccattggcacacagatttcattgcacaaaaaagataa

SEQ ID NO: 44768 - protein, 312 aa, Unknown
  Obtained from environmental sample
  DOMAIN (1)...(223): Aldo/keto reductase family
  misc_feature (1)..(312): Xaa is any amino acid
MDEAVKILRKALDGGINFFDSARGYSDSEEKIGTALSSRRGDFFIATKTPAKSGIALKKDLETSLGKLKTDHIDVYQFHNPGFVPRPGDETGLYDAALEAKAQGKIRFIGISNHRLTVAREAVESGLYDTLQFPFSYLSTEEEIGLTKLCAEKNVGFIAMKALSGGLITDIFAAQVWMAQYANVVPIWGIQRESELDELLQAMKQTGGITPEQQAKIGKDRSELGGEFCRGCGYCLPCPAEIPINMAARISLLMMRAPLARFLTEDFQKTMSRIENCQRCGHCTSGCPYNLDTPALLKKNLHWHTDFIAQKR

SEQ ID NO: 44769 - DNA, 768 bp, Unknown
  Obtained from environmental sample
  misc_feature (1)..(768): n is a, c, g, or t
ttgaaaattgtcagcgctgcggccattgtacttccggctgcccatataatctggacaccccggcactgcttaaaaaaaacctccattggcacacagatttcattgcacaaaaaagataatcataatgtaaaggagataaagatgaaggtagtattagtcaacggaagtccaaacgccaatggatgcacattcaccggacttagcatcattaaagaacagttggcaaagcatggcgttgattctgagatatttcaggtagggaaaaaaccaatcataggatgtaccgattgcagaacctgtaaacagccggggaaaaccggaaaatgcgtttttaatgatgatctggtaaataccgtaggtcaggctttcagagaagcggacggcatcatactaggttctcctgtgcattttgcttccgcttgtggagcggcaacctcattctttgatcgtttgtttttcagccttgaacctgaagcaaaaagattgaaattcggcgcgtgtattgttagttgcagaagagcaggttcaaccgccacattcgaccaattaaataagtattttacccatgggcaaatacccgttgtttcatcttgttattggaatggcatacacggatatacaccggaagacgtatacgccgataaagaaggcgtccgtacattaacaatattggcaaacaatatggcatatctcatcaaatgcaagcggcaaagcaatattgaactgccggaagagccgccgatggtcatgacaaattttatccgttga

SEQ ID NO: 44770 - protein, 255 aa, Unknown
  Obtained from environmental sample
  DOMAIN (48)...(230): NADPH-dependent FMN reductase
  misc_feature (1)..(255): Xaa is any amino acid
MKIVSAAAIVLPAAHIIWTPRHCLKKTSIGTQISLHKKDNHNVKEIKMKVVLVNGSPNANGCTFTGLSIIKEQLAKHGVDSEIFQVGKKPIIGCTDCRTCKQPGKTGKCVFNDDLVNTVGQAFREADGIILGSPVHFASACGAATSFFDRLFFSLEPEAKRLKFGACIVSCRRAGSTATFDQLNKYFTHGQIPVVSSCYWNGIHGYTPEDVYADKEGVRTLTILANNMAYLIKCKRQSNIELPEEPPMVMTNFIR

SEQ ID NO: 44771 - DNA, 711 bp, Unknown
  Obtained from environmental sample
  misc_feature (1)..(711): n is a, c, g, or t
atggtcagattggccgagggccggcatttttcttctctgcgtggatttttgaattatttggaagagagaaatttgctgggattttcaccggagaatttgtattccgctccgcatttagaaaaatatttaccgcaatgtttgagcatagatgaggttgctgctatttttgaaaacataaacccaaatgataaatttggaatgagggatattgccttgctggagcttttgtatagtgctgggcttaggattagcgaggctgtttcgttgaaattggagcatattcagttggacaacggatggctaactcctgttggcaaaggcaataagcagcgattggttccgctatctggcaaggcaaaggctaatttggaggcttggctcaaaatctggcggcagcaattaaaacccaaaacagataccgtgattctcaacttccacggaaaaaaactcaccagagttggggcttggaaaataattcagatgcgtaccgcatttcttggcaaagagtcaattagcccacactcattgaggcattcttttgcgactcattgcctagcaggtggaatggatttgagaattttgcaggagctacttgggcacgcaaacttatccactacgcaaatttacacgcatttggataattcttacttgaaaagcgagcatcatcattatcatcctagggagaagggagttctaagtagcattttctaa

SEQ ID NO: 44772 - protein, 236 aa, Unknown
  Obtained from environmental sample
  DOMAIN (55)...(219): Phage integrase family
  misc_feature (1)..(236): Xaa is any amino acid
MVRLAEGRHFSSLRGFLNYLEERNLLGFSPENLYSAPHLEKYLPQCLSIDEVAAIFENINPNDKFGMRDIALLELLYSAGLRISEAVSLKLEHIQLDNGWLTPVGKGNKQRLVPLSGKAKANLEAWLKIWRQQLKPKTDTVILNFHGKKLTRVGAWKIIQMRTAFLGKESISPHSLRHSFATHCLAGGMDLRILQELLGHANLSTTQIYTHLDNSYLKSEHHHYHPREKGVLSSIF

SEQ ID NO: 44773 - DNA, 528 bp, Unknown
  Obtained from environmental sample
  misc_feature (1)..(528): n is a, c, g, or t
ttgcacaactttgtggagatcgccgccgagattgcggagcgtaggcgcggcgttggccgcgatgcgcggtttatgattgtgggcggcaaggtttcggggcacgaagattattacgacgaggtgatggagtcggcgcgacgcctagggttggacaagcgactgacagtgaccggcaacgtcaaacacgaggaggtggcggcgcgcctttcggaggcgtccgtgctgatacacgcccccgattgggaggaggcgctgggcggcgtggtacttgaggcgatggcgctggacgtggcggtggtggcctacgacagcggcggcgtcggagagtgcttccacaatggggtaagcgggtacttagtaaaaaaaggcgacaaatcaagcgcggcggcgcgggcggtatcgctattgaataaaccggaactgcgagagaatataaccgcgaacgcgaaaaaatatctagatgaaaaattcacgcaagaatcatatattaacaatatattaaccgtttatgaaaaaatgttttactag

SEQ ID NO: 44774 - protein, 175 aa, Unknown
  Obtained from environmental sample
  DOMAIN (4)...(152): Glycosyl transferases group 1
  misc_feature (1)..(175): Xaa is any amino acid
MHNFVEIAAEIAERRRGVGRDARFMIVGGKVSGHEDYYDEVMESARRLGLDKRLTVTGNVKHEEVAARLSEASVLIHAPDWEEALGGVVLEAMALDVAVVAYDSGGVGECFHNGVSGYLVKKGDKSSAAARAVSLLNKPELRENITANAKKYLDEKFTQESYINNILTVYEKMFY

SEQ ID NO: 44775 - DNA, 1092 bp, Unknown
  Obtained from environmental sample
  misc_feature (1)..(1092): n is a, c, g, or t
atgaaaaacaataatttttgttggatggccacctggaaagtaactgaccgttgcaaccttaactgcgcctactgcgacccgacgataatgaagcgggtaagcgaggcggaggtgataaacaggttcgaagcgctcgaccgcatagcggtgtacaagccgcgcatactgaacatcagcggcggcgaaccgtcgctgctgaaagaattacccggactgctttcgcgggcgaaggcggtctggaatccctacattagggtcgtccacaacggcacggggccgcaaaaattggcggaggcctttccctgcgtagaccgcctcgtgataagcgtcgacgggccgggcgaggtcaacgccgcgacacgcgggataagcggcgacgccgtgctcgacaagatcgcggcgcttgtaaactcccgcgaacccgtaccggagatcactataaatacggtggtcacggagaagaacatcgacacccttaaaggcttcgccgcccaaatagcctccgtctccccgaacatcgcgctggccctcctgccggtaatgcccgtcgacggcgagctgtcggtgctgagagacagggaggccggatacgagagatttctcgatatttacgccggaataaaagcggcgcatagtaacgtagtccacaacctagactgcgtgatgcgccacaaaaacctacgcaaaatacagtgctacaatcaatatttcactgtcagattctcgccgcgcggcgaaccgttcacttgcggcgccggtatcgtatcgcagttgcgcaggagcgaccgggcgtataaaaaggtcttcaaaaagggcgggttgcgaaagctctttaccatgatcgttaaatccgtaaaagaaaaagcgggcgccgttgatttcacctgccgcaacatctgcaactgcgacagctggctcgacatggtgcttctgggcaaggagacggagtacgcgccggtagtgctgcgcgggtttaaggggaggctctccgaaaacgattatgccgagtttgaagcgtttgtcaagaaacacatcaacgccgatttcaacgcggcgcgattcagggagatggcggagggcgggccgcgatga

SEQ ID NO: 44776 - protein, 363 aa, Unknown
  Obtained from environmental sample
  DOMAIN (12)...(166): Radical SAM superfamily
  misc_feature (1)..(363): Xaa is any amino acid
MKNNNFCWMATWKVTDRCNLNCAYCDPTIMKRVSEAEVINRFEALDRIAVYKPRILNISGGEPSLLKELPGLLSRAKAVWNPYIRVVHNGTGPQKLAEAFPCVDRLVISVDGPGEVNAATRGISGDAVLDKIAALVNSREPVPEITINTVVTEKNIDTLKGFAAQIASVSPNIALALLPVMPVDGELSVLRDREAGYERFLDIYAGIKAAHSNVVHNLDCVMRHKNLRKIQCYNQYFTVRFSPRGEPFTCGAGIVSQLRRSDRAYKKVFKKGGLRKLFTMIVKSVKEKAGAVDFTCRNICNCDSWLDMVLLGKETEYAPVVLRGFKGRLSENDYAEFEAFVKKHINADFNAARFREMAEGGPR

SEQ ID NO: 44777 - DNA, 1602 bp, Unknown
  Obtained from environmental sample
  misc_feature (1)..(1602): n is a, c, g, or t
atgtcgctgctgaatatcatcaatggtattctggatctttccaaaatacaaaccggtaagtttaacctcgttcccgtgaattacgactttaacgcgcttattgacaatattagttcaatcgtgcgctttctgacagataaaaaaggcattggctttgagttggcaatacatggtgaaattcccaagtgtctttatggcgacgatgtccggctcagacagatacttctgaacgtattaagcaacgcgataaaatttaccgaatccggacacgtacgcctgtccgttgaaattacggatgaaaacctgaaattctctgtcagtgatacgggcattggcatacgcacagaagatattccgaagctttttgaaacattctcccagaccgatacactgagaaaccgcacgaaggaaggaaccgggctgggcttatccattaccaagtcattggtcgaaatgatgggcgggcttattacggtagaaagcgtatacggacagggttcgatattccgtattattatcccaaaggtctcaggcgatgaatcattaataagctctgtcgaaaacaaagaaagcgtaatatacgctcctgacgcgaagatattggcggttgatgacaatacaatcaacctgaacgttatacgcggccttttacagctttgtaaaataacggtagaaactgccgagtcgggtttacaggcaatagagatgatccggaaaaatcaatacgacattgtattcatggatcacatgatgcccgaaatggacggagtagaagccacaaaagccattcgtgaaatgggcataaacgtacctatcatagcgcttacagcgaacgttgtcgaaggttcaagggagttgttcctgaatgccggcatgaacgacatgctgatgaagcccattgacagggcgacgcttaacaaaatgctcgcgtactggattccgtcatggaagattaaaaacaggcctgacgaaaccgttatagatgaagatgatgcaaatgcacacaaggaattccggaaaagaatagaacaaataaaagggctatccgtacagacagggctggacagggtttccggccaatgggacgtttacagggactcgctaaaattgctgataaaagaaatagaaaagtgcgataagaatttgaaatcatttttatcctccggcgatatgaggaatttctcgatagaagcgcacagcatgaaaggctccctggccaacatcggggtaatggagctttccgcgcttgcgaaggaacttgaaacggcgtccgatcaaggggacgctgttttttgcgccgcgaatttggcgccttttctggaagcgctccgggatttgaactcaagcatcgcggaggcttttggggctgaaagccggaatccaggccccattgaaataccgcctgaattaccggctatctttgagaaactgaaaaaggcttttgagaatactgattttctggctatagaaaagctgatgagaagcctggatgaattaaaaccggaaggcgcattgaaagatgaaatagaggctataaatgacgctgtgttgatgatggactacgatagcgccatggaagtaatgcaaaaactgtcaaaataa

SEQ ID NO: 44778 - protein, 533 aa, Unknown
  Obtained from environmental sample
  DOMAIN (366)...(453): Hpt domain
  misc_feature (1)..(533): Xaa is any amino acid
MSLLNIINGILDLSKIQTGKFNLVPVNYDFNALIDNISSIVRFLTDKKGIGFELAIHGEIPKCLYGDDVRLRQILLNVLSNAIKFTESGHVRLSVEITDENLKFSVSDTGIGIRTEDIPKLFETFSQTDTLRNRTKEGTGLGLSITKSLVEMMGGLITVESVYGQGSIFRIIIPKVSGDESLISSVENKESVIYAPDAKILAVDDNTINLNVIRGLLQLCKITVETAESGLQAIEMIRKNQYDIVFMDHMMPEMDGVEATKAIREMGINVPIIALTANVVEGSRELFLNAGMNDMLMKPIDRATLNKMLAYWIPSWKIKNRPDETVIDEDDANAHKEFRKRIEQIKGLSVQTGLDRVSGQWDVYRDSLKLLIKEIEKCDKNLKSFLSSGDMRNFSIEAHSMKGSLANIGVMELSALAKELETASDQGDAVFCAANLAPFLEALRDLNSSIAEAFGAESRNPGPIEIPPELPAIFEKLKKAFENTDFLAIEKLMRSLDELKPEGALKDEIEAINDAVLMMDYDSAMEVMQKLSK

SEQ ID NO: 44779 - DNA, 624 bp, Unknown
  Obtained from environmental sample
  misc_feature (1)..(624): n is a, c, g, or t
ttggtacctgatattgaggatatagtaagcgcagggaaaatgggccatgtcgactttgccgcggatcaggcacaaacattcatagctgttcttaacaatcttaagacaaaaataatggaggcaaagaaggaaaaaacgtctgaaattatcatcgatgttttaaacgaggacggcctggcttataacgacatcggaacacaattcttaaaaaaggtcttgaagctgttggatcatgaggaagcaacccgcaaaatgaggatacttgccgtagatgactcccctgtcatagtaaaaaccatatcttccgttttaagcgaggaatataaagtatatggaatgacaaatccaaccatgctcgacaaattcctaaagcagattacgccggatttgtttttacttgactataaaatgccagagctcagcggatttgaccttattcccattataagaggttttagcgaacacaaagacacgcccgtcatttttctgacatcggagggaacactggcgcatgtatccgccgcctttgcgcttggggcctgcgattttattgtcaaaccttttcagggcaatattctgcgtgaaaaaatagcaaaacatattgtcaggaaaaaattattttga

SEQ ID NO: 44780 - protein, 207 aa, Unknown
  Obtained from environmental sample
  DOMAIN (85)...(198): Response regulator receiver domain
  misc_feature (1)..(207): Xaa is any amino acid
MVPDIEDIVSAGKMGHVDFAADQAQTFIAVLNNLKTKIMEAKKEKTSEIIIDVLNEDGLAYNDIGTQFLKKVLKLLDHEEATRKMRILAVDDSPVIVKTISSVLSEEYKVYGMTNPTMLDKFLKQITPDLFLLDYKMPELSGFDLIPIIRGFSEHKDTPVIFLTSEGTLAHVSAAFALGACDFIVKPFQGNILREKIAKHIVRKKLF

SEQ ID NO: 44781 - DNA, 525 bp, Unknown
  Obtained from environmental sample
  misc_feature (1)..(525): n is a, c, g, or t
gtgatggacaccgattgcagaaaggatgaaacttacgaatcgctttcggacttcggccttccttacggtttaatcagaataccccagccctacgacaccgcgacgctcaattacaactggcaggtatggggctgtcacgcctactcgttattctcgacttacaccgaacatatcggaaaacaatcaacgcaaacggcggtgaacgcggttcttcgttttttaatcgccaaagggatactcaaatgggctctgcacggcggaatgcacacccgcatactaaacgaaggattgataaaaaatatccagacaagcaacgccgggattttaaaaaaatatgtcgctgtcggcgacgaggttatcgaaggcgacttgctctgcgaaataatccatcctttggaggggaacacgataggcaggatagaatctccggtaaacggaacggtattcttcgccttcaacaaacagcttgtgatggaacataccgacgtgtttaacattattcctttttcacggtatagncgataa

SEQ ID NO: 44782 - protein, 174 aa, Unknown
  Obtained from environmental sample
  misc_feature (1)..(174): Xaa is any amino acid
MMDTDCRKDETYESLSDFGLPYGLIRIPQPYDTATLNYNWQVWGCHAYSLFSTYTEHIGKQSTQTAVNAVLRFLIAKGILKWALHGGMHTRILNEGLIKNIQTSNAGILKKYVAVGDEVIEGDLLCEIIHPLEGNTIGRIESPVNGTVFFAFNKQLVMEHTDVFNIIPFSRYXR

SEQ ID NO: 44783 - DNA, 636 bp, Unknown
  Obtained from environmental sample
  misc_feature (1)..(636): n is a, c, g, or t
ttgaccgcaggcagtgtgttggctgccgccgtgttgggggttggtacggtgatatctgacaaaaacaccactgtcgccggcagtataacggttaagtatgatacggccaccggtaatcagtcgtacatacagttcggagccaacggcgccaccaagttagaagccagactccacgatgccgccgtaggcgacagcattactttcatcttctccgagtaccaagccgcctcctccaagctgaacgactccgtaatggcccaaataggcgccaacagcggtcagaccgctttcgtctccatgggcgatatgcgcgccaaggccctcggcgtcgccggtattgacgtcagtacaaagtggggcgcggcgacggccattgagacggtgaacaacgcgttgcagaaagtttcgcatcagcgcagttctctcggtgccatccagaaccgtttggagcacacgatcaagaatttggacacggccgcggagaacttgcaggctgccgagagccgtattcgcgacgttgacatggcgaaggagatcatggagttcacgaagaacaacattctccagcaagcgtcgcaggcgatgttggcgcaggcgaattctcagccgcagagcgtgttggcgttgttgaagtag

SEQ ID NO: 44784 - protein, 211 aa, Unknown
  Obtained from environmental sample
  SIGNAL (1)...(19)
  DOMAIN (118)...(189): Bacterial flagellin C-terminus
  misc_feature (1)..(211): Xaa is any amino acid
MTAGSVLAAAVLGVGTVISDKNTTVAGSITVKYDTATGNQSYIQFGANGATKLEARLHDAAVGDSITFIFSEYQAASSKLNDSVMAQIGANSGQTAFVSMGDMRAKALGVAGIDVSTKWGAATAIETVNNALQKVSHQRSSLGAIQNRLEHTIKNLDTAAENLQAAESRIRDVDMAKEIMEFTKNNILQQASQAMLAQANSQPQSVLALLK

SEQ ID NO: 44785 - DNA, 489 bp, Unknown
  Obtained from environmental sample
  misc_feature (1)..(489): n is a, c, g, or t
ttgaaccttcttttgaaggtcgggggacagagaaatttattcgaaaagacatcacacaaagatcacaaaggtacacaaagatcacaaagagaagagggaataatgatgaatgaaaatcaaattggtataataatcgtagatactgctgtaaatttacacaaagaacttggtcccggattatttgaaagtgtttatgaagttattttatcaaaactgcttgctaaaaaaggactaaatgtccaacgacaagtttcaattcctattaattttctaggggaacatattgatgaaggatttcgcgcggatttattcgttgaaggtaaagttatcattgaacttaaatcagtagaaaagataacggatgcccataaaaaacaattattaacttatttaaaactgtcaaatacaaaacttggtttcatcttgaatttcggagttggagtaatgaaagatggcatattcagaataatcaatgggactcttaaataa

SEQ ID NO: 44786 - protein, 162 aa, Unknown
  Obtained from environmental sample
  misc_feature (1)..(162): Xaa is any amino acid
MNLLLKVGGQRNLFEKTSHKDHKGTQRSQREEGIMMNENQIGIIIVDTAVNLHKELGPGLFESVYEVILSKLLAKKGLNVQRQVSIPINFLGEHIDEGFRADLFVEGKVIIELKSVEKITDAHKKQLLTYLKLSNTKLGFILNFGVGVMKDGIFRIINGTLK

SEQ ID NO: 44787 - DNA, 357 bp, Unknown
  Obtained from environmental sample
  misc_feature (1)..(357): n is a, c, g, or t
atgagcgactgtattttttgtaaaataattgaaggtcagcttccttccaaaaaactttacgaagacgatgaaatgcttgcctttttcgacattaatcccgcgacgccggttcattttcttattgtccccaaaaagcacataaagagcctgttggacattgacgcggaagattcggctttacttggcagaatactccttaaagcgggagatcttgcgaaacagcaagggtgcacagaaaaaggcgggcgttttatcatcaacgcgaaaagcgacggcgggcagactgttgatcatctgcatattcactttctgggaggaaccgctctgggagccggtcttctcggaaagaaagattag

SEQ ID NO: 44788 - protein, 118 aa, Unknown
  Obtained from environmental sample
  DOMAIN (4)...(109): HIT domain
  misc_feature (1)..(118): Xaa is any amino acid
MSDCIFCKIIEGQLPSKKLYEDDEMLAFFDINPATPVHFLIVPKKHIKSLLDIDAEDSALLGRILLKAGDLAKQQGCTEKGGRFIINAKSDGGQTVDHLHIHFLGGTALGAGLLGKKD

SEQ ID NO: 44789 - DNA, 357 bp, Unknown
  Obtained from environmental sample
  misc_feature (1)..(357): n is a, c, g, or t
atgaaatatattctttttgcgcttagtttgacgattttaagttgtgtgtctcttggcggcagaagcatcgcttccaaaggaagcgccgcttccgaaggaagcgcagatttctatgaaggtactgctcaggggtaccgcgggcccatacaagtacaggtacgcgtttccgacggcagtataacggaaattattattgccgattctgaggaggactattttgtcggaggggccgccatagaagaattaattgacatggtaatccaatacaacacaacggacatagacgcggttaccggcgcgacagaatcaagcaggggttttcttaaagcggtggagaatgctataatgaacttatga

SEQ ID NO: 44790 - protein, 118 aa, Unknown
  Obtained from environmental sample
  SIGNAL (1)...(24)
  DOMAIN (44)...(118): FMN-binding domain
  misc_feature (1)..(118): Xaa is any amino acid
MKYILFALSLTILSCVSLGGRSIASKGSAASEGSADFYEGTAQGYRGPIQVQVRVSDGSITEIIIADSEEDYFVGGAAIEELIDMVIQYNTTDIDAVTGATESSRGFLKAVENAIMNL

SEQ ID NO: 44791 - DNA, 1545 bp, Unknown
  Obtained from environmental sample
  misc_feature (1)..(1545): n is a, c, g, or t
atgccggtggacaagaaaccaggcgatcacgtttacggggcaaccattaacgcaaacggccttatccgctttaaggcggaaaaagtcggcggtgataccgcgctggctcagattattaaattagtagaggacgctcagagttccaaggcgccaatagcaaaaattgcggatgtagtgtgcggttattttgtacctatagtctgcgttatagcccttgccgccggaatagcgtggttcgccgcgtcctccgccggtcttacaacaccccccgccggaaaaacaacactggaattcgccctgactatttttatttccgtactggtcatcgcctgtccctgcgctctcgggcttgccacgcctacggcgatcatggtgggaaccggcaagggagcggaaaacggcattttgataaaaggcggcgaggctctggaaatcacccataaaatacaaacgatcgtgtttgacaagacggggacgattacagagggaaagccggaagtgacggatattgttatcgtaagcggagaatggggaacgggaaacagagaacagggcaaggacgccgatcttttccttcaacttgccgccgccgcggaaagaaactcggaacatcccctcgcctccgccattgtccgcgaagcggaaaaacgcgctcttgtactgccgcctgttacggatttcaaagccattcccggcaaaggcattgaggcaaaaattcccctgcctgcggataaaatactttccactcttcccaatccctactcttctctttccgctctgcctatcatgattggaaaccgcaaacttatggaagagcgcggcatttcacttgcggaacttgacgcaacttccgaccgtcttgcaggcgaaggaaaaacgccgatgtatgtcgttcttaacggcagtatcgcgggaatcgtagcggtagcggacgttcttaaacattccagcagagcggcgataagccgtcttcacaaaatgggaatcgaagttgccatgattaccggagacaacaaaaaaaccgcggacgccatcgccaaacaagtgggaattgatcgcgtgcttgcggaagttctgccgcaagacaaatccgccgaagttaagaagctgcaagaaacagatttgggaaccccgcatggagaacagcgcaagcagttctcccaagagacaaaacgccaacgacgttttgtcgcaatggtgggcgatggcatcaacgacgctccggcactggcgcaggcggacatcggaatcgccatcggaagcggcacggatgtggcgatggagtccgccgacattgtgcttatgcgttccgatttgatcgacgttcccacagcggttaatttaagcaaacggacaatccgcactatcaaacaaaatttattctgggcatttggttacaacgtgatgggtattcccatcgccgccggtattttgtatctctttggcgggccgcttctcaatccggtttttgccgccgccgccatgagcctgagttccgtgtcggtgttgaccaacgcgctgagactgaaaagatttagagcgtaa

SEQ ID NO: 44792 - protein, 514 aa, Unknown
  Obtained from environmental sample
  DOMAIN (1)...(145): E1-E2 ATPase
  misc_feature (1)..(514): Xaa is any amino acid
MPVDKKPGDHVYGATINANGLIRFKAEKVGGDTALAQIIKLVEDAQSSKAPIAKIADVVCGYFVPIVCVIALAAGIAWFAASSAGLTTPPAGKTTLEFALTIFISVLVIACPCALGLATPTAIMVGTGKGAENGILIKGGEALEITHKIQTIVFDKTGTITEGKPEVTDIVIVSGEWGTGNREQGKDADLFLQLAAAAERNSEHPLASAIVREAEKRALVLPPVTDFKAIPGKGIEAKIPLPADKILSTLPNPYSSLSALPIMIGNRKLMEERGISLAELDATSDRLAGEGKTPMYVVLNGSIAGIVAVADVLKHSSRAAISRLHKMGIEVAMITGDNKKTADAIAKQVGIDRVLAEVLPQDKSAEVKKLQETDLGTPHGEQRKQFSQETKRQRRFVAMVGDGINDAPALAQADIGIAIGSGTDVAMESADIVLMRSDLIDVPTAVNLSKRTIRTIKQNLFWAFGYNVMGIPIAAGILYLFGGPLLNPVFAAAAMSLSSVSVLTNALRLKRFRA

SEQ ID NO: 44793 - DNA, 492 bp, Unknown
  Obtained from environmental sample
  misc_feature (1)..(492): n is a, c, g, or t
atgttccgagtttctttccgcggcggcggcaagttgaaggaaaagatcggcgtccttgccctgttctctgtttcccgttccccattctccgcttacgataacaatatccgtcacttccggctttccctctgtaatcgtccccgtcttgtcaaacacgatcgtttgtattttatgggtgatttccagagcctcgccgccttttatcaaaatgccgttttccgctcccttgccggttcccaccatgatcgccgtaggcgtggcaagcccgagagcgcagggacaggcgatgaccagtacggaaataaaaatagtcagggcgaattccagtgttgtttttccggcggggggtgttgtaagaccggcggaggacgcggcgaaccacgctattccggcggcaagggctataacgcagactataggtacaaaataaccgcacactacatccgcaatttttgctattggcgccttggaactctgagcgtcctctactaa

SEQ ID NO: 44794 - protein, 163 aa, Unknown
  Obtained from environmental sample
  misc_feature (1)..(163): Xaa is any amino acid
MFRVSFRGGGKLKEKIGVLALFSVSRSPFSAYDNNIRHFRLSLCNRPRLVKHDRLYFMGDFQSLAAFYQNAVFRSLAGSHHDRRRRGKPESAGTGDDQYGNKNSQGEFQCCFSGGGCCKTGGGRGEPRYSGGKGYNADYRYKITAHYIRNFCYWRLGTLSVLY

SEQ ID NO: 44795 - DNA, 918 bp, Unknown
  Obtained from environmental sample
  misc_feature (1)..(918): n is a, c, g, or t
gtgaaggcggaacacgattattccgagcggcgggcctgtaagcttctggatatgaaccggcgtacttttcgccgtgaaccttccgcggataaggatgccgccttgcggacacgtatgcgcgagattgccgaaacacgccggcgctttggcgctcccaggctccatatcatgctccggcgggaaggcttggtcgtcaaccataaacgcacagagcgtgtataccgggaggaaggtctttgcttgcgattgaaaaagcgcaacaaacgtccgagtcatgcgcgtgtgccccaagtcgggccgttatgccgtgacgagcaatggagtatggactttttgagtgatgctcttctggatggccgccggatcaggattttgacgattgtggatttgtgggatcgtagcagcccggccttggaagtggacgtttcgcttccgggtctgcgagtggtgcggactctggagcggttgcgcctgcaagggcggcttcctcaatgcattcggacggacaatggtccggagtttaccggcaaagaactggatgcctgggcgcataagcacaacgtccggctggattttatacgtcccgggaagccgatggacaatgggcacatcgaaagcttcaatggtaaaatgcgcgatgaatgtctgaatcagcatgtttttttgtccctggctgacgccagggactgccttgcaagatggagggatgattataaccagtcccgaccgcacagctccctggactggatgagtcctgaagagtatcatgaatatcatcaaccctataacccaacgggaaccactaacttnaaattcggtatacccaacgggggtagggtcacagaggctattctatcatggcaaatgagaatctttgctataatccaaagatcatggatgaaatcattgactgcatag

SEQ ID NO: 44796 - protein, 305 aa, Unknown
  Obtained from environmental sample
  DOMAIN (99)...(257): Integrase core domain
  misc_feature (1)..(305): Xaa is any amino acid
MKAEHDYSERRACKLLDMNRRTFRREPSADKDAALRTRMREIAETRRRFGAPRLHIMLRREGLVVNHKRTERVYREEGLCLRLKKRNKRPSHARVPQVGPLCRDEQWSMDFLSDALLDGRRIRILTIVDLWDRSSPALEVDVSLPGLRVVRTLERLRLQGRLPQCIRTDNGPEFTGKELDAWAHKHNVRLDFIRPGKPMDNGHIESFNGKMRDECLNQHVFLSLADARDCLARWRDDYNQSRPHSSLDWMSPEEYHEYHQPYNPTGTTNXKFGIPNGGRVTEAILSWQMRIFAIIQRSWMKSLTA

SEQ ID NO: 44797 - DNA, 537 bp, Unknown
  Obtained from environmental sample
  misc_feature (1)..(537): n is a, c, g, or t
atggcaaatgagaatctttgctataatccaaagatcatggatgaaatcattgactgcatagaaggctatacaagccattattcaagaacatttatcatcaactttggattgaactatccacaatcatcacagcatactaccaatactcccatgcaagaatttattggaaggtttaagaaacacctcgatgtaaggggattgcgtcctgtgtatttctgggtcaaggaacaacgcatatccgataaccctcattaccactgtttgcttcttctggatggtcgtaagatacagaatcagtttgaattgatggaagaagccaaacgtctatggggaagcatcaacggatgctcaggcagtggacttgtccactatgccaacgattgcaggattctcagaacagattcatcaacgtattcgcaggatattaacgacagcatattccatgcaagctatcttgccaagacaaacacaaaaaaccatgttcatccacgtcaacgcgagtttggttactcttacgctaaaccatggaagcaatag

SEQ ID NO: 44798 - protein, 178 aa, Unknown
  Obtained from environmental sample
  misc_feature (1)..(178): Xaa is any amino acid
MANENLCYNPKIMDEIIDCIEGYTSHYSRTFIINFGLNYPQSSQHTTNTPMQEFIGRFKKHLDVRGLRPVYFWVKEQRISDNPHYHCLLLLDGRKIQNQFELMEEAKRLWGSINGCSGSGLVHYANDCRILRTDSSTYSQDINDSIFHASYLAKTNTKNHVHPRQREFGYSYAKPWKQ

SEQ ID NO: 44799 - DNA, 1953 bp, Unknown
  Obtained from environmental sample
  misc_feature (1)..(1953): n is a, c, g, or t
gtgaaccttttgaggcacgtcataatcggcaattccgcggccggcataggcgcgccggaaggcatccgccaagtggaccgtcgggccgaaatcaccgtcatcaccagcgagccgcaccattcatattcgcgtccgctcatttcctatctcttgagcggcaaggttacggaagaagggatgaaataccgcggcgacggcttttatgccgagaacaactgcgttttgcttaaaaacagcgtcgtggccgaaattgacgccgcggctaaaacggcggtgttggccgacggcggccgggtgccctatgacaggctcctggtcgccacgggttcccggcccctggtgccgtcctttgaagggctcggcacggtggataagaaattcactttcatgggcttggatgatgcgcgtgaactttctgtctcgctggaacgcaacaagcgtcttctcatcgtaggcgcgggtctgatcggtctgaaatgcgccgagggcattcacgagcgcgtaaagcacatcacggtgcttgacctggccccgaggattttatccagcattctcgacgatgaaggcgcgaagctggttcagagccatctggaaagcaaaggcatagagttcaggctttccgctaacatcaaaaatttcaagtttaattccgttactcttgatagtggcgaaacaatagaattagatatcctcgttctggctgtcggtgtgcggccaaacaccgcgcttctcaacggcgtggcaaagacagaccggggcatcgtcgtaaacggaaaatcggaaacctcagcccctgatatttacgcggcgggcgattgtacgcaaacgcttgacatatcaagcgggcaaaataaaatcatggcgctgttgcccaacgcttatatgcagggcgaagctgcggggatcaatatggctggcggagacaagagctttgacaaagcgatccccatgaacgcgatcgggtttttcggcctgcacattattacggcgggaaattactctggcagcgtacatgccgagaacagcaagggcaattacaggcgtttatttttcagcgataacaaattaaacggatatattctaattggcaatgtggaaaaagccgggatttacacaagccttattcgcgaacatacgccgcttgacacaatcgacttcgcgctggtttgtgaaaagcccggggctgatggcattcaggaaagaagatcgtatggtaaaattgggaggcgcgtcatgacaaacattcaagcgaaggatttagaccacaaggaattaaataagctgatcagggctgccggggaagacatcagcatagatgactgctttgggcagaggtttatcggaagcggcatgagcggcaaaaatataacgataaacggaactccgggaaacgctatgggcgcttattttaacggcggaaccattacggtaaaaggcaacgcacaggacgctgtcggtgatacaatgaatgacggcaaaatcatcatccacggcaacgcgggtgacgcgcttggttacgccatgcgtggcggcagcatttttgtcaggggcaatgccggttacagaaccggtatccacatgaaggagtacaaggagaaaaaacccgtaatcgtcataggcggcaaagtgggcagtttcctgggcgaatacctggccggcggggtgattgtcgtgcttggcattgattcggtggaagccccggtctattattttacggggaccggcatgcatggcgggaagatttttatacggacgaccaaggatctcctgagcctgccggtacaggttgtcttgtcaaacgctgcggtggaagacttgaacgagattaagccgtacctttcagaatttgcgaattatttcggaatggacacggaatcgcttttaaaggacaatttttatttgttaaggcccaataccaaaaacccgtacaaacagctatacacggcaaattga

SEQ ID NO: 44800 - protein, 650 aa, Unknown
  Obtained from environmental sample
  DOMAIN (147)...(236): Pyridine nucleotide-disulphide oxidoreductase
  misc_feature (1)..(650): Xaa is any amino acid
MNLLRHVIIGNSAAGIGAPEGIRQVDRRAEITVITSEPHHSYSRPLISYLLSGKVTEEGMKYRGDGFYAENNCVLLKNSVVAEIDAAAKTAVLADGGRVPYDRLLVATGSRPLVPSFEGLGTVDKKFTFMGLDDARELSVSLERNKRLLIVGAGLIGLKCAEGIHERVKHITVLDLAPRILSSILDDEGAKLVQSHLESKGIEFRLSANIKNFKFNSVTLDSGETIELDILVLAVGVRPNTALLNGVAKTDRGIVVNGKSETSAPDIYAAGDCTQTLDISSGQNKIMALLPNAYMQGEAAGINMAGGDKSFDKAIPMNAIGFFGLHIITAGNYSGSVHAENSKGNYRRLFFSDNKLNGYILIGNVEKAGIYTSLIREHTPLDTIDFALVCEKPGADGIQERRSYGKIGRRVMTNIQAKDLDHKELNKLIRAAGEDISIDDCFGQRFIGSGMSGKNITINGTPGNAMGAYFNGGTITVKGNAQDAVGDTMNDGKIIIHGNAGDALGYAMRGGSIFVRGNAGYRTGIHMKEYKEKKPVIVIGGKVGSFLGEYLAGGVIVVLGIDSVEAPVYYFTGTGMHGGKIFIRTTKDLLSLPVQVVLSNAAVEDLNEIKPYLSEFANYFGMDTESLLKDNFYLLRPNTKNPYKQLYTAN

SEQ ID NO: 44801 - DNA, 687 bp, Unknown
  Obtained from environmental sample
  misc_feature (1)..(687): n is a, c, g, or t
atggttttattttttattatcgatacttccggcagtatgacggggacaaaaattggagccgtgaacacggccattcgcgaggttttaccggaattaaaggggattggcggctctgatgtcgatttaaaaataagttgcctgaaattttcctgcggttgttcatggatgcacgcttccccggtcgctgttgaacagtttcaatggaataacctttccgccgacggtgaaactgattttggagccgcctgtaaggaactgtccgataaattgtccagggaaaaattcctggcggccccttccgcttccgtagcccccgccattatcctcatgtctgacggcgagcctacggacgattacaagaaaggcttatccgaattgcgggacaacaaatggtataaatacgccattaaggttgccgtggctatcggggaggacgcgaatattgacgtgttaaaagagtttaccggaaacattgaggccgtaactaccgtacacacgccggaagccctattaaaatggatacgttttgttaccgttgaatccgtacaaattggaagtaaaagccagcccatgcaggacgggcagattgaatccaaacagggaacgatgatagaacagatgaaggatttacagcaaagcgatccggattttaaccaggtttcaaccgcagaggatgactgggattaa

SEQ ID NO: 44802 - protein, 228 aa, Unknown
  Obtained from environmental sample
  misc_feature (1)..(228): Xaa is any amino acid
MVLFFIIDTSGSMTGTKIGAVNTAIREVLPELKGIGGSDVDLKISCLKFSCGCSWMHASPVAVEQFQWNNLSADGETDFGAACKELSDKLSREKFLAAPSASVAPAIILMSDGEPTDDYKKGLSELRDNKWYKYAIKVAVAIGEDANIDVLKEFTGNIEAVTTVHTPEALLKWIRFVTVESVQIGSKSQPMQDGQIESKQGTMIEQMKDLQQSDPDFNQVSTAEDDWD

SEQ ID NO: 44803 - DNA, 870 bp, Unknown
  Obtained from environmental sample
  misc_feature (1)..(870): n is a, c, g, or t
gtgccgtttattaaatttgccgtaaaggcccggggcataagccatattgaaaagggcattccctgtcaggattccgcaaacgctgttttgggccttaataatacgataggaattgcctgcgccgccgacggccacgggggcaataaatatttccgaagcgacagagggtcaaatttcgcggttactatagctttgccgtccctggcggatttttacggttctgtaacaagaaaaaagactgtattatttgcagacggcaaagccggtaacgagggcataagaaatattgatatgcaatcgaagttgaaacagcttgaggcgaatatcatttacaaatggcgcaatgccgtcattgaagatttaaaaaattatcccttgactgaagccgaaaccggaatctgtaatgataacaatattccgcatgacgatccggtaatgtatggcacaactttattagcagggcttgtttcggattgtctttggtttgtaatacatatcggcgacggcttatgcgttgttttggaaaatgaagataaaatatattgtcccctacaggaagacgagcgtttggcgtttggcaggacaacttcattatgtgacaatgacgcggttaacaattttcgtgaaagttatggtttttccccaattatggggttaaccgcagccacagacggaatggcggattcgtttgaaccggataaatatctccggtttaataaagagctgtacgacaaattttctcattttcctgcgcanacagaagctgaattacaggattttcttccaaaaatatccgagcgncgcagccgtgatgatgtttcaattacgggtattttcagaaataatgagttaaaacaggcattggcatga

SEQ ID NO: 44804 - protein, 289 aa, Unknown
  Obtained from environmental sample
  misc_feature (1)..(289): Xaa is any amino acid
MPFIKFAVKARGISHIEKGIPCQDSANAVLGLNNTIGIACAADGHGGNKYFRSDRGSNFAVTIALPSLADFYGSVTRKKTVLFADGKAGNEGIRNIDMQSKLKQLEANIIYKWRNAVIEDLKNYPLTEAETGICNDNNIPHDDPVMYGTTLLAGLVSDCLWFVIHIGDGLCVVLENEDKIYCPLQEDERLAFGRTTSLCDNDAVNNFRESYGFSPIMGLTAATDGMADSFEPDKYLRFNKELYDKFSHFPAXTEAELQDFLPKISERRSRDDVSITGIFRNNELKQALA

SEQ ID NO: 44805 - DNA, 786 bp, Unknown
  Obtained from environmental sample
  misc_feature (1)..(786): n is a, c, g, or t
atgatttttcctatatgtcagataacgccttttgacagcataaccaatgccggccacgcatcaatgattatcaaaatgaacgggcagacaatttttacagacccgtttttctccaatgcggctgtgatagtgcggaaaaaagtaaaaataaaatttgatttttccaaagtccctgaaaagtttgtggtattaataagccacaaccattatgatcatcttgataaatattccgtaaaaaagcttgcaaaaaaaggcgctgtttttatcgttcctttagggctaaaaaaacttgtttcaagttacggagcgaaggaagtgcatgagcttggctggtggcaaaatattactcttgacggcattgagtatacgtttgtgccttcccagcattggtccaggcggcttgggcaaaagggcggcagtaccttgtggggcgggtatgttattaagggcgcaaagaccatttatttttcaggcgactccggttattttatcggttttaaggaattcggaaacaaatgggatattgattatgccatcatgggggcgggcgcttatgagccgcgctggtttatgcattacgcgcacatgaacgtaaaagaatttttaatggcggcgcaggagactaaggcaaaaatttctattccaatgcatttcggcgttatcagtttaagcaacgagccactactatatccgttactggaaattgacaacgctattaaacaaaacccggagcttgcgaaaagcatactttctttaagggtaggggagtatacaaagatacaatga

SEQ ID NO: 44806 - protein, 261 aa, Unknown
  Obtained from environmental sample
  misc_feature (1)..(261): Xaa is any amino acid
MIFPICQITPFDSITNAGHASMIIKMNGQTIFTDPFFSNAAVIVRKKVKIKFDFSKVPEKFVVLISHNHYDHLDKYSVKKLAKKGAVFIVPLGLKKLVSSYGAKEVHELGWWQNITLDGIEYTFVPSQHWSRRLGQKGGSTLWGGYVIKGAKTIYFSGDSGYFIGFKEFGNKWDIDYAIMGAGAYEPRWFMHYAHMNVKEFLMAAQETKAKISIPMHFGVISLSNEPLLYPLLEIDNAIKQNPELAKSILSLRVGEYTKIQ

SEQ ID NO: 44807 - DNA, 753 bp, Unknown
  Obtained from environmental sample
  misc_feature (1)..(753): n is a, c, g, or t
atgatatttctttccaaaatttttacatgcttaattcttcctcccggatgttttatcgttgtacttttccttgtttttttatttataccgaaaaaaaagaaaatatttccgctcctttcgcttttgattttgtatctattgtcaatacagcctgtttccgacttgcttctgaagcctcttgaaaacgcgtatccgcccttgtcgtccgaatttaagaaagactggccgcaggctgttgtaattttaggcggcggaataatacaagcctcgccggaagcgggagcggggaaggatgcccttacatcggacgcgatgaaaagagtggtatacgcgtactcgcttcgcgatacatttaaagttccgtatattttttccggcggaaagacttttgaatacggacaggagcctgaagcgtttgcggcgagcaggttgtttgtttctttggggtttccttttgatcggcttattctggaatcaagaagccgtaacacatgggaaaacgcgaaagagacggcaatatacggatttgaaaaagttgtattaattacatctgcatatcatgttaaacgcagcgtttattgttttaaccggcaaggcatatctgtaattgccgccccaaccgattataaatgcgaccgcgggcgtaaatataattttttcagttttatgcctgcaatttccagtttaaataattcatacctggccttgcatgagtatgtcgggttgttgatatataaagttatttacaagtga

SEQ ID NO: 44808 - protein, 250 aa, Unknown
  Obtained from environmental sample
  DOMAIN (75)...(242): DUF218 domain
  misc_feature (1)..(250): Xaa is any amino acid
MIFLSKIFTCLILPPGCFIVVLFLVFLFIPKKKKIFPLLSLLILYLLSIQPVSDLLLKPLENAYPPLSSEFKKDWPQAVVILGGGIIQASPEAGAGKDALTSDAMKRVVYAYSLRDTFKVPYIFSGGKTFEYGQEPEAFAASRLFVSLGFPFDRLILESRSRNTWENAKETAIYGFEKVVLITSAYHVKRSVYCFNRQGISVIAAPTDYKCDRGRKYNFFSFMPAISSLNNSYLALHEYVGLLIYKVIYK

SEQ ID NO: 44809 - DNA, 903 bp, Unknown
  Obtained from environmental sample
  misc_feature (1)..(903): n is a, c, g, or t
atgatccgcctctctttgaacgcctgttgcacaaatattattcggaaaaaaacgatgggaaaatttgaagacgaacttgaagtccaaaaacgccagatggaaaacctcctctgcgatcttgaaaaacttatcacgctctttgaaacaaaatccgtcacggatatttatgtttatggcgacggaaacgtttccgtttcagattttgaaaaaggctcttatgataccggtattgttctttcaattccggaacgcctaagaattatttacagcctttcaagcgttgtgaacatacctatagataaatggataaggccgactcttgaaagcatcattccaaaatataatatccgcactacggccattgttgatccttgggtcaccgcccctgaaattacttttagaaggccggcggataaaattcacactttggaagattacctttcagaaaaaagaatatctcaggatttatacgaaaaaattatttcgcatattgagaaatattcaaacatcgtcatttccggatcgacgggaagcggcaagacgacctttaccaacgcttgtttggataaaatgtatgagctttttccgcgggaccggctctacatcgttgaagacacttatgaactgcagtatcgcgatccgaaaaaaacccagctttacatacgccctgatcaggccgtcgccgccatccagaccgccatgcgatggactcctaaaggattattttcggggaaatccgctacggcgaagtcgccaacgaaatgcttaaagcatggaatacaggccatccgggaaatgttacaacaattcacgcggatagcgccgcttctaccatacctcgcatcgaaggacttttacgccaggtcattaaaggacagcttcctgatctggctgaaagtataa

SEQ ID NO: 44810 - protein, 300 aa, Unknown
  Obtained from environmental sample
  DOMAIN (29)...(274): Type II/IV secretion system protein
  misc_feature (1)..(300): Xaa is any amino acid
MIRLSLNACCTNIIRKKTMGKFEDELEVQKRQMENLLCDLEKLITLFETKSVTDIYVYGDGNVSVSDFEKGSYDTGIVLSIPERLRIIYSLSSVVNIPIDKWIRPTLESIIPKYNIRTTAIVDPWVTAPEITFRRPADKIHTLEDYLSEKRISQDLYEKIISHIEKYSNIVISGSTGSGKTTFTNACLDKMYELFPRDRLYIVEDTYELQYRDPKKTQLYIRPDQAVAAIQTAMRWTPKGLFSGKSATAKSPTKCLKHGIQAIREMLQQFTRIAPLLPYLASKDFYARSLKDSFLIWLKV

SEQ ID NO: 44811 - DNA, 882 bp, Unknown
  Obtained from environmental sample
  misc_feature (1)..(882): n is a, c, g, or t
atgcggggcgggcagaccccgcccctacggcgatgggcgatgattatgaaaacaaccataaaaaaaatactactgactggcggcgggactgcgggccatgtcaccccgaatttggccttaatccccggtctaaaagccttgggtttcgacatccactacgtcggcacccgcgccggcatggaacgcggtttggtcgaaaaggccggtttgacctaccactgtatcagcgcgggtaagttacggcgctattttgattttaagaatttcacggacgccttcagaatagcgatcggattcattcaatcaatctttctattgataaagctccgccccgcactcgtcttcagcaaaggcggtttcgtctcctgtcccgtggtctgggcggcgtggctgtgccgcgtgcccgccatcatccacgaatcggacatcacgcccggattggccaatcggctctctatgccgtttgtcaagaagatatgcttcagtttccctgagaccgagtctcatctgcccgcctccaagcgggtgatgacgggtctgccggtacgcgaagaactattcggcggcgacgccgctacgggtcgggaactttgcggatttgaagacggcaaaccggtagtagtagtaattggcgggagtctgggggcaagcgccgtgaacgaggccgtaaggggcgggcttaacaaattgctcgtcgatttcaacgtctgccatatatgcggcaagggcaacaaggcgccggggggacgatctggatacagccaattcgagtacgtaggggccggagctgccggatctgttcgcgatggccgacatagtaatatcgcgggcaggagcgacgacgctgttcgaactattggcgtatgcaaacggccctgttga

SEQ ID NO: 44812 - protein, 293 aa, Unknown
  Obtained from environmental sample
  DOMAIN (23)...(161): Glycosyltransferase family 28 N-terminal domain
  misc_feature (1)..(293): Xaa is any amino acid
MRGGQTPPLRRWAMIMKTTIKKILLTGGGTAGHVTPNLALIPGLKALGFDIHYVGTRAGMERGLVEKAGLTYHCISAGKLRRYFDFKNFTDAFRIAIGFIQSIFLLIKLRPALVFSKGGFVSCPVVWAAWLCRVPAIIHESDITPGLANRLSMPFVKKICFSFPETESHLPASKRVMTGLPVREELFGGDAATGRELCGFEDGKPVVVVIGGSLGASAVNEAVRGGLNKLLVDFNVCHICGKGNKAPGGRSGYSQFEYVGAGAAGSVRDGRHSNIAGRSDDAVRTIGVCKRPC

SEQ ID NO: 44813 - DNA, 789 bp, Unknown
  Obtained from environmental sample
  misc_feature (1)..(789): n is a, c, g, or t
gtgcagaagctggacatcgtcggccagctggccggcggcatctcccacaacttcaacaaccagctgaccgggatcatgggtttcgccaacctcatcgcgatgcggacggaaaacgcgaacgtcaagaagttcgccgaggagatcatcggcatctgcaagaacgcggggaacatggtgagggagctgcttactttcgccagatacaaaccgatgtccgccaccgtccaaaacgtcaacggcgccataaccacggtcaccaacctgctctccaacagcatagacaagcgtataaccatctccacagacctgagcgacgaacaatgcaacgtcttcgccgacgcggtgcagctgcaaagcctgctcctgaacatcgcgctcaactccaaagacgctatgcccgccggcggcaagctcgccttctccaccaaacgggtcgagaccgccgacggcgccaacgccgccgacgcgccgtgcggctacgtgcggatagagatcgccgacaccggccacggtttcggcgacgacgtgaaagcgcggctgttcgaacccttcttcactacaaaggctcaggggcacgtgggcctcggactgtcggcggcgtacaacctcgtcacgctgatgaacggaacaatcgaaatcacaagcgaggcggacaagggaacgtcggtcgtgctgatgctcccgatccactcggaagcccagcgcggcgccgagggcaaggccgccccggcccggaaagacgcggcggcggacggcaacgacggctcggccgatctgatccttggttga

SEQ ID NO: 44814 - protein, 262 aa, Unknown
  Obtained from environmental sample
  DOMAIN (6)...(71): His Kinase A (phosphoacceptor) domain
  misc_feature (1)..(262): Xaa is any amino acid
MQKLDIVGQLAGGISHNFNNQLTGIMGFANLIAMRTENANVKKFAEEIIGICKNAGNMVRELLTFARYKPMSATVQNVNGAITTVTNLLSNSIDKRITISTDLSDEQCNVFADAVQLQSLLLNIALNSKDAMPAGGKLAFSTKRVETADGANAADAPCGYVRIEIADTGHGFGDDVKARLFEPFFTTKAQGHVGLGLSAAYNLVTLMNGTIEITSEADKGTSVVLMLPIHSEAQRGAEGKAAPARKDAAADGNDGSADLILG

SEQ ID NO: 44815 - DNA, 1110 bp, Unknown
  Obtained from environmental sample
  misc_feature (1)..(1110): n is a, c, g, or t
ttgactttaatccccgaagtcgcaagcggcgaattaaaaacaaagccgacccaacactcggtaaagtcgatgcaggaaatgggaattcagcccgacattttaatctgccgcgctcccgtaatgcttgaagaatctacacggcggaaaatcgccctctttaccaacgttgatcccgacgctgtttttacttcacccgatattgatacgacaatttatcaaataccgatggtcttctttgatcaaaaacttgatcaggttatccttcgtaagatgggcgttgaaagccgtcatgccgatattagtccgtggcattccgtaatagatcgttttaactcccgcaagggaaaagtaaaaataggcgttgtcggaaaatatatggagttacacgacacttatacgtcgctgtacgaagcgttattccacgcaagtcttgaatgcggcgtagaaatggaactggtaaaaatagattcgcaaaaacttgaagagacggaaaacacaaactcaattttgggaaaaggcgaaaacgccaaaaactgtatgtttcaggttgacggtattttggttcccggcggtttcggcgagaggggaatcggcggcatggtaagagcggcggcttgggcaagaactaacaaagtgccgtacttgggaatttgccttggtatgcacataatgttaattgattggggacgcaatgtgatgaattgggcggacgccgattcaaccgaattcaaccgtgactcgaaacaccctgttgtgagtcttcttgaagaacaggttaatgtaacaaattacggcggaacaatgcgtctgggcgcaatggaaaccgtaaacgaaaacggcactcatattttagcggcgtacggcgaaaagcggataatggaacgtcaccgccaccgctatgaatttacaaaccagtaccgcgaggaaatggcaaagacaggtctgaaacttgccgcttttaattccgacggttctcttgttgagtgcgttgaatggccggatcacccgtggggtgtcgccgttcaattccatcccgaatttaaatccaaaccgacatcggcggctcctttgttcagggattttattgcggcggttaagaagaataaatga

SEQ ID NO: 44816 - protein, 369 aa, Unknown
  Obtained from environmental sample
  DOMAIN (147)...(346): Peptidase C26
  misc_feature (1)..(369): Xaa is any amino acid
MTLIPEVASGELKTKPTQHSVKSMQEMGIQPDILICRAPVMLEESTRRKIALFTNVDPDAVFTSPDIDTTIYQIPMVFFDQKLDQVILRKMGVESRHADISPWHSVIDRFNSRKGKVKIGVVGKYMELHDTYTSLYEALFHASLECGVEMELVKIDSQKLEETENTNSILGKGENAKNCMFQVDGILVPGGFGERGIGGMVRAAAWARTNKVPYLGICLGMHIMLIDWGRNVMNWADADSTEFNRDSKHPVVSLLEEQVNVTNYGGTMRLGAMETVNENGTHILAAYGEKRIMERHRHRYEFTNQYREEMAKTGLKLAAFNSDGSLVECVEWPDHPWGVAVQFHPEFKSKPTSAAPLFRDFIAAVKKNK

SEQ ID NO: 44817 - DNA, 732 bp, Unknown
  Obtained from environmental sample
  misc_feature (1)..(732): n is a, c, g, or t
ttgacgctttttttgcgtcattattataaaaattttttatggaggcagaaaatgaaatctgtcaaagcgtttgcgctgatagcggcgttaatggtaattgttgtccttgccggttgtaacacttcaggcaaagccgcgcccggtattaaactggagaccacggccaaagttgaaacaatcgagcataaagggagcgcccttggcgtaaaagacataccgccctggctgtcgacgtttattcaacgcaacggtacccgttccgtcgaggcgctccctgattataagggcaagtatgtaattatcggccaggctaacggagccggattacagcaggtggaaacctgggccaaaaactttgacgcccagcagcagattggcgccaccatcgaaacccgcgtggcgtcggtgttcaaggcccatgagaatttgctcccgggcggtgacgacgcgaaacgcaaatacgacaacgctattaacacattggtaagggccacctacacaggcgccaaacaggaagccgactggtggctgcatcagaagatcaccgaaaagggcaaagaacctgaaacaaggtatacttcttatgttttgtacaccatcgacaggtcgatattagaccagcagataagggaccagatcaagaaaattagagacggcgaaaacccggaactggacgcggcttttgacgccgttacagcgcaactgctccaaagaggcctggagtgggagtaa

SEQ ID NO: 44818 - protein, 243 aa, Unknown
  Obtained from environmental sample
  misc_feature (1)..(243): Xaa is any amino acid
MTLFLRHYYKNFLWRQKMKSVKAFALIAALMVIVVLAGCNTSGKAAPGIKLETTAKVETIEHKGSALGVKDIPPWLSTFIQRNGTRSVEALPDYKGKYVIIGQANGAGLQQVETWAKNFDAQQQIGATIETRVASVFKAHENLLPGGDDAKRKYDNAINTLVRATYTGAKQEADWWLHQKITEKGKEPETRYTSYVLYTIDRSILDQQIRDQIKKIRDGENPELDAAFDAVTAQLLQRGLEWE

SEQ ID NO: 44819 - DNA, 699 bp, Unknown
  Obtained from environmental sample
  misc_feature (1)..(699): n is a, c, g, or t
atgggcgccctcatagccctggtgggccggcccaacgtcggcaaatccaccatcttcaaccgcctggtgggccgctcccaggccctggttgacgaccgccccggagtcacccgtgaccgccactacggcgagatgcgcttcgaaggccgcctgggcacggtcatcgataccgggggcttcgaccccaccgaccaagatcccctcatcgggcagatcaaggcccaggccctggcggccctggaggaatccgacctgactgtgctggtggtggatggccgaagcggccccactccccacgaccgggaactggcccggctcatccgccgctcgggccggccccacctggtggcggtcaataaaatcgacggcccggacctggaagccggcctgaacgaattccatgaactgggtctggatgggctgtggccggtgagcgcggcccacaactacggcctgaatgatttcaaggccgccctggccgggttcctggcccaggccgggccggacggcttaggcgaggcggatgaggaggccccgccccgggtggccgtcatcggccggcccaacgccggcaaatcatccctcatcaaccgcctgaccggccgggagcgcctggtggtggaacagccgcccgggcaccaccggcgacgcggtggcagtgcccgtgacggcccggcggccggtctatgttttcattga

SEQ ID NO: 44820 - protein, 232 aa, Unknown
  Obtained from environmental sample
  DOMAIN (5)...(182): Elongation factor Tu GTP binding domain
  misc_feature (1)..(232): Xaa is any amino acid
MGALIALVGRPNVGKSTIFNRLVGRSQALVDDRPGVTRDRHYGEMRFEGRLGTVIDTGGFDPTDQDPLIGQIKAQALAALEESDLTVLVVDGRSGPTPHDRELARLIRRSGRPHLVAVNKIDGPDLEAGLNEFHELGLDGLWPVSAAHNYGLNDFKAALAGFLAQAGPDGLGEADEEAPPRVAVIGRPNAGKSSLINRLTGRERLVVEQPPGHHRRRGGSARDGPAAGLCFH

SEQ ID NO: 44821 - DNA, 570 bp, Unknown
  Obtained from environmental sample
  misc_feature (1)..(570): n is a, c, g, or t
ttgacagatgtcggatttggccataaggaattgttctgtgacattctcataaagcgcaacacgacccttcccgcgtccgcctctaaaatttacttaacttcccgcgataaccagacaaaagtgcatgttaccgcatatcagggtgaaagccttgatcctgatgaaaactaccttttgaattgttttgaacttaacggcgtgcctaaagccaaagcaggtaaagaaaagataaatatccgttttgaatatgatttgaacggcattttaacggtacaggcggaaatagtctcaacgggcaaatcggcggcagtgatggtgaacacgtcgcagatgggtaaaaatcttgatctttcaaaatggaaggacgcttccgccgcctggaaataccggaagataatacagaaagcggaaagacttgtaaaggttcatgacggggccgaagaaattgaagccgccgccaatgaattgaaaaaggcgcttgttatgaattgggacgacgcggttatcgaaaagatgaagaacgtccttgccgacgcgattgacggcatggaagaggaagacaagggttga

SEQ ID NO: 44822 - protein, 189 aa, Unknown
  Obtained from environmental sample
  misc_feature (1)..(189): Xaa is any amino acid
MTDVGFGHKELFCDILIKRNTTLPASASKIYLTSRDNQTKVHVTAYQGESLDPDENYLLNCFELNGVPKAKAGKEKINIRFEYDLNGILTVQAEIVSTGKSAAVMVNTSQMGKNLDLSKWKDASAAWKYRKIIQKAERLVKVHDGAEEIEAAANELKKALVMNWDDAVIEKMKNVLADAIDGMEEEDKG

SEQ ID NO: 44823 - DNA, 1302 bp, Unknown
  Obtained from environmental sample
  misc_feature (1)..(1302): n is a, c, g, or t
ttgaattactacgaactgttgaatatagagcgaggcgctgacgccaatgaaattaaacgcgcttatttttcagcggttagattacattcgccggattccgatcccgaggggttcaaggcaataaggcttgcctatgaaacgctttacgatccaaaaaagcgcgccgagtatgacggttattttgtcacgtcaggcggcgtgcagaatgatctgctcgcggcccgcagccttattcgtgaaaacaaatacaaacaagccatggatttcctgacggaattgaacgaaaaaaatccggattcggcggatgttaagcggcttcttgccgaggtgttatggtacctgaagaaaagcgggaccgccgacaaaatttgcgcggagatcctcgggaaaaatccgtcagactatgatacgctgctgttacgcgcaagaatagcggaatcaatgagacatatagataaagccaacgactattataacgacgcggtcaacgcctatccgtcgaaccccggggcatggactgaatatatgcattacgctctcaaaaacgcccgttggcaggtatcaaatattttctaccgcgccatggaacaggatataaatatgttccgtgacgattatattttgtatttagttgggacgcatgagaataatttatttaacagtgaaaagtatccggaatattatgataaattcgctgaattttatataaatgacaagaacccggaagaagacgtatatccgcatctgatggcattaataccgcgtttattggaaaaaaaagagcttgttccatttgtggaaaaaatactgcccaagcttgaaaaaagcaatcaatacagcgatgaagacgaaaagagttttatgtatatacgaatgaccataaaactgtttaaacttcaatctgataaacgaatacatggcgtgcttaatgacctgacagtatttcttttttatgacgaaaaagataaaaacgaacagttggggatggaaatttatattgtctataatctgaccaggttacgcccgtcaataaaagttctcatgcatgaatatccggagttgttcaggctaaaccaggcgttttacctggacgcgctcaatgaaaaaaaagaagattatcttttggataaatatatcgcgatacataaaaagataaagcccggttttaacttttattatgatggtgatgaagatacggaagatgtagcgccttttaagcgtgaatcccccaaaatcggacgtaatgccccatgtccgtgcggaagcggaaagaagtataaaaagtgctgcggggcaaaataa

SEQ ID NO: 44824 - protein, 433 aa, Unknown
  Obtained from environmental sample
  DOMAIN (414)...(433): SEC-C motif
  misc_feature (1)..(433): Xaa is any amino acid
MNYYELLNIERGADANEIKRAYFSAVRLHSPDSDPEGFKAIRLAYETLYDPKKRAEYDGYFVTSGGVQNDLLAARSLIRENKYKQAMDFLTELNEKNPDSADVKRLLAEVLWYLKKSGTADKICAEILGKNPSDYDTLLLRARIAESMRHIDKANDYYNDAVNAYPSNPGAWTEYMHYALKNARWQVSNIFYRAMEQDINMFRDDYILYLVGTHENNLFNSEKYPEYYDKFAEFYINDKNPEEDVYPHLMALIPRLLEKKELVPFVEKILPKLEKSNQYSDEDEKSFMYIRMTIKLFKLQSDKRIHGVLNDLTVFLFYDEKDKNEQLGMEIYIVYNLTRLRPSIKVLMHEYPELFRLNQAFYLDALNEKKEDYLLDKYIAIHKKIKPGFNFYYDGDEDTEDVAPFKRESPKIGRNAPCPCGSGKKYKKCCGAK

SEQ ID NO: 44825 - DNA, 513 bp, Unknown
  Obtained from environmental sample
  misc_feature (1)..(513): n is a, c, g, or t
atggcatacacatttaaagaaacacgttatgaatcgatgagataccgcaggtgcggcaggagcgggcttaaactgccggaaatttctttggggttttggtataatttcggcggctcggacaattacgaaacagggcgggaaaccatgttaaccgcttttgacgcgggggtatgtcattttgacctcgcaaataattacgggccgcctccgggttctgcggaaattacctttggccgtttttttagggaaaacctgctgccataccgcgatgaaattattatttccacaaaggcgggttataatatgtggccggggccttatggcgattggggcagcagaaagtatcttatcgccagtttggacgcgagtctgaaacgtatgggccttgattatgtggatattttttatcatcaccgccccgacccggaaaccccgattgaggagacaatgacagcccttgccgatattgtgcgccggggtaaggctttgtatgccggtattcaaatacaataa

SEQ ID NO: 44826 - protein, 170 aa, Unknown
  Obtained from environmental sample
  DOMAIN (19)...(170): Aldo/keto reductase family
  misc_feature (1)..(170): Xaa is any amino acid
MAYTFKETRYESMRYRRCGRSGLKLPEISLGFWYNFGGSDNYETGRETMLTAFDAGVCHFDLANNYGPPPGSAEITFGRFFRENLLPYRDEIIISTKAGYNMWPGPYGDWGSRKYLIASLDASLKRMGLDYVDIFYHHRPDPETPIEETMTALADIVRRGKALYAGIQIQ

SEQ ID NO: 44827 - DNA, 819 bp, Unknown
  Obtained from environmental sample
  misc_feature (1)..(819): n is a, c, g, or t
ttggtgatgaaagcatttttttgcggctccgcagcttcaaaggggctgctccagtttacggatacgacaaacgcctacaggcttttaacggagtatggcaaggatattcgctataacttcctctggaaaaaatggattgtgtggaacggctgtcaatgggaaatggacgatggatatttaatccatgaccggggcttgaaaatgataagggggatttatgcggagcttctgaaaacagccgatatgcgggaccgcattgaaattgaaaaacacggtatgcagagcgagagcgcaaggcggaggaaggctttgattgaggttgcaagctggataccggaactgaatataaaaactgacgaccttgacagagacccctggctgttcaatgtcaagaacggaactattgatttaagaacgggagaaatgagggaacacaggcaagaagatttaataaccagaattgccaatgtggagtatgacttgaacgtcgattgccctgtatggaaaaagtttgtaatggagataatgaattacaatgcagacttaattcattttatccaaaatgcggcgggatgggcaataacaggggacacgtccgaacaatcaatgttcatcctgtttggaacgggggcgaacggaaaaagcacctttcttaataccattatgaatttattgggagattacgccatcgccacgcctactgaaacctttatgagaaaatcgggagaccagataacaaatgacattgcaaggctgaggggaacgcgctttgtaacactacggaagcggaatatggcnaaaggctgtcagagcctttaa

SEQ ID NO: 44828 - protein, 272 aa, Unknown
  Obtained from environmental sample
  misc_feature (1)..(272): Xaa is any amino acid
MVMKAFFCGSAASKGLLQFTDTTNAYRLLTEYGKDIRYNFLWKKWIVWNGCQWEMDDGYLIHDRGLKMIRGIYAELLKTADMRDRIEIEKHGMQSESARRRKALIEVASWIPELNIKTDDLDRDPWLFNVKNGTIDLRTGEMREHRQEDLITRIANVEYDLNVDCPVWKKFVMEIMNYNADLIHFIQNAAGWAITGDTSEQSMFILFGTGANGKSTFLNTIMNLLGDYAIATPTETFMRKSGDQITNDIARLRGTRFVTLRKRNMAKGCQSL

SEQ ID NO: 44829 - DNA, 525 bp, Unknown
  Obtained from environmental sample
  misc_feature (1)..(525): n is a, c, g, or t
atgaccgcgaggtttctgtacggggagcactttaacttcgtaccaacgttcaagatattcatggcgagcaaccacaagcctgttatcaagggaacagaccacggcatctggaggcggatcaagctgataccgttcactaccacgatagctgaagataagatggacaggcaccttgagcaaaagctgctggaggagaaatcaggcatactgaactggctgatcgaaggggcgctacgctggcaaaaagagggcttgaacaccccgtcaatcgtgctgaacgctactgacgagtaccgtggggagatggacgctatcgggaactttatcaaggaacggtgcgtccagaaaccgggggaggcgatcaaggcgcgagagctgttccgtgtctatcaagaatggtgcgaggagaacaacgagatagcaaccagcgagcggatgttcgggctgaggatgaaggagctgggcatggcgcagaaacgggcagccgatggccggtactggcaggatattgcgcttcaggcgtga

SEQ ID NO: 44830 - protein, 174 aa, Unknown
  Obtained from environmental sample
  DOMAIN (1)...(157): Poxvirus D5 protein-like
  misc_feature (1)..(174): Xaa is any amino acid
MTARFLYGEHFNFVPTFKIFMASNHKPVIKGTDHGIWRRIKLIPFTTTIAEDKMDRHLEQKLLEEKSGILNWLIEGALRWQKEGLNTPSIVLNATDEYRGEMDAIGNFIKERCVQKPGEAIKARELFRVYQEWCEENNEIATSERMFGLRMKELGMAQKRAADGRYWQDIALQA

SEQ ID NO: 44831 - DNA, 996 bp, Unknown
  Obtained from environmental sample
  misc_feature (1)..(996): n is a, c, g, or t
atgtacagattcggccgaggttctttttgcccgcggggcggcagcagggcaggagataccatcgaggtaaaacttgcgtcccccctaccaaaggaatcgccctgggggagaacccttgacagaatcgcttctgaatggagccggataacaaacaaccaggtgcgcctaaacatacgccacgggggcatcgaagggaatgaagccaaaatgcacctttcccttgccagcgatattatccagggagctgtcttcacctctttcggacttagcgccatcgatccgggaataatgactttgagcgcacccttccttatccgcaccgaaagcgaattgaacgcggtaatgcaggaaatgcaggtggaattggatcgcaggttcaacagcaagggcaattacgtcattctggcctggtccaaatccggctttgtcaatattttctccaaggatcccgtcaaaacccccgaagatttgcgcaagattaaaatagcttccaacgccgaggcgtcggatatgaacgacgtttttaaaaaaatgggcttccagatatttgagtcggactggggtgatgtgggaaacaaactgaacgcgggaactatcgcggcggtttatcaacagccagcggcagtcgcggcttttcagctccagtcaattctgaaaaatatgctttctatgaacattgccccggtgcttggcgggatcgtccttaaccaggtaacctggaaaaaaatcggagatttgaatccccggtatcagcagcaactgcttgatgtcacccggaaaattggtaatgaatttgacagctctttgacaaaaacagttaacgacgctgtagcaaccatgaagcgatccggattaaaggtgaacgacgcctcacctgccgagcaacagcagtggttcagcgaggttgaaagggctacagccagccttctgggaaccacctttgacagggatatttatcaaagggtgagcagtatccttacaaggatcaggcggtaa

SEQ ID NO: 44832 - protein, 331 aa, Unknown
  Obtained from environmental sample
  DOMAIN (25)...(313): Bacterial extracellular solute-binding protein, family 7
  misc_feature (1)..(331): Xaa is any amino acid
MYRFGRGSFCPRGGSRAGDTIEVKLASPLPKESPWGRTLDRIASEWSRITNNQVRLNIRHGGIEGNEAKMHLSLASDIIQGAVFTSFGLSAIDPGIMTLSAPFLIRTESELNAVMQEMQVELDRRFNSKGNYVILAWSKSGFVNIFSKDPVKTPEDLRKIKIASNAEASDMNDVFKKMGFQIFESDWGDVGNKLNAGTIAAVYQQPAAVAAFQLQSILKNMLSMNIAPVLGGIVLNQVTWKKIGDLNPRYQQQLLDVTRKIGNEFDSSLTKTVNDAVATMKRSGLKVNDASPAEQQQWFSEVERATASLLGTTFDRDIYQRVSSILTRIRR

SEQ ID NO: 44833 - DNA, 426 bp, Unknown
  Obtained from environmental sample
  misc_feature (1)..(426): n is a, c, g, or t
atgtccaagcttaatattgaggctctgcatcaagagaacaaaaagaaagatacctttgattttcgcgctggcgataccgtcacggtcaatgttaaaattatggaaaaaaccgcagacggcaaggcaaaaagccgcattcagcctttcaaaggcgtggttattcagcgcaaaggcacaggcataagtgctactgtaacggttcgtaaaatctcaaatggcattggagttgaacgtattttccaaatacactcccccttaatagattccatagtagtagatacccacggcagtgtgcgcaaatcccgcatttattatatgcgcgaactgcacggcaaagccgcccgcatcgcagagcgcaaggttcacgctccggtagaagccacaggggtagccgccacagctaccgaagaaactacggcaagctag

SEQ ID NO: 44834 - protein, 141 aa, Unknown
  Obtained from environmental sample
  DOMAIN (3)...(120): Ribosomal protein L19
  misc_feature (1)..(141): Xaa is any amino acid
MSKLNIEALHQENKKKDTFDFRAGDTVTVNVKIMEKTADGKAKSRIQPFKGVVIQRKGTGISATVTVRKISNGIGVERIFQIHSPLIDSIVVDTHGSVRKSRIYYMRELHGKAARIAERKVHAPVEATGVAATATEETTAS

SEQ ID NO: 44835 - DNA, 522 bp, Unknown
  Obtained from environmental sample
  misc_feature (1)..(522): n is a, c, g, or t
ttgaaagttgaaaaatgtgagattgatggtcttttggttgttgagccggatgtttttcccgattcgcggggttggttttatgaatcatacaatgcggaaaagtttaaagcccttggcatagacacggtttttgtgcaagacaaccacagccgttccgtgaaaaacacattgcgcggcttgcactaccaaaaaaatcctgggcaggcaaaacttgtgcgttgcacccacggcaaaatttgggatgtggcagttgatatacgcgatggcagccccacttacggcaaatggcacgcagtagaactcagcgaagagaacaaaaaattcttatatattcccatcggttttgcccacggattttgcgtactttccgattttgccgaggttcaatacaaatgcagttccgtgtataatggagcagaggaagctggctatgcttgggactgcccaaaaatagccgtaaaatggcccataaaagaacctattttaagcaaaagagatttggggaaccctagcttgccgtag

SEQ ID NO: 44836 - protein, 173 aa, Unknown
  Obtained from environmental sample
  DOMAIN (3)...(172): dTDP-4-dehydrorhamnose 3,5-epimerase
  misc_feature (1)..(173): Xaa is any amino acid
MKVEKCEIDGLLVVEPDVFPDSRGWFYESYNAEKFKALGIDTVFVQDNHSRSVKNTLRGLHYQKNPGQAKLVRCTHGKIWDVAVDIRDGSPTYGKWHAVELSEENKKFLYIPIGFAHGFCVLSDFAEVQYKCSSVYNGAEEAGYAWDCPKIAVKWPIKEPILSKRDLGNPSLP

SEQ ID NO: 44837 - DNA, 1101 bp, Unknown
  Obtained from environmental sample
  misc_feature (1)..(1101): n is a, c, g, or t
atgaatcttgagatgcagcatattcaaaggaaaatgcttttacttacggaagaacaatttgatgtccttgacagtacaaaattaaataaacgagttattatacaaggtgttgcgggaaccggaaaatcaatcttggcacttgaaaaattcagacaatctgtgtcaatgaataagaaaactctttatctttgctataatagaaatatggcaaaatacgccagtttatcattaaaagatactgtttttgaccgctccacagttactacatttcattcgatgatacaaaaatatttaaatctggaaaaactgtatgaaaagagtatgacggaaataaatccattacttgataaaataaaaatagaagatggcgatgtttatgattatattattatagatgaagcccaagatttattgaatatatcggttattgaactgttagataaattggtatatggcggattaaaaagaggcgaatggatttttttcctcgatcccaatcagaatatttttaacaatgacaaagagtataattttgcattggagtatattaatgaaacatatcatcccgcatactatctattaaattataattgcagaaatacaaagcaaatagctaaatctatttcggtaacaactcttgttcctttggcaaagtatcaagaattatcgggacctgttgttaaaagatttacatactcagactcaaaagaattgaaaataatattccgtagagaattactttctctgtttgccggcggaacatcttcggcagacatagttgttttatcaaaatataaatatataaattccggtatttttgatttaaaatcattgaataatttgaatataatagaaaacaacgatattaataaatttaataagaatgcaataaattattttacggtacaatcgtataaagggctggaatccaatattgttatttttattgacataaacgggtttaaaagtgaacaggatagattattaaattatgttgcgatgtccagagcaaaaattatgttatatctgttttatccggtaacagctaagacagaatacaatgatattaccgcagaaggaatggatttgctattattttga

SEQ ID NO: 44838 - protein, 366 aa, Unknown
  Obtained from environmental sample
  DOMAIN (2)...(156): Type III restriction enzyme, res subunit
  misc_feature (1)..(366): Xaa is any amino acid
MNLEMQHIQRKMLLLTEEQFDVLDSTKLNKRVIIQGVAGTGKSILALEKFRQSVSMNKKTLYLCYNRNMAKYASLSLKDTVFDRSTVTTFHSMIQKYLNLEKLYEKSMTEINPLLDKIKIEDGDVYDYIIIDEAQDLLNISVIELLDKLVYGGLKRGEWIFFLDPNQNIFNNDKEYNFALEYINETYHPAYYLLNYNCRNTKQIAKSISVTTLVPLAKYQELSGPVVKRFTYSDSKELKIIFRRELLSLFAGGTSSADIVVLSKYKYINSGIFDLKSLNNLNIIENNDINKFNKNAINYFTVQSYKGLESNIVIFIDINGFKSEQDRLLNYVAMSRAKIMLYLFYPVTAKTEYNDITAEGMDLLLF

SEQ ID NO: 44839 - DNA, 579 bp, Unknown
  Obtained from environmental sample
  misc_feature (1)..(579): n is a, c, g, or t
ttgttttccggggactttgcagccgccaagctcaggatggtttccttttttaccctgctcctggatgatctttacggctgctggtcagtttcatccggcggaattgatagtaaattttccacaatgttgccaaaggcatttatgcctattgatccggcggagatcatggaactgccggacctggacgcctggaaacgctgggcggatcgtaacttcgacaggctggtagttcaggcgaatctggaacgtcagaaaaattatcccctgcctctggttaaggctttaagctttatcagggaaaactataattgcagtattcagcttaccgatgccgctgaagccgctcaggtaaacgccgcgcatttaagccggctttttgtaaaatatcttggaattaattttattgattaccttactaccctgcggatcaatgaggcggaacggcttttaaaggaaaaacccgtaaccgtaaaagaagcggcctttgcgtccgggtataaggatcccaattacttcagcaagacctttaaaaaaataaaagggattcttccaactgaagtaacgaacactaatagttag

SEQ ID NO: 44840 - protein, 192 aa, Unknown
  Obtained from environmental sample
  DOMAIN (145)...(189): Bacterial regulatory helix-turn-helix proteins, AraC family
  misc_feature (1)..(192): Xaa is any amino acid
MFSGDFAAAKLRMVSFFTLLLDDLYGCWSVSSGGIDSKFSTMLPKAFMPIDPAEIMELPDLDAWKRWADRNFDRLVVQANLERQKNYPLPLVKALSFIRENYNCSIQLTDAAEAAQVNAAHLSRLFVKYLGINFIDYLTTLRINEAERLLKEKPVTVKEAAFASGYKDPNYFSKTFKKIKGILPTEVTNTNS

SEQ ID NO: 44841 - DNA, 804 bp, Unknown
  Obtained from environmental sample
  misc_feature (1)..(804): n is a, c, g, or t
atgtttagcgttttaatcgtagacgacgaagaacctgtcctggatagttatgaattcatgctgaacgctttctctgaaggcggcgccatcgaagatggcgagagaaagaaaagcccttttacactggctggcaaggcgcgtaccggttatgaagccctaaggctgatccatgaaacgcagccggatcttgtctttatggacattaacatccccggcatagacggccttgcggtactggaagacgtatataaaaaattcccccgcatggtctgtattctttctaccgcctatgaacgctttgacctggcccgcagggccatacctctgggggccttcgcctatctggtcaagccggtttccaaaaacactttcttttccacacttgaaaatgccctggttaagctccgttccctcctgccagaaaattccgaatacagcgagccgcgtcttgccctgcttcgcagggacatctggacagttatggatgaacagcgctggtcgtggtacagggaaacaatggcccttccgtcagactacggtcttgccctgcttgtagaattgggaaaagatatggaaatttggggagatcgcattgcggagcaaatttcttacaaatttcactgtacctttgatgtaatgctgaaccgaggcctcttcttaatttccgaagaattaagctccgaagttttaaggcaaagaatcgtaacgcttttgggaaactgcttggcaatgttgcctggcacttcgggcttgggcggctgttacgggggccggaactgtaccgttcctgcgacgaagccataa

SEQ ID NO: 44842 - protein, 267 aa, Unknown
  Obtained from environmental sample
  DOMAIN (2)...(129): Response regulator receiver domain
  misc_feature (1)..(267): Xaa is any amino acid
MFSVLIVDDEEPVLDSYEFMLNAFSEGGAIEDGERKKSPFTLAGKARTGYEALRLIHETQPDLVFMDINIPGIDGLAVLEDVYKKFPRMVCILSTAYERFDLARRAIPLGAFAYLVKPVSKNTFFSTLENALVKLRSLLPENSEYSEPRLALLRRDIWTVMDEQRWSWYRETMALPSDYGLALLVELGKDMEIWGDRIAEQISYKFHCTFDVMLNRGLFLISEELSSEVLRQRIVTLLGNCLAMLPGTSGLGGCYGGRNCTVPATKP

SEQ ID NO: 44843 - DNA, 498 bp, Unknown
  Obtained from environmental sample
  misc_feature (1)..(498): n is a, c, g, or t
atgcccttaagcaggcacgaagactattcaattaacactattatcgggccaaacagcagcctgaaaggggatattgtcactcccggtttcacgcgcatcgacggaagcatcacgggggatgtgaacgcctcaggcagggtggtaatcggcgaacgggcgcggatgaagagcaacgtccttgggactgccgtgacaataggcggggttgtgtatggcgatgtgattgccggggaatccctcgttgtcctttccacagcgcttgttttgggtgatataataacacgccggataaaagcggatgagggatgccttattcatggcaggataaaggtttgccccgatgaggaaagctgggccagcgctgtcagcgagtaccgcgacgcccagaaggtaaaatcggctttgcctgttttttcaaaaaaaacgggcagggacgaggtcccatccaaagacgggattcccccggcaaagggcggatcatcaaaagacaaggcttaa

SEQ ID NO: 44844 - protein, 165 aa, Unknown
  Obtained from environmental sample
  DOMAIN (3)...(115): Protein of unknown function, DUF583
  misc_feature (1)..(165): Xaa is any amino acid
MPLSRHEDYSINTIIGPNSSLKGDIVTPGFTRIDGSITGDVNASGRVVIGERARMKSNVLGTAVTIGGVVYGDVIAGESLVVLSTALVLGDIITRRIKADEGCLIHGRIKVCPDEESWASAVSEYRDAQKVKSALPVFSKKTGRDEVPSKDGIPPAKGGSSKDKA

SEQ ID NO: 44845 - DNA, 558 bp, Unknown
  Obtained from environmental sample
  misc_feature (1)..(558): n is a, c, g, or t
ttggctaaagtagacaccgacgtacaatcttttttcatgaaccccgccgcgtatacgcatgtaaaagacgacggcaaaaaaacaaaagtttccagacccctccccggcgccaagaccggtttttcgcggatctttgatgagatccggggcaagacagccggagatataggccccttgcaggaattgcccgtgtccgaagaaactgttaatctgttgatggatgaagtgcgcagtacgggggatgcgttacgcgaaagacctttccctgatgaaattctccgctataaacaggctgtgcgtaatttcatgcattatgttgttgaaaacgcctacagcaaaagcaccgaagcggggattcccagcttccttaaaccgggcttcaaaggcccccggggtacgcttgaatcaaggaagcagatagcttatacaaagatacaggttattgatgaaaagctggaagagcttgcgaagcgacttcttaccagccaaactcagcagatggagattgcctcgcgtcttgaggaaataaagggacttctgatagacttgatgcagtaa

SEQ ID NO: 44846 - protein, 185 aa, Unknown
  Obtained from environmental sample
  DOMAIN (11)...(185): Protein of unknown function (DUF327)
  misc_feature (1)..(185): Xaa is any amino acid
MAKVDTDVQSFFMNPAAYTHVKDDGKKTKVSRPLPGAKTGFSRIFDEIRGKTAGDIGPLQELPVSEETVNLLMDEVRSTGDALRERPFPDEILRYKQAVRNFMHYVVENAYSKSTEAGIPSFLKPGFKGPRGTLESRKQIAYTKIQVIDEKLEELAKRLLTSQTQQMEIASRLEEIKGLLIDLMQ

SEQ ID NO: 44847 - DNA, 939 bp, Unknown
  Obtained from environmental sample
  misc_feature (1)..(939): n is a, c, g, or t
atgagcgattttgatgaagaagatatttccctacttgaggacaggcctgaggaaagggaggcaatttcaagcgtcggcgagatggttaaatctccggggattgaatccattgcccctgacacgcccgttttccggctgcggctctcctattcccatgaaacttttctcgccatttaccgtgacgattccctgtaccccggctcaatggttatagtccccacccgttacggcaaggatcttgcccaggtaatagggcccgtgcgctgcaagcacgacgtttccgatattgtctggattgagcgcatagccgttaaggaagacctggacaaggcggatcacaaccatattcttgaacgggacgcgtttaacatctgcaaagaaaaaattctaaatcaccagcttgaaatgaaacttgtgcatgtccattatttgctggaagagcccaagatactgttttttttcaccgcggaaaaccgcgttgacttccgcgaactggtgaaggatctggtcagcgtttttaagacccgtattgaactgcgccagatcggtgtccgcgacgaagccagggtggtaagcgggctgggcatttgcgggcgcggctactgctgccataccgtttccgacaagctaaaacccgtgtcaataaaaatggcaaaagaccagaacctttcgtttaactcaatgaaaatatccgggccctgcggaaggcttctctgctgtctttcctacgagcacggtttttattgcgagcagatccgccgtatcccgcaggaaggcgcaaagataaaccacgacaatgaaacatggtctgttgccgaagcgaatatgattaccggccagataaaactctcccacagcgacggacgcctgataacgcttccctccgatagatttgaaaaaattgacaaccactggaaaacaaaatcaaataacaaataa

SEQ ID NO: 44848 - protein, 312 aa, Unknown
  Obtained from environmental sample
  DOMAIN (95)...(182): PSP1 C-terminal conserved region
  misc_feature (1)..(312): Xaa is any amino acid
MSDFDEEDISLLEDRPEEREAISSVGEMVKSPGIESIAPDTPVFRLRLSYSHETFLAIYRDDSLYPGSMVIVPTRYGKDLAQVIGPVRCKHDVSDIVWIERIAVKEDLDKADHNHILERDAFNICKEKILNHQLEMKLVHVHYLLEEPKILFFFTAENRVDFRELVKDLVSVFKTRIELRQIGVRDEARVVSGLGICGRGYCCHTVSDKLKPVSIKMAKDQNLSFNSMKISGPCGRLLCCLSYEHGFYCEQIRRIPQEGAKINHDNETWSVAEANMITGQIKLSHSDGRLITLPSDRFEKIDNHWKTKSNNK

SEQ ID NO: 44849 - DNA, 1278 bp, Unknown
  Obtained from environmental sample
  misc_feature (1)..(1278): n is a, c, g, or t
ttgcgtgtcatcagctatgacatcaattcccaaaaatacaggggtgtggatatgcacaacgattttacactgtttagaagggttgttccttcggggaaaattgtcatttattactatgcttatgacaatgaggggaaacgcttgggggcgtggagtaccggggaagctaacaagacggcggctaggaattactgtaataggttatgccgtgaagggaggttattacccagtcctaaagaaatgccgacttttgccgtattttccgctttgttctgggattgggaaaaaagcgaatacctganagaacgccggaaacgccggagtctgacacaatcctatgcggacaaaaacaaaaagacggtcgagaatattttagtaccgtactttgggaaaatgagactggacgaaattacaggaaaagaaattgatacatggctggattacctgatttccaaaaagtacaagaattcgaccgctaacggcttttacggctctttgcagactatgttgaaatgggcggttaaaaaacacattattgagcgcgaccccttcaatgacgtggagaaactgctgcaagagcaaaaagagaaaaaaattattacccatgacgaatttagggcgttgtttggctatgattggaaaagggtttgggataataatttcctgatgtgtacggctcataaactggcggggctgacagggattaggtgctgtgaagttttggggttaaaaggggaatatgtgtttgatgaccatatctatatttgcgcccaatacgatgatgtatacggctatcgggaaactaaaactaaaacgaaacacaatataccgctgaccaaagaagttatagcggacctgaaaaaactgatggagctaaacggaaagggttttgtgttctcggagacaggcggcgatgtgcctataaaccgtaattctgtctataacggcttgatgaaagccttgcaaaacataggcataagcgaaaaggaaatagacgagagggggcttaacgtccatgcttggcggcatttcctgaataccgaattgcaaaaagctggtttgactacccaaatagtacaggcggttacagggcataagacggcgaaaatgaccgaacactatactcattttgacccaatggaatttagagatgtgccggaaatacaggcggcgttgctggcagaaaagccggaaggagagaaaactgaccgccctgccctgtctttggtgaaaatgccgaatgacgaaaaagctgaaaataaaaaacaggcttcatag

SEQ ID NO: 44850 - protein, 425 aa, Unknown
  Obtained from environmental sample
  DOMAIN (210)...(384): Phage integrase family
  misc_feature (1)..(425): Xaa is any amino acid
MRVISYDINSQKYRGVDMHNDFTLFRRVVPSGKIVIYYYAYDNEGKRLGAWSTGEANKTAARNYCNRLCREGRLLPSPKEMPTFAVFSALFWDWEKSEYLXERRKRRSLTQSYADKNKKTVENILVPYFGKMRLDEITGKEIDTWLDYLISKKYKNSTANGFYGSLQTMLKWAVKKHIIERDPFNDVEKLLQEQKEKKIITHDEFRALFGYDWKRVWDNNFLMCTAHKLAGLTGIRCCEVLGLKGEYVFDDHIYICAQYDDVYGYRETKTKTKHNIPLTKEVIADLKKLMELNGKGFVFSETGGDVPINRNSVYNGLMKALQNIGISEKEIDERGLNVHAWRHFLNTELQKAGLTTQIVQAVTGHKTAKMTEHYTHFDPMEFRDVPEIQAALLAEKPEGEKTDRPALSLVKMPNDEKAENKKQAS

SEQ ID NO: 44851 - DNA, 753 bp, Unknown
  Obtained from environmental sample
  misc_feature (1)..(753): n is a, c, g, or t
atgtttgacaatgccaccttaaaccaactgcacgagcttcgcctctctgccatggcccattgtttcgcagagcagcaagcccaaaccgacatccgttcgctttcgtttgaagagcgcttcggcctgttagtcgaaacggaattgctgtaccgaaggaacaaacgcaccgaacggctgataaggcaggcaggtttccgattcccagccgctattgaggatattgattaccataacaaaaaaggcataagtaagccggaagtcctcaaactatccctctgctcgtatatcaagaaagcccagaatgtctttttctcaggccctaccggtattggtaaaacctatcttgtctgcgccctgggccgtgccgcctgcgcccaagggtttcaggtcgtctatatgaggctaagcgatttcttccgcttcgcttccgccacccatgcccatggccaggctcacttcagcgacaagtgcgcaaaagtcccccttctcatatttgatgattggggccttaaaaagttttccctggaagaaaccgcggaactctctgacattttcgaacggcgttatggccgggcctccacaataatatcaagccaggttccatcctctgcctggcatgacttgtttccagacccgacgcaggctgatgcaatcctcgaccggctagtccataacgcctatgcctataatatctcaggcgagtctatgcggaaaaccatcggaaaccgcagcctcgaaagcccggattcttag

SEQ ID NO: 44852 - protein, 250 aa, Unknown
  Obtained from environmental sample
  DOMAIN (23)...(52): IstB-like ATP binding N-terminal
  misc_feature (1)..(250): Xaa is any amino acid
MFDNATLNQLHELRLSAMAHCFAEQQAQTDIRSLSFEERFGLLVETELLYRRNKRTERLIRQAGFRFPAAIEDIDYHNKKGISKPEVLKLSLCSYIKKAQNVFFSGPTGIGKTYLVCALGRAACAQGFQVVYMRLSDFFRFASATHAHGQAHFSDKCAKVPLLIFDDWGLKKFSLEETAELSDIFERRYGRASTIISSQVPSSAWHDLFPDPTQADAILDRLVHNAYAYNISGESMRKTIGNRSLESPDS

SEQ ID NO: 44853 - DNA, 543 bp, Unknown
  Obtained from environmental sample
  misc_feature (1)..(543): n is a, c, g, or t
ttgaaaatgccaattttctatgagcaaggagaaataatgaataaactaattgaaagccgccagagcatcagaaaattcaaagccgataaacccgttacaaaggaacagcttaaaaagctgttggaagcagcaatgttcgcgccttcgacctgtaatacacgcccgtgggaatttatcgcgatcacaaaacgggaaacccttaacgcgattgccaatgtccatccttacgctaaaatgtgtgaaaccgctactgcggcaattatcgtggtggcgattccccaaaccggcactatgcctgaaggctatttttcacaagactgcgcggcggcaacacagaacattctcctggaagccgtctctatggggcttggtacttgctggtgcggtgtttatccaagggaagaacgcataaactcaattcgtaacctttttaacatccctgaaccgaaaatcccctttaatgtcattgcaataggaattccggatgagtcccctgccaaaagaggctttttcgaggaagccaaagtaacgtatattgattaa

SEQ ID NO: 44854 - protein, 180 aa, Unknown
  Obtained from environmental sample
  DOMAIN (17)...(160): Nitroreductase family
  misc_feature (1)..(180): Xaa is any amino acid
MKMPIFYEQGEIMNKLIESRQSIRKFKADKPVTKEQLKKLLEAAMFAPSTCNTRPWEFIAITKRETLNAIANVHPYAKMCETATAAIIVVAIPQTGTMPEGYFSQDCAAATQNILLEAVSMGLGTCWCGVYPREERINSIRNLFNIPEPKIPFNVIAIGIPDESPAKRGFFEEAKVTYID

SEQ ID NO: 44855 - DNA, 1260 bp, Unknown
  Obtained from environmental sample
  misc_feature (1)..(1260): n is a, c, g, or t
atgatccgcaaactgctgagggataaccctgaatcctgcgtgattgttaccggttgttacgcgcaacttgatgcggaagaaatcaaaggctgcgacggaggcgccggaacctgccgccgagtgagcggaagcgaacgaaggttcccctccggtaggcggctctttgtgcttgggggagggcagggggaggcggcctcggccgccgcggcggccggagcaaaaagtgccctgcttggtttgccgcagtatctgttagacgctgcttccggagaaccgctgccgcatttattggaatcatggatgcgaaacagcgaatcggccgtaaaagacgattctgtttttaattttaaacctgacgaattcagtttccattcacgggggtttttgaaaatacaggacggatgtaataataactgcgcctattgccgtgtccgactcgcgcgcggccggagcgtcagcctcaatcacggggcggttctggagcggcttcgcgtttttgaagcgaaaggctgtcctgaagttttcattaccggggtgaacatcacccaatactgcgacaacaatgccggtattgatttggcggggctcttggaactgctccttgatggcactagtaatatctgtctgcgcctttcctcccttgagcctgaacatattgatgcccgcctcgcttcggcgttcgcccgtccgaggatacacccgcattttcatctttccgtgcagtcaggcagcgacgcgatcctgaaaagcatgcggcgcgcgtataacatgcaaaccgttgaaaaggcaatggctttgctgcgctcggcaaaggacaatccctttctcgcctgcgacataatcaccggtttccccggcgagggcgaagatgaattcgccgcgacgctcggcttttgcgagaggacgcgtttcgcgtggatacacgccttcccttattcgcggcgtcccggtacggcggccttttcctttggagaccctgtccgcgatattgacaaaacgcggagggtggaaaccctgaccgcgctcgccctgcgtggcaaacgcagctacgccaaagcatggcttgggaaggaactctccgccgttgttgaaaaagcgccttgctccgctgggcggcaatgcagggccgtttccgagaactacctgaagctccttgttaactgtaacggagaggcgcccccacccggctcgtccatacgctgtacgccggtctctgtttgcgaagaagaaaacattgatgccatagccaatgagcaatga

SEQ ID NO: 44856 - protein, 419 aa, Unknown
  Obtained from environmental sample
  DOMAIN (129)...(299): Radical SAM superfamily
  misc_feature (1)..(419): Xaa is any amino acid
MIRKLLRDNPESCVIVTGCYAQLDAEEIKGCDGGAGTCRRVSGSERRFPSGRRLFVLGGGQGEAASAAAAAGAKSALLGLPQYLLDAASGEPLPHLLESWMRNSESAVKDDSVFNFKPDEFSFHSRGFLKIQDGCNNNCAYCRVRLARGRSVSLNHGAVLERLRVFEAKGCPEVFITGVNITQYCDNNAGIDLAGLLELLLDGTSNICLRLSSLEPEHIDARLASAFARPRIHPHFHLSVQSGSDAILKSMRRAYNMQTVEKAMALLRSAKDNPFLACDIITGFPGEGEDEFAATLGFCERTRFAWIHAFPYSRRPGTAAFSFGDPVRDIDKTRRVETLTALALRGKRSYAKAWLGKELSAVVEKAPCSAGRQCRAVSENYLKLLVNCNGEAPPPGSSIRCTPVSVCEEENIDAIANEQ

SEQ ID NO: 44857 - DNA, 1281 bp, Unknown
  Obtained from environmental sample
  misc_feature (1)..(1281): n is a, c, g, or t
ttgcaatatatgaaaaaccgcaaatttgagacgcttcaacttcacgctgggcaagaaaaaccagaccccaccacagacgcaagggctgtgcccatttacgcaacaacctcttatgtattcaaggattgcgcgcaagctgccggaaggtttgccttgacggaggctggcaacatttacactcgcttgatgaacccaacatctgatgtgtttgagcagcgtatggcggctcttgaagggggcgtaggtgctttggcaacctcttcagggatggcagcggtgacttatgctgtacaaaatatcgcaacagctgggcacaatatagtatcggataaacgcatttatggcggaacatataacctttttgccaacaccctgcccgatttgggcataaccacaacattcgtggatggcagcgaccctaagaattttgaaaaagccattaacgaaaaaacaagggcattgtttgtggaatcgcttggaaacccaaattccaccattgttgatattgatgcgcttgcggctatcgcacacaagaacggcattccgcttattgtggacaatacattttcgccacccaatttgttccgcccttttgagcacggtgcagatgtggttgtgcattccgccaccaaattcataggcggtcacgaaacggtantaggaggcgtgatagtggactcgggaaaattcaattgggcggcaaacgataaattcccgggtttgtctaagccaaatcccagctatcacggcgtagttttcaccgaggctgttgggaatctcgcgtatataataaaaattcgggtcacattgatgagagatacaggagcgaccataagccctttccactccttccttttccttcaaggattggaaaccttgtctttgcgtgtggaacgccacgtggagaatgcgctcaaagtggtggaatatctgcgcaagcatccgaaggtggaatcccttaaccacccctctttgccggaacatccggataatgctttgtataaaaagtattttccaaaaggtgcaggttcaattttcacttttgaaatcaagggcggtgcggagcaggcaaaaaagttcattgacaagctggagttgttctcccttcttgcaaatgtggcagattccaaatctctggttatacatccggcaagcacaacacattcccagctcactggggatgaacttttggaacaaggcataaagccaaataccattaggctttccattggcactgagcatattgacgatattatcgctgatttggagcaggcgttttaa

SEQ ID NO: 44858 - protein, 426 aa, Unknown
  Obtained from environmental sample
  DOMAIN (42)...(423): DegT/DnrJ/EryC1/StrS aminotransferase family
  misc_feature (1)..(426): Xaa is any amino acid
MQYMKNRKFETLQLHAGQEKPDPTTDARAVPIYATTSYVFKDCAQAAGRFALTEAGNIYTRLMNPTSDVFEQRMAALEGGVGALATSSGMAAVTYAVQNIATAGHNIVSDKRIYGGTYNLFANTLPDLGITTTFVDGSDPKNFEKAINEKTRALFVESLGNPNSTIVDIDALAAIAHKNGIPLIVDNTFSPPNLFRPFEHGADVVVHSATKFIGGHETVXGGVIVDSGKFNWAANDKFPGLSKPNPSYHGVVFTEAVGNLAYIIKIRVTLMRDTGATISPFHSFLFLQGLETLSLRVERHVENALKVVEYLRKHPKVESLNHPSLPEHPDNALYKKYFPKGAGSIFTFEIKGGAEQAKKFIDKLELFSLLANVADSKSLVIHPASTTHSQLTGDELLEQGIKPNTIRLSIGTEHIDDIIADLEQAF

SEQ ID NO: 44859 - DNA, 837 bp, Unknown
  Obtained from environmental sample
  misc_feature (1)..(837): n is a, c, g, or t
atgtccaataatggaatgcgaattttatacaatgcgataaacaaagaaacggatttgttttgcgaagtcgctttcgcgccttggagagatatggcaaaacttatgcgggaacataacattcctctttatacgcacgcctcttttagcgaagttaaaagttttgatgctttggggataacagtacaaaccgaactcaatttcacaaacattccatacattttggaactcgcaaacatcacggcttttgccgcaaacagagatgaaaatgaacccattgttatagcgggcggaccagcaatggcaaaccctatgccaatagcggatttctttgactgcctctgcataggagatggcgaaattttggcgcccaaagctctgcgcataattggcgaagcaaaaaaggctggcaaaaataaatcggaaattttggaacaaatagcgaaaatggaaggcttttacgtgccggcaattcacaaagagataaaatccgttaaaagaacataccttgaaaaactcgcaaaagaccttttcccaacaaaaaatttaatagcaaatatgccgcttgtgcacgaccgcttttgcgtagaagttatgcgaggttgcacccaaggttgccgtttttgccaagccggatattggtacaggccaactagggaattggatgcggacgatgttctggacatagccaaagaagggctaaaagccaccggcgaccgccagcttgggcttttatcgctttccaccgcagactactcccctgtggaaaaatgcttgactcctttatttgagacccatttttcaaaacatagacgtatctntgccctcgnnctagagtag

SEQ ID NO: 44860 - protein, 278 aa, Unknown
  Obtained from environmental sample
  misc_feature (1)..(278): Xaa is any amino acid
MSNNGMRILYNAINKETDLFCEVAFAPWRDMAKLMREHNIPLYTHASFSEVKSFDALGITVQTELNFTNIPYILELANITAFAANRDENEPIVIAGGPAMANPMPIADFFDCLCIGDGEILAPKALRIIGEAKKAGKNKSEILEQIAKMEGFYVPAIHKEIKSVKRTYLEKLAKDLFPTKNLIANMPLVHDRFCVEVMRGCTQGCRFCQAGYWYRPTRELDADDVLDIAKEGLKATGDRQLGLLSLSTADYSPVEKCLTPLFETHFSKHRRIXALXLE

SEQ ID NO: 44861 - DNA, 459 bp, Unknown
  Obtained from environmental sample
  misc_feature (1)..(459): n is a, c, g, or t
gtggtttggtatttggcggcgaccggggcgcgggtcagcgagttggtacagattaaggttgagcacgttcaggcgggttatttcgacctgtatacgaaaggcggtaagcttcggagattgtacattcctaaaaaattgagaacagaaactcttaggtggctgaacttaacaaataaaacgtttggttatctttttctaaaccgtttcggtgaacgtataacaactcgcgggatttcccaacaattgaagaactatgcagaaaaatacgggttgaatacaaaggtagtgtacccacattccttccggcaccgttttgccaagaacttccttgaaaagtacaacgacatcgctttgcttgctgacctaatgggtcacgagagtattgaaacaacacggatctatttacgaaggaccgcgagtgaacaacaggcacttgttgacaaaatcgtgacgtggtaa

SEQ ID NO: 44862 - protein, 152 aa, Unknown
  Obtained from environmental sample
  DOMAIN (1)...(144): Phage integrase family
  misc_feature (1)..(152): Xaa is any amino acid
MVWYLAATGARVSELVQIKVEHVQAGYFDLYTKGGKLRRLYIPKKLRTETLRWLNLTNKTFGYLFLNRFGERITTRGISQQLKNYAEKYGLNTKVVYPHSFRHRFAKNFLEKYNDIALLADLMGHESIETTRIYLRRTASEQQALVDKIVTW

SEQ ID NO: 44863 - DNA, 306 bp, Unknown
  Obtained from environmental sample
  misc_feature (1)..(306): n is a, c, g, or t
ttgctctgtgtccgtgctcctgttggtattgtaaatattacagatcacgaggtagccatcggacgtggtttgtgtgctgttagtccatttggtgaaatatctgttgaatttatttttcattggttgacagcatttcaatatagttttgtagaacaagcaacaggaactacatttatggcgattacaaccgatgtagttcaacaacaaattgtacccatcccaccacttgccgaacaacatcgaatcaccgttgccattgaatctgcatttaagcagttagacaatatagttacaaatcttttataa

SEQ ID NO: 44864 - protein, 101 aa, Unknown
  Obtained from environmental sample
  misc_feature (1)..(101): Xaa is any amino acid
MLCVRAPVGIVNITDHEVAIGRGLCAVSPFGEISVEFIFHWLTAFQYSFVEQATGTTFMAITTDVVQQQIVPIPPLAEQHRITVAIESAFKQLDNIVTNLL

SEQ ID NO: 44865 - DNA, 675 bp, Unknown
  Obtained from environmental sample
  misc_feature (1)..(675): n is a, c, g, or t
atgataaatgtatcaaaaggctggaatcaaaaacaaaaggatataaatgtccttttaccaaaccaaaaaacatttgaagaaggagtcggtttattgctggaaatgcatggtttattgcacgataaaagagtgtgcaagggtacttacgtaacattttatgatgatctatgggaaaatttgaaaggagaaacctgtaaaataatatccaataaagaaacatccatattgtggaatatttggcatattaccagaatagaggacattatctcaaatataataattaggaaaaaagaaacaatattcaataaagaaattcaaacaaagttgaatataggaattaaagataccggaaacgcaatgacatattctgaaatagaatcatttaataaaagtgtaaacataaaggaattaaaggactatagggttaaagtgggaaaatcgacacaaaaaataattaaggctattgaatttagtgacgtaaaaagaaaagtggaaaaggaacagcttgaaagaataaaacaaaatgggggcgtaacagacgatcaaaaatcaatatggttattggatttttggggaaggaaaaatatgcttggattaataaatatgcccataacaaggcatcaaatagttcacttaaatgactgttttaaaataaaacagaagtacaataaataa

SEQ ID NO: 44866 - protein, 224 aa, Unknown
  Obtained from environmental sample
  misc_feature (1)..(224): Xaa is any amino acid
MINVSKGWNQKQKDINVLLPNQKTFEEGVGLLLEMHGLLHDKRVCKGTYVTFYDDLWENLKGETCKIISNKETSILWNIWHITRIEDIISNIIIRKKETIFNKEIQTKLNIGIKDTGNAMTYSEIESFNKSVNIKELKDYRVKVGKSTQKIIKAIEFSDVKRKVEKEQLERIKQNGGVTDDQKSIWLLDFWGRKNMLGLINMPITRHQIVHLNDCFKIKQKYNK

SEQ ID NO: 44867 - DNA, 474 bp, Unknown
  Obtained from environmental sample
  misc_feature (1)..(474): n is a, c, g, or t
gtgagcagctatgccgatttcatgatagctcctgtaagcgtgggttcttcctccgatacggatgccgtggttcctatggatacggcagttcgtgttgtaaacaactcaaagcccggcgcgaagatgacaaagataactatcatcaccaatcaggataaactcgcactccttcactccgctcttgacaagatcggcataacaggccttacggttacaaacgtcctcggccacgggatgcaaaaaggccatacggagttataccgcggcgcacaggtagaaatacggctgcttcccaaagtgcagattgacattgtcgtaagcaagataccgcctgaaactgtaatagaaacggtgaaaaagatactgtacacaggcaaagtcggcgacggaaagatattcctttctgacattgaaaacgtcatcaaagtccgcacaggagaacaaggatacgacgctttacaggacaatgaatag

SEQ ID NO: 44868 - protein, 157 aa, Unknown
  Obtained from environmental sample
  DOMAIN (45)...(146): Nitrogen regulatory protein P-II
  misc_feature (1)..(157): Xaa is any amino acid
MSSYADFMIAPVSVGSSSDTDAVVPMDTAVRVVNNSKPGAKMTKITIITNQDKLALLHSALDKIGITGLTVTNVLGHGMQKGHTELYRGAQVEIRLLPKVQIDIVVSKIPPETVIETVKKILYTGKVGDGKIFLSDIENVIKVRTGEQGYDALQDNE

SEQ ID NO: 44869 - DNA, 675 bp, Unknown
  Obtained from environmental sample
  misc_feature (1)..(675): n is a, c, g, or t
ttgatcagatcggccgagttacataagctccgaagaattgtctgcatgaaggtacgctttgacgggcttataatcacgggcgctcccgtggaaacactacccttcgaagaagttgattactgggatgaacttgtaaagataattgaatattcacaggaaaatgttttttcctgcctgcatatctgctggggcgcccaggccggtctttattgcaaatacgacattccaaaacatccgctggaaaaaaaattattcggtgtttttccacataccgtcaacgaccagcacaatttgttattccgcgggttcgacgacgaatttcttgcaccccagtcaaggcacaccgcaagcgaccgtggtaaaatagcggctgaccggcggctgacaattcaatccgaaacccccgaagcgggcgtattcattgtaaccgctcgcggaggcagggaaatttttgtcacagggcacttggaatacgatccgttgacgcttgacaaagaatataaacgcgacgtatcaaagggactgccgattgaaaaacctaaaaattattatcctgatgatgatccgtcaaggacgcccattgtccgctggcgtgcccacgccaatctattttttgataattggctgaattatgtgtatcaggaaacgccttataatttggatgaactaaagtag

SEQ ID NO: 44870 - protein, 224 aa, Unknown
  Obtained from environmental sample
  DOMAIN (1)...(218): Homoserine O-succinyltransferase
  misc_feature (1)..(224): Xaa is any amino acid
MIRSAELHKLRRIVCMKVRFDGLIITGAPVETLPFEEVDYWDELVKIIEYSQENVFSCLHICWGAQAGLYCKYDIPKHPLEKKLFGVFPHTVNDQHNLLFRGFDDEFLAPQSRHTASDRGKIAADRRLTIQSETPEAGVFIVTARGGREIFVTGHLEYDPLTLDKEYKRDVSKGLPIEKPKNYYPDDDPSRTPIVRWRAHANLFFDNWLNYVYQETPYNLDELK

SEQ ID NO: 44871 - DNA, 435 bp, Unknown
  Obtained from environmental sample
  misc_feature (1)..(435): n is a, c, g, or t
ttgaaagaggtcggcaagtcaaaaaagcctgttcttcttaaacgaggacttgcaaacacgattgaagaacttttaatgagcgccgaatacatcgtctcggcgggaaacaatcaagttattctatgcgagcgtggcatccgcacttttgaaaccatgacacgtaatacgcttgatatttccgccgtcgttcttttgaagcaaaagacccatcttcccgttattgtagacccaagccacgccgccggcgcaaggagccttgttccaccgctttcaaaagcggccttatctgcaggcgctgacggattaatgatagaagcgcataacaacccggcgaaggcgttatgcgatggagcgcaatcccttgatctggagcagtttaactcgcttatggaagagttaaaaaaacgcgccgtattggaaaataaaattatttaa

SEQ ID NO: 44872 - protein, 144 aa, Unknown
  Obtained from environmental sample
  DOMAIN (1)...(139): DAHP synthetase I family
  misc_feature (1)..(144): Xaa is any amino acid
MKEVGKSKKPVLLKRGLANTIEELLMSAEYIVSAGNNQVILCERGIRTFETMTRNTLDISAVVLLKQKTHLPVIVDPSHAAGARSLVPPLSKAALSAGADGLMIEAHNNPAKALCDGAQSLDLEQFNSLMEELKKRAVLENKII

SEQ ID NO: 44873 - DNA, 1473 bp, Unknown
  Obtained from environmental sample
  misc_feature (1)..(1473): n is a, c, g, or t
atgataaaaccaccactggaagaaataaaacaaatagccgcaacggggcaatacaacataataccgatgagcatggaattgtattccgatatgtttacgccgattgatatttttaaaaagctaaaaagtgtcagcggtcattgctttattcttgaaagcgcggaggacacaaaaacatggggcagatacacttttctgggatttgatccaacaatggaaatcacttgtcttaacggtttgatgaatattaattcagatgaaacaaaaacttttaaaacggataatccaaacaagcaaattcaggaaattttaagcctttacaacagcgtaaaatttgattatctgcctccttttacaggggggcttgtcggctactttgcctacgattacgctaaatattgtgagccatcgctgaagcttgacgcttatgacgaagagcgttttaacgatgtcgatttaatgctttttgacaaggtgatttgttttgatcattacaaacaaaaagtaattttaatcgtaaatataaaaaccgataatccagaagccgaatatgaaaaaggaaaatcaaagctggaatatataaataatctaatcagaacgggagcccatgaaaatactccaaccgcttgtttaaagtctgattttaaagcgttgttttccaaagatgaatactgcaaaatggtgaacaaggcgaaggatcacataaaagaaggcgatatttttcaagttgtgttatccaatcgatatgaggctgattttgagggcagtatttttaacacgtaccgagtactgcgtacaattaacccttcgccgtatatgttttatttcagcggaagtaatcttgagatcgccggagcatcaccggaaactcttgtaaaattgcataacggcaggctgtttacattcccacttgcgggaacacggcgcagaggcgcagatgaagaagaagacatcgctcttgaaaaagaacttcttgcggacgaaaaagaactcgcggaacacaatatgctggtagacctgggcagaaatgatttaggcagaatcagtaacttcggatcgnttgtcgtagaaaagcacatgtctatcctgcgcttttcccatgttatgcacataggctcgaccgtaagcggggaaatcaacgaaggaaaaaccggcttggacgcgataaacgccattcttcccgccggcactctttccggagcgccgaagatacgcgctatgcagataataaatgaattggagcggaacaagcgcggcatttacggcggcgcggtaggttatcttgactttaccggaaatatggacacctgtatcgcgattagaattgtgtacaagaaaaaaggcaaagtgttcatccgatgcggtgcgggaattgtcgcggacagcaatcccgaatccgaatatcaggaatgtgtaaacaaatcgaaagcggcgcaaaacgcgcttatgcagtcgtcgggagggatagattga

SEQ ID NO: 44874 - protein, 490 aa, Unknown
  Obtained from environmental sample
  DOMAIN (23)...(171): Anthranilate synthase component I, N terminal region
  misc_feature (1)..(490): Xaa is any amino acid
MIKPPLEEIKQIAATGQYNIIPMSMELYSDMFTPIDIFKKLKSVSGHCFILESAEDTKTWGRYTFLGFDPTMEITCLNGLMNINSDETKTFKTDNPNKQIQEILSLYNSVKFDYLPPFTGGLVGYFAYDYAKYCEPSLKLDAYDEERFNDVDLMLFDKVICFDHYKQKVILIVNIKTDNPEAEYEKGKSKLEYINNLIRTGAHENTPTACLKSDFKALFSKDEYCKMVNKAKDHIKEGDIFQVVLSNRYEADFEGSIFNTYRVLRTINPSPYMFYFSGSNLEIAGASPETLVKLHNGRLFTFPLAGTRRRGADEEEDIALEKELLADEKELAEHNMLVDLGRNDLGRISNFGSXVVEKHMSILRFSHVMHIGSTVSGEINEGKTGLDAINAILPAGTLSGAPKIRAMQIINELERNKRGIYGGAVGYLDFTGNMDTCIAIRIVYKKKGKVFIRCGAGIVADSNPESEYQECVNKSKAAQNALMQSSGGID

SEQ ID NO: 44875 - DNA, 438 bp, Unknown
  Obtained from environmental sample
  misc_feature (1)..(438): n is a, c, g, or t
atgccgcgcttgttccgctccaattcatttattatctgcatagcgcgtatcttcggcgctccggaaagagtgccggcgggaagaatggcgtttatcgcgtccaagccggtttttccttcgttgatttccccgcttacggtcgagcctatgtgcataacatgggaaaagcgcaggatagacatgtgcttttctacgacaancgatccgaagttactgattctgcctaaatcatttctgcccaggtctaccagcatattgtgttccgcgagttctttttcgtccgcaagaagttctttttcaagagcgatgtcttcttcttcatctgcgcctctgcgccgtgttcccgcaagtgggaatgtaaacagcctgccgttatgcaattttacaagagtttccggtgatgctccggcgatctcaagattacttccgctgaaataa

SEQ ID NO: 44876 - protein, 145 aa, Unknown
  Obtained from environmental sample
  misc_feature (1)..(145): Xaa is any amino acid
MPRLFRSNSFIICIARIFGAPERVPAGRMAFIASKPVFPSLISPLTVEPMCITWEKRRIDMCFSTTXDPKLLILPKSFLPRSTSILCSASSFSSARSSFSRAMSSSSSAPLRRVPASGNVNSLPLCNFTRVSGDAPAISRLLPLK

SEQ ID NO: 44877 - DNA, 459 bp, Unknown
  Obtained from environmental sample
  misc_feature (1)..(459): n is a, c, g, or t
atgggtgcgcggccgcaggtcgaactgttttgcgacggcgcctgcctggggaaccccgggccagggggctgggccttcctgctcaggttccgggcggcggacggcgtgcgcgaaaaagagggcagcggcgcggaggcggcgaccaccaacaacaggatggagctgaggggggccatcgagggcctgagggccctcaaaaagccgtgcgacgtcaagattcactgtgacagccagtacgtggtgaagggcgtcggggcgtggctggcggactggaagtccaggggatggcgcaaggcggacggcaagccgccgcttaacgacgacctgtggcgcgagctggacgcgctgctggaagcccacagggtcgaggccgcctgggtcaggggccacgccggccacgccgagaacgagcgggttgacgcgatggccagggcgatggcgatgaaagtcaacggttaa

SEQ ID NO: 44878 - protein, 152 aa, Unknown
  Obtained from environmental sample
  DOMAIN (4)...(148): RNase H
  misc_feature (1)..(152): Xaa is any amino acid
MGARPQVELFCDGACLGNPGPGGWAFLLRFRAADGVREKEGSGAEAATTNNRMELRGAIEGLRALKKPCDVKIHCDSQYVVKGVGAWLADWKSRGWRKADGKPPLNDDLWRELDALLEAHRVEAAWVRGHAGHAENERVDAMARAMAMKVNG

SEQ ID NO: 44879 - DNA, 600 bp, Unknown
  Obtained from environmental sample
  misc_feature (1)..(600): n is a, c, g, or t
atgacgctggcgaccttggtgatcatcgccctgtctttgttgtcgcttctgaaattcgccgactccatcctcgaccggttgctgagggacaaactgacgggggcatttgcaaagaggcacttcgacggtctgctcgacgatgggatcaagcgctcagtcaagcaccgcagcgggctggcactggtcatgctggacctcgaccacttcaaggcggtgaacgacacatacggccatgtcttcggcgacaaggtgctggtctccgtctccaaggccatcaagggctcgatacggcccgaggactgcttcgtccgctacggcggcgaggagttcgccatcataatggccgacgtggaccaggacaacgtgctggaggcggccgagcgcgtgcgcagggccgtcgagaacgcgcctgttttcaacgaagagtgcaacacccaggtcacgacgaccataagcataggcgtggccagcttcaccgacctgtccctgggcgccaaggagcttgtggagagcgccgacaaggccctatacgacgcgaaggagacaaggaacagtgtggccatgttcgactgggaccgccgccaagagggcgccgggtag

SEQ ID NO: 44880 - protein, 199 aa, Unknown
  Obtained from environmental sample
  SIGNAL (1)...(20)
  DOMAIN (23)...(185): GGDEF domain
  misc_feature (1)..(199): Xaa is any amino acid
MTLATLVIIALSLLSLLKFADSILDRLLRDKLTGAFAKRHFDGLLDDGIKRSVKHRSGLALVMLDLDHFKAVNDTYGHVFGDKVLVSVSKAIKGSIRPEDCFVRYGGEEFAIIMADVDQDNVLEAAERVRRAVENAPVFNEECNTQVTTTISIGVASFTDLSLGAKELVESADKALYDAKETRNSVAMFDWDRRQEGAG

SEQ ID NO: 44881 - DNA, 1002 bp, Unknown
  Obtained from environmental sample
  misc_feature (1)..(1002): n is a, c, g, or t
ttgacgatttttgaaaataattgggaggaactcccattgcacgcttggggtggctgtatgcagcaatacaggtactcgcagcatattcttcttatgaaatatttagctgcttcttacggcaaagcatctgtaaaaaacacaataaaaaacgattttgcaactgccttcgcaaaacccattggtggttgcaatcattttggcaacggataccaaagcgatggctaccgttcttatatatacgattatcagtggggttcaaacaaaatcaaagcagaccaaggtttaacctattacaaatggaacatagttgatccaagcaaggattacaaggatgttgcagaagactatttgcattatatccacggggtaaatccatttaatatggtttacttaaccaatatgaataacaacggagcttcaagaagtttaacatccatatatcacacttggttttcggaagagagcgcaaaatggggcgttactgcgggtaccaatcccggtcccgcaccgggctatatgcctggcggccctaacaaaagctatgcgctggatggatgctgcccgtcttcttgcggtagcaccgctaacaacagcaggtgcaatttggtagaggttccaaaaaaccagccttctgcaaaaatgtataaggacatgaatcacaattggcctataaattcttgggaaataacggagcctagcaacggctatcagatatcttacataagtttgctttccaagtttgtggaaaagggcggtactgtgcccataaaaaaacagcctacaatccaaaattttaaaatcacacagagcaaaaattccctgcaagtttttggcgacaaggctctgcaagtgtccatatacagtgcgaacggaaagttgctgataaaagaacatagcagcaacggtaatctcaacataaatttgcagaacatcccaaacggagtttacatagtgcaaattttgagcggttcggttagagagacacgtgttatggcgaggtga

SEQ ID NO: 44882 - protein, 333 aa, Unknown
  Obtained from environmental sample
  misc_feature (1)..(333): Xaa is any amino acid
MTIFENNWEELPLHAWGGCMQQYRYSQHILLMKYLAASYGKASVKNTIKNDFATAFAKPIGGCNHFGNGYQSDGYRSYIYDYQWGSNKIKADQGLTYYKWNIVDPSKDYKDVAEDYLHYIHGVNPFNMVYLTNMNNNGASRSLTSIYHTWFSEESAKWGVTAGTNPGPAPGYMPGGPNKSYALDGCCPSSCGSTANNSRCNLVEVPKNQPSAKMYKDMNHNWPINSWEITEPSNGYQISYISLLSKFVEKGGTVPIKKQPTIQNFKITQSKNSLQVFGDKALQVSIYSANGKLLIKEHSSNGNLNINLQNIPNGVYIVQILSGSVRETRVMAR

SEQ ID NO: 44883 - DNA, 765 bp, Unknown
  Obtained from environmental sample
  misc_feature (1)..(765): n is a, c, g, or t
ttggaaaacgagacggtttggcttacgcaaaaggcaatggcggaactttttaatgtcggtgttcctgctataaacaagcatttgaaaaatatttttatagagggcgaacttaatgaagaagtggttatttccaaaatggaaataaccactcagcacggtgctattgccgaaaaaacgcagaataaggaaacaaatttttacaaccttgatgctattatttccgttggatatagggtaaattcaaaaaacgcaacgctttttagaatttgggctacaaatgtattaaaaaattatctgttaaagggttatgccgttcatcagcaaattgaaggtattaaaaaattgtctgccaatcacgaaacccgcttaattgaagtggaaaagaaagttgatttttttgttaaatcgtctttaccaccattagaaggtatcttttatgaagggcagatttttgatgcttataattttgcttgcgatttgataaaatccgctaagaaatccattgttctaattgacaattacattgacgaaagcgttttgttgttgctctcaaaacggagtgccaaagtatcggcaaaaatttacacggcacaaatttcacggcaattgcaattagacatccaaaaacacgcgtcccaatatccgccaattaccgtggataaattttcaaaatcacacgatagatttctgctaattgatgattgtacctatcacataggggcgtctctgaaagatttggggaaaaagntggtttgccttctctaa

SEQ ID NO: 44884 - protein, 254 aa, Unknown
  Obtained from environmental sample
  misc_feature (1)..(254): Xaa is any amino acid
MENETVWLTQKAMAELFNVGVPAINKHLKNIFIEGELNEEVVISKMEITTQHGAIAEKTQNKETNFYNLDAIISVGYRVNSKNATLFRIWATNVLKNYLLKGYAVHQQIEGIKKLSANHETRLIEVEKKVDFFVKSSLPPLEGIFYEGQIFDAYNFACDLIKSAKKSIVLIDNYIDESVLLLLSKRSAKVSAKIYTAQISRQLQLDIQKHASQYPPITVDKFSKSHDRFLLIDDCTYHIGASLKDLGKKXVCLL

SEQ ID NO: 44885 - DNA, 321 bp, Unknown
  Obtained from environmental sample
  misc_feature (1)..(321): n is a, c, g, or t
ttgccaagcaaagaagaatggcaggaacttgcgaatttcgtaggcggcaatgaaattgctggaaagaaactcaaagctactaacggatggaacagttgctatgggcaatcgggcaatggtactgatgagtacggctttgctgccctgccaggtggtgctggctctaatttaactatcggcaacaatggtatgtggtggagtgcttcagaacacaacggcatccgtgcctacagccaaaatataggtcacggcggagatctcgccatcttggatcattacactaagtttaatttgtttagtgtgcgttgcgttcaggactag

SEQ ID NO: 44886 - protein, 106 aa, Unknown
  Obtained from environmental sample
  misc_feature (1)..(106): Xaa is any amino acid
MPSKEEWQELANFVGGNEIAGKKLKATNGWNSCYGQSGNGTDEYGFAALPGGAGSNLTIGNNGMWWSASEHNGIRAYSQNIGHGGDLAILDHYTKFNLFSVRCVQD

SEQ ID NO: 44887 - DNA, 954 bp, Unknown
  Obtained from environmental sample
  misc_feature (1)..(954): n is a, c, g, or t
atggcaaaatcaccgttaacgcccggagctgtcgtaggcggcagttccaagaagaaaaacgtaaaagaatactcaggtcggcaaaaagcggctatatttctcgtaacgataggctctgaaatttccgcggaaatatttaaatttctgcgtgaagatgaaattgaaactctcacctttgaaatcgcgcgtcttgaaacaatagactcggaacagaaagacgcgatacttcaagaattccaagagttgatgatggcgaaccaattcatctcaacaggcggtatcgactacgccagagagcttttggaaaaatcactcggaagccaaaaggcgattgacattatcaaccgcttaacatcaagcttgcaggtacgtcctttcgactttatccgcagaacggatcccgcgcaccttttgaactttattcaacaggaacatccgcagacaatcgcccttattttggcgtatttggagccgaacaaagcttccatcattctgcaaaacctgccgcatgaggtacagagcgacgtggcgcggcgtatcgcgacaatggacagaacaagccccgaagtattgcgcgaagttgaacgcgtccttgaaaagaaactttcatcgctgtccagcgaagactacaccgcggcgggcggcgttgagagcatcgtagaaatacttaaacttgttgaccgcgcctcggaaaaacagattatcgaagcgttggaagacgaagacccggaacttgccgaagagatcaagaagaggatgttcgtattcgaagactcgttatgctcgacgaccgcgccattcaaaaggttatgcgcgaagtcgattcacaggaactcgcgaaagcgcttaaatccgttgactcggaagttcaggacaagatattcaagaatatgtcaaaacgcgccgcgagcatgctcaaggaagatatggagtacatgggaccggtacgattga

SEQ ID NO: 44888 - protein, 317 aa, Unknown
  Obtained from environmental sample
  misc_feature (1)..(317): Xaa is any amino acid
MAKSPLTPGAVVGGSSKKKNVKEYSGRQKAAIFLVTIGSEISAEIFKFLREDEIETLTFEIARLETIDSEQKDAILQEFQELMMANQFISTGGIDYARELLEKSLGSQKAIDIINRLTSSLQVRPFDFIRRTDPAHLLNFIQQEHPQTIALILAYLEPNKASIILQNLPHEVQSDVARRIATMDRTSPEVLREVERVLEKKLSSLSSEDYTAAGGVESIVEILKLVDRASEKQIIEALEDEDPELAEEIKKRMFVFEDSLCSTTAPFKRLCAKSIHRNSRKRLNPLTRKFRTRYSRICQNAPRACSRKIWSTWDRYD

SEQ ID NO: 44889 - DNA, 501 bp, Unknown
  Obtained from environmental sample
  misc_feature (1)..(501): n is a, c, g, or t
atgttaaaggctgttttcagaccgaatgaattggtaacgcttcaagaaaaggtcgttattgaatctcctacttcctattctgaaatgactcatttatccgccatagaagataatgcggaagccgctgaagctattgaagaatatacgggacctacggcggatgaacttcggcgcgaagctgaaatgttcaaatcaaggtgggaagaagaaaaagaacgaatgatttcttcggcaaaagaagaagccgataacattgtacaggatgcgcagaaggcggcctttgcggaagttaaaaggcagactgacgaagcccaagttttaaaacagcaggcccaagaagaagcggaacgcataatagcggacgctaaagtaaaggcaaatgaacttgaagaagaggtaaggaagtctttagataatgaacgcagggaggcgaaagaacagggaaagacggagggcaaggaagacggatattccgaagaaaaagcggaagttgacgcttaa

SEQ ID NO: 44890 - protein, 166 aa, Unknown
  Obtained from environmental sample
  misc_feature (1)..(166): Xaa is any amino acid
MLKAVFRPNELVTLQEKVVIESPTSYSEMTHLSAIEDNAEAAEAIEEYTGPTADELRREAEMFKSRWEEEKERMISSAKEEADNIVQDAQKAAFAEVKRQTDEAQVLKQQAQEEAERIIADAKVKANELEEEVRKSLDNERREAKEQGKTEGKEDGYSEEKAEVDA

SEQ ID NO: 44891 - DNA, 729 bp, Unknown
  Obtained from environmental sample
  misc_feature (1)..(729): n is a, c, g, or t
gtgcttgaacgcgcacaggacaagagggcggatatcttaagcgatacggaaaaagaaattatatatttggtacttcttattacgcgcaaagttatcaaggttatctcggaaaaccagcgtgatgtgataatttccaatgtagttgaagctctgcgtaaggttaaggcgaagggaaatatcacgattaaggttaatcttgccgatcttaaactcgcgaccgaacacaaacaggattttatcgcccttatggaaggcgtgaaaacaattaatatagttgaagacagttccgtagataagggcggttgcgtaatagaaactgattttggagaaattgacgcgcgtatcgcaagccagcttgcggagattgaaaacagaatactggaaatttcaccaataaaagaaactaatgccgatcatttgccgtctcctgtaataaggtccgcgaggcttaataccgagcttgccgcgtcttccgcgataatggacgcgctgaataaatcagaaaaagaaaacacggctgttgatttaaattacaattccaattccgatacagattccgattcagaagaaccggaattatcagccggcgcaagcgcggctcttaccgcttcagccgcgttagccgctcttgcgacaatggcgacaaaaggcaagagggaagtggacaagagaataacaagcggattggatcaaataacaagaaggaaaactgatactttgattccgtag

SEQ ID NO: 44892 - protein, 242 aa, Unknown
  Obtained from environmental sample
  misc_feature (1)..(242): Xaa is any amino acid
MLERAQDKRADILSDTEKEIIYLVLLITRKVIKVISENQRDVIISNVVEALRKVKAKGNITIKVNLADLKLATEHKQDFIALMEGVKTINIVEDSSVDKGGCVIETDFGEIDARIASQLAEIENRILEISPIKETNADHLPSPVIRSARLNTELAASSAIMDALNKSEKENTAVDLNYNSNSDTDSDSEEPELSAGASAALTASAALAALATMATKGKREVDKRITSGLDQITRRKTDTLIP

SEQ ID NO: 44893 - DNA, 1653 bp, Unknown
  Obtained from environmental sample
  misc_feature (1)..(1653): n is a, c, g, or t
atgatcggcgccggcggccaggccggacagaacgacgccgccaatctccttaaacccgcccttgcgcggggcaaactgcgctgtattgccgctaccacgtatcaggagtacatcaagtattttgaaaaagaccctgccctggcgcggcgcttccagaacatccttatcgaagagccggatgacgataaggggacgcagatgatgcggggcatagtaaaatccctggaaaagcaccacggcgttgttgtgctggacgaggctcttggcgcggctgtaaaactttcacggcgctaccttccctcccgccagcttcccgacaaatccgtgagcatccttgacacggcctgcgccaaggtgaacctgagccaaaacgcgcagcccgccgaactggaatattccctcaggcgcattgaggcactggaactggaaatagaaattctcaaacgtgaagaaacaggcggaatgaaccatgcggaaaaaatagccgccttaaacgatgaacttataaaagaagaaaaaaacagtgacgaaatacaaaaacgttttgacagggaaaaagccctggccgccgaaatagcggccctgcggacacaactcaatgacgttgaaaaggacaaggcggccgctcttactgcggaactggaagccaaacgaaaagagcttgcggatttccagggggaacatcccctggtactgccccaggtggacactcaggcggtttctacggtcatctccgaatggaccggcatacctttgggcagaatggtaaaggacgaaatcaagtccatcctttcccttgatgaagaactctgcaggagggttatcggacaggatcacggcctgaaaattatcgcgaaacgggtagttaccgcaagggcgtccctggccgacccgaacaaacccatcgcggtaatcatgctggcaggcccctccggggtcggtaagaccgaaaccgcccttgcccttgccgaacagatctacggcagcgacgagcaaatcgttactattaatatgagcgaattccaggaatcccataccgtatccacactgaagggcgcgcctcccggttatgtcggctacggcgaaggcggagtcctcaccgaggcggtacgcagaaagccctacagcgtggtgctgctggacgaagtggaaaaggcgcacccggatgtgcatgaaattttctttcaggtttttgacaaaggccagatggaagacggcgcgggcaggctggtgaatttccgcaacaccctgatccttttgacgactaacgtgggcgaccatgttatagagcggctctgcgttgacgaggacaatttccccgccgtggaaacgctggaagaggctgtcaggggcgacatggcgaaggtgttcccggccgcgcttcttggccgcatccagatcgtgccttattatcctctcgggaaaaaagccctgtaccgcatcatcgacttaaaactttccaaaataaanaaacgggtggcggaaaattacgccgcacagctcgttatcgctgacgcggtnaaggacgagattatccgccgctgtgacaatgccgcctccggcgcagggctcgtcgacgcggttatcagcaacagcctgctgcctgaaatcagcggcgaattcttcgcagcaccctggaggaaaagaatttaa

SEQ ID NO: 44894 - protein, 550 aa, Unknown
  Obtained from environmental sample
  DOMAIN (304)...(473): ATPase family associated with various cellular activities (AAA)
  misc_feature (1)..(550): Xaa is any amino acid
MIGAGGQAGQNDAANLLKPALARGKLRCIAATTYQEYIKYFEKDPALARRFQNILIEEPDDDKGTQMMRGIVKSLEKHHGVVVLDEALGAAVKLSRRYLPSRQLPDKSVSILDTACAKVNLSQNAQPAELEYSLRRIEALELEIEILKREETGGMNHAEKIAALNDELIKEEKNSDEIQKRFDREKALAAEIAALRTQLNDVEKDKAAALTAELEAKRKELADFQGEHPLVLPQVDTQAVSTVISEWTGIPLGRMVKDEIKSILSLDEELCRRVIGQDHGLKIIAKRVVTARASLADPNKPIAVIMLAGPSGVGKTETALALAEQIYGSDEQIVTINMSEFQESHTVSTLKGAPPGYVGYGEGGVLTEAVRRKPYSVVLLDEVEKAHPDVHEIFFQVFDKGQMEDGAGRLVNFRNTLILLTTNVGDHVIERLCVDEDNFPAVETLEEAVRGDMAKVFPAALLGRIQIVPYYPLGKKALYRIIDLKLSKIXKRVAENYAAQLVIADAVKDEIIRRCDNAASGAGLVDAVISNSLLPEISGEFFAAPWRKRI

SEQ ID NO: 44895 - DNA, 792 bp, Unknown
  Obtained from environmental sample
  misc_feature (1)..(792): n is a, c, g, or t
atggtcgcccacgttagtcgtcaaaaggatcagggtgttgcggaaattcaccagcctgcccgcgccgtcttccatctggcctttgtcaaaaacctgaaagaaaatttcatgcacatccgggtgcgccttttccacttcgtccagcagcaccacgctgtagggctttctgcgtaccgcctcggtgaggactccgccttcgccgtagccgacataaccgggaggcgcgcccttcagtgtggatacggtatgggattcctggaattcgctcatattaatagtaacgatttgctcgtcgctgccgtagatctgttcggcaagggcaagggcggtttcggtcttaccgaccccggaggggcctgccagcatgattaccgcgatgggtttgttcgggtcggccagggacgcccttgcggtaactacccgtttcgcgataattttcaggccgtgatcctgtccgataaccctcctgcagagttcttcatcaagggaaaggatggacttgatttcgtcctttaccattctgcccaaaggtatgccggtccattcggagatgaccgtagaaaccgcctgagtgtccacctggggcagtaccaggggatgttccccctggaaatccgcaagctcttttcgtttggcttccagttccgcagtaagagcggccgccttgtccttttcaacgtcattgagttgtgtccgcagggccgctatttcggcggccagggctttttccctgtcaaaacgtttttgtatttcgtcactgtttttttcttcttttataagttcatcgtttaa

SEQ ID NO: 44896 - protein, 263 aa, Unknown
  Obtained from environmental sample
  misc_feature (1)..(263): Xaa is any amino acid
MVAHVSRQKDQGVAEIHQPARAVFHLAFVKNLKENFMHIRVRLFHFVQQHHAVGLSAYRLGEDSAFAVADITGRRALQCGYGMGFLEFAHINSNDLLVAAVDLFGKGKGGFGLTDPGGACQHDYRDGFVRVGQGRPCGNYPFRDNFQAVILSDNPPAEFFIKGKDGLDFVLYHSAQRYAGPFGDDRRNRLSVHLGQYQGMFPLEIRKLFSFGFQFRSKSGRLVLFNVIELCPQGRYFGGQGFFPVKTFLYFVTVFFFFYKFIV

SEQ ID NO: 44897 - DNA, 513 bp, Unknown
  Obtained from environmental sample
  misc_feature (1)..(513): n is a, c, g, or t
atgctggacaatctgtttcaggaagcgcaaatactgcttccgtcgttacaaaaagacatgataataggcgcatataccggaatacggccaaagctggttgccagggggcagagtaatttcggtgattttgttatagaggaaagtccaaaagtcaaaaacctgattaaccttatcggcatcgaatctccgggattaaccgcgtctatgcctattgctgaaagagtaagcgaaattatagccgcaaaaacaaaatccgggcaaaacaggcaattcaaagcagagtataaaaaaccgccgtatttatactctcttgaccgaaaagaacaggatgatctaatagcagaaaatcaggattatggcgaaattgtatgccggtgtaaaacaataacaaaggcggaagtattgcaggcgcgggcaattcgggagtataggcatatactgaacgagacagtagtaactgtgttcagatccgttgtggtcggtaacaggaagggtacggtcttagcctggtag

SEQ ID NO: 44898 - protein, 170 aa, Unknown
  Obtained from environmental sample
  misc_feature (1)..(170): Xaa is any amino acid
MLDNLFQEAQILLPSLQKDMIIGAYTGIRPKLVARGQSNFGDFVIEESPKVKNLINLIGIESPGLTASMPIAERVSEIIAAKTKSGQNRQFKAEYKKPPYLYSLDRKEQDDLIAENQDYGEIVCRCKTITKAEVLQARAIREYRHILNETVVTVFRSVVVGNRKGTVLAW

SEQ ID NO: 44899 - DNA, 567 bp, Unknown
  Obtained from environmental sample
  misc_feature (1)..(567): n is a, c, g, or t
atgagcttcgtcccggaagacaggctcggcatggggcttgccggcggcatgagcatttcagccaatatccttttgcgttcatacgataaaaatccgggccttttcgttgactatgcgtcaggggatcttttggccgggcaaattgtcagggattatgacgtttccaccccttcgatccgccagataataaggaaactttccggagggaatatccagaaagtcctgcttggcagggagatacatttttcgccaaaagttcttattaccgcgtatcccgtgcgggggctggacgtaggcgcgtcttattttatttataacctgttgaacgagcagaagaagaaaggcgtcgccgttttgtatatcggcgaagacctggacgtgttaatggaaatttgcgacaggcttatggtgattcaccacggaaaaattatgggcgttgttgatccccaggataccacgaaagagcgtatcgggcttatgatgttaggcgaaaagcattccggcgttggtgccggcgcgggagccgccgcccctaaggcggccgccgcccctaaggcggcgaaatga

SEQ ID NO: 44900 - protein, 188 aa, Unknown
  Obtained from environmental sample
  DOMAIN (9)...(141): ABC transporter
  misc_feature (1)..(188): Xaa is any amino acid
MSFVPEDRLGMGLAGGMSISANILLRSYDKNPGLFVDYASGDLLAGQIVRDYDVSTPSIRQIIRKLSGGNIQKVLLGREIHFSPKVLITAYPVRGLDVGASYFIYNLLNEQKKKGVAVLYIGEDLDVLMEICDRLMVIHHGKIMGVVDPQDTTKERIGLMMLGEKHSGVGAGAGAAAPKAAAAPKAAK

SEQ ID NO: 44901 - DNA, 669 bp, Unknown
  Obtained from environmental sample
  misc_feature (1)..(669): n is a, c, g, or t
atgacaggcatacggatagccgcgcgggcggagttaagccggcggaacgaaatgctgcttcggctttttgcggctgtgagcgcccttgcggcttcaggtcttatcatggcggttatgggctacaacccctttgacgtttacgcgaagatcatatcaggctctcttggctcggcttaccgcttcagggaaacgattaacaaagccatacctttatgcgttctttcactgggaaccgcgattgccttcaggatgaaattctggaacataggccaggaggggcagttttacctcggggcttacggagcgtccctggcggcctttgccttcccgaaccttcccgcgccgctcctcctgtcgataatgctgataatgggcatggtgttcggcggcctgtgggctttgattcccgcgttattgaaaataaaattttcaacaaatgaaacgctggttacattgatgctgaactacatcgcgatcaagtggatttcctttttgcagtacatcgcctggaaagacccgacggccctcggtttccccaaaattacccctttcagcgccaacgcggtgcttccccgcctttttagcatccatatcggctggataatcagcctctgcctcgcgtttttgctgtacgtgctgctgaaaaaaaccaagtcgggtatgagatag

SEQ ID NO: 44902 - protein, 222 aa, Unknown
  Obtained from environmental sample
  misc_feature (1)..(222): Xaa is any amino acid
MTGIRIAARAELSRRNEMLLRLFAAVSALAASGLIMAVMGYNPFDVYAKIISGSLGSAYRFRETINKAIPLCVLSLGTAIAFRMKFWNIGQEGQFYLGAYGASLAAFAFPNLPAPLLLSIMLIMGMVFGGLWALIPALLKIKFSTNETLVTLMLNYIAIKWISFLQYIAWKDPTALGFPKITPFSANAVLPRLFSIHIGWIISLCLAFLLYVLLKKTKSGMR

SEQ ID NO: 44903 - DNA, 1023 bp, Unknown
  Obtained from environmental sample
  misc_feature (1)..(1023): n is a, c, g, or t
ttgtgcttggttccgaattttttattcggtaccggtttgtacgggagaagaataatgactgagtttttgaatatgatgactttgttcctgcaaacctccgtgcagatgggaacccacattctattcgccgttcttggcggaatcttatgcgagaaaatcggaaaccttaacctcggcatagagggcatgatgctgttaggcgcttccgtgggcttttccgccgcgcttgctacggcgaatccttttgcggcggttctggccgcgggcctcgccggatctctcggggctttaatatacgggataataaccattacactgcggggcaaccaggttgtcaccggccttgtccttacgatttttggcaccggcgtatcgggctttatcggcaaaagcctcgccggaaagcctttaccggacgcggttcaaaaggctttttcccctgtaaccgttcccctgttgggaaagatccccgttatcggacaggtcttttttatccagagcccttacgttttggccggccttatcctcggagcgctgctttatgtttatttccgctatacccgcatagggctgaacgcgcgcgcggtcggcgagaaccccgccgtcgccgacgccgccgggattccggtgatcctctataaatatgttcatgtcatgctcggcggttttttatgcggcctgggcggagcgtatctttccctggtttttgttcctcgctggcaggagaacatcaccgccggagcgggctggattgccgtcgcgctggttattttcagcacgtggaatcccctgcgtgccattttcgccgcctgtctctttggcgccctgcggggcctgggtttcaaattacagaatattgtcatgagcattgccggcgtccgcattatttttcattcccagcttctggatatgatcccctaccttgccaccatcattgtccttttgatcatcacccgcaggaagaagaaagaatatcaggcgcctgcggctcttggcgcgtcgtatttccgggaagacaggtaa

SEQ ID NO: 44904 - protein, 340 aa, Unknown
  Obtained from environmental sample
  DOMAIN (29)...(314): Branched-chain amino acid transport system / permease component
  misc_feature (1)..(340): Xaa is any amino acid
MCLVPNFLFGTGLYGRRIMTEFLNMMTLFLQTSVQMGTHILFAVLGGILCEKIGNLNLGIEGMMLLGASVGFSAALATANPFAAVLAAGLAGSLGALIYGIITITLRGNQVVTGLVLTIFGTGVSGFIGKSLAGKPLPDAVQKAFSPVTVPLLGKIPVIGQVFFIQSPYVLAGLILGALLYVYFRYTRIGLNARAVGENPAVADAAGIPVILYKYVHVMLGGFLCGLGGAYLSLVFVPRWQENITAGAGWIAVALVIFSTWNPLRAIFAACLFGALRGLGFKLQNIVMSIAGVRIIFHSQLLDMIPYLATIIVLLIITRRKKKEYQAPAALGASYFREDR

SEQ ID NO: 44905 - DNA, 702 bp, Unknown
  Obtained from environmental sample
  misc_feature (1)..(702): n is a, c, g, or t
atgctgataatgggcatggcgttcggaggcctatgggctttgattcccgcgttattgaaaataaaattttcaacaaatgagacgctggtgacattgatgttgaactacatagcgatcaagtggatttcatttttgcagtatgtggcgtggaaagatccgacggctcttggtttccctaaaattacccctttcagcgccaacgccgtgcttccccgccttttcaatattcatatcggctggataatcaacctctgtctcgcttttttgctgtacgtattgcttaaaaaaaccaagttcggttacgagattgacgtaataggggagagcgaggccacggcgcgttacgcgggcatgaacgtgttcaggatcagcgttctcgcgatcatgctttcaggcggcctttgcggtattgcgggaatgatgcaggcctccgcgattgagcgttccctgtcggagcagctttcgggcgggcttggctttacgtcggttattgttacctggcttgcccgccttgagccgggcgtagtaatcatcatggcgtttcttttttccctgctgatacagggcggcaatttcctgcagtcaagtttgcagattccggcttctatctcgcaggtgctgcaggggatcattattttctttgtgcttggttccgaattttttattcggtaccggtttgtacgggagaagaataatgactga

SEQ ID NO: 44906 - protein, 233 aa, Unknown
  Obtained from environmental sample
  DOMAIN (1)...(216): Branched-chain amino acid transport system / permease component
  misc_feature (1)..(233): Xaa is any amino acid
MLIMGMAFGGLWALIPALLKIKFSTNETLVTLMLNYIAIKWISFLQYVAWKDPTALGFPKITPFSANAVLPRLFNIHIGWIINLCLAFLLYVLLKKTKFGYEIDVIGESEATARYAGMNVFRISVLAIMLSGGLCGIAGMMQASAIERSLSEQLSGGLGFTSVIVTWLARLEPGVVIIMAFLFSLLIQGGNFLQSSLQIPASISQVLQGIIIFFVLGSEFFIRYRFVREKNND

SEQ ID NO: 44907 - DNA, 834 bp, Unknown
  Obtained from environmental sample
  misc_feature (1)..(834): n is a, c, g, or t
atgtttgcggatagggccctcggcgttaccaacgtaagccttaccaaagaaatggagaagctcagttccggtctcaggattaaccgtgcaggagacgacgcttccggtctcgcagtttctgaaaaactgcgcagtcaaatcaggggtttgaaccaggcctctaccaatgccagcaacggtatttccttcatacaggttactgagggctacctccaggaaacccaggatatcgttcagcgcatcagggaactggcagttcaggccgccaacggcatctattctgaagaagacaggctttacatccagattgaagtttcagcattggtagatgaaattgaccgtatagccagccatgcccaatttaacggcatgaacctcttaaccgggcgttttgccaggctgcagggcatgaacactgttaccgcgtccatgtggttccacatcggggccaatatggatcaaagaacacaggttttcatcggcaccatgaccaccaagggtcttggcatccgcaacgtaggggatgacaccttcatcaccctggaaaccgctgacgatgccaacagggccattggtacaatggacgccgccatcaagatcatcaacaaacaaagggctgacctgggcgcataccagaacaggcttgaacatgcggtagtcggattggacgtaggagccgagaatatgcaggcttccgagtcccgtatccgggataccaacatggctcaccagatggtttcctacactagggatcagattctgatccaggcgggaaccgccatgctggcgcaggctaaccagaggtccgcaacggtattgcaacttctgcggtaa

SEQ ID NO: 44908 - protein, 277 aa, Unknown
  Obtained from environmental sample
  DOMAIN (184)...(255): Bacterial flagellin C-terminus
  misc_feature (1)..(277): Xaa is any amino acid
MFADRALGVTNVSLTKEMEKLSSGLRINRAGDDASGLAVSEKLRSQIRGLNQASTNASNGISFIQVTEGYLQETQDIVQRIRELAVQAANGIYSEEDRLYIQIEVSALVDEIDRIASHAQFNGMNLLTGRFARLQGMNTVTASMWFHIGANMDQRTQVFIGTMTTKGLGIRNVGDDTFITLETADDANRAIGTMDAAIKIINKQRADLGAYQNRLEHAVVGLDVGAENMQASESRIRDTNMAHQMVSYTRDQILIQAGTAMLAQANQRSATVLQLLR

SEQ ID NO: 44909 - DNA, 903 bp, Unknown
  Obtained from environmental sample
  misc_feature (1)..(903): n is a, c, g, or t
atggacgggccgacccgccattcgccgggcggagccgacgcggttcctgatcttttcagcgcggctgtttccgccgacggttttaccaccgctaaaggcggagcgcccgtaagcgccattaaccccgcgcagggcggggatgccgacagaatggtatttgacgcaagttatctggcgctcccaaaattattgtcgggcaatgaaaaagacggatacatgcagtctatttctgtgggcgctcttttcccgacaaaagccggggttttgggcggttccataaggtacataggcggttttgcggaagatcaatttgattattttcccataaatccgacatttggcggcaatctgtttaccgcaaaagaattgtatccgggaatgtccctggggcttggcataaacttcggttttggcgcggcaacgacaatttcaggagacatcggttttagatacaataccggcaatcttggctttttaaaaaatttcacggcaggcgtagtactgcgaagcctggggttaagttatttcccgacatggctttccctcgtcagcggtatatcatttgaccttattcatatagaaggaaaagataataaaaatgatccatttatattgggctttgcaaccgatatcgccttcccctctctattctatcctccgtatattaacgtaatatggaaagccggaataaaaatgacaatcgctgaaacaatcaccctcaacgcgtcatggccgggaggcagcgggcttaaccttcaggaattaacggaaaaaaaagtatcatttccggtttttccagcaatcgggctatgcgtaaatataatgctgccttccacgggagagcggattgtcggaggacggcttccttcggacggagacatgctgataagcggaagcttttaa

SEQ ID NO: 44910 - protein, 300 aa, Unknown
  Obtained from environmental sample
  misc_feature (1)..(300): Xaa is any amino acid
MDGPTRHSPGGADAVPDLFSAAVSADGFTTAKGGAPVSAINPAQGGDADRMVFDASYLALPKLLSGNEKDGYMQSISVGALFPTKAGVLGGSIRYIGGFAEDQFDYFPINPTFGGNLFTAKELYPGMSLGLGINFGFGAATTISGDIGFRYNTGNLGFLKNFTAGVVLRSLGLSYFPTWLSLVSGISFDLIHIEGKDNKNDPFILGFATDIAFPSLFYPPYINVIWKAGIKMTIAETITLNASWPGGSGLNLQELTEKKVSFPVFPAIGLCVNIMLPSTGERIVGGRLPSDGDMLISGSF

SEQ ID NO: 44911 - DNA, 696 bp, Unknown
  Obtained from environmental sample
  misc_feature (1)..(696): n is a, c, g, or t
ttgggaaagaattttacgtttgaaggggcctcaaaaagagcgccaagctgcgcccacgttgtgtatgattactacggcggcgcggaaaaactgggaaaattcgctgaaatgatcaaatatgtcgataaaacggactcggcggatttaacgatagacgaaattatgcaccctaccggctgggtattgcttggttttcttaccgatccccgcacaggactgggcagaatccggaattttaccatcagcaattttgaattaatgaagcagctcgcccatgatacttttaccaaacctattgatgagattctcgcgtcaaaagatgtgaaggaacgcgttgatgtctattttgagcagcacaataattttattgaaatggtaaaaaaacacgcaaaaattgaaggtaaagccatatatgttgatctgcgtgatgttgaaaccatctacgcgggcaaccgctttttgctgtacaccattttccccgatcaaaatatatccgtatgggtggttgacggcaagaaaaaggtcaacacggtcattacggttggttacagcgtcatcaacaaaaccgccacggtcgatgtaggcagccttatgctgaaatacggcggcggcgggcacaaggcggtaggcacctgccaggtaccgtatgatgataccgatnagataattggtgagattatcgcggctgttaggtaa

SEQ ID NO: 44912 - protein, 231 aa, Unknown
  Obtained from environmental sample
  misc_feature (1)..(231): Xaa is any amino acid
MGKNFTFEGASKRAPSCAHVVYDYYGGAEKLGKFAEMIKYVDKTDSADLTIDEIMHPTGWVLLGFLTDPRTGLGRIRNFTISNFELMKQLAHDTFTKPIDEILASKDVKERVDVYFEQHNNFIEMVKKHAKIEGKAIYVDLRDVETIYAGNRFLLYTIFPDQNISVWVVDGKKKVNTVITVGYSVINKTATVDVGSLMLKYGGGGHKAVGTCQVPYDDTDXIIGEIIAAVR

SEQ ID NO: 44913 - DNA, 489 bp, Unknown
  Obtained from environmental sample
  misc_feature (1)..(489): n is a, c, g, or t
atgtactatccatatacatttaccgcgaccgacgctcttggaaacgccagttccacggaaggcagaatcggcattgacgtgcttgtcatccgcgaaggcgacaggctgaggatacaaatcccctcaatccagttcaggccgaatttcgcggacttccaaaacctgcccaaggatgttgttgacaacaatatgcgaataataaggcgcatcgcgcagatactcaaccaattccgcgattacaaggtacaggtggaaggccacgccaatcctacgcagccggcaggcgccgcgcacgacagggaagaacctgaattaaaacgcatcagcgaactgagggcaaaggcgattgtagatctactggtacgcaacggcgtcgcgcgaagcaggctgaccgccataggagccggctcctccaaaaccatcgccgactttgaagaccgcgacaactggtggaaaaaccgcagagtagagttttacttgattaaatag

SEQ ID NO: 44914 - protein, 162 aa, Unknown
  Obtained from environmental sample
  DOMAIN (58)...(154): OmpA family
  misc_feature (1)..(162): Xaa is any amino acid
MYYPYTFTATDALGNASSTEGRIGIDVLVIREGDRLRIQIPSIQFRPNFADFQNLPKDVVDNNMRIIRRIAQILNQFRDYKVQVEGHANPTQPAGAAHDREEPELKRISELRAKAIVDLLVRNGVARSRLTAIGAGSSKTIADFEDRDNWWKNRRVEFYLIK

SEQ ID NO: 44915 - DNA, 471 bp, Unknown
  Obtained from environmental sample
  misc_feature (1)..(471): n is a, c, g, or t
atggcttacattaatcagtacgcgtccaggttggataaactcaactttaaggacatgttcggcggggatttttttctgacctgggaaaaatcctacgatgaaattctcgcgacctttacggtggcggacgctttgcgctggctgcgggagaataacatatctacgcggattttcgattcggggctgggcgtttcactgttcagggataactcgacccgtacccgtttcagtttcgcttcggcctgcaattctctgggccttgcggttcangatttggacgagggcaaatcccagatcgcccacggagagaccgtgcgggaaacggctaatatgatttcctttatggccgacgttatcggcataggggacgacatgtacatcgttaagggtaatacttacatgagggaagttgcggagcagtgttggaaggtcacgttgacggcaatctggaacagtgcccgacgctggtga

SEQ ID NO: 44916 - protein, 156 aa, Unknown
  Obtained from environmental sample
  DOMAIN (22)...(137): Aspartate/ornithine carbamoyltransferase, carbamoyl-P binding domain
  misc_feature (1)..(156): Xaa is any amino acid
MAYINQYASRLDKLNFKDMFGGDFFLTWEKSYDEILATFTVADALRWLRENNISTRIFDSGLGVSLFRDNSTRTRFSFASACNSLGLAVXDLDEGKSQIAHGETVRETANMISFMADVIGIGDDMYIVKGNTYMREVAEQCWKVTLTAIWNSARRW

SEQ ID NO: 44917 - DNA, 774 bp, Unknown
  Obtained from environmental sample
  misc_feature (1)..(774): n is a, c, g, or t
gtgttggaaggtcacgttgacggcaatctggaacagtgcccgacgctggtgaacctccagtgcgacatcgatcatcccacacaggcaatggccgacatgaaccacataatccgccacttcggcggcattgacaaactcaagggaaagaaagtcgctatgacctgggcatactcgccatcttacggaaaacccctgtccgtgccgcagggggtcataggcctgatgacccgtttcggcatggaggtgcatctcgcccatccggagggttacgaggttatgcccgaagtcgaggctgttgcgaagaagaacgcggcattaagcggaggcaaattcaccaaatcaaattcaatgcgggaggcgtttgcggacgctgacattgtgtaccccaagagctgggctcccttcgcggcgatggagaaacggaccaatctgtacggcaacagtgactttgacgggataaagaccctggaaaaagaactgctggcacagaacgccaaacacaaggactgggaatgtaccgaagacctgatgaaagcgaccaaagacggcaaggccctgtacctgcactgtcttcccgcggacatttcgggcgttagctgcaaggaaggggaggttgccgcttcggtctttgaccgttaccgcgtccccctttacaaagaggcgagccacaagccctacatcatcgccgcgatgatcttcctttccaagattaagtgtccgcaggaaaccctggcaaacatggtttcgcggaatatccccaggcatttcagctaa

SEQ ID NO: 44918 - protein, 257 aa, Unknown
  Obtained from environmental sample
  DOMAIN (46)...(235): Aspartate/ornithine carbamoyltransferase, Asp/Orn binding domain
  misc_feature (1)..(257): Xaa is any amino acid
MLEGHVDGNLEQCPTLVNLQCDIDHPTQAMADMNHIIRHFGGIDKLKGKKVAMTWAYSPSYGKPLSVPQGVIGLMTRFGMEVHLAHPEGYEVMPEVEAVAKKNAALSGGKFTKSNSMREAFADADIVYPKSWAPFAAMEKRTNLYGNSDFDGIKTLEKELLAQNAKHKDWECTEDLMKATKDGKALYLHCLPADISGVSCKEGEVAASVFDRYRVPLYKEASHKPYIIAAMIFLSKIKCPQETLANMVSRNIPRHFS

SEQ ID NO: 44919 - DNA, 684 bp, Unknown
  Obtained from environmental sample
  misc_feature (1)..(684): n is a, c, g, or t
atgaaaaagcgcatagtcattgccctgggggggaacgccctgggagataaccttaaagagcagatggcggcggccagggtcacctccggcgccatagttgatctggttgaggaaggccatgagatagtcatagttcacggcaacggcccccaggtggggatgatcgaaaccgcctttgagaccgccgccaaagccgacaagcattttccggttctgcccatgtcggtctgcgttgccctgagccagggttatatcggctacgatttgcagaacaccatacggatggagcttgaccacaggagcatgaaaaaacaggtcgccacgattattacgcaggttgaggttgacccccatgacaaggcctttgaaaatccgaccaaaccaattggcggctttcacagcagggaagaggcggagattctcaagtccaagggtgttccggtaatggaagacgcgggcaggggctggcggcaggttgtggcttccccgaaaccggttaacattatcgaggctgataccatcaaggcgctgctggcggcggggcagatccccattgccgcgggcggcggggggattcccgtcgcgatgaaggacggccagtacaggggcatgagcgcggtcattgacaaggattttccgcggcaaaactcgcggagctattcggcgcgacatctctctcgataa

SEQ ID NO: 44920 - protein, 227 aa, Unknown
  Obtained from environmental sample
  DOMAIN (3)...(223): Amino acid kinase family
  misc_feature (1)..(227): Xaa is any amino acid
MKKRIVIALGGNALGDNLKEQMAAARVTSGAIVDLVEEGHEIVIVHGNGPQVGMIETAFETAAKADKHFPVLPMSVCVALSQGYIGYDLQNTIRMELDHRSMKKQVATIITQVEVDPHDKAFENPTKPIGGFHSREEAEILKSKGVPVMEDAGRGWRQVVASPKPVNIIEADTIKALLAAGQIPIAAGGGGIPVAMKDGQYRGMSAVIDKDFPRQNSRSYSARHLSR

SEQ ID NO: 44921 - DNA, 384 bp, Unknown
  Obtained from environmental sample
  misc_feature (1)..(384): n is a, c, g, or t
atgctgtctgtaatgaataaacggtttaaaattcttgatatagtaataattcttttagccgtatgtcttactgtttcctcggcgtatgccgcgtactttaaacctgataattcggtcagggcgctgatacgggggcaggacaaggactggacgtttcctcttgagacaaatgaaaccgtaaccgtaagcggtccgcttggggatacaatcgtaaaaataaatgataaccgggcatggattgaatcttcgccgtgtgacaaccaaacctgcgtcggcatgggttctgttcaaaggcagggacaatgggcgctgtgcctgccgaataaagttatgttaattatagaaggaacggatgataaagacatcgacagtatttcatggtaa

SEQ ID NO: 44922 - protein, 127 aa, Unknown
  Obtained from environmental sample
  SIGNAL (1)...(28)
  DOMAIN (15)...(121): Protein of unknown function (DUF1312)
  misc_feature (1)..(127): Xaa is any amino acid
MLSVMNKRFKILDIVIILLAVCLTVSSAYAAYFKPDNSVRALIRGQDKDWTFPLETNETVTVSGPLGDTIVKINDNRAWIESSPCDNQTCVGMGSVQRQGQWALCLPNKVMLIIEGTDDKDIDSISW

SEQ ID NO: 44923 - DNA, 540 bp, Unknown
  Obtained from environmental sample
  misc_feature (1)..(540): n is a, c, g, or t
atgataaagacatcgacagtatttcatggtaaaaaaaccatcgcgctgcttggagcctgctgtctcttcctctcagccgtcgagtacctgatcccaaagcccctgccctttatgcggcttggccttgcaaatctgccgcttatgatcgcgttggacattttcccctttggcggctacatgactttggtctgtcttaaaatattcggacaggcaataataacgggaactctgttttcgtatgttttcttgttttccgtgacgggcactgtttgttccgcccttgtaatgttttttctgcgccgtatgtttggttcttccggacgggagagaatttcttttatcggcataggaacagccggcgctatggtttccaatattgcgcagttatttttagcgcggctttttatttttcaggaaaacacgcgatacgtcgcgcctccttttctggcggcagggcttattacgggtatcgcgctcggcgctttctgcgaagtttttacgcgcaaatcgctttggtataaatcaagggcgggtaaatga

SEQ ID NO: 44924 - protein, 179 aa, Unknown
  Obtained from environmental sample
  SIGNAL (1)...(26)
  DOMAIN (17)...(166): Heptaprenyl diphosphate synthase component I
  misc_feature (1)..(179): Xaa is any amino acid
MIKTSTVFHGKKTIALLGACCLFLSAVEYLIPKPLPFMRLGLANLPLMIALDIFPFGGYMTLVCLKIFGQAIITGTLFSYVFLFSVTGTVCSALVMFFLRRMFGSSGRERISFIGIGTAGAMVSNIAQLFLARLFIFQENTRYVAPPFLAAGLITGIALGAFCEVFTRKSLWYKSRAGK

SEQ ID NO: 44925 - DNA, 744 bp, Unknown
  Obtained from environmental sample
  misc_feature (1)..(744): n is a, c, g, or t
gtgggcgagggcgaccgcgtgataaacgtgggtgtgagcggccccggagcggtcaggcgggcgctcgaacgcctcggggcggacgcggacttcggagaactatccgagtgcatcaaaaagaccgccttcaagatcacgcgggtaggacagctggtcgcgcgcgaagcagccaaacgattgaacgcgacgatgggaatcatagacctgtcgctcgcccccacgcccgccgtcggcgacagcgtggcccatatattggaggtgatggggttgtcaagcgtcggggcgcacggatcgaccgccgccctcgcaatgctgaacgacgcggtaaaaaagggcggcttgatggccggcgtctacgtgggcggtctgagcggcgcgttcatccccgtgagcgaagacgcggggatgatagaggcggtcgggcggggcagcctgtcattagagaaattagaggcaatgacctccgtatgcagcgtggggcttgacatgatagcgattccgggcgacacgccggaagaaatcatagaagcgataatcgccgacgagtgcgcgataggcgtagtgaacaacaagacgacggcggtgcggttgataccggtgcccggaaagacggtaggagaaaaagtagagttcggcggcctgctcggcaccgcgccgataatggcggtaaacaaattttcccctgctggattcataaacagaggcggtaaaataccggcgccgattatcagcaataggaattga

SEQ ID NO: 44926 - protein, 247 aa, Unknown
  Obtained from environmental sample
  DOMAIN (1)...(247): Uncharacterized ACR (DUF711)
  misc_feature (1)..(247): Xaa is any amino acid
MGEGDRVINVGVSGPGAVRRALERLGADADFGELSECIKKTAFKITRVGQLVAREAAKRLNATMGIIDLSLAPTPAVGDSVAHILEVMGLSSVGAHGSTAALAMLNDAVKKGGLMAGVYVGGLSGAFIPVSEDAGMIEAVGRGSLSLEKLEAMTSVCSVGLDMIAIPGDTPEEIIEAIIADECAIGVVNNKTTAVRLIPVPGKTVGEKVEFGGLLGTAPIMAVNKFSPAGFINRGGKIPAPIISNRN

SEQ ID NO: 44927 - DNA, 375 bp, Unknown
  Obtained from environmental sample
  misc_feature (1)..(375): n is a, c, g, or t
ttgttttattgctcttggggggagtgtatgaacacgcatgaaaaagggaagatcggggaggatcaagcggtcgcgtatctattggatcgcgggtacaccatacagacgcggaactttcggacgcggtacggggagatagacatcgtggccgtcgcgcccgacgggacgattgtctttgtggaggtgaagtcggccaatactatgagttgcggcaacccgctctacaaggtcacgccggccaagcagaggactatcgcggggatggccaagcggtatatgtacgaccgtaaactcatagggcgggcgtgcaggatggatgtgataggcatttaccgcggaaagatagatcacattcccaatgcttattgggtgtga

SEQ ID NO: 44928 - protein, 124 aa, Unknown
  Obtained from environmental sample
  DOMAIN (18)...(111): Uncharacterised protein family UPF0102
  misc_feature (1)..(124): Xaa is any amino acid
MFYCSWGECMNTHEKGKIGEDQAVAYLLDRGYTIQTRNFRTRYGEIDIVAVAPDGTIVFVEVKSANTMSCGNPLYKVTPAKQRTIAGMAKRYMYDRKLIGRACRMDVIGIYRGKIDHIPNAYWV

SEQ ID NO: 44929 - DNA, 375 bp, Unknown
  Obtained from environmental sample
  misc_feature (1)..(375): n is a, c, g, or t
gtggagacggacgagaaatgcgacaaatgcggcgcgccgatggtcattttgagcatgaacaacagcaaattcttgggctgttcgcggttccccgactgcaagaacaccaagtcgctctccataggcgtgccttgcccgcaaaaaggctgcgacggcagcgtggtggagcggaagacgcggcggggcaaggtgttctacgggtgcaacaagtatcccaaatgcgacttcgccagttgggacaggcctataaacaggaagtgcgagaagtgcgggaatccgtatttgatacagaaagattacaagcgcaaggggtctactatacggtgccctgcttgcaaggaggaagtagaggggcaggcatcacagcaaaattaa

SEQ ID NO: 44930 - protein, 124 aa, Unknown
  Obtained from environmental sample
  DOMAIN (4)...(41): Topoisomerase DNA binding C4 zinc finger
  misc_feature (1)..(124): Xaa is any amino acid
METDEKCDKCGAPMVILSMNNSKFLGCSRFPDCKNTKSLSIGVPCPQKGCDGSVVERKTRRGKVFYGCNKYPKCDFASWDRPINRKCEKCGNPYLIQKDYKRKGSTIRCPACKEEVEGQASQQN

SEQ ID NO: 44931 - DNA, 906 bp, Unknown
  Obtained from environmental sample
  misc_feature (1)..(906): n is a, c, g, or t
atgcagctgaaacgttttctcaatcgcaaagttttacgagtattgctcgtgcttgcagtcgtgaaggtgcttgcaatagctctgttcttttgctggttgctctttatagtcccttcagacgacccggaaaataaattcaccagagaaaatatattgcaaaacttgaacggcgaaactagggtgttttattccgatggagctaccgtaataggctctttttttgacacaaaccaccgcttatatgtgccttacgattcaataccccaaacccttatagatgcaatagtctccgccgaggattcaaaattttgggaccacagaggttttgacataagcggttttgcacgtgcgatgttcaaaaacttgaggcatttgaattttaggcaagggggcagcacgctcagccagcaaacggtgaagaatgtctttggcagggaagaaaaaagcgtgaaggcaaaactcacggaattgacagatgctgtaaaattggagaaacgttttagcaaacaggaaattttggaattttatctgaatcagtttcaggtttatggttccggcaggggagccgccatagctgctatctattttttcaataagcccctcaaggaactaagccttgaagaatgtgcttttatagctggcattgtcaaagggccttacaactacgaccctcgcgtgcaaaaaacgcctgagagagcggaagcggctttgaaaaaagggcaactcagaacaaaatatgttttgcgcagaatgctcgaaaatcattacataaaccaggagacttacgactctgcaaaagtgccagaactgagctacggcgaattcagatttaactcgtcttttattttggataaagtggatagggaattaaatgatgatttttttgtggagattttgacaaactga

SEQ ID NO: 44932 - protein, 301 aa, Unknown
  Obtained from environmental sample
  SIGNAL (1)...(25)
  DOMAIN (59)...(228): Transglycosylase
  misc_feature (1)..(301): Xaa is any amino acid
MQLKRFLNRKVLRVLLVLAVVKVLAIALFFCWLLFIVPSDDPENKFTRENILQNLNGETRVFYSDGATVIGSFFDTNHRLYVPYDSIPQTLIDAIVSAEDSKFWDHRGFDISGFARAMFKNLRHLNFRQGGSTLSQQTVKNVFGREEKSVKAKLTELTDAVKLEKRFSKQEILEFYLNQFQVYGSGRGAAIAAIYFFNKPLKELSLEECAFIAGIVKGPYNYDPRVQKTPERAEAALKKGQLRTKYVLRRMLENHYINQETYDSAKVPELSYGEFRFNSSFILDKVDRELNDDFFVEILTN

SEQ ID NO: 44933 - DNA, 1674 bp, Unknown
  Obtained from environmental sample
  misc_feature (1)..(1674): n is a, c, g, or t
ttgattatccgaattctgtgttcagcgcggacatacaggctcttgtttatccaaatacagaggctcttatcaaaactgacactgttgacgtgccggtatccggcggagatcttgaataggatgtacggtatgaaacgttatttttcgataatttttttactatgcggcttatccgcaattttatccgcccaaaacaatttcttttacgaaggtacgggcggctccggaatgcgcgttgcggtattgcagccgtcaggcagcaatattcctgagcaggagcaatggcttttgcggcttgtacaaagcaccatcacgggagacttcaataaatacaccgccatgacagtaattgaccgtcaaaatctggatacgattctgggtgagcagcaatcgtcgttatccggtaattattcggaaaaagattacatcagcataggaaaactgacaaacgcccgctatattcttgcgggaactctcacaaaaacgggcggcggctttatgcttgaattgtcggtttcagacaccgaaacaggagtgcgcaaggcgtcgtttactcccaaaaattgcacccttgacgaattacagagcacttcaattataaaacaagccgaggaagaactgctagggcaaatgggcataacgcttactgccgccgggaaacaggcgttaagggacagcgtttccgccgtgccgcaagcggcatccggcgccgatacatccgcggcggttactacggaaaaaggggaacgcctttcctttatcgattatctttcaaaaacagccgacagtctgtatgcgttaggtgatcttcaggacgcgctttggtattacagaagccttacctattattaccccggttattacaaaggctggctgggcatagtccgctgtttctccaaaaattacaccaattttgattttgtagacagtgaaatatatatggaaagagcttccattaccgcggcgggaaacgccgaaaagcaggaagtgcagaaagtccgcgcggcgttcgacaagcaatggccgtccatagccgttaagcgcgaacagcgcgcggttgaagaagcaaagcggcggcaggataatttttaccgcatgactttcaaacagcagaacggcgtgttaaacgagtataccggctcaagcgaagaggtgattatcccgcctgaaattaccgttatcggtcaggccgctttccggcaaaacggcagggtaaaacgggtgatacttcacaataaagtcaccgccatagagaaggaagctttcgcaaactgcacaggccttgttgaagtcattattcccgcaagcgtcaaaagtataggcgcaaacgcgttttataattgtttcgcccttacagacattattattcccgctaacattacggttattccggataacgccttttctgggtgcaagaatttgaaaaacgtaactatagcgaacggcgtacagcggattgataaagcgtttgtaagctgtgaaagccttaccgcgataatcattccccgcacagtaacagccatcggcgactttgcgttttcccaaatgcaaaaactgaaaaccgttactttgctcaacgataaaataacaatagggccgacgcgcgtttatggcatgcccgcttacaacaaagatgagatgatcaagcgttttggggctgcgatttttaattga

SEQ ID NO: 44934 - protein, 557 aa, Unknown
  Obtained from environmental sample
  misc_feature (1)..(557): Xaa is any amino acid
MIIRILCSARTYRLLFIQIQRLLSKLTLLTCRYPAEILNRMYGMKRYFSIIFLLCGLSAILSAQNNFFYEGTGGSGMRVAVLQPSGSNIPEQEQWLLRLVQSTITGDFNKYTAMTVIDRQNLDTILGEQQSSLSGNYSEKDYISIGKLTNARYILAGTLTKTGGGFMLELSVSDTETGVRKASFTPKNCTLDELQSTSIIKQAEEELLGQMGITLTAAGKQALRDSVSAVPQAASGADTSAAVTTEKGERLSFIDYLSKTADSLYALGDLQDALWYYRSLTYYYPGYYKGWLGIVRCFSKNYTNFDFVDSEIYMERASITAAGNAEKQEVQKVRAAFDKQWPSIAVKREQRAVEEAKRRQDNFYRMTFKQQNGVLNEYTGSSEEVIIPPEITVIGQAAFRQNGRVKRVILHNKVTAIEKEAFANCTGLVEVIIPASVKSIGANAFYNCFALTDIIIPANITVIPDNAFSGCKNLKNVTIANGVQRIDKAFVSCESLTAIIIPRTVTAIGDFAFSQMQKLKTVTLLNDKITIGPTRVYGMPAYNKDEMIKRFGAAIFN

SEQ ID NO: 44935 - DNA, 1059 bp, Unknown
  Obtained from environmental sample
  misc_feature (1)..(1059): n is a, c, g, or t
ttgagcgtgttttgcgagagtacaattttatcattgagcacggcccaaagggcgcgcacaccgtgtacaccggcaatctttacaaaaaggggtgccaggcgatcgtcggcccgtactgcggcacattcgtcacggttgagatcgacgggcgccttagacttgataccgcggaaggatcaatgctgctctcctccggaacgcttagatttcccgggagcgtacgcggtgattgatccgacgtccgcaataacgctggcaatagacataggcagcacccgcacgcacatagcggcggttgatgtctatgagttggattgcctcgacaggatcgattcctataatgatgattttgacgatgttttcgtaacaaacgtgaaaaaaatcgcggacgcgcatccgcaaatcaatagggtgaacatctcatcatgcgtacggagcttggcgataaaagccaaagagatatgcgctgatttatgtattgatcctcgtattgatttgcgtattgattcatttatcaaagacggtcagaaacgctttaatacggtggaattggtacacccgcataaaagactgccggtcgctttcgactacgaagagccgggcacgctcggaacggacagaatctgcgacgcccttgcctgcgccgcgatgagcaagggcaaaagctgcataatcatagacgtcggcacggcggttacggtggactacctgcgggacggaaagatctttgaaggcgtggcgatactgtcgggatactcgatgcagctcgacgcgttgcataaaaacacagactcgctgccgcggatcgatatcagcgctctcggcgacgggccgaacgtctcgctcccgtcaaaatcaacggaggattgcatcaaggccggcatcctcttaggtatggccggagcgatcgacaggtgcgtcggcgtgtgcaagcgcaactggggcaaaggcatagtagtcgcgaccggcggcggatgggaaccgatcaagccgttaatcaaacacaagacggtgacgattccgaacttaacgctgatcggggcggggatctataggtga

SEQ ID NO: 44936 - protein, 352 aa, Unknown
  Obtained from environmental sample
  DOMAIN (84)...(309): Bordetella pertussis Bvg accessory factor family
  misc_feature (1)..(352): Xaa is any amino acid
MSVFCESTILSLSTAQRARTPCTPAIFTKRGARRSSARTAAHSSRLRSTGALDLIPRKDQCCSPPERLDFPGAYAVIDPTSAITLAIDIGSTRTHIAAVDVYELDCLDRIDSYNDDFDDVFVTNVKKIADAHPQINRVNISSCVRSLAIKAKEICADLCIDPRIDLRIDSFIKDGQKRFNTVELVHPHKRLPVAFDYEEPGTLGTDRICDALACAAMSKGKSCIIIDVGTAVTVDYLRDGKIFEGVAILSGYSMQLDALHKNTDSLPRIDISALGDGPNVSLPSKSTEDCIKAGILLGMAGAIDRCVGVCKRNWGKGIVVATGGGWEPIKPLIKHKTVTIPNLTLIGAGIYR

SEQ ID NO: 44937 - DNA, 483 bp, Unknown
  Obtained from environmental sample
  misc_feature (1)..(483): n is a, c, g, or t
atggcgctaatagagtgcatgccgtcgggggacgcgcccgtgtctataaaatggccgaacgatatctattggggcgagagaaaaatcgccggcattctccttgagaacgccccccaaaaaccaaacgcgctgatcatcggcttcggcataaacgtaaacatagcgcaagacgatttcccaagcagtctgcacaggacgacgacctccgtgctgatggaaatcggcgaggagtacgtacctgacgcgttacttgagcgtgttttgcgagagtacaattttatcattgagcacggcccaaagggcgcgcacaccgtgtacaccggcaatctttacaaaaaggggtgccaggcgatcgtcggcccgtactgcggcacattcgtcacggttgagatcgacgggcgccttagacttgataccgcggaaggatcaatgctgctctcctccggaacgcttagatttcccgggagcgtacgcggtgattga

SEQ ID NO: 44938 - protein, 160 aa, Unknown
  Obtained from environmental sample
  misc_feature (1)..(160): Xaa is any amino acid
MALIECMPSGDAPVSIKWPNDIYWGERKIAGILLENAPQKPNALIIGFGINVNIAQDDFPSSLHRTTTSVLMEIGEEYVPDALLERVLREYNFIIEHGPKGAHTVYTGNLYKKGCQAIVGPYCGTFVTVEIDGRLRLDTAEGSMLLSSGTLRFPGSVRGD

SEQ ID NO: 44939 - DNA, 1221 bp, Unknown
  Obtained from environmental sample
  misc_feature (1)..(1221): n is a, c, g, or t
ttgttcgcctgcggcactatggctctggagggcgcgcccggccttaagaaggagcattatgttatttttgataccgccaatccttcgggcaaaaagagcaagagatcgattccgtggacggcgcatatcggcatgatggcggcggttcagccttttatttccggcgcgatttctaaaacgattaatatgcccaacgcggcgaattacgacgatgtaaagggcgcttatatgctctcgtggaagaacgggcttaaagcggtcgccctgtaccgtgacggctcaaaactttcacagccgcttaacagcgttgacccgggcgcggatccgttagccgatactattctgaaggttgagaagggtttggacatcccggtatcctcgccggaccgcaagaaattaaacacgcgcggtttgcgcagggctttgcctaaccgcaggatgggttacactcagaaggcaaagatcggcgggcattcgatttttatcaggacgggcgaatatgaggacggcaatctgggtgaaatcttccttgacatgcacaaggaaggcgcggctttcaggagccttttaaacagttttgccattacggtttctctcggtttgcaatacggcgtgcctcttgaagaatacgttgacgcattcactttcagcaggtttgaacctaacggttttgtgcaggggcacgattatgtgaagatggcgaccagcgttatcgattatattttccgcgatcttgcgatcagttatctgaaacgcagcgacttggcgcaggttaagccggaagatttggaagcgacggggaccaaaagcgatttcggcgtgtccgacggcaaagaccggagtgacaagcacagcgccggtttcaggccgagcgcgacggtttccgcgccgaagaacgtgataccttcgcaggttacgccggcgtcttcaacagggaaaaccgttaaagtacaaggcggctcttttgcgggtaacagcgtacctattgacggaggtgttgttgcaggtaacgccgctaaagccggtatcgctccttccggggcgcatacggcggttatggaaggctcttaccatgaggagaacgaggttattaagattgtcaacgccagaattaaaggttatgagggcgatccttgttctttgtgcggatcgttttctttggttaggaacggaacttgcttgaaatgcgataattgcgggagcacgacggggtgttcgtag

SEQ ID NO: 44940 - protein, 406 aa, Unknown
  Obtained from environmental sample
  misc_feature (1)..(406): Xaa is any amino acid
MFACGTMALEGAPGLKKEHYVIFDTANPSGKKSKRSIPWTAHIGMMAAVQPFISGAISKTINMPNAANYDDVKGAYMLSWKNGLKAVALYRDGSKLSQPLNSVDPGADPLADTILKVEKGLDIPVSSPDRKKLNTRGLRRALPNRRMGYTQKAKIGGHSIFIRTGEYEDGNLGEIFLDMHKEGAAFRSLLNSFAITVSLGLQYGVPLEEYVDAFTFSRFEPNGFVQGHDYVKMATSVIDYIFRDLAISYLKRSDLAQVKPEDLEATGTKSDFGVSDGKDRSDKHSAGFRPSATVSAPKNVIPSQVTPASSTGKTVKVQGGSFAGNSVPIDGGVVAGNAAKAGIAPSGAHTAVMEGSYHEENEVIKIVNARIKGYEGDPCSLCGSFSLVRNGTCLKCDNCGSTTGCS

SEQ ID NO: 44941 - DNA, 588 bp, Unknown
  Obtained from environmental sample
  misc_feature (1)..(588): n is a, c, g, or t
atgtccgatccgacacgtgttccggaatatgacgaaaatagccgctatacctattctgactatctgcgctgggaaggcctggagaggtatcagctcataaacgggaaagtttttcagataccttccccgtcggtatctcatcaggctttgctgatggagttgtcgatgcagttcgctaactggcttaaaggtaaatcctgccgggtgtttgccgccccgctggacgtgcgcctgttcccgaaagcggatgattctgatgacacgattgtacagcccgatttgcttgttgtctgcgataaggaaaagctcaaagatggtactgtaaacggcccgccggatttggtggctgagattgcgtctcctttaagcacctattgtgagttttttttgaaatttcatgattaccttgaagccggagtaaaggaatactgggtgattgacccggaagaaaaaagaatactggttcatatttacgaaaacggccattatatcagctctgtccataaaggggatggtagcgtacctgtgaccatcctgccgggcctgaacattgctcttgggaatctctgggaagcagcacttacctga

SEQ ID NO: 44942 - protein, 195 aa, Unknown
  Obtained from environmental sample
  DOMAIN (47)...(157): Protein of unknown function (DUF820)
  misc_feature (1)..(195): Xaa is any amino acid
MSDPTRVPEYDENSRYTYSDYLRWEGLERYQLINGKVFQIPSPSVSHQALLMELSMQFANWLKGKSCRVFAAPLDVRLFPKADDSDDTIVQPDLLVVCDKEKLKDGTVNGPPDLVAEIASPLSTYCEFFLKFHDYLEAGVKEYWVIDPEEKRILVHIYENGHYISSVHKGDGSVPVTILPGLNIALGNLWEAALT

SEQ ID NO: 44943 - DNA, 1074 bp, Unknown
  Obtained from environmental sample
  misc_feature (1)..(1074): n is a, c, g, or t
ttgatagccgagggcatcgcgaacgcctaccttgacagtgtgccgctggtggcgattaccggcaatgtcgctgtcccgctgttgggtagggacagttttcaggaagttgatataatgggcattacccagtctatcgtaaagcacaattatgtagtcagagatgtcgctatgctcgaacatacgctgaacgaggcctttagcatagcgggcagcgggcggcggggtccggtgctggtggatattcccaaaagcgttcaaactgattcttgcgaatataccggtaaaccgcccgctgtggaagaacgggaaaagtgttcttttgatattgaacgggttgccgccgcgattaaagacagtaaacgcccctttatctacgcggggggcggcgtacttgccagcggtgcggaggcggaactccgcgcgttatctgaaaaattatccgctccggtcggcttcagcatgatggggttgtcggctctgccggatgattatccgctgaacctgggcatgacggggatgcacggaagatacgccgcaacggtcgccaaatcagaatgtgacgcgcttatcgctttgggggtgcggttttcagaccgcgccaccggcaatgtgaatgaataccgtgaaggaaaacacatcattcatgttgatattgacattgccgaaatcggcaagaatgtcgcgtcgcacatggacatttgcggcgacgtaaaagatgttttaacacagttgctgccggttcttccggtacagcgcaatgatgaatggcttgcgcgtattgagaaattaaaacaatcgccgcaggcggaatatataagcggcggtttttcgccccaaagcattattaaaacggtaaggcgttactgcgaggatgatactgttatcgcgaccgatgtaggacagcatcagatgtgggtaatacagaattacagtttccaaaaaccgcggactctgctaacgtccggcgggcttggtgcgatgggtttcggccttggcgctgccatcttgttttttgcgttgccaaaaacgggaagagaactgtgcttttcaccagcgacggcagttttggaatga

SEQ ID NO: 44944 - protein, 357 aa, Unknown
  Obtained from environmental sample
  DOMAIN (1)...(94): Thiamine pyrophosphate enzyme, N-terminal TPP binding domain
  misc_feature (1)..(357): Xaa is any amino acid
MIAEGIANAYLDSVPLVAITGNVAVPLLGRDSFQEVDIMGITQSIVKHNYVVRDVAMLEHTLNEAFSIAGSGRRGPVLVDIPKSVQTDSCEYTGKPPAVEEREKCSFDIERVAAAIKDSKRPFIYAGGGVLASGAEAELRALSEKLSAPVGFSMMGLSALPDDYPLNLGMTGMHGRYAATVAKSECDALIALGVRFSDRATGNVNEYREGKHIIHVDIDIAEIGKNVASHMDICGDVKDVLTQLLPVLPVQRNDEWLARIEKLKQSPQAEYISGGFSPQSIIKTVRRYCEDDTVIATDVGQHQMWVIQNYSFQKPRTLLTSGGLGAMGFGLGAAILFFALPKTGRELCFSPATAVLE

SEQ ID NO: 44945 - DNA, 504 bp, Unknown
  Obtained from environmental sample
  misc_feature (1)..(504): n is a, c, g, or t
gtgggtaatacagaattacagtttccaaaaaccgcggactctgctaacgtccggcgggcttggtgcgatgggtttcggccttggcgctgccatcttgttttttgcgttgccaaaaacgggaagagaactgtgcttttcaccagcgacggcagttttggaatgaaccttatcgagcttgctaccgctgtaacggaagagttgccgattaccgttgtcattcttaacaacggaactttggggatggtgcggcaatggcaggcagtattttacggagagcgttacgcgcaaaccacactgaaccgtaaaaccgattttgcggctctggcaaaagccttcggggcggaaggacaccggacgacggatatttcgcggcttgaagacatactgaaaaacataagcggtaatgtgccggtagtcatagattgtccaatagatataaatgagaaagtatatccaatgattctgcctggcggatcagcagaaaatattatagttggaggttga

SEQ ID NO: 44946 - protein, 167 aa, Unknown
  Obtained from environmental sample
  DOMAIN (13)...(142): Thiamine pyrophosphate enzyme, C-terminal TPP binding domain
  misc_feature (1)..(167): Xaa is any amino acid
MGNTELQFPKTADSANVRRAWCDGFRPWRCHLVFCVAKNGKRTVLFTSDGSFGMNLIELATAVTEELPITVVILNNGTLGMVRQWQAVFYGERYAQTTLNRKTDFAALAKAFGAEGHRTTDISRLEDILKNISGNVPVVIDCPIDINEKVYPMILPGGSAENIIVGG

SEQ ID NO: 44947 - DNA, 735 bp, Unknown
  Obtained from environmental sample
  misc_feature (1)..(735): n is a, c, g, or t
atgtgcgccgcaaatgacgcgcccggagctttcgctcttaccggggaaattcttgattcgggcgtttcaatcgaacagtttgtaattgatcttgccggatactaccgcagccttctgcttctgaaaaacggcgtaacaagggaatcccttttggggtaccggcccgcgctgttttcggcaaaggcgctggaaacttttgactctgtccgtcttgaacaggcgctggatctgctgctcaactgctaccgcaacatccgctattcagtgtctccgcgttttgaactcgagaccgctgtttcaaaattgtcgtggcttagccgctggatttcccctacggaacttggcgaagcggttgagaacgctcggggtgtttttagaaacgcgggagtcaaacaaagccaagccgcgccggtgaagactgcgcctgcagtgcgggagactgcattttcggacgtgaagtccgcggcgcgcgcgcctgccgctgcagcgccaagaccgcagccaaagagcggttctctgtccgatgaattccggcggatgttagcagagaggggggggaatgtgtccgcagagggcgcgtccatagaatcgtccaaaaacgcagacgaagatttttcgcctgctgacgacgatgttccgctttgggacagagcggcaagtaaaaacggcggcgaggaaataccgccgcaggttgagactgtgctttctgtgattcccggcacggtcgttgaataa

SEQ ID NO: 44948 - protein, 244 aa, Unknown
  Obtained from environmental sample
  misc_feature (1)..(244): Xaa is any amino acid
MCAANDAPGAFALTGEILDSGVSIEQFVIDLAGYYRSLLLLKNGVTRESLLGYRPALFSAKALETFDSVRLEQALDLLLNCYRNIRYSVSPRFELETAVSKLSWLSRWISPTELGEAVENARGVFRNAGVKQSQAAPVKTAPAVRETAFSDVKSAARAPAAAAPRPQPKSGSLSDEFRRMLAERGGNVSAEGASIESSKNADEDFSPADDDVPLWDRAASKNGGEEIPPQVETVLSVIPGTVVE

SEQ ID NO: 44949 - DNA, 324 bp, Unknown
  Obtained from environmental sample
  misc_feature (1)..(324): n is a, c, g, or t
atgaattttaatccattggaattaatgaaaaacgcccagcaaatacaggaaaagatgagcgggtttcaggaaaaacttgaattgattcaagttacgggcgcatccggcggaagcatggtggaaatcgacataaacggaaaatttgaagttcttgccgtccgcatcgcgccgcaggcaatggaaggcggcgatattgaaatgctgcaggatctgataatgtccgcttttacggacggcatgactaaggtgcgtgaagaaataaacagacaaatgagcgcgattacaggcgggttgaattcccccggctttccgggggttatgtga

SEQ ID NO: 44950 - protein, 107 aa, Unknown
  Obtained from environmental sample
  DOMAIN (9)...(101): Uncharacterised BCR, YbaB family COG0718
  misc_feature (1)..(107): Xaa is any amino acid
MNFNPLELMKNAQQIQEKMSGFQEKLELIQVTGASGGSMVEIDINGKFEVLAVRIAPQAMEGGDIEMLQDLIMSAFTDGMTKVREEINRQMSAITGGLNSPGFPGVM

SEQ ID NO: 44951 - DNA, 615 bp, Unknown
  Obtained from environmental sample
  misc_feature (1)..(615): n is a, c, g, or t
atggatgtgttgaacctccccatgaaaaaaacccactggatggagggtctgtatccggacgccatcggctttcaggccggcacggaattttcttttccggttaagggaggctattgggaattcggccttgagggagtatacacttatccctatttgtacatcatgtggggcaaaggctggtccttttacaaggaagtcccggaattggatacaatggagcctcctcttcgctactggacaggaacccctttcggccccgacacaatagccggcactctttgggcgggcttccgttcttcaacaaattggtacggaggtttttcatttaccttttccgcgcagggagaaaggtcagacttgtatatttttgaaaaatttgatgatgacaaaatccgccccacccatctggtatacgatgtcaccgtccccccgtcaggaacgccggtctacacctacaccgccgccctccgcggcgaatactccccgaataaatggctcagcctgacgctccagcccggttatcgtgtaacggtaaacacaggacatattgaagacaaaattgataaaggctttgaactcgcgttttccctgaagtacacgccttttgccaagtag

SEQ ID NO: 44952 - protein, 204 aa, Unknown
  Obtained from environmental sample
  misc_feature (1)..(204): Xaa is any amino acid
MDVLNLPMKKTHWMEGLYPDAIGFQAGTEFSFPVKGGYWEFGLEGVYTYPYLYIMWGKGWSFYKEVPELDTMEPPLRYWTGTPFGPDTIAGTLWAGFRSSTNWYGGFSFTFSAQGERSDLYIFEKFDDDKIRPTHLVYDVTVPPSGTPVYTYTAALRGEYSPNKWLSLTLQPGYRVTVNTGHIEDKIDKGFELAFSLKYTPFAK

SEQ ID NO: 44953 - DNA, 609 bp, Unknown
  Obtained from environmental sample
  misc_feature (1)..(609): n is a, c, g, or t
atgaattccagatttttagaagatgacgacgacgatgatgacgatgagaaagaaggcaaaggttttattcccgacccgcttgccgggaaaatgcttaaaacccggacaattttaatctccggaacaatcaataaagaactggctgaaaaaaccattcgccaactgcttcttctggaagacatgagcggagagcctatccgtgtttttatcgattctcccggcggagacgcggacgccggttatgctatatttgacatgctccgttttgtaaaaccggatatttggactataggcatggggcttgtcgcaagcgcggcggccatcattcagcttgcggcgccgaaggacaggcgcgtgggcctgcccaacagccactaccttattcaccagccgctttccggaatacgcggcgtcgccaccgatatcgagatacacgcgaaagaacttgaaaaactgcgcgaaaaaatcaaccgcctgatttccgacgaaaccggcaatccctttgaacaagttgaaaaagacaccgaccgcgactactggatgaacgcgtccgaggcggttaagtacgggttgatcagcaggatagttaccaacagaagcgagatttga

SEQ ID NO: 44954 - protein, 202 aa, Unknown
  Obtained from environmental sample
  DOMAIN (19)...(199): Clp protease
  misc_feature (1)..(202): Xaa is any amino acid
MNSRFLEDDDDDDDDEKEGKGFIPDPLAGKMLKTRTILISGTINKELAEKTIRQLLLLEDMSGEPIRVFIDSPGGDADAGYAIFDMLRFVKPDIWTIGMGLVASAAAIIQLAAPKDRRVGLPNSHYLIHQPLSGIRGVATDIEIHAKELEKLREKINRLISDETGNPFEQVEKDTDRDYWMNASEAVKYGLISRIVTNRSEI

SEQ ID NO: 44955 - DNA, 756 bp, Unknown
  Obtained from environmental sample
  misc_feature (1)..(756): n is a, c, g, or t
gtggtggatccaagtatcaatctgcgccttaccataagcctcagggccaatggcgagtattcctaccggatgataaacccggtcttgttctatgccaatgtgtgcggcaatgtggaggaaaattacactcgggacaaaatcgacagccagcttaaaagcgaaatcataaccgtgttgggcccctctctggcaaaactgggtaagggcatagaataccatgaaatctccttccaaaccgacaagctggcggagatcctcaacgaggcccttagccccaaatggaaagaaggccggggtatagaaattgtcaattttggaattacctgtaccgcttctccggaagatgaaaaccgcattaagcagcttcagaccgcggccgtaatgagagatccgaccatggctgccgcatccctggtaaacgcccagggcgatgccatgcgtactgccgcaggaaataccgcgggcgcgatgactggttttatgggcatgggtatggccggccaagccggcggcatgaacccccaggcattattccagatggggggccctccggcctccgcccaagctcaggctgcgccgccgcccgcttccgcaaagccccaaggggcaggctggacctgttcctgcgggcacgggggaaataccggcnagttctgcgccgagtgcggtaaaccgatgcccgtggcgccagctacttggacgtgttcctgcggccatgggggaaatacccgtaagttctgtgaggagtgcgggtaa

SEQ ID NO: 44956 - protein, 251 aa, Unknown
  Obtained from environmental sample
  misc_feature (1)..(251): Xaa is any amino acid
MVDPSINLRLTISLRANGEYSYRMINPVLFYANVCGNVEENYTRDKIDSQLKSEIITVLGPSLAKLGKGIEYHEISFQTDKLAEILNEALSPKWKEGRGIEIVNFGITCTASPEDENRIKQLQTAAVMRDPTMAAASLVNAQGDAMRTAAGNTAGAMTGFMGMGMAGQAGGMNPQALFQMGGPPASAQAQAAPPPASAKPQGAGWTCSCGHGGNTGXFCAECGKPMPVAPATWTCSCGHGGNTRKFCEECG

SEQ ID NO: 44957 - DNA, 384 bp, Unknown
  Obtained from environmental sample
  misc_feature (1)..(384): n is a, c, g, or t
atgggcagaccatcgctatggtggttttgcagccgtagagctccgcgccgcaggaggggcaggcgccggtggtcaggtcgtccgattcggggtcttcccaaacctcgccgtcccatttggtttcccaaacggtctcctgcggttgttcagcggccgcggcggcgcagtcgaaagtatcttcgtcgccgagcgcgccgacgtttgtttccccggccgcggcggcgcaatcgaacgtatcttctccgccggcggcggcagcgcagtcgaagagatcttcgccgccaccggcgcagtcgaaaatatcttcgttgccccactgatatgacgcaagcgccgcgcgcccgaacgtcgctccgcaggactggcacttcgccgtctgcgtag

SEQ ID NO: 44958 - protein, 127 aa, Unknown
  Obtained from environmental sample
  misc_feature (1)..(127): Xaa is any amino acid
MGRPSLWWFCSRRAPRRRRGRRRWSGRPIRGLPKPRRPIWFPKRSPAVVQRPRRRSRKYLRRRARRRLFPRPRRRNRTYLLRRRRQRSRRDLRRHRRSRKYLRCPTDMTQAPRARTSLRRTGTSPSA

SEQ ID NO: 44959 - DNA, 741 bp, Unknown
  Obtained from environmental sample
  misc_feature (1)..(741): n is a, c, g, or t
ttgagaacctcaaaaaaattatccgcggcggagaatttacaggtactactattggctgaattaacgcttgcctatctggagagtctcagcaccggcgaacttgttgaacttgccgccgcaaaaggtctggatattccgcccggccttgagcgtgttttcattgttgaagaactgctctgtcttgataatgatattgacgataaagccgtggaaacggatgaggcggaaatccatgattcacatcaccatgaatttgcgagttttatggttcttcccccagcagtacccatgttacgtttattgacgttcttatccgcgacccccttgtgggcgtttgttttttgggaaataaaagccaatgaccgcagcctctatgaaaacgccgctgattttaagggttactgcctgcgggtaactcccctcaatgaagacagccttcagccggatgaggcggcttcttttatggtgacggtgaattccggcgattccgcccggtatctgggatttccaccggaagacgggcggtgttttaaggttgagttgtgtatgctgaatcgtgaaggctgcgtggtgcttgcggagtcccgcccgttcaggctgccgcgcctgatcaatctgaggccggacaaagacttgcaggcagagtaccgtaattccctggcaatattgtccggaattgaccgcttttcgctggttcaaagcgaagaccgccaactccgcccacgggatagtaaagggtag

SEQ ID NO: 44960 - protein, 246 aa, Unknown
  Obtained from environmental sample
  misc_feature (1)..(246): Xaa is any amino acid
MRTSKKLSAAENLQVLLLAELTLAYLESLSTGELVELAAAKGLDIPPGLERVFIVEELLCLDNDIDDKAVETDEAEIHDSHHHEFASFMVLPPAVPMLRLLTFLSATPLWAFVFWEIKANDRSLYENAADFKGYCLRVTPLNEDSLQPDEAASFMVTVNSGDSARYLGFPPEDGRCFKVELCMLNREGCVVLAESRPFRLPRLINLRPDKDLQAEYRNSLAILSGIDRFSLVQSEDRQLRPRDSKG

SEQ ID NO: 44961 - DNA, 459 bp, Unknown
  Obtained from environmental sample
  misc_feature (1)..(459): n is a, c, g, or t
atggcgacgcggctcaatgcccaactggtcaaggcggttatggccgaatggtgctgccaggatgtagtcactgaccccacccgcgcggaaccccttaaagggaaggtgctggtggccgccggctggaagccgggtttttcttcggataacgacgcggtactgcttgccgaacggtttaacgcgaaaaccgtcattaatctttccaacattgaaaaggtctacaccgccgatcccaaaaaagacccgtccgcccggccgctggaccgtatttcatgggcggatttccgcgcaatggtgggcgacgaatgggttcccggcaaaaatgttccctttgatcccattgccagccgtcacgcggaaaaaattggcttgaaggtgatatgcgccgcggggagggatattgagaacctcaaaaaaattatccgcggcggagaatttacaggtactactattggctga

SEQ ID NO: 44962 - protein, 152 aa, Unknown
  Obtained from environmental sample
  misc_feature (1)..(152): Xaa is any amino acid
MATRLNAQLVKAVMAEWCCQDVVTDPTRAEPLKGKVLVAAGWKPGFSSDNDAVLLAERFNAKTVINLSNIEKVYTADPKKDPSARPLDRISWADFRAMVGDEWVPGKNVPFDPIASRHAEKIGLKVICAAGRDIENLKKIIRGGEFTGTTIG

SEQ ID NO: 44963 - DNA, 1701 bp, Unknown
  Obtained from environmental sample
  misc_feature (1)..(1701): n is a, c, g, or t
ttgtcgcatatgagccacgaagtgcgcacgccgatgaacgctattttaggaattaccgaaattaatttgcagaaggagtctcttccgcctgatatacaggaagcgttcggcagaatctacaattccggatatttgctgcttggcattattaacgacatactggacttgtccaaaatagaagcgggcaaactggaacttgtgccggtcaattacgacgtctcaagccttatcaacgatgtcgttcatcttaatgttatacggtttgacaacaaaccgattgtatttgatcttaaggcagatgaaaaaattccgttaactctgtcaggcgacgaactgcgtattaaacaaattcttaataaccttctttccaacgcgttcaagtatacgaactcaggcaaggtttcactgtcaattgacgttgaacacagctggaatgcggcatgggtaacgctcgtgttccgcgtgagtgataccggtcagggtatgacaagcaaacagttggaaaaactgtttgacgaatatactcgttttaatcaggaagccaaccgcacaaccgagggcgcggggctgggaatgaatataacgaaacggcttgtcgagttaatgaacggggatatttccgtggaaagcgagataggcaaaggttcggtattcacggtacgtctgcctcagagaattgtcgacacaggagtattgggaaaagaaatagtagaaaacctcatgcaattccgtataggcaagatgacgcanatgaataaagcgccgcagattgtccgcgagtatatgccttacggaaaagttcttatagtagatgatgtggaaacgaatctgtatgtcgcaaaaggattaatggccccttacggttttgggattgataccgcctcgggtggtctcgaagcggttgacaaaattaagagcggagaggtctatgacatcatctttatggatcactttatgcctataatggacggtatagaagcgacaaaaataattcgcagtctggggtatgatcatcctatcattgccctaacggccaacgccctaacagggcaggcggagatgtttatggagaatgggtttgacggctttatttccaaaccgattgatatacgccagttaaacttttcgttgaataaactaatacgggacaaacagccgtctgaggtacttgaagcggcgcggcggcaagccctcaagttcaataaatctgccgccggtgaattagagccaatcttagactcagaattggcggagattttcacgagagacgctgaaatagcccttgagcggctggacaccatacactcaaatgcgtaccgtagagccgatgatatcaggatgtttgtcatcactgtccacgcgatgaaaagcgcccttgcgaacatcggtgaagccgagctttctgctgccgcgtacaaattagaacaagcgggacgtatggaaaatattaacgtaatgaggtcagaaaccccggcgtttctggaagcgcttcgcggagtggtcgaaaaaaccaaagtaaaagagggcgatagtgaagcaatacaggaagattccgagaatgaacgggcctatttgagagaaaaactacttgtcattcagaaagcctgcgaggggtatgatggaacaaccgctaatacaatattggccgaactggaacaaaaaaaatgggctggtctaccagcgaatgctcggccattctga

SEQ ID NO: 44964 - protein, 566 aa, Unknown
  Obtained from environmental sample
  DOMAIN (1)...(62): His Kinase A (phosphoacceptor) domain
  misc_feature (1)..(566): Xaa is any amino acid
MSHMSHEVRTPMNAILGITEINLQKESLPPDIQEAFGRIYNSGYLLLGIINDILDLSKIEAGKLELVPVNYDVSSLINDVVHLNVIRFDNKPIVFDLKADEKIPLTLSGDELRIKQILNNLLSNAFKYTNSGKVSLSIDVEHSWNAAWVTLVFRVSDTGQGMTSKQLEKLFDEYTRFNQEANRTTEGAGLGMNITKRLVELMNGDISVESEIGKGSVFTVRLPQRIVDTGVLGKEIVENLMQFRIGKMTXMNKAPQIVREYMPYGKVLIVDDVETNLYVAKGLMAPYGFGIDTASGGLEAVDKIKSGEVYDIIFMDHFMPIMDGIEATKIIRSLGYDHPIIALTANALTGQAEMFMENGFDGFISKPIDIRQLNFSLNKLIRDKQPSEVLEAARRQALKFNKSAAGELEPILDSELAEIFTRDAEIALERLDTIHSNAYRRADDIRMFVITVHAMKSALANIGEAELSAAAYKLEQAGRMENINVMRSETPAFLEALRGVVEKTKVKEGDSEAIQEDSENERAYLREKLLVIQKACEGYDGTTANTILAELEQKKWAGLPANARPF

SEQ ID NO: 44965 - DNA, 1485 bp, Unknown
  Obtained from environmental sample
  misc_feature (1)..(1485): n is a, c, g, or t
ttgtacgcggtggtgatgcacagcttcaggggcggggcaataaactatccgcttgtgctggccctggtccaggaactggaagaaacgctgaagctcagggtggaatcgttttccaatgacgattcgcttctcctgttaataccccgtctgggtatcgaaggaaatgtaaagcagattgaaaatatttttcgcaatgccgttacggagcttaacaaaagcggcggaggcggtctttgccggggggagaggctgttcagaaaccggctggaggcgtccggcattttcggcgcgagtttccgcgaggccgcggaaaggagcctccttttgcccaaagcgggttttgggaaacgaaccccgctatggatcacaaggcagcgttccaggcggctttttgacgcggtacgcggcgaagaaggttttccggttaccgccgaagcgtggaggagctgtctggtcgatttattcgacatggaaggtttccgcgagttgttaggctcaattaatgacaacagcgtcgctttgtcttttttttacagcagtctccccagccccttttcgcgtgacatggtacggcaggaaaccaataccctgatttatgaatacgatgaacgaaaagatatacagggctcgggagcgactctttccgacaaggttattcaggaagccctgggcgacgcttctcttcgtcctgttataaaacctgaacttgcccacggcttcagtgcccggcttcgcagggaagagccgggctgggcgcctgatgaccagttgtccctgtacgagtgggttaaagagcggatcgctatccccctggatgaatgggaaaccctgtgcgcgtcgctgcccgaagatctcaaacagaatttctcccaaatacagtccaacgaccggctggtaatagttaagcgaaacgacgatgccattccttcgatggttcaccgagaatgggaagaggcatggcgaagcgaacctttgcccctgctcggcccctggctgcgttatgaaggcccaaccgttttgccgcgcattgcagaggttttcggtgtaagccttgccgaagccgaggatgccgttaacgcccttgccgaagttgatgaggtagtctgtgatgtgcgtcttgccggagcggtttccccgctcatctgcgacagcagaaaccttgagatgctgctgcgcctttcccggagaaaacagcgccctgagatcagcgaaaggcccgcagcccttttggttcctttccttgccctgcgacaatttacaatgagcaatgcaagagaacagagaacagtgaacagtgaacagagagtaaagctaattcagagcaacgaagctgctattaaaaagttatatgcttgcagcgcgcctgttaaattgtgggaaaccgaatttttcaccgcgcgttgcgcctattacagtccggaaattattaataacgaaattaatgaaggccgcctggtctggtatggcgcggcaaggaaaaaatag

SEQ ID NO: 44966 - protein, 494 aa, Unknown
  Obtained from environmental sample
  DOMAIN (1)...(186): DEAD/H associated
  misc_feature (1)..(494): Xaa is any amino acid
MYAVVMHSFRGGAINYPLVLALVQELEETLKLRVESFSNDDSLLLLIPRLGIEGNVKQIENIFRNAVTELNKSGGGGLCRGERLFRNRLEASGIFGASFREAAERSLLLPKAGFGKRTPLWITRQRSRRLFDAVRGEEGFPVTAEAWRSCLVDLFDMEGFRELLGSINDNSVALSFFYSSLPSPFSRDMVRQETNTLIYEYDERKDIQGSGATLSDKVIQEALGDASLRPVIKPELAHGFSARLRREEPGWAPDDQLSLYEWVKERIAIPLDEWETLCASLPEDLKQNFSQIQSNDRLVIVKRNDDAIPSMVHREWEEAWRSEPLPLLGPWLRYEGPTVLPRIAEVFGVSLAEAEDAVNALAEVDEVVCDVRLAGAVSPLICDSRNLEMLLRLSRRKQRPEISERPAALLVPFLALRQFTMSNAREQRTVNSEQRVKLIQSNEAAIKKLYACSAPVKLWETEFFTARCAYYSPEIINNEINEGRLVWYGAARKK

SEQ ID NO: 44967 - DNA, 678 bp, Unknown
  Obtained from environmental sample
  misc_feature (1)..(678): n is a, c, g, or t
ttgaggcttatgaaagacaactttctctccactgtttcgcatgagcttaaaaccccgctgactgccataaaaatgtattccgagatgatgcacagcgggcgtgttcaaaaaagcgaaaaaataatttcacattcaggcgttatgctaaaagaggcaaaccgcttggaaagccttatagaagacattttaaactataccagaatggaaagcggcaaaaagatttttagaatggaaagcctagctctctcggaatgtgtaaataaggtttgcgattctatgaatgttatagcaagtagcaagggtttggagatgaaaagggaaatagcggataattgcattataatgggagattacccttccatttacagccttgttcagaatttgatagacaacgctattaaatacaccaaagagggatatgtttttattaaattacaacaaggtgagcagggaatatcgttttcagttgaagacacaggcagaggtattcctatagatgaacaaaagaatatatttgaaggtttttacaggataggggatgaatccacaagggaaacgcgaggctccggtttgggtctcgctattgtaaaacgcacagccgatgcccataaagctgcaattcttttgaaaagcacgccgggcaaaggctcaacgtttacggttgtttttagaacttaa

SEQ ID NO: 44968 - protein, 225 aa, Unknown
  Obtained from environmental sample
  DOMAIN (4)...(71): His Kinase A (phosphoacceptor) domain
  misc_feature (1)..(225): Xaa is any amino acid
MRLMKDNFLSTVSHELKTPLTAIKMYSEMMHSGRVQKSEKIISHSGVMLKEANRLESLIEDILNYTRMESGKKIFRMESLALSECVNKVCDSMNVIASSKGLEMKREIADNCIIMGDYPSIYSLVQNLIDNAIKYTKEGYVFIKLQQGEQGISFSVEDTGRGIPIDEQKNIFEGFYRIGDESTRETRGSGLGLAIVKRTADAHKAAILLKSTPGKGSTFTVVFRT

SEQ ID NO: 44969 - DNA, 852 bp, Unknown
  Obtained from environmental sample
  misc_feature (1)..(852): n is a, c, g, or t
ttggccgtgcgtagtatatacatcgtcattgaaggcgcgaaagtagtggcgaacgtaaaaaccggccttctcggaaaactgcgcgataccaacaattttgtaaatttacgtttttgttttaaacctgtaggagaaacaaatacggttacgttttttgtcgcgggccgcgtcctttcaagcgctccctacggcaattcgcctgatataaatatttttaacatccagtttacaaacaggccgcccgatgattttatcgaaattatggggcgtcttttggacgcgactgtaaattcatcaaaacgcaaagacgacagaatacaaataaacgcggacaatatccgcaagttaaacttaatgtcaagcgaaagcaccgtttttatagataatgttcccagacgctgtatattaagggatttgtctttttcgggttctaaaataataatgatgggaataacaaaattcctccttgataaagaagccatattgcgagttgattttaacgatccaagagaatcattcgcgattaagggaaaatttgtccgagccgaaaatgttgaaggcaaaaaagagatggtcgcacttggattgttttttactgaaaacgctgttccaatgggttttaaactgcggattaacgatttccttaccgcgataagggcggattaccgcagcataactgaagaagaacttgaggctcaagcaacagtcaaagcctcctccaaaccggccgcagctcctgccgccggggcaaaaccggccgccgctcctgctgccggagcaaaacccgccgcgcctgccgccgcaagacctgccgcgcccgccgcagccaaaccggcggcgccctcaaagtaa

SEQ ID NO: 44970 - protein, 283 aa, Unknown
  Obtained from environmental sample
  DOMAIN (99)...(217): PilZ domain
  misc_feature (1)..(283): Xaa is any amino acid
MAVRSIYIVIEGAKVVANVKTGLLGKLRDTNNFVNLRFCFKPVGETNTVTFFVAGRVLSSAPYGNSPDINIFNIQFTNRPPDDFIEIMGRLLDATVNSSKRKDDRIQINADNIRKLNLMSSESTVFIDNVPRRCILRDLSFSGSKIIMMGITKFLLDKEAILRVDFNDPRESFAIKGKFVRAENVEGKKEMVALGLFFTENAVPMGFKLRINDFLTAIRADYRSITEEELEAQATVKASSKPAAAPAAGAKPAAAPAAGAKPAAPAAARPAAPAAAKPAAPSK

SEQ ID NO: 44971 - DNA, 951 bp, Unknown
  Obtained from environmental sample
  misc_feature (1)..(951): n is a, c, g, or t
gtgagggttctgtttgcagcaagccccgccattgccatacccgctttagagtcgttgaccaaaacagaaggaatagaattatcaggcgtgcttacaaaccccgatagtccaaaaggcagacatggcgcgttcgcgcctacggaaataggggaagcggcggcagaaatttgcgctaatgttcccgtgttaaaaccggttaaacttgacgccgaagcgcgggaacaggtaagttccctgaagccggacttgcttgttactttcgcttacggaaaaattttcggccctaaatttttggcgttgtttccgcttggcgggataaatattcatcccagcctgttgcctaaatacagggggccctctcctatacaagcggctatcttaaaccgcgacacggaaacggggattaccgtgcagactctggcgaaggagatggacagcggggatattctggcgagtgaaaatttgcagctaacaggttatgagacggcggaatccttaagcgaaataatggcgcaaaaagcggctgttcttctgccgcaggttttacgggaaattgcttcgggaaccgcccgcccacagccgcaggatcacggcatggcaagctattgttccattatcacaagggacaacgcccttatagactggaaaaagagcgcggcggaaattgaagccgaaacgcgggcttttgatccgtggccgcttagccggactattcacaatgggcgggaattatatatattaaaagcagacgtttataaaggcggggagcaaaacggaaaaatccctccggggcaggctgtgggaatagacaaagaggccggtatactggtacaaacaggagaggggattctctgtattacggaattgcagtatcagggaaaaaaagcgcttttctggcgggattttttaaatggagcgcgcgattttttaggcgcgcaattaggcagctaa

SEQ ID NO: 44972 - protein, 316 aa, Unknown
  Obtained from environmental sample
  SIGNAL (1)...(20)
  DOMAIN (1)...(182): Formyl transferase
  misc_feature (1)..(316): Xaa is any amino acid
MRVLFAASPAIAIPALESLTKTEGIELSGVLTNPDSPKGRHGAFAPTEIGEAAAEICANVPVLKPVKLDAEAREQVSSLKPDLLVTFAYGKIFGPKFLALFPLGGINIHPSLLPKYRGPSPIQAAILNRDTETGITVQTLAKEMDSGDILASENLQLTGYETAESLSEIMAQKAAVLLPQVLREIASGTARPQPQDHGMASYCSIITRDNALIDWKKSAAEIEAETRAFDPWPLSRTIHNGRELYILKADVYKGGEQNGKIPPGQAVGIDKEAGILVQTGEGILCITELQYQGKKALFWRDFLNGARDFLGAQLGS

SEQ ID NO: 44973 - DNA, 507 bp, Unknown
  Obtained from environmental sample
  misc_feature (1)..(507): n is a, c, g, or t
ttgctaggccaaaaagcgaaaaaaatggataaaattgacaatgaattaaaggacacgccaaaacagatgtttgaaatcctcaaacagataaaaggagtggggatagccggcccccagattggactgatgaagcgtatatttgttgtccatatcgagggcgatgaagagcgtgtatttattaatccttcaattctggaaacgtctcaggaaacggcaaaatatgaggaaggctgtctttccgttcccggtatttatgttgatgtggtccgttccgagtctgtaaagattcaggcgtggaacgagaaaggcaaaccttttacaatggaagcaaacgggcttctggccagggttattctgcacgagtacgatcatcttgaagggattctatttttggacaggttgcctgatttaaagagagacaaacttattgaaaaatatgagaaggccgtgattaagggagagaaaataaagagaaaaaaagccaagggagaaaaaataccaaagtga

SEQ ID NO: 44974 - protein, 168 aa, Unknown
  Obtained from environmental sample
  DOMAIN (1)...(140): Polypeptide deformylase
  misc_feature (1)..(168): Xaa is any amino acid
MLGQKAKKMDKIDNELKDTPKQMFEILKQIKGVGIAGPQIGLMKRIFVVHIEGDEERVFINPSILETSQETAKYEEGCLSVPGIYVDVVRSESVKIQAWNEKGKPFTMEANGLLARVILHEYDHLEGILFLDRLPDLKRDKLIEKYEKAVIKGEKIKRKKAKGEKIPK

SEQ ID NO: 44975 - DNA, 594 bp, Unknown
  Obtained from environmental sample
  misc_feature (1)..(594): n is a, c, g, or t
ttgtccagcacggcaatatgcaaaaaccataaccggtaccatgccatcacgatacttgacataccgccaaaaatacgccagaaatatttatacaatattggaattactgtgggagaaagcgtggagaaatacattcagtcctttataaaggtttgcgaatcagttttccgtgatttctgcaaaactgaagtcaaagccggcaaggtattctatatgacaaaagaaaaaagggatatgggctgggacatctcgggaatcattggtctttccggccaaatatcaggggctgtcgctttatccatgaaggacaatgtagcttttcaggttacaaagaccctgacaggcgttgaacataatacttttgacgccgatgttaccgacgcgataggcgaaataatcaatataataaccggaaatatcaaaaaagaatttgaagcgtcttacagaacggctatttccatcccatcaattgtgcaaggtaaagaccacaaattaatatggccttccaaaaatataagaataatttgtatccctttcattattttctcaggcgaagagctttttatttccatcgcggttgatgaagttaaatga

SEQ ID NO: 44976 - protein, 197 aa, Unknown
  Obtained from environmental sample
  misc_feature (1)..(197): Xaa is any amino acid
MSSTAICKNHNRYHAITILDIPPKIRQKYLYNIGITVGESVEKYIQSFIKVCESVFRDFCKTEVKAGKVFYMTKEKRDMGWDISGIIGLSGQISGAVALSMKDNVAFQVTKTLTGVEHNTFDADVTDAIGEIINIITGNIKKEFEASYRTAISIPSIVQGKDHKLIWPSKNIRIICIPFIIFSGEELFISIAVDEVK

SEQ ID NO: 44977 - DNA, 735 bp, Unknown
  Obtained from environmental sample
  misc_feature (1)..(735): n is a, c, g, or t
atgtcaatgttcgacaaggcgttgaagtattcatacgccgaacaaaaaagagaacgccacaagctgctgcgtgtcatcatgacattcctgttcctgttcctgctgtttaccgtaataaacgctcttatcgtttcggtctgggtactggataatgacacaatggaacccgggatgcgggcgggggaccgccttattgtttattcgtctttcctgccatttattatttcaaaaattgacaagaccggagggtcgccgcctttcaaacgcggaaccataatattaattgacacaaggcgcggtgacaaccggaattggcccgtaaaaacggccgacagttttgtccggtttgtcacggcgcagcaaaaacaaattcttaacccggacgagcatctttatataaaacggatcatcgcgattcccggcgacgagatcagcatgaacaattttgttttcagggtgaagccggcgggcaatatgtatgtctttaccgaatttgaactttcagaccacccctattacccgaacataccccaggttccggccctttgggatgagacgcttcccttttcaggttatatggacagcataacgctcggtcccggtgagtatttcgttgtttcagatgatcggagcaattcgggcgactcacgcacatgggggccggttaacgcaaaaataatactgggaaaacccgtattccggttttggcccatccagcgaatcggccgcccctag

SEQ ID NO: 44978 - protein, 244 aa, Unknown
  Obtained from environmental sample
  misc_feature (1)..(244): Xaa is any amino acid
MSMFDKALKYSYAEQKRERHKLLRVIMTFLFLFLLFTVINALIVSVWVLDNDTMEPGMRAGDRLIVYSSFLPFIISKIDKTGGSPPFKRGTIILIDTRRGDNRNWPVKTADSFVRFVTAQQKQILNPDEHLYIKRIIAIPGDEISMNNFVFRVKPAGNMYVFTEFELSDHPYYPNIPQVPALWDETLPFSGYMDSITLGPGEYFVVSDDRSNSGDSRTWGPVNAKIILGKPVFRFWPIQRIGRP

SEQ ID NO: 44979 - DNA, 831 bp, Unknown
  Obtained from environmental sample
  misc_feature (1)..(831): n is a, c, g, or t
atgcccgcgtcgctgtatatccatgttcctttctgttcgcaaaaatgcgattactgcgatttctattccgtccccatagcctgttcagacgcacagcccctgatggacccgtatattgaagctgtgttatgcgacatagaagaccagatcagactgttcaatgtaaacagcataccaagcgtctatataggcggcgggacgccttccgtacttggtgcagagcgcataacacgttttttgacttcaattaaaacgctgttaacaagcattgaaacgcctccgcttgaattcaccgtggaggcaaaccccgaatcaactgacgaggctttcatgcaagcctgtgttgaaggcggcgtcagccggataagccttggcgtacagagtttttgtgaagcgtcacggaaagctgtgcgcagaaatggcggcatcaggcggatcgaagacgctcttgcccttgccgcacggtattttccgctggctttttccgccgaccttatcaccggcctcccctttcaaacaaacgacgttgtctgtcaggacatcaaacgtctgctgtctttcccggttgccccatgttccctgtacagccttatccttgagccgcaaacgcctctcggcgcgagagccgccgccgtttccgcctccctgccctcgttagacgacgcgacccgttttggatcgcgggacgggacctgctggaaaacgccggttaccgccaatacgaggcgtccaatttctgtctgccggacaaaacctgcgcccacaacatacgctactggagaatggaaaactggatgggcgcgggtcccgcggcatcgggaacgatcataa

SEQ ID NO: 44980 - protein, 276 aa, Unknown
  Obtained from environmental sample
  DOMAIN (6)...(184): Radical SAM superfamily
  misc_feature (1)..(276): Xaa is any amino acid
MPASLYIHVPFCSQKCDYCDFYSVPIACSDAQPLMDPYIEAVLCDIEDQIRLFNVNSIPSVYIGGGTPSVLGAERITRFLTSIKTLLTSIETPPLEFTVEANPESTDEAFMQACVEGGVSRISLGVQSFCEASRKAVRRNGGIRRIEDALALAARYFPLAFSADLITGLPFQTNDVVCQDIKRLLSFPVAPCSLYSLILEPQTPLGARAAAVSASLPSLDDATRFGSRDGTCWKTPVTANTRRPISVCRTKPAPTTYATGEWKTGWARVPRHRERS

SEQ ID NO: 44981 - DNA, 399 bp, Unknown
  Obtained from environmental sample
  misc_feature (1)..(399): n is a, c, g, or t
atggaaaactggatgggcgcgggtcccgcggcatcgggaacgatcataaacgacgaaacaggcaccggaaaaaggttcacttatccggctgacattgagagttacattaagatgccggccccccgcatcaaccacgccgttacggaaaaattaggcggaacggacctgattaaggaaacactgctcatggggttcaggtattgcgaaggacctgacaacaggcttttcagacagcgctttggccgtgggattgaagacataatccccaaaaccatcgccctctggagcgaacggaatttttttcagacggcgctaaagccgtcaaaacagggcatgctttttgttaacggcttcctgcgcgacgcatttgacgagttaaaagtgaagagtgaaaagtga

SEQ ID NO: 44982 - protein, 132 aa, Unknown
  Obtained from environmental sample
  DOMAIN (2)...(113): HemN C-terminal region
  misc_feature (1)..(132): Xaa is any amino acid
MENWMGAGPAASGTIINDETGTGKRFTYPADIESYIKMPAPRINHAVTEKLGGTDLIKETLLMGFRYCEGPDNRLFRQRFGRGIEDIIPKTIALWSERNFFQTALKPSKQGMLFVNGFLRDAFDELKVKSEK

SEQ ID NO: 44983 - DNA, 1263 bp, Unknown
  Obtained from environmental sample
  misc_feature (1)..(1263): n is a, c, g, or t
atggaggaacaaatggggttagacatgaaaaccagaaaaaaaatttgtgcgaggatttgcaggcgctaccaaaaagcgggcaagaaggacaaggctaaaatccttgacgagtatgggccaatgcttgagtataaccgggattacttggcccacctgttagccaactggggaaaaacagtgtatgccacttgtggcgagaaacctgtcaaatgtatcgccaaaccgcccttaaaagcccgcgacaaggcccctaaaagcaaaaaaacaggcaggccggaaaagtataacaaacccttcgccgctgtcattttaagcctgtgggaatttttcgactttcagtgcgggaagctgttagcccccctgctaaaggggatggtcggtttttttgttcaagagtttaatttgagcgaagacatacaggcgctgcttttgtctgtcagcccggcaactatcgaccggaagatcaggaaccagaanaaaagatatcgccttaaaggcatacatactaaaaagccgggaacgctccttaagagccagattccgatacgggtttgttttggccgggacgagaagcgcccggggtttttcgagacggataccgtcagccactgcggagcgaacgcgtccggccagttctgccagacattgacgctcaccgacgtgggttcagggtggaccgaggaatgcgccttgttgaatagcgcccatcgctgggtcaagaagcgcattgaaagcacccgggacagcctcccgttccccatgctcggtattgacagcgacaacggcggggagttcatcaaccaccaactccttgactggtgtatccagaacaacatcaagttcaccaggggccgcccctaccggaaaaatgacaactgcttcgtcgagcagaaaaacggagacgtggtacggaaaactgtcggatatgcccgttttgagggtcaaaacgcttgtgacgcgctcgccgaggtctaccgcttcctgaacccccttttgaattactggtatcctactcttcgtcttattgccaaagaaaaactcccctccggcaggtataaaaaaatttacgaaaaagatcccaaaacgccctgccagcgtcttcttgaatctcctgatgtcagtgaggaatgcaaagaggagcttcgccggagaaaggctgctttgaatcctgttgagttgaaacgtgctttggatgaagcaagggatcgtctcttgaaactttctgtcatagagtctaatatcccttccagcaaggtttcttga

SEQ ID NO: 44984 - protein, 420 aa, Unknown
  Obtained from environmental sample
  DOMAIN (188)...(368): Integrase core domain
  misc_feature (1)..(420): Xaa is any amino acid
MEEQMGLDMKTRKKICARICRRYQKAGKKDKAKILDEYGPMLEYNRDYLAHLLANWGKTVYATCGEKPVKCIAKPPLKARDKAPKSKKTGRPEKYNKPFAAVILSLWEFFDFQCGKLLAPLLKGMVGFFVQEFNLSEDIQALLLSVSPATIDRKIRNQXKRYRLKGIHTKKPGTLLKSQIPIRVCFGRDEKRPGFFETDTVSHCGANASGQFCQTLTLTDVGSGWTEECALLNSAHRWVKKRIESTRDSLPFPMLGIDSDNGGEFINHQLLDWCIQNNIKFTRGRPYRKNDNCFVEQKNGDVVRKTVGYARFEGQNACDALAEVYRFLNPLLNYWYPTLRLIAKEKLPSGRYKKIYEKDPKTPCQRLLESPDVSEECKEELRRRKAALNPVELKRALDEARDRLLKLSVIESNIPSSKVS

SEQ ID NO: 44985 - DNA, 549 bp, Unknown
  Obtained from environmental sample
  misc_feature (1)..(549): n is a, c, g, or t
atggtacctccaggtcgggacaggctttcagggcgtgttgaagttgatgaaacatatttcggagccccagaaaagggtggaaaacgtggtcgaggtactgaaaacgaggtattagctgctattgcggtagaaacgaacgaaaagattgtaggccggattcgtgtcagtatgctgacagatgcatctgaagacagcctccaaaaattcatacaagaaagtgtggaatctgggagtacagtagtaactgatggatggcttggatatagtggtcttgaagcaattggatataatcatgaaataatagttcatcaggatttagatgctttacttccatatgtccatactgttatttccttgatgaaacggtggattataggaacgcttcaaggttcttgttcaagagaacaccttcaatattattttgatgagtatacctttcgtttcaaccgtcgaaaatcaaaaagtagaggacagttgttttatcgcttgcttcaaaacgctgttcaaatagaaccggtaatttacaaaaatattattgctaaacattaa

SEQ ID NO: 44986 - protein, 182 aa, Unknown
  Obtained from environmental sample
  misc_feature (1)..(182): Xaa is any amino acid
MVPPGRDRLSGRVEVDETYFGAPEKGGKRGRGTENEVLAAIAVETNEKIVGRIRVSMLTDASEDSLQKFIQESVESGSTVVTDGWLGYSGLEAIGYNHEIIVHQDLDALLPYVHTVISLMKRWIIGTLQGSCSREHLQYYFDEYTFRFNRRKSKSRGQLFYRLLQNAVQIEPVIYKNIIAKH

SEQ ID NO: 44987 - DNA, 450 bp, Unknown
  Obtained from environmental sample
  misc_feature (1)..(450): n is a, c, g, or t
atgagcttgacgctggaagccatggacgcgctgatgtcttattctttccccggcaatgtccgcgagctggaaaacctcatggagcgattcgccgccttgggttcgggcggcatcctcgacagggacgtgttccccgacaatatcctccaagagacagaaagcaaaaggcgcgaccatcctgtaagcgtagcaactgccagccgtgtggatgaatgcgaagcggggattcccagcggcgggctggacttggacgcgtacctaaaatccaccaagggctattttgtgcaaaaagcgcttgagctttctggcgggaataagacaaaggccgcccattttctgggcatgggctacaggcccttgaagtacttcctggaagaagcggggggcgcagacgcgctgcccaaggagcatcccgcgccacaggattttccgcttccaaaatctccctaa

SEQ ID NO: 44988 - protein, 149 aa, Unknown
  Obtained from environmental sample
  misc_feature (1)..(149): Xaa is any amino acid
MSLTLEAMDALMSYSFPGNVRELENLMERFAALGSGGILDRDVFPDNILQETESKRRDHPVSVATASRVDECEAGIPSGGLDLDAYLKSTKGYFVQKALELSGGNKTKAAHFLGMGYRPLKYFLEEAGGADALPKEHPAPQDFPLPKSP

SEQ ID NO: 44989 - DNA, 750 bp, Unknown
  Obtained from environmental sample
  misc_feature (1)..(750): n is a, c, g, or t
gtggaaaaaagtctctttggcaccgtcacccacggagaggccgcttatatccacaacttgcggactccntggtacataagtacgaccaacgtcggcccttggcgccgcncaatgcacaccagcttcaacgggaacctgtaccccacccatggcttggggccagtctgctggtacatgggcatccacaagggcgaccgcttggctagcctagtcagcttcagctcgccagaggcctcgctcactgagtacatgaatgaaaaacttgaggccggggacccaaggagaaacgaaaaatatatctgcggcgacatgaacacaagcatcatcaaaacagcaaaggggcgcaccatcatgctgcagcacgacgtcgtcaccccgcgcccgtacagccgccacaacatgatacagggcagcaagggctgctttgccgactaccctgcgcgcatacacattgacggcgtgaccaaagaacaccaatgggacaacgacatgaagccctgggacgaaaagtacggccacccgctctggaaagaacttgaggaacaggccaggcagagcggtcacggtggaatggacttcatcatgaactaccgccttgtccagtgcatgaagcaggggctggcccccgatttcaatgtttacgacgctgccgcatggagcgcgcctttcccccttagcatcgccagtgtgcaaagcaacggcaagccccaagacttccccgacttcaccaaggggctgtggaagggataa

SEQ ID NO: 44990 - protein, 249 aa, Unknown
  Obtained from environmental sample
  misc_feature (1)..(249): Xaa is any amino acid
MEKSLFGTVTHGEAAYIHNLRTPWYISTTNVGPWRRXMHTSFNGNLYPTHGLGPVCWYMGIHKGDRLASLVSFSSPEASLTEYMNEKLEAGDPRRNEKYICGDMNTSIIKTAKGRTIMLQHDVVTPRPYSRHNMIQGSKGCFADYPARIHIDGVTKEHQWDNDMKPWDEKYGHPLWKELEEQARQSGHGGMDFIMNYRLVQCMKQGLAPDFNVYDAAAWSAPFPLSIASVQSNGKPQDFPDFTKGLWKG

SEQ ID NO: 44991 - DNA, 1230 bp, Unknown
  Obtained from environmental sample
  misc_feature (1)..(1230): n is a, c, g, or t
atgaaaattcataatgattttaccctgtattttcgggttgtcccttcggggaaacgggttgtgtactactatgcttatgacgaaaatggcaagcggctgtatggaaagtctaccggggaaacgacgctaacagcggctagggttaagttgaaccggctgttaaaagagggggatttggtacagaaaaaaccacgtatgccgacttttgccgaatatgcgctgggctggtgggagtgggatacctgcgcttacctcaaaaaacggcgcaagcggtataatattacccaagggtacgctgaccaggcaaaacggaatttacataaggtgctgttgccgtatttcgggaaaatgagaatggacagaattacccgaaacgatatagatatgtttctggattacctgattaaacaaggctataaaaatacgactatcaacggctattatggcacgatgaaaaccatgatgattgaggcggctgaccaggggttaattacgattgacccgactgccaaaattgggcggctggttaatgaccgtaaggaattgcagattattacgccgatagaatttaagaaattgtttatgggtgattgggaacgggtatgggaacatagccgaattgcttacacggctaataaactggcggcattgtcgggtatgagggtgtccgaggttttggggttaaaaggctgttacttgtacgatggctatatttacctgtgtatgcaatatgatacatacggctaccgccctacgaaaacaaaagacaaacacaatataccgctgccggcttcgatgattgccgatttgaacgaattaaaacggataaacggggacggctttttgttttcaacggatgggggcgggaaaccggtgggaaggcggactatttatttgcatttgcaaagtgctttgcggaatatagggattactgatacggagagaaaagagcggaaattgcacgtacacggctggcggcatttctttaatacggaaatgctgaaaggggggttgacgataccccaagcgcaagcgataaccggacacaagagcgtgagaatgacggaattatacaatcattttgaccctacggagtttgtgaaggtgcgggaagtacaagatgccttgctactgcctgaaacggcgcaaccgtctgacaatgcggggcgggctggtccggtgctggcttttccggtacgggaaagtgaaccacaacggaaacaggcataa

SEQ ID NO: 44992 - protein, 409 aa, Unknown
  Obtained from environmental sample
  DOMAIN (195)...(368): Phage integrase family
  misc_feature (1)..(409): Xaa is any amino acid
MKIHNDFTLYFRVVPSGKRVVYYYAYDENGKRLYGKSTGETTLTAARVKLNRLLKEGDLVQKKPRMPTFAEYALGWWEWDTCAYLKKRRKRYNITQGYADQAKRNLHKVLLPYFGKMRMDRITRNDIDMFLDYLIKQGYKNTTINGYYGTMKTMMIEAADQGLITIDPTAKIGRLVNDRKELQIITPIEFKKLFMGDWERVWEHSRIAYTANKLAALSGMRVSEVLGLKGCYLYDGYIYLCMQYDTYGYRPTKTKDKHNIPLPASMIADLNELKRINGDGFLFSTDGGGKPVGRRTIYLHLQSALRNIGITDTERKERKLHVHGWRHFFNTEMLKGGLTIPQAQAITGHKSVRMTELYNHFDPTEFVKVREVQDALLLPETAQPSDNAGRAGPVLAFPVRESEPQRKQA

SEQ ID NO: 44993 - DNA, 450 bp, Unknown
  Obtained from environmental sample
  misc_feature (1)..(450): n is a, c, g, or t
atggtgaaccctgagtcactgcaaaaatattctcttttcggcgggctggagccggaacaaatcagctctatcctcccgcttatggttctggaaaccttcggtcccgatgaatacataattaccgagggaaaacccaatgacaagatatatttccttatcgagggaacagtagcggttaccaaaaataatatccccctttcccgcttcggcgaaggggaagaattcggcgaaatagaagtgcttgatgtaatggcgtccgccgcctctataaaaacaattacaaatgtaaaattaatgtctatttccaataaagcgcttcgtgatatttacaagcttgatataaaaatcttttccctgataataatgaaccttgcgcgggacttatcccgccggttaaggaagatggatgaaaaacttgcggcagtcgctaaagaacctatttttatataa

SEQ ID NO: 44994 - protein, 149 aa, Unknown
  Obtained from environmental sample
  DOMAIN (30)...(115): Cyclic nucleotide-binding domain
  misc_feature (1)..(149): Xaa is any amino acid
MVNPESLQKYSLFGGLEPEQISSILPLMVLETFGPDEYIITEGKPNDKIYFLIEGTVAVTKNNIPLSRFGEGEEFGEIEVLDVMASAASIKTITNVKLMSISNKALRDIYKLDIKIFSLIIMNLARDLSRRLRKMDEKLAAVAKEPIFI

SEQ ID NO: 44995 - DNA, 618 bp, Unknown
  Obtained from environmental sample
  misc_feature (1)..(618): n is a, c, g, or t
atgatgatcatcgacattttacgcggcagcaagaacgaaaaaatcatccgttttggctttgataccctcagcacatttgcaataatgtctgatacaaaagcgcacaggattcggcaaatccttgaccacttgattgacaaaggtttcctgcttgtggaagaaggagaatatccggttataacgcttggtaacgcggaaagcttgctcaaggaagaagagcgcgttttaatgaaattgccggaagaacgcgaaaaagcgccggatggaaaaaaacaaagggacgcgaaactttttgaaacgcgcgatttgtctgatacaaaaacaccgcggcaaagcggtgaaaaactcactgacacgcagaatgtatcggcggagattgacgaagacttgttcgacaaattgaaaaaactacggagagaaatcgccgcgagggaagcggttcccgcttacattgttttttctgacgcaactctgcgggacatgtgccgcaaaaggcctgtttcactggttcaattttccggcgttaacggcgtggggagcgtaaaattggaaaaatacggagacatatttaccgatcttatccgaaaatattacgaaaaacaaggtgataatatttaa

SEQ ID NO: 44996 - protein, 205 aa, Unknown
  Obtained from environmental sample
  DOMAIN (124)...(204): HRDC domain
  misc_feature (1)..(205): Xaa is any amino acid
MMIIDILRGSKNEKIIRFGFDTLSTFAIMSDTKAHRIRQILDHLIDKGFLLVEEGEYPVITLGNAESLLKEEERVLMKLPEEREKAPDGKKQRDAKLFETRDLSDTKTPRQSGEKLTDTQNVSAEIDEDLFDKLKKLRREIAAREAVPAYIVFSDATLRDMCRKRPVSLVQFSGVNGVGSVKLEKYGDIFTDLIRKYYEKQGDNI

SEQ ID NO: 44997 - DNA, 1296 bp, Unknown
  Obtained from environmental sample
  misc_feature (1)..(1296): n is a, c, g, or t
atgaataaggtatatagcaagattgaatcaataacaggcagcgttattaccgtcaaggcggaagatgtccgttacggagacctcgcggaggtcgatacagtgttcggcacgtcgcttgcggaagtaaaccgcctgcagggcgacattgtttcattacaggtattcgccggcggccgcggtatttccacgggcgacacagtccgcttcctcggacgccccatgcaggttccgttctccgagaaccttatgggcagggtgttctcaggttccggcaaaccgcgcgacaacggccccgcgttacacgagaacttaatcccgatcggcggcccctctgtaaatccgtcccagcgcattatcccgcgcaagatgatccgcacaggtatccccatgatcgacctctttaacactctggtcgtctctcagaaacttcccatcttctccgtatcgggcgagccttacaacgaactgcttgcgcgtatcgcgatgcaggcggaagtagacgtaatcgtcttgggcggcatgggtcttaaatacgacgactatctttactttaaggacactctggaaaacggcggcgctttggcgcgtaccgtaatgtttatacataccgcaagcgacccaacggttgagtgtcttatgataccggatatgtcccttgccgttgccgaaaagtttgcccttcaggggaaggacgtacttgttcttcttaccgatatgacaaacttcgcagacgcaatgaaggaaatctcgattattcaggaacaggttccaagtaaccgcggatatccgggcgatctttacagccagcttgccagccgctacgaaaaagccgtagactttgaaaccgcaggttccatcaccgttctcggcgttactacaatgcccggtgacgacgtaacccatcctgtgcctgacaataccggatacataacggaaggtcagtattatcttaaaaacggccgtattgaaccgttcggctcactttctcgtcttaaacagcaggtaaacggcaaaacgcgcgaagaccaccgcgcccttatggacggcatgatcaaactctattccgctttccgcgacactatggaaaagaaagcgatgggctttatcatgactaactgggacgaaaaactcttaaaatacggcgatcaatttgaaaaaaggatgatgtctctttccgtaaatattccgttggaaaaagcgctggatttgggttgggagattttatcttcctgctttaaccctgaagaaacaggattaaggacagaacttataaataaattttggccgaaaaattag

SEQ ID NO: 44998 - protein, 431 aa, Unknown
  Obtained from environmental sample
  DOMAIN (8)...(71): ATP synthase alpha/beta family, beta-barrel domain
  misc_feature (1)..(431): Xaa is any amino acid
MNKVYSKIESITGSVITVKAEDVRYGDLAEVDTVFGTSLAEVNRLQGDIVSLQVFAGGRGISTGDTVRFLGRPMQVPFSENLMGRVFSGSGKPRDNGPALHENLIPIGGPSVNPSQRIIPRKMIRTGIPMIDLFNTLVVSQKLPIFSVSGEPYNELLARIAMQAEVDVIVLGGMGLKYDDYLYFKDTLENGGALARTVMFIHTASDPTVECLMIPDMSLAVAEKFALQGKDVLVLLTDMTNFADAMKEISIIQEQVPSNRGYPGDLYSQLASRYEKAVDFETAGSITVLGVTTMPGDDVTHPVPDNTGYITEGQYYLKNGRIEPFGSLSRLKQQVNGKTREDHRALMDGMIKLYSAFRDTMEKKAMGFIMTNWDEKLLKYGDQFEKRMMSLSVNIPLEKALDLGWEILSSCFNPEETGLRTELINKFWPKN

SEQ ID NO: 44999 - DNA, 834 bp, Unknown
  Obtained from environmental sample
  misc_feature (1)..(834): n is a, c, g, or t
atggccgggccgggccgggcctggaccggctcttgggcgaagccgttttcggtgcggaaggaccatgaaaatcctcttgtcctacgcctccggactcagcctggcctggctgggcctgctctcctttttcgccgggctggccgcctggccccgcgacggcgccttcctgcccctcttggcggggctggccctggtcctggccgccgtgcctcccctcctggtcctggtgcgccaataccttgccccggccggccggggcgtcgacctcaccttaggcccatgacccggaccccgcccaaatccaccatcacccgcttccgggccttttcgggcttgacgctcttcatcgtattcctctcgctctccgtcacctttgtcctggccacgcggaaattcggccacggcagcctggcggaccaattggccatcacctccgaccatatgcggctgcgcctggcgaccatcgtgaacagtgaaataaccctggtcaggaaaatggccgattcgccggtcatccggcgctatttcctgaaccccgccgatcccgccttgaaacgggacgctttcgaggagctggagtctttccgggcggctttccaagtcaagtccctgttctggatcaacgacatcgaccggctgttttaccggaccggcaatgaaccgtatgtcgtggaccccaccctgccggagaactactggtatgacatgaccttatatgaaacggagacctacaatttcaacatcaactacaaccctgacttaaacgagacgaatatctggatcaacgccccggtctttcagaggcgggccggcccatcggctctctcgcgataa

SEQ ID NO: 45000 - protein, 277 aa, Unknown
  Obtained from environmental sample
  misc_feature (1)..(277): Xaa is any amino acid
MAGPGRAWTGSWAKPFSVRKDHENPLVLRLRTQPGLAGPALLFRRAGRLAPRRRLPAPLGGAGPGPGRRASPPGPGAPIPCPGRPGRRPHLRPMTRTPPKSTITRFRAFSGLTLFIVFLSLSVTFVLATRKFGHGSLADQLAITSDHMRLRLATIVNSEITLVRKMADSPVIRRYFLNPADPALKRDAFEELESFRAAFQVKSLFWINDIDRLFYRTGNEPYVVDPTLPENYWYDMTLYETETYNFNINYNPDLNETNIWINAPVFQRRAGPSALSR

SEQ ID NO: 45001 - DNA, 396 bp, Unknown
  Obtained from environmental sample
  misc_feature (1)..(396): n is a, c, g, or t
ttgggaattcaaaaccttaccatgacaggagcaacggtggatcgtcaggcgctggttagccgctttcaaaccgacgacaatgtaaaggcttttgttatgaccttaaaaacagggggaaccggcctcaaccttacggcggcggattacatcttcatcatggatccctggtggaacagcgccgccgaaaatcaggccattgatcgcagtcaccgcatcgggcagcagaatccggtgttttgttacaggctcatagccaaagatacgattgaagagcggattttggaacttcagaaacgaaaaaccgatttggcgggagcgcttcttgccgacgatccaggggcgcttaaagcactaagtccggaggatgtggcctaccttgttggagacgcgccgtga

SEQ ID NO: 45002 - protein, 131 aa, Unknown
  Obtained from environmental sample
  DOMAIN (1)...(73): Helicase conserved C-terminal domain
  misc_feature (1)..(131): Xaa is any amino acid
MGIQNLTMTGATVDRQALVSRFQTDDNVKAFVMTLKTGGTGLNLTAADYIFIMDPWWNSAAENQAIDRSHRIGQQNPVFCYRLIAKDTIEERILELQKRKTDLAGALLADDPGALKALSPEDVAYLVGDAP

SEQ ID NO: 45003 - DNA, 756 bp, Unknown
  Obtained from environmental sample
  misc_feature (1)..(756): n is a, c, g, or t
atgggcgcgtgccttgccgatgagatgggtcttggaaaaacgattcaggtgatagccctcctgcgttccctcaacgagacaggcgttaggggaaactgccttatactctgcccgaaaacattggtgtttaactgggtcgcggaactggaacggttcgcgccggaactgccatgcatggtgcattatggaatagggcgggatacggcccaactggaaaccgacgggttcagaatcatcctgagtacttacgctactttacggcgcgacatcgaagatttccagaagatcaattttttgtatatcatccttgacgaatcccaaaatataaaaaatctgacctctcaaacaacggcggcggtaatttctttgaagggggaacaccggcttgccctgagcggcactccgatagaaaacaacctgggggaactgtacagcctgttccgctttctcaacccttcgtttttcggttctgaaaggctttttattcagcgctaccttcatcccattcaggatgacaaagacgaggatgcccttaaagacctaaaggcaaggatatatccctttatgctaaggcgtttgaagcgggatgtgctaaaggagcttccggccaaaaccgaagaaactgcgtacatcgagctggaagaaaaccatctggctgtttaccatcgcagacgacaggaatacaaacagctcatcgacaatatcatcgcgaggggagaagcggcaaatcttcgtttgtcattttcaaggcgctag

SEQ ID NO: 45004 - protein, 251 aa, Unknown
  Obtained from environmental sample
  DOMAIN (2)...(244): SNF2 family N-terminal domain
  misc_feature (1)..(251): Xaa is any amino acid
MGACLADEMGLGKTIQVIALLRSLNETGVRGNCLILCPKTLVFNWVAELERFAPELPCMVHYGIGRDTAQLETDGFRIILSTYATLRRDIEDFQKINFLYIILDESQNIKNLTSQTTAAVISLKGEHRLALSGTPIENNLGELYSLFRFLNPSFFGSERLFIQRYLHPIQDDKDEDALKDLKARIYPFMLRRLKRDVLKELPAKTEETAYIELEENHLAVYHRRRQEYKQLIDNIIARGEAANLRLSFSRR

SEQ ID NO: 45005 - DNA, 603 bp, Unknown
  Obtained from environmental sample
  misc_feature (1)..(603): n is a, c, g, or t
ttggaaaaaataaaaaccgtcatagaaggcaatactgatataaaattcaccgtcttttgcggagaccttacccaaaacggagctgaacaggacttgaaaaaatgtcttgaaattgccaataaccttccaattcccgtataccctgtaataggtaaccacgatatttattttggcaactggcctatatggaagaatctgatcggttccaccagttaccgggtaaacggagacggcgccaccctctttattttggacagcgccaatagtttccttgggaaagaacagatagattggcttgaaaatgaactaaaaagcgcgcccggcaagactgacgacagggtttttgttttttcccatcataacctttttgtaggttccgcggtaaatatccagcaattatccgacacaggggaaagagcgcgaattatctctttattaaacggaaaacgcggcataatgtttaccggacattcccataaacgcctgattatagaagcgggcgacatgatgtatatcaatatcgaagattttgtcagaaataaaacctattgcctggtttcggttaacaaatacggtgtaacttataattttaaaagactataa

SEQ ID NO: 45006 - protein, 200 aa, Unknown
  Obtained from environmental sample
  DOMAIN (2)...(161): Calcineurin-like phosphoesterase
  misc_feature (1)..(200): Xaa is any amino acid
MEKIKTVIEGNTDIKFTVFCGDLTQNGAEQDLKKCLEIANNLPIPVYPVIGNHDIYFGNWPIWKNLIGSTSYRVNGDGATLFILDSANSFLGKEQIDWLENELKSAPGKTDDRVFVFSHHNLFVGSAVNIQQLSDTGERARIISLLNGKRGIMFTGHSHKRLIIEAGDMMYINIEDFVRNKTYCLVSVNKYGVTYNFKRL

SEQ ID NO: 45007 - DNA, 1044 bp, Unknown
  Obtained from environmental sample
  misc_feature (1)..(1044): n is a, c, g, or t
atggctatgtttggacaccggccgccgtggggagggagggtcttatggcaattgacaatattgttgttttttctctccccggcggcaggggcgcaaattcgcgctctgaccgccccggaagctgacgctgtattaaaaaacggttctctttttcccaatatatatttccgtgatgttgtcaatgccttgaaaatcgcggaggcttcccatccctattgggtgagtacccaggatgaattggacgccgtaaaccggacctatcaagaccaagcttcattgctactgaataatgacatcctcgctttttacggccatcccaactcaaagaatatgggaattctgggccgttacccaatggaagaactggataaaaggctgaccgaacttgccctggaatacgaattgtccagcgatgggcgcacggtacgcaaggctttctacattatctacggaacggtttggcccgagggcgagatcggtatcttaaacgaaggaatagtcaagcgctatatcgagtatgccctggaaaacgacatactggtttttctcgatcatcagattggccgttatgatccggtgaattcccttaagcgtatgttcccctggctgcattatcccaatgtgcaccttgcgctggacccggaatggcgcaccgccaggcccatgcgggaaatagggaacgttaccgcggacgagatcaaccgggcccagcaggctatggaagactatatcatcgagaataatattcccggtgaacgcctgctggttatccatcagtttaactacctgatgattagcancagggagaaggtgagaagcgatttccagcgcgtgcggcttgtccattgcgccgacggtttcggctccccgcgtcttaaacgcgattcttacgcttataacgccgcggcgtccaatatgcctttaaaagcgttcaaacttttctacaatttcggaatacccggcgccggttacgacaacccccttatgagtcctaaagacgtatacgccctgaacccgcggccttatatcatcatgtaccagtaa

SEQ ID NO: 45008 - protein, 347 aa, Unknown
  Obtained from environmental sample
  misc_feature (1)..(347): Xaa is any amino acid
MAMFGHRPPWGGRVLWQLTILLFFLSPAAGAQIRALTAPEADAVLKNGSLFPNIYFRDVVNALKIAEASHPYWVSTQDELDAVNRTYQDQASLLLNNDILAFYGHPNSKNMGILGRYPMEELDKRLTELALEYELSSDGRTVRKAFYIIYGTVWPEGEIGILNEGIVKRYIEYALENDILVFLDHQIGRYDPVNSLKRMFPWLHYPNVHLALDPEWRTARPMREIGNVTADEINRAQQAMEDYIIENNIPGERLLVIHQFNYLMISXREKVRSDFQRVRLVHCADGFGSPRLKRDSYAYNAAASNMPLKAFKLFYNFGIPGAGYDNPLMSPKDVYALNPRPYIIMYQ

SEQ ID NO: 45009 - DNA, 564 bp, Unknown
  Obtained from environmental sample
  misc_feature (1)..(564): n is a, c, g, or t
ttgaaactctacaaacccaacatgccgcttagcgataccgcgaaaaaagttattgaaaaaattaaagacagccccaaggacaggattgttaaaatatacgattttggcaactatgacgagcaggattttgaagtcatggagtacgccgaaggcggcacccttgaagagtaccttaaaagctcaggcgcgatacacgacacgaccaaaataaaaaacatcgtaaagatggtagtcgaagggcttgaacagcttcacggcgagcataaggttatttaccaggacttaaagcctgaaaacatctattttagggacgcgaaaaaaacatctcttgtccttgccgattttgggatttcaagtattatgaaaggctatgacaaagaggtcgaagtaaccgccagcattacagacctttacgccgcgcccgaattggcgcacaaggggaatagaaacgaagtaatggtaacccctccagttgattactttgcgcttgggataaccatgtttgaactctggctgggcgaaagccgttcaagggcgttaaggcggccaagcgggactacatga

SEQ ID NO: 45010 - protein, 187 aa, Unknown
  Obtained from environmental sample
  DOMAIN (4)...(185): Protein kinase domain
  misc_feature (1)..(187): Xaa is any amino acid
MKLYKPNMPLSDTAKKVIEKIKDSPKDRIVKIYDFGNYDEQDFEVMEYAEGGTLEEYLKSSGAIHDTTKIKNIVKMVVEGLEQLHGEHKVIYQDLKPENIYFRDAKKTSLVLADFGISSIMKGYDKEVEVTASITDLYAAPELAHKGNRNEVMVTPPVDYFALGITMFELWLGESRSRALRRPSGTT

SEQ ID NO: 45011 - DNA, 342 bp, Unknown
  Obtained from environmental sample
  misc_feature (1)..(342): n is a, c, g, or t
ttggccgagtgtgatacttcgccatggaagggctntaaacagcttttgcatacaacaaaacttattcaaaaaggactgaacccgtctttgaaaatcggcggcattttctttacaatgtacgacccaaggaccagacttgccaatgatgtaattaaacaggtcagcgccatttataaagatacggttttaaatacaatcattcctcgaaatattcgtctctcagaagcgccctcctacgggatgcccatttctctttacgatccgcaatgccccggagcaagggcataccacgctcttgcccaagaactgctccgcaaaacaggaggaataaatggcgcgtag

SEQ ID NO: 45012 - protein, 113 aa, Unknown
  Obtained from environmental sample
  misc_feature (1)..(113): Xaa is any amino acid
MAECDTSPWKGXKQLLHTTKLIQKGLNPSLKIGGIFFTMYDPRTRLANDVIKQVSAIYKDTVLNTIIPRNIRLSEAPSYGMPISLYDPQCPGARAYHALAQELLRKTGGINGA

SEQ ID NO: 45013 - DNA, 933 bp, Unknown
  Obtained from environmental sample
  misc_feature (1)..(933): n is a, c, g, or t
atggcgcgtagaatcggtttgggaaaaggtcttgacgcattactggataacaatgacgatgacgaatcatctgccgcatcggttgaaaatcaaacagtttcccctccctccgcaacaaccgcttccggaaacaaagcgcaggacattgttcaattaccggtgagcaaacttgttcccaatcccggccagccccgtaaaaattttgatgaaacagaattacaggaattggctgactcaataaaaacttacggtatcatacaaccaatcattgcggcggacacgggagacggcgcttacataataatcgccggcgaacgcagaacacgcgccgcaaaactggccggtcttggtacggtccctgtaattattcgtgattataccgatcaaaaacgtcttgaaatttcgttaatcgaaaatatccagcgcagtgatttaaacccgatagaagaagcggcggcgtataaaaatcttatggacttttcaaatctttcccaggacgagcttgcgacgagggtaggaaaaaacagatcgactgtcgcaaacgcattacggcttcttaaactgcccattgaaattcaaaaaagcatagaaggcggtaaagtgagttcgggacacgcaagggcgttgttatccgtaaccgacgcaaaactgagggataggctttacagggaaatacttgcaagcgaggtttcagttagagaaactgaaaagcgggcggcggcttttaataccgaaaaaaccggcaaaacaaaaaacacggacagcgataaagctttaaaacgtccgcccgaagtaaacgccatggaagaaaaatttatcggcaaattgggaaccaaagtaattattgagggagacctgaacaaaggtaaaatacatattgattactattcaatggaagatttagaaaggctgtacgaaatattgggcggctga

SEQ ID NO: 45014 - protein, 310 aa, Unknown
  Obtained from environmental sample
  DOMAIN (50)...(140): ParB-like nuclease domain
  misc_feature (1)..(310): Xaa is any amino acid
MARRIGLGKGLDALLDNNDDDESSAASVENQTVSPPSATTASGNKAQDIVQLPVSKLVPNPGQPRKNFDETELQELADSIKTYGIIQPIIAADTGDGAYIIIAGERRTRAAKLAGLGTVPVIIRDYTDQKRLEISLIENIQRSDLNPIEEAAAYKNLMDFSNLSQDELATRVGKNRSTVANALRLLKLPIEIQKSIEGGKVSSGHARALLSVTDAKLRDRLYREILASEVSVRETEKRAAAFNTEKTGKTKNTDSDKALKRPPEVNAMEEKFIGKLGTKVIIEGDLNKGKIHIDYYSMEDLERLYEILGG

SEQ ID NO: 45015 - DNA, 954 bp, Unknown
  Obtained from environmental sample
  misc_feature (1)..(954): n is a, c, g, or t
gtgcacgtaacggattataccaacgcaagcagaacgatgatcttcgacatccataaacttgattgggacgacacccttcttagagctttggatattccgcgcgccatgcttccgcaggtaaagccgtcaggcgcgatgttagcgtccgcctatattaacgacagtgaaattcccattgcgggggatgcaggcgatcaacaggcggcgctttttgggcagtgctgttttgataaaggggacacaaaatgcacttatggcacaggctgtttcctgttaatgaatacaggtactagcgccgctgtcagcgggaacgggcttttaaccaccattgccgcaggcttcaacaaaaaggtgcaatacgcgcttgagggatcagtctttaccggaggagccgttattcaatggctgagagacgaattgcgtataattacagacagcgcagacagcgaatactttgcgggaagagtaaaggataccggcggcgtctatcttgttcccgcttttaccggtcttggcgctccgtattgggacatgtatgcgcggggctgcataatcgggatcacgcgcgggacaaaaagagcgcacattataagggcggcgcaggaatctatcgcctatcaggtaatggatcttttaaacgccatggaaaacgatcttggcataaaattaaaggagttaaaagttgacggcggggcgagcagggataaatttcttatgcagttccagtctgatatgtgcagagcggcaattgtgtgccctgttattagggagacgaccgctctgggagcggcgtgtcttgcaggaattaccgtcggattctggaaaaacttgaacgaggtaaaaaaacgctggcggcaggatactgtttttaccccaaaaattgacattgaaaagcgtgaaaaactagttacaggctggcacaaagcggtggaaagaagccgctcgtgggcttga

SEQ ID NO: 45016 - protein, 317 aa, Unknown
  Obtained from environmental sample
  DOMAIN (75)...(300): FGGY family of carbohydrate kinases, C-terminal domain
  misc_feature (1)..(317): Xaa is any amino acid
MHVTDYTNASRTMIFDIHKLDWDDTLLRALDIPRAMLPQVKPSGAMLASAYINDSEIPIAGDAGDQQAALFGQCCFDKGDTKCTYGTGCFLLMNTGTSAAVSGNGLLTTIAAGFNKKVQYALEGSVFTGGAVIQWLRDELRIITDSADSEYFAGRVKDTGGVYLVPAFTGLGAPYWDMYARGCIIGITRGTKRAHIIRAAQESIAYQVMDLLNAMENDLGIKLKELKVDGGASRDKFLMQFQSDMCRAAIVCPVIRETTALGAACLAGITVGFWKNLNEVKKRWRQDTVFTPKIDIEKREKLVTGWHKAVERSRSWA

SEQ ID NO: 45017 - DNA, 306 bp, Unknown
  Obtained from environmental sample
  misc_feature (1)..(306): n is a, c, g, or t
ttgtgccagcctgtaactagtttttcacgcttttcaatgtcaatttttggggtaaaaacagtatcctgccgccagcgtttttttacctcgttcaagtttttccagaatccgacggtaattcctgcaagacacgccgctcccagagcggtcgtctccctaataacagggcacacaattgccgctctgcacatatcagactggaactgcataagaaatttatccctgctcgccccgccgtcaacttttaactcctttaattttatgccaagatcgttttccatggcgtttaaaagatccattacctga

SEQ ID NO: 45018 - protein, 101 aa, Unknown
  Obtained from environmental sample
  misc_feature (1)..(101): Xaa is any amino acid
MCQPVTSFSRFSMSIFGVKTVSCRQRFFTSFKFFQNPTVIPARHAAPRAVVSLITGHTIAALHISDWNCIRNLSLLAPPSTFNSFNFMPRSFSMAFKRSIT

SEQ ID NO: 45019 - DNA, 504 bp, Unknown
  Obtained from environmental sample
  misc_feature (1)..(504): n is a, c, g, or t
ttgcaggaagatgaacagttggtcaaaaggcttgaaaataccatttctacgctcaaaattgacatggatgccatccaaaactcagtccaaaccctttcggctgaaaatgaaaaggcgcgggatgccgccgaaaagctttccaccctggacgaaaccgtcaaatggctggaaaaacgcattgccgaaatgaatgttgcccgcgaaagcatggcgcggcttgccaccgagctgcaaaacctcgataaagacgcccagaaccagcttaaccttacccgttccctgctgaaccgcgaggaaggcaaaatagcgggccgcgctgccggtaaaagcgccggcaaagccgccggcagagcctcagacgacagcgctccgccgccccgcgaccgtgaaaacattatcaaacttaaacgccagggctggactattgacgagatcgccggggcaatgaagatatccaagggcgaagtagagctgattttagaacttggccccaaagaaatgtag

SEQ ID NO: 45020 - protein, 167 aa, Unknown
  Obtained from environmental sample
  misc_feature (1)..(167): Xaa is any amino acid
MQEDEQLVKRLENTISTLKIDMDAIQNSVQTLSAENEKARDAAEKLSTLDETVKWLEKRIAEMNVARESMARLATELQNLDKDAQNQLNLTRSLLNREEGKIAGRAAGKSAGKAAGRASDDSAPPPRDRENIIKLKRQGWTIDEIAGAMKISKGEVELILELGPKEM

SEQ ID NO: 45021 - DNA, 1371 bp, Unknown
  Obtained from environmental sample
  misc_feature (1)..(1371): n is a, c, g, or t
ttgggcgaagcgatcaaaaagaaccgcgaagaatgggaaatcgccttccgcgataccggacaggaagtagtaagcgccgcccaggaacggctggaagaataccgtcaggcgcaggaagaacagttcaggcagctttccggcattgccaatgacgccgcccgtctggaagttgaattgcggcgctccatgcaggacgcaatgaaccatgtcaacagcgactttgccattttcgggcaggagatacgcggcacctgggaaaccgcgtcaggggaatttaacggccaattacagaccctgcggcatgaactggcgggcatagatcgtgaactcgccggaatcaaggaaaaggctattgaaaatgtttccgaaagacttaaagtttttgaagacgaattcctggcagacctcaataagcggggcgccgtaatagaccagcagcttgccgcctggcaggagacactggataaacggctggaagtaatcgccgcagattccgaagccaaacggcaaaaaaccgaaaccctcccttacgaagatgtcaagaaagccattaccgccccagncgaaaagctcgtctcggatctggaacggctcaaggcggaaaccgccgcgttcgaagaaggtatacgcgaagaaatgcgcggcgcggacgaatcccgaaaatccttcagcgagcagcttggacgcgatttggaagaagttaaaaacgccgccgagaacgagatcaataccaagattggccagtacaacctctcggtcgcggatacgatccgccaaagccagcgggacctggaaacgcaaattcacgaactggtaacagattccaaagaacggtacaccgccctggaaacttcatcagaagaattccgcaagaatatagaggaatggcagacccagtacaatacccgcatgagggaacttgataatgccatggaagaagcccgccgccgcggccgcgagatttccgtggaaaatgaagaacggctcatggcggcgcgtaactctctggatgagatgcgccatgaaatcaccgcccaggtaaaactcttcgaccgtaccgatatgctcaaagcggaacttagccgccatgtcgaggacatgagcggcaacatagagcgtctcctgcagcttaaaaacgagatagcccattttgaaaatcagttcatccagataaagcgcctggaagacgatgtaaacgccaagatgacccgcttcctttcggaaaaacgccgcatcgaggtcatggaaagcgattttacccgcctgctccagacttcccagtcggtagaggaaaaacttgcccaggtatcaaactcagacgacatactgcaaaccatgcaggttcaattacgccgcaggaagacgcgataa

SEQ ID NO: 45022 - protein, 456 aa, Unknown
  Obtained from environmental sample
  misc_feature (1)..(456): Xaa is any amino acid
MGEAIKKNREEWEIAFRDTGQEVVSAAQERLEEYRQAQEEQFRQLSGIANDAARLEVELRRSMQDAMNHVNSDFAIFGQEIRGTWETASGEFNGQLQTLRHELAGIDRELAGIKEKAIENVSERLKVFEDEFLADLNKRGAVIDQQLAAWQETLDKRLEVIAADSEAKRQKTETLPYEDVKKAITAPXEKLVSDLERLKAETAAFEEGIREEMRGADESRKSFSEQLGRDLEEVKNAAENEINTKIGQYNLSVADTIRQSQRDLETQIHELVTDSKERYTALETSSEEFRKNIEEWQTQYNTRMRELDNAMEEARRRGREISVENEERLMAARNSLDEMRHEITAQVKLFDRTDMLKAELSRHVEDMSGNIERLLQLKNEIAHFENQFIQIKRLEDDVNAKMTRFLSEKRRIEVMESDFTRLLQTSQSVEEKLAQVSNSDDILQTMQVQLRRRKTR

SEQ ID NO: 45023 - DNA, 1509 bp, Unknown
  Obtained from environmental sample
  misc_feature (1)..(1509): n is a, c, g, or t
atggaagaggagagcaaggcccttgacgcccacatggacgagatgaacaccatggaggcgcggcttgtagagatgcagagaaacatctacggtctagccctggagaaaaacgccaaggaaaacgaggcccggcttctgggggagcggcgcaacgaaggcaaggccaagatagaacagggcgaagtaagggaaaaacagataaataacaagatagaagagctaaatgatgacgccgctgggcaagatgaagttgtttctgaattgagacaaaagtctgcaagcatagaagataacatcaaatcctttgaggaaaacatccagcttgcctcaacccgcataggtgataacgaaaaagcgatacataaggccgaatccgagatacacggccttgaaaaagagcagtcccaatttgaaatacagttggcgcagataaccgatgacattgtcgcggaactggacgccggactgaaaaaagccggatattcggcttcggaacgcagaaatattgaaaccgctcttaacgagacgctgaacaggctgcgcacggtgcttaccggcaggggaacccttatccgcgacctttccgccgccgcttccgtcgaggctgccgagcttcagcgcattgccggaactctggcgacggaactttccaacgccgcggcggacgcggaaaaagccatcgccctgtttgaaagctaccgaaaccattcccccctgtttctcgacgagttccttgccccgcagggcatcatcaccaaaaagcgggaactggacgtgaaaatccggactgcgaaagaaggtatagaggaacgccgccaaaggataaagaccctgcaaggcgacaacgcggctctagcggcgaagatcaacgagtaccgcgccacgctggaggatctgcgggtaaacctcgccagaatgaacgcgcaggcaaaatccgccgaggaacaggcaaaactgatacggcgcgagcttaccgggcaggaatccatgctcaaaaatatccgcgacgaattgcacgccgaccgcaagcggctggaggatattaacgagcgcattgccgatacccagtcggaaatcgccgaaattgagcagaaaggaaaaggccttaccatcgagcttgaaaagctggaaaaggatataaaaaagagatcgggcgatgttgctggaaaacaggaaatcatcaaaaagcgcaccgcggaacttgccaaagtgcaggaggccctggacaagattcatcttgaactggtgcagtcagaaacggaaatcaaaaacatacaggaaaatttccgcgatacccattcccgcgacctgatggaatttgaggagcgtgtttttaccataaccgcccacccggccgatctgcgggaaaaacttaccgaggcgcgttcccagatgaaagaccttggttcggtgaacctgatggccccggaagaatttgccgaaccaaagacgctacgaatttttaagcaatcagatggcggatctcctgaaagtccgcaaagaccttga

SEQ ID NO: 45024 - protein, 502 aa, Unknown
  Obtained from environmental sample
  misc_feature (1)..(502): Xaa is any amino acid
MEEESKALDAHMDEMNTMEARLVEMQRNIYGLALEKNAKENEARLLGERRNEGKAKIEQGEVREKQINNKIEELNDDAAGQDEVVSELRQKSASIEDNIKSFEENIQLASTRIGDNEKAIHKAESEIHGLEKEQSQFEIQLAQITDDIVAELDAGLKKAGYSASERRNIETALNETLNRLRTVLTGRGTLIRDLSAAASVEAAELQRIAGTLATELSNAAADAEKAIALFESYRNHSPLFLDEFLAPQGIITKKRELDVKIRTAKEGIEERRQRIKTLQGDNAALAAKINEYRATLEDLRVNLARMNAQAKSAEEQAKLIRRELTGQESMLKNIRDELHADRKRLEDINERIADTQSEIAEIEQKGKGLTIELEKLEKDIKKRSGDVAGKQEIIKKRTAELAKVQEALDKIHLELVQSETEIKNIQENFRDTHSRDLMEFEERVFTITAHPADLREKLTEARSQMKDLGSVNLMAPEEFAEPKTLRIFKQSDGGSPESPQRP

SEQ ID NO: 45025 - DNA, 918 bp, Unknown
  Obtained from environmental sample
  misc_feature (1)..(918): n is a, c, g, or t
gtgcttgcaagcagcaatcatttggtgcttatatcgccaaggcgttttggcaaaacatctttgataaccagcgttacaagttcgctttcaagacctgtgatttatatggatttgcaattagccacagatgtttctgatttagcgactcaacttttaaagaaatttttggatatttataaatgggaaaaagtaaaacattttttagcgaattttaaaattgtgccaaccttggaacttaatcctcaaacaaatggaatggaggtttcttttgctccgtctgcaagcaataaatttattcctcttgaagatgtgttaaaccttatagaaaaaacgagtaaaaaaagcaataagcctattgttgtttttgatgaatttcaagaaataactcatttggggaaaaatttaccaaagcagctcagagctgtgattcaacatcataaaaatatcaattatgtttttttgggcagtttggaaacaatgatgaaagcaatttttgaaagcaaaaaatctccattttatcattttggctatcttatgagccttgataaaatcccctacgatgatttttttgaatacttgaaaaaacgtttcaacgaagttacaaacaaaagcgaaactatatcaaaagaaattttagaattttctaaccaacatccatactacacccagcaacttgctttttattgtttttcatttttagaaaaagaaaaatatagaaaagatatgctcttgagtgttatacaaaacattataatgctacataacgtagattatgagcggctttggaataccattagccaaacagacaaaaaaattctcattactcttgctatgcaagaaaaaccttctagcattttgcgccctacaagcactatttacagcggattgtcgcgattaataaagcaaggctatatataa

SEQ ID NO: 45026 - protein, 305 aa, Unknown
  Obtained from environmental sample
  DOMAIN (6)...(213): Archaeal ATPase
  misc_feature (1)..(305): Xaa is any amino acid
MLASSNHLVLISPRRFGKTSLITSVTSSLSRPVIYMDLQLATDVSDLATQLLKKFLDIYKWEKVKHFLANFKIVPTLELNPQTNGMEVSFAPSASNKFIPLEDVLNLIEKTSKKSNKPIVVFDEFQEITHLGKNLPKQLRAVIQHHKNINYVFLGSLETMMKAIFESKKSPFYHFGYLMSLDKIPYDDFFEYLKKRFNEVTNKSETISKEILEFSNQHPYYTQQLAFYCFSFLEKEKYRKDMLLSVIQNIIMLHNVDYERLWNTISQTDKKILITLAMQEKPSSILRPTSTIYSGLSRLIKQGYI

SEQ ID NO: 45027 - DNA, 900 bp, Unknown
  Obtained from environmental sample
  misc_feature (1)..(900): n is a, c, g, or t
ttggaaggagttcccggactcgctaaaaccctcgccgttaaaagtcttgcggagattactggccttgaatttaaacgtattcaatttacccccgaccttttaccggcggaccttacggggacgatgatctgggaacaggctaacggcaggttctccgtgcgccgtggccccgtttttgccaatgtaattctggcggacgaaattaaccgcgctccggcaaaagtacagtccgctcttcttgaggcaatggaagaaaaacaggtgacaatcggcgaagaaacccatcccctgcctgatccgttttttgtccttgcgacggaaaacccaatcgaacacgaaggcacctattccctgccggaagctgagcttgaccgttttttaatgaaactgcttgttttttatccgcaacctgtggaagaactggatattgttaaaaacagcccccttttatcttcagtttcagctaataagggggcggcgcttaatcccgtacttaacagggaaaaactttcctttttgcgtaacgccgcggattccgtccatatagacgaagaaatcagcaaatacatagtgtcggttgtaaccgccacacgccccgcgtctacaaggcaggcgcccaccgcgccgcagcaaaggacggaaagcgcgaaaacggacgcggagagcgtataccgttatgtgtcatttggagcctctcctcgggcttctatcgccttgtacaggtgcagccgtattcttgcgatgtttgaagggcgtaactttgtaagccctgaaaacgtaaaaacggccgcttttcccgttttacggcacaggattgtgctttcttatgaagctgaagcggaaggcatggacgcggatgcggttatagcaagaatattaagccatgttcccgttccgtaa

SEQ ID NO: 45028 - protein, 299 aa, Unknown
  Obtained from environmental sample
  DOMAIN (1)...(134): ATPase family associated with various cellular activities (AAA)
  misc_feature (1)..(299): Xaa is any amino acid
MEGVPGLAKTLAVKSLAEITGLEFKRIQFTPDLLPADLTGTMIWEQANGRFSVRRGPVFANVILADEINRAPAKVQSALLEAMEEKQVTIGEETHPLPDPFFVLATENPIEHEGTYSLPEAELDRFLMKLLVFYPQPVEELDIVKNSPLLSSVSANKGAALNPVLNREKLSFLRNAADSVHIDEEISKYIVSVVTATRPASTRQAPTAPQQRTESAKTDAESVYRYVSFGASPRASIALYRCSRILAMFEGRNFVSPENVKTAAFPVLRHRIVLSYEAEAEGMDADAVIARILSHVPVP

SEQ ID NO: 45029 - DNA, 663 bp, Unknown
  Obtained from environmental sample
  misc_feature (1)..(663): n is a, c, g, or t
atggaaacaagcgaattactgcggactattattaaccttcccattttttcaaaaggacttgccgatgaaatgcttgcgggaaatttcagctctatatttaaagggcagggaatggaatttgacgaggcgcggcattacgagcttggcgatgatataaggtcgatagattggaacgcaagcgcgcgctttggagtcccatttgtaaaaatgttccgcgaagaacgcgaattaactattttaattttacttgatatttctccttccatgcacaggacgcatatagcgcagcaggggttaagcccttacgagcaggcgctaatctgcacggctttaatcgccttttccgcagagcatacagaccagcaagtgggagcgtttttatttgacagggacgtggaaaaagtttttccgccgcgcaagggacgcaaggctataatgtcaattgtaatgtccgcgcttcagtatcagaacaacattataccgcgcagatcccagtatggcagtgatattgcatccgcgttgactggagcgcagaggcttctaaaaaaacgctcgcttgtcgtgcttatatcggattttttcagcattaactgggaacgtgaaatgggaagcctctgtagaaaacacgacgtaatagcgataaaattccctcggccgatctga

SEQ ID NO: 45030 - protein, 220 aa, Unknown
  Obtained from environmental sample
  misc_feature (1)..(220): Xaa is any amino acid
METSELLRTIINLPIFSKGLADEMLAGNFSSIFKGQGMEFDEARHYELGDDIRSIDWNASARFGVPFVKMFREERELTILILLDISPSMHRTHIAQQGLSPYEQALICTALIAFSAEHTDQQVGAFLFDRDVEKVFPPRKGRKAIMSIVMSALQYQNNIIPRRSQYGSDIASALTGAQRLLKKRSLVVLISDFFSINWEREMGSLCRKHDVIAIKFPRPI

SEQ ID NO: 45031 - DNA, 681 bp, Unknown
  Obtained from environmental sample
  misc_feature (1)..(681): n is a, c, g, or t
ttgtcaacattgacagataacgaacacacggtaacaataatcgcggaagacctttacggggtaaagagccttcccacaacgcgaaaattccgcgtatcgttaaacgagcctaccggaacaatgacatatcctctttatgatacggtattaaaagaaggcgtagaacttcgcggaaccgcctttgaccgcaacggcattaaagaagtaagagcttctatcgataacggaaatacatttaacaaggttagaggaacctttggcacggctgcggaaacaatacagtggaactatcaatttaacacgacaatattaaaagacggtccccacgtggtgtttatcaaagtattggacagatacgacataccggctacttacgcgtttatgattaacgtagacaacacacagccggaaattattctggacagccctggcgacggttcaatatccgttggaaatatttccgtaatgggacgcgtacttgatcctaacttaaaagaagtaagcctggaattaagaagccttgacggctttacaattcccgccaacttaagatcaagaaaacttgacttaagctcaataataagagaaaacattgatatttccgcaatggcggacggacagtacaatctcgctattatcgcgctagacagagccgggaaacatgactcgtttttcgcgtaa

SEQ ID NO: 45032 - protein, 226 aa, Unknown
  Obtained from environmental sample
  misc_feature (1)..(226): Xaa is any amino acid
MSTLTDNEHTVTIIAEDLYGVKSLPTTRKFRVSLNEPTGTMTYPLYDTVLKEGVELRGTAFDRNGIKEVRASIDNGNTFNKVRGTFGTAAETIQWNYQFNTTILKDGPHVVFIKVLDRYDIPATYAFMINVDNTQPEIILDSPGDGSISVGNISVMGRVLDPNLKEVSLELRSLDGFTIPANLRSRKLDLSSIIRENIDISAMADGQYNLAIIALDRAGKHDSFFA

SEQ ID NO: 45033 - DNA, 1296 bp, Unknown
  Obtained from environmental sample
  misc_feature (1)..(1296): n is a, c, g, or t
atggataccgcccatgttgacgattcgggttatttcgttttcaaaatgaattccgaaaaactcaatactggggttaacgccattacggtaaacagtaattttggaggaccgactgttgtttcatcaaggccatacaatatagtctacaggaacggcggtccgtgggtaacgatagacagctttaaattcgcggaattcgcctatgaaagaccgtatctgtacgggcgcacgggatatgtcttatctgaagaagaccaggaactgcttaaagataaagctacggacaaggcggttaaagccagaatccaaagaaaaattcctgactttacggaaataagttttgataacggaagatcgtttgtaatgacaagcaaagccgcggcaaaaaatattgattaccgttacagattggaagacggagaaatggctgaaggctaccactatatagtagtaagaacgacaatgaaaaacggcgagtttgccctgacaagaatgttagtccaggttgacaagacaaaaccggaaatccgccttatttcaccggaagccggaagcagatacaatcagtcaatcgcttattcagcctccgctactgacgacattgagcttgtaagccttacataccatctccgcgccggagacaaagccgcttacgaagtgcctggtttcctgcaggggctttatattgaaggcgtaatacccccgttcttaagacaacttgccgtttcaaacggttttgacgaatgggttcctacaatgccattcgccggaggctcgacatacactgatttcggccttgggttaagcttctttgacgataacgtaaaaattcaaggacagtacggtttaatgacgcaggatctatacgaagctcttgggggagaaggcgcggttcgttacggcggagacgttattggcctcaagatactcgcgaatatttacacattgcctcttggttcggtatggggacctgattttgactggctttacgcttcattctcggttggtgctaacttctcgcagtttaacttcttaaataaagaaaatgaaaagttctcaacgcctgaaaaaccggtatattatacccagagcggcgcggccacatggttgagcgcgttgttattgcaaatagaattcccaaaagtgacaattccaaagaagaaagctttaagaacgttcagcttgtttacggaaggacagctatggttcgtacctactgacgtaaacgcggagcagatgggcataccagtaatgataccgcatgtgatgatggggttaaggatttacatattctaa

SEQ ID NO: 45034 - protein, 431 aa, Unknown
  Obtained from environmental sample
  misc_feature (1)..(431): Xaa is any amino acid
MDTAHVDDSGYFVFKMNSEKLNTGVNAITVNSNFGGPTVVSSRPYNIVYRNGGPWVTIDSFKFAEFAYERPYLYGRTGYVLSEEDQELLKDKATDKAVKARIQRKIPDFTEISFDNGRSFVMTSKAAAKNIDYRYRLEDGEMAEGYHYIVVRTTMKNGEFALTRMLVQVDKTKPEIRLISPEAGSRYNQSIAYSASATDDIELVSLTYHLRAGDKAAYEVPGFLQGLYIEGVIPPFLRQLAVSNGFDEWVPTMPFAGGSTYTDFGLGLSFFDDNVKIQGQYGLMTQDLYEALGGEGAVRYGGDVIGLKILANIYTLPLGSVWGPDFDWLYASFSVGANFSQFNFLNKENEKFSTPEKPVYYTQSGAATWLSALLLQIEFPKVTIPKKKALRTFSLFTEGQLWFVPTDVNAEQMGIPVMIPHVMMGLRIYIF

SEQ ID NO: 45035 - DNA, 1368 bp, Unknown
  Obtained from environmental sample
  misc_feature (1)..(1368): n is a, c, g, or t
gtgtaccctattccaagcatgaaaattgtacagcaccacggcgctgtggaaataatgcgaggctgtcccaatggctgccggttttgccacgccggttactggtacagaccttgcaggcaaaaagacgaagcggttattgccgctcaggtagatgaaatggtaacaaaaggcggctggcaggaaataagcctgtcctcgctgtcatcgggcgattatacgggaattgcggaattggtggaaaatcttaattcacgtttcagcgataaacacatttcatttcaactgccctcgcttaaagtttcaggtttttcactttcaatactggaaaagatcgccgtaacaagaaaaagcgggcttacatttgccgtagaaacgccgaaagatacatggcaaatgtcaataaacaaggaagtaacaagggattcggttgtttcgataattacggaggcaagaaaaaacggctggaaaggagcgaagttttattttatgatagggcttcccgttcccgattgcggttttaatgaggaagaggaaatagtttcgtttgccgcggatatcgggcgcagatgcagaatgaattttaacattaacgtgngaatatttattcctaaaccgcatactccctaccaatgggcgaagcagattgacagcgaaacagcggaaaaaaaacttaactttatccgctctaaattaaaaccattggggcataaggtaagtatttcagaccctctcatttcacaaatagaaggcttgttaagcaggggggatgaaagagcgggggcattatgcgaacaggcttggctggctggaagcaggcttgatccatggagcgaatatattaacaaagaggaatggcgcaggattttagaagaaaaccgcagcgtcgtagattcaattttatcaggaaaaaataattctttgccttggggaaatattgattccctggtaacgacagagtatcttaagcgtgaatttgaaaaatcggaaaacagcattgttacttcttcatgtaaggaaaattgtaataattgcggattggcgtctgtaattaccgaatgtccgcccaataaaacagaaagccatataagcaaatccgtttcttttgttaaccataaaaatatagaagttaacgatagttcacagcataagccagatccgtcaatatacagggtattgttcagtttcagcaaaaaagagagcgctgtatttcacgggcatttaagccttatagagattttttcaatgtcgttcaggagagcaaatattcccgttatgtatacgcagggttataatccgcttgcaaagatggaatttgcgtccccattatcattaggtgtcagcgcggatttggaaatcgcctctgcgtaa

SEQ ID NO: 45036 - protein, 455 aa, Unknown
  Obtained from environmental sample
  DOMAIN (16)...(180): Radical SAM superfamily
  misc_feature (1)..(455): Xaa is any amino acid
MYPIPSMKIVQHHGAVEIMRGCPNGCRFCHAGYWYRPCRQKDEAVIAAQVDEMVTKGGWQEISLSSLSSGDYTGIAELVENLNSRFSDKHISFQLPSLKVSGFSLSILEKIAVTRKSGLTFAVETPKDTWQMSINKEVTRDSVVSIITEARKNGWKGAKFYFMIGLPVPDCGFNEEEEIVSFAADIGRRCRMNFNINVXIFIPKPHTPYQWAKQIDSETAEKKLNFIRSKLKPLGHKVSISDPLISQIEGLLSRGDERAGALCEQAWLAGSRLDPWSEYINKEEWRRILEENRSVVDSILSGKNNSLPWGNIDSLVTTEYLKREFEKSENSIVTSSCKENCNNCGLASVITECPPNKTESHISKSVSFVNHKNIEVNDSSQHKPDPSIYRVLFSFSKKESAVFHGHLSLIEIFSMSFRRANIPVMYTQGYNPLAKMEFASPLSLGVSADLEIASA

SEQ ID NO: 45037 - DNA, 1062 bp, Unknown
  Obtained from environmental sample
  misc_feature (1)..(1062): n is a, c, g, or t
ttgcagaatattatcgatcataagttcaaaaaaataaatctcttaataatcctctccggcagccagatcggctttatggaaaacgaggttatggggcacaaaagcccgctttttggaagacgcacggcgcagatgaagctcggcagttttgattatattgacgcgtcggcgatgctttcaaaatttagcggcgaagacaaaatcaggctgtattgctgtgtcggcggtacgccttattatctttcgcggattgacaaacagttaagcgttgaaaaaaacctggaaatgcttttttttgaacctacgggctatctctatgaagaacccctcatgctgctcaagcaggaattgagggaaggggcggtatacaattcgattatatccgctatcgccctgggggcggtcaggttaaacgagatttcctcaagaataggggaagaacgtactaaaatgattcgataccttgatactttgataggtcttaacattctgcgtaaggaatttccttttggagaaaatccggaaaaaggcaaaaggggaatttaccgtatcatggataattgtttccgtttttggtatcgttatgtgttcacgaataaaaccgttattgaacagggcgccggctcggcgcttcttaaatcgtttctgccggaactcaacagttacattggcggcccgtttgaagatatttgtatgcagtacatgatacggatgaataatctttcgatgttgccttttgtttttacccagtccggaagatggtggggaacaaacccgaagacccgtcagcaggaagaagtcgatatggttttttccgatacaaagcgctttatttttgccgaatgtaaatggcgcaatgatttgaaagatacggcggctcttaaaacacttattgaaaagtcaaaattgttgatacacgattataataatgatattaaacaacaggatatttttttctatttgttttccaaaatgcccttttcaaaatcttgcgtatcccttgcgcggcagacgggcaatgtggccttaataggtcaaaaggaactttttacccttaaatga

SEQ ID NO: 45038 - protein, 353 aa, Unknown
  Obtained from environmental sample
  DOMAIN (192)...(296): Archaea bacterial proteins of unknown function
  misc_feature (1)..(353): Xaa is any amino acid
MQNIIDHKFKKINLLIILSGSQIGFMENEVMGHKSPLFGRRTAQMKLGSFDYIDASAMLSKFSGEDKIRLYCCVGGTPYYLSRIDKQLSVEKNLEMLFFEPTGYLYEEPLMLLKQELREGAVYNSIISAIALGAVRLNEISSRIGEERTKMIRYLDTLIGLNILRKEFPFGENPEKGKRGIYRIMDNCFRFWYRYVFTNKTVIEQGAGSALLKSFLPELNSYIGGPFEDICMQYMIRMNNLSMLPFVFTQSGRWWGTNPKTRQQEEVDMVFSDTKRFIFAECKWRNDLKDTAALKTLIEKSKLLIHDYNNDIKQQDIFFYLFSKMPFSKSCVSLARQTGNVALIGQKELFTLK

SEQ ID NO: 45039 - DNA, 570 bp, Unknown
  Obtained from environmental sample
  misc_feature (1)..(570): n is a, c, g, or t
atgggattaaacaacgatggggtagagaaaatatctgcaagggtggaaaagcaaattggcaaggcgaacaaaaataaattcgcggttggaatttccgttgcagaaacaccgggaatagcagaagaaaataggcggcaagatttgctggaaactttttcaatagcgtacaaagcagctgattatttggaagtaaatgtgagctgcccttacacatgcgaagaacgtttggatttagatacgtgttttatgaaagagattttttctgaaattgagagttttagaaaaaacgctccttgtcgcaaagcggtttatgcaaaactaagcccagacttaacagacaaacagttgctttctcttttagatttgctcgctcaatttggcgtgaatggaattattcttggaaacacttacccaagcgaaaaactctcttattcccttgccagctttaaacgcccaaggaacaagcggcggaatttctggaaggccactttacgaaaacacattcagaaaatccaccctggcaaaaaaacatttcccgcagctctccattgtggcctgcggcggaattga

SEQ ID NO: 45040 - protein, 189 aa, Unknown
  Obtained from environmental sample
  misc_feature (1)..(189): Xaa is any amino acid
MGLNNDGVEKISARVEKQIGKANKNKFAVGISVAETPGIAEENRRQDLLETFSIAYKAADYLEVNVSCPYTCEERLDLDTCFMKEIFSEIESFRKNAPCRKAVYAKLSPDLTDKQLLSLLDLLAQFGVNGIILGNTYPSEKLSYSLASFKRPRNKRRNFWKATLRKHIQKIHPGKKTFPAALHCGLRRN

SEQ ID NO: 45041 - DNA, 1302 bp, Unknown
  Obtained from environmental sample
  misc_feature (1)..(1302): n is a, c, g, or t
ttggctgcacgctcgtgtcgaatcagtctaagtttttggaagagctcaataaaaataattacacgcacgtattcgtatcttcattcctattcgagagtacggaaaaagatagttaagaatctcggtatagatatcacggtagttctcttggccgagtacggggagaacgtggtgaacacggaggcggtgaagacgcttgaaatgccggtgcactcaatttccatagcgaacttgctgaacggcgccatggatgtcgtttacgcggagaacccgcaggggggcacgccgttcatggcgccgtcggcgcgggtgctgatcgtggacgacctgataacgaatctgcgtgtcgcggaggggctcatgctgccctacaagatgcagatagacgtttgccagagcggcgcggaggcgatagagcaggtgaggggaaagccctacgacattgtcttcatggaccacatgatgccggagatggacgggatagaggcggcgcaaaagataaggggtttggggggcgacgagtacaagcgcttgcccatagtggcgctgacggcgaacgcggtgtcgggcgtgcgggaaatgtttttgcaaaatggattcaatgattttttggcgaagccgatagaaatgatgaagctcaacgcgatcttggacgcgtggctgccggcggaaaagaagatgccgtacgtggccgaggaggaggacgcctacgcgcccgctttcgagataccgggaatagatgtgagctccggcgtgcagatgacgggcggcaacgagcgcaactatttgcgcgcgctatcggcgttctacaaggacggcacggacaagctgtcgcagctctccgagagttttgagcgcggcgacacgaaggcctacgcggcttgcgcccacgcggttaagggcgccggggcgagcgtcggcgccgtgaaactgtcgagcttcgcgaaggcgcttgagctggcggcgaagaacgagaatttaaactatataaagaagaatcacgagacgttcatggacgagttcaaaacgcttctcggcaacatccgttacgtggtgtcgccggaggggaagcaaacgaacgccgttatgcccgactcggagttcataaaggggcatttgaccgagctgcggaacgcgctagtggagttcaacatagaggcggcggataacgcgctgtccgtgttattgggagagcagttggacgcggcgacgggtgagatgttggagcgggtgtcgaacaagattctgatttgcgagtacgatcaagcccttgtgattgttgagggaatgttggggtgttaa

SEQ ID NO: 45042 - protein, 433 aa, Unknown
  Obtained from environmental sample
  DOMAIN (264)...(340): Hpt domain
  misc_feature (1)..(433): Xaa is any amino acid
MAARSCRISLSFWKSSIKIITRTYSYLHSYSRVRKKIVKNLGIDITVVLLAEYGENVVNTEAVKTLEMPVHSISIANLLNGAMDVVYAENPQGGTPFMAPSARVLIVDDLITNLRVAEGLMLPYKMQIDVCQSGAEAIEQVRGKPYDIVFMDHMMPEMDGIEAAQKIRGLGGDEYKRLPIVALTANAVSGVREMFLQNGFNDFLAKPIEMMKLNAILDAWLPAEKKMPYVAEEEDAYAPAFEIPGIDVSSGVQMTGGNERNYLRALSAFYKDGTDKLSQLSESFERGDTKAYAACAHAVKGAGASVGAVKLSSFAKALELAAKNENLNYIKKNHETFMDEFKTLLGNIRYVVSPEGKQTNAVMPDSEFIKGHLTELRNALVEFNIEAADNALSVLLGEQLDAATGEMLERVSNKILICEYDQALVIVEGMLGC

SEQ ID NO: 45043 - DNA, 729 bp, Unknown
  Obtained from environmental sample
  misc_feature (1)..(729): n is a, c, g, or t
atgatgagaaataaatttgcgccgcttttccttgcgcttcttctgtgctcatgccggagtataaatcacagtagagcggaacttaacatacccccttccatagtttatttcagttttgatgacggacccaacgccacagataatacaacagccctgttgctggatgtgcttaataaatatcaaattaaagctgttttttgtttgttaggagttaatgcggaacatgctcctgaactggtcaaccgtatatacgatgaaggacattgtattgttaatcacgggtactccgaaaaatgtgcaggcaggatgaacgatgatgaattccggaataatctaattcggggggaagcggcaatttccgctgccatgggacgcggtatgtatcccaagctgtaccggcctcagggcggtttttacacctccgctcatgaaaaaatcattagcgatgaaggttatatattggttccatgcaatatcagggtatatgatgcggttattgacggaacaaaacaaagtaaagttgtaagggaaattatcagaaaagttgaaaaacagggcggagggattattttactccatgacgcagaggattcttatgttcaggcggaagagcggattgcaaagacacccccaggcgtttttaaccgctcatggattccaaacgcggtagaaaaaataattactattcttttggacaaggttttatttttgacagtcccgatattttaa

SEQ ID NO: 45044 - protein, 242 aa, Unknown
  Obtained from environmental sample
  SIGNAL (1)...(26)
  DOMAIN (28)...(155): Polysaccharide deacetylase
  misc_feature (1)..(242): Xaa is any amino acid
MMRNKFAPLFLALLLCSCRSINHSRAELNIPPSIVYFSFDDGPNATDNTTALLLDVLNKYQIKAVFCLLGVNAEHAPELVNRIYDEGHCIVNHGYSEKCAGRMNDDEFRNNLIRGEAAISAAMGRGMYPKLYRPQGGFYTSAHEKIISDEGYILVPCNIRVYDAVIDGTKQSKVVREIIRKVEKQGGGIILLHDAEDSYVQAEERIAKTPPGVFNRSWIPNAVEKIITILLDKVLFLTVPIF

SEQ ID NO: 45045 - DNA, 918 bp, Unknown
  Obtained from environmental sample
  misc_feature (1)..(918): n is a, c, g, or t
gtggcgcacagctacgtgaggcctctgctgaaaccgggcgacgagattgtcctgacgatattggagcatcacgccaatatcgtgccgtggcagctgatagctcaggagacgggcgcgattatcaaggttgcgccggttgactccgacggtcagattatcctctccgagtacacgcgcctcttcggcccgcgtacgaggttcgcgtcggtcacgcacgtctccaacgcgcttggcacgattacgcccgtacacgagatggtgcagatcgctcacggtttcggcgtcaggatattggtggacggcgctcagtctgttgcgcatacgccgataaacgtcaccgcgctggacgcggacttcttcgtcttctccgggcataagatattcgcccctaccggtataggggccgtgtacggcaagaccgacgccttaaacgaggcggcgccttaccaaggcggcggcaatatgattcgtgacgtaacgtttgagcgcacggtgtacaacccccctcccagtaagtttgaagccggtacggggagcatcgccgacgccgtaggattaggcgccgcgcttgactatgtctcgcaaataggattgcccaacatcagcgcctacgagcacgaactgcttgactatgccacatgcgaattatgtggcataaaaggtttgcgcttcataggcaccgcgaaggagaaagcaagcgtactctctttcgtgttggaaggcgcgacgacggagcaagttggaaagcacctagccgaccgcggcatagccgtccgagccggccaccactgcgcccaacccatacttcgtcactacggcctggaatccacagtccgtccgacgctggcgttctataacaccgccggcgaggtagacgaattggtacgtgcggttagagaaatagcgccgaagttttaa

SEQ ID NO: 45046 - protein, 305 aa, Unknown
  Obtained from environmental sample
  DOMAIN (1)...(294): Aminotransferase class-V
  misc_feature (1)..(305): Xaa is any amino acid
MAHSYVRPLLKPGDEIVLTILEHHANIVPWQLIAQETGAIIKVAPVDSDGQIILSEYTRLFGPRTRFASVTHVSNALGTITPVHEMVQIAHGFGVRILVDGAQSVAHTPINVTALDADFFVFSGHKIFAPTGIGAVYGKTDALNEAAPYQGGGNMIRDVTFERTVYNPPPSKFEAGTGSIADAVGLGAALDYVSQIGLPNISAYEHELLDYATCELCGIKGLRFIGTAKEKASVLSFVLEGATTEQVGKHLADRGIAVRAGHHCAQPILRHYGLESTVRPTLAFYNTAGEVDELVRAVREIAPKF

SEQ ID NO: 45047 - DNA, 696 bp, Unknown
  Obtained from environmental sample
  misc_feature (1)..(696): n is a, c, g, or t
atgatgggcatcatcgagttccagaagagattcggcacggaggagcagtgccgcctccacctgttcagggcgcggtggccgaagggcttcgtgtgcccgaagtgcggcggcggggagcacttcgacatcaggtcgcgccgcctgttccagtgcaagtcctgcggccaccaggcgtcggccacggccgggacgataatggacaagacgcgcaccccgctggccaagtggttcatggcgatctacctgatggccgccgacaagcggggcgtgagcgcgctggccctggcgaagcacataggcgtcgcctactacaccgcgtggacgatgtgccacaaaatccgccacgcgatgggcgcgagggacggcggccgcaagctgggcggcacggtcgaaatggacgagaccttcttcggtgcgcccgaggaggggggcaagcgcgggcgcggcgcggagaagacgccggtgctggtctcggtgtcgctcacgggcgggggcaagccaaaggccgcaaggatgaaggtggtgggggccgtgggccgcggggaggtgaaagagttcgccgaggccgcggtcagcgggggcagcgaggtgcgcacggacgggctgcacgtgtacaggcagctggcggggctcggcttcaggcacgtctggaagaggcacgacccgaggcgcacctccgctggatgcacgtcataa

SEQ ID NO: 45048 - protein, 231 aa, Unknown
  Obtained from environmental sample
  misc_feature (1)..(231): Xaa is any amino acid
MMGIIEFQKRFGTEEQCRLHLFRARWPKGFVCPKCGGGEHFDIRSRRLFQCKSCGHQASATAGTIMDKTRTPLAKWFMAIYLMAADKRGVSALALAKHIGVAYYTAWTMCHKIRHAMGARDGGRKLGGTVEMDETFFGAPEEGGKRGRGAEKTPVLVSVSLTGGGKPKAARMKVVGAVGRGEVKEFAEAAVSGGSEVRTDGLHVYRQLAGLGFRHVWKRHDPRRTSAGCTS

SEQ ID NO: 45049 - DNA, 834 bp, Unknown
  Obtained from environmental sample
  misc_feature (1)..(834): n is a, c, g, or t
gtgccgcctccacctgttcagggcgcggtggccgaagggcttcgtgtgcccgaagtgcggcggcggggagcacttcgacatcaggtcgcgccgcctgttccagtgcaagtcctgcggccaccaggcgtcggccacggccgggacgataatggacaagacgcgcaccccgctggccaagtggttcatggcgatctacctgatggccgccgacaagcggggcgtgagcgcgctggccctggcgaagcacataggcgtcgcctactacaccgcgtggacgatgtgccacaaaatccgccacgcgatgggcgcgagggacggcggccgcaagctgggcggcacggtcgaaatggacgagaccttcttcggtgcgcccgaggaggggggcaagcgcgggcgcggcgcggagaagacgccggtgctggtctcggtgtcgctcacgggcgggggcaagccaaaggccgcaaggatgaaggtggtgggggccgtgggccgcggggaggtgaaagagttcgccgaggccgcggtcagcgggggcagcgaggtgcgcacggacgggctgcacgtgtacaggcagctggcggggctcggcttcaggcacgtctggaagaggcacgacccgaggcgcacctccgctggatgcacgtcataatctcgaacgcgaaggccatggcgggcgggacgttccacgggcttgacgcgaggcgcctccagcggtacctggacgagttctgctaccgtttcaacaggcggctgtcaccagacggcatcttcggcaggctgctggacgcctgcctctgtgccggcaggatcaccgcgcatgagctaattggatag

SEQ ID NO: 45050 - protein, 277 aa, Unknown
  Obtained from environmental sample
  misc_feature (1)..(277): Xaa is any amino acid
MPPPPVQGAVAEGLRVPEVRRRGALRHQVAPPVPVQVLRPPGVGHGRDDNGQDAHPAGQVVHGDLPDGRRQAGRERAGPGEAHRRRLLHRVDDVPQNPPRDGREGRRPQAGRHGRNGRDLLRCARGGGQARARRGEDAGAGLGVAHGRGQAKGRKDEGGGGRGPRGGERVRRGRGQRGQRGAHGRAARVQAAGGARLQARLEEARPEAHLRWMHVIISNAKAMAGGTFHGLDARRLQRYLDEFCYRFNRRLSPDGIFGRLLDACLCAGRITAHELIG

SEQ ID NO: 45051 - DNA, 960 bp, Unknown
  Obtained from environmental sample
  misc_feature (1)..(960): n is a, c, g, or t
ttggtttttgtcgtcactccttggctgctgcacgtacccaacgccgtcgcagcgatggagggcggagcccacgccgcagtggaggtcccagccgccattgacttaaatggatgctggcagttggtggaagtttccgaaaaaacccgccgccactgcatgatgatggaaaattgcaactatggccgcactgaaatgatggttctgaacatggtggaaaaaggcctctttggcaccatcacccacggcgaagcagcctacattcacaatctgcggactccatggtacataagcaaaaccaacgtcggtccttggcgccgccccatgcacacccgcttcaacgggaacctgtatcccacccacggattgggtcccgtctgctggtacatgggcatccacaaaggcgaccgtctggcaagcttagtcagcttcagttcgcctgaagcctccctcaccgagttcatgaatgaaaaacttgaggcaggagacccaaggaggggcgaaaaatacatttgcggcgacatgaacactagcatcatcaaaacagcaaaggggcgcaccatcatgctgcagcacgacgttgtcaccccgcgcccgtacagccgccacaacatgatacaaggcagcaagggctgctttgccgactacccagcgcgcatacacatagacggtgtgaccagagagcatcaatgggacaatgacatgaaatcttgggatgaaaagtacggccatcccctctggaaagagcttgaggaacaggccaagctgagcggccatggtggaatggacttcatcatgaactaccgccttgtccagtgcatgaagcaagggttggttccagactttaatgtttacgatgccgctgcatggagcgcaccgttccccctcagcatcgccagcgtgcagagcaacggcaaaccccaggatttccctgacttcaccaagggtctgtggaaggggtga

SEQ ID NO: 45052 - protein, 319 aa, Unknown
  Obtained from environmental sample
  misc_feature (1)..(319): Xaa is any amino acid
MVFVVTPWLLHVPNAVAAMEGGAHAAVEVPAAIDLNGCWQLVEVSEKTRRHCMMMENCNYGRTEMMVLNMVEKGLFGTITHGEAAYIHNLRTPWYISKTNVGPWRRPMHTRFNGNLYPTHGLGPVCWYMGIHKGDRLASLVSFSSPEASLTEFMNEKLEAGDPRRGEKYICGDMNTSIIKTAKGRTIMLQHDVVTPRPYSRHNMIQGSKGCFADYPARIHIDGVTREHQWDNDMKSWDEKYGHPLWKELEEQAKLSGHGGMDFIMNYRLVQCMKQGLVPDFNVYDAAAWSAPFPLSIASVQSNGKPQDFPDFTKGLWKG

SEQ ID NO: 45053 - DNA, 438 bp, Unknown
  Obtained from environmental sample
  misc_feature (1)..(438): n is a, c, g, or t
atgcttaaaccttatgatttactcgaaaagatactgtttgatattgaaaacggcatcaaaaataatataaacgcgtccgttctttccaaaaaatacgatttttcggaaggccatttgcgcagattattcagttttgctttcaaacaatccatcgccgcttatatacgttcccgcacattggcggcaagcttaaacgatatattggaaacgaataccaatattcttgatatagcgcttgaatacggctttgaatatgaacagtcatatatcaggactttcaaacgtgaattcggaataacccccggcgatttgcgaaaaacggggcagattatacaaattaagccgccgcttcatctttttgacaaaaaaagagtagataacggagttttatttggacccggattttgtaatggttccgcggtttcatgttataggtaa

SEQ ID NO: 45054 - protein, 145 aa, Unknown
  Obtained from environmental sample
  DOMAIN (62)...(106): Bacterial regulatory helix-turn-helix proteins, AraC family
  misc_feature (1)..(145): Xaa is any amino acid
MLKPYDLLEKILFDIENGIKNNINASVLSKKYDFSEGHLRRLFSFAFKQSIAAYIRSRTLAASLNDILETNTNILDIALEYGFEYEQSYIRTFKREFGITPGDLRKTGQIIQIKPPLHLFDKKRVDNGVLFGPGFCNGSAVSCYR

SEQ ID NO: 45055 - DNA, 1788 bp, Unknown
  Obtained from environmental sample
  misc_feature (1)..(1788): n is a, c, g, or t
ttgtccctgtacgagtgggtcaaagaacggatcgccatccccttggatgaatgggaaaccctgtgcgcgtcgctccccgaaaagctcaaacaggagctttcacaattaaactcaaacgaccggctggtaatggttaagcgtaacgatgccgcctttccttcgatggttcaccgcgaatgggaagaatcatggcggcgcgatcctttgcccctgctcggcccctggctgcgttatgaaggcccaatccccctgttgcgcattgccggggtttttggcataagccttgccgaagccgaggacgccgtcaacgcccttgccgaagttgaggaagtagtctgtgatgtgcgtcttgcggaagatacttctccgctcatctgtgacagtagaaactttgagatgctgttgcgtctttcccggcgaaaacagcggcctgaaattatcgaaaggcccgccgctcttttggttcccttcattgctttacggcaaggtttaacaatgagcaatgggggcacagctttaagcgtggctactattaaaaaactaaatgcttgctgtgcgcctattaaattgtgggaaaccgaattctttaccgcgcgttgcgctcattacagcccggaaattattaacagtgaaattaacgaaggccgactggtctggtacggcgcangaaaggaaaagattgngttgtgccggcccgaggatctggaactggtgaacgcgaatactgttcataaatccaggcagaagaaacattcggaagtcgaaaccagagaaactgggcttccttcggaagccttcgcgcggttaattgataacggtttttttgatcgtccgcgggatttttgggaaataaaggacgctattaatgcaggtgcgaagcggaacatcaccagtaaagagtgcgccgatgccctttggcaggaagcgtggcagggaaggctgtcgtcagactcctttgaaccgcttcgccggggtattcaattcgggttcacgataaagaacacggaaacttctgaacaaccgccccagtcaagtttaggttctccgcgtatgccccgcgtcccgcgttctttacgggatcgctggcgggacggggcgccggtatcgggcaggtggttttcgattgttcttaatgatgttgaaaacacagagcagggccaatggtgggatgacccgcttgaggaggatgggcggaaccgggacagggtacgcctgttgctggcgcgttggggtattctctgccgtccgctcatggaaaaagtttccaaaagcgagctctcgccttttacatggtcggggcttttgccgaccatgcgccgtatggaactatctggcgagcttgttgcgggccgtttcttcgccggaattaattccctgcaatttgcctcgcccgctattgcgcgtgagcttgaaaacgccgaggctgttgacggcatatactggatgaacgccgcgatcccggcaagccccgcgggacttgatattgaaggggtggacccccgccttcccgaccggctggcatccagccgcgtctatttccggggctcgcagcttatcgccgtgtcaaaccgaaacggtaaagagcagcacatctgcatagcccccgatgatcctgacattccagccttgatcgatcttattaaaataccccgtacaagaaaattccttcctgacaataaaatcgttattgataccatcaacgacaaaacagccgggcagagtgaatacgcgcgtgtttttcaggactgcggatttatccctgaccgcggcaggctctgcctttggtaa

SEQ ID NO: 45056 - protein, 595 aa, Unknown
  Obtained from environmental sample
  misc_feature (1)..(595): Xaa is any amino acid
MSLYEWVKERIAIPLDEWETLCASLPEKLKQELSQLNSNDRLVMVKRNDAAFPSMVHREWEESWRRDPLPLLGPWLRYEGPIPLLRIAGVFGISLAEAEDAVNALAEVEEVVCDVRLAEDTSPLICDSRNFEMLLRLSRRKQRPEIIERPAALLVPFIALRQGLTMSNGGTALSVATIKKLNACCAPIKLWETEFFTARCAHYSPEIINSEINEGRLVWYGAXKEKIXLCRPEDLELVNANTVHKSRQKKHSEVETRETGLPSEAFARLIDNGFFDRPRDFWEIKDAINAGAKRNITSKECADALWQEAWQGRLSSDSFEPLRRGIQFGFTIKNTETSEQPPQSSLGSPRMPRVPRSLRDRWRDGAPVSGRWFSIVLNDVENTEQGQWWDDPLEEDGRNRDRVRLLLARWGILCRPLMEKVSKSELSPFTWSGLLPTMRRMELSGELVAGRFFAGINSLQFASPAIARELENAEAVDGIYWMNAAIPASPAGLDIEGVDPRLPDRLASSRVYFRGSQLIAVSNRNGKEQHICIAPDDPDIPALIDLIKIPRTRKFLPDNKIVIDTINDKTAGQSEYARVFQDCGFIPDRGRLCLW

SEQ ID NO: 45057 - DNA, 1005 bp, Unknown
  Obtained from environmental sample
  misc_feature (1)..(1005): n is a, c, g, or t
atgatcgccttcacaaaaacactgagcagctatcttgaaaaaaaaagagcgaatacactttttgctgtcctgcgtaattattacaccgagaacagtccctatctgattattgataccgccagaggaagaaaaataaacgaaacatcaaggcagattttgcatggattcattataaatacttttattccgtttttacagaaaaacaaaataaggcgattcagcaatataaagcctgtcgttatgcgtaactttcaaaattacctgctcattgaaaaaaagatgctcccgcagtcgattaaccggcagatgggcggaatcaaggcaatattcagtcatttatttatggcgggcattatcaaacacaatatcgtaaaggacatatcgcccttaagacccgccaatagcaggatcagggggtgctattcggttgacgagctaaaaggaatattcaaagatacatggaaagataaaaaatcctatttgctgtgttcaattatttattccaccggaatcagaaacagcgaattgcagaatcttaaggttaaagaccttattgtcagggaaaatgtggattttctaaatattgtaaaaagcaaaacctcaagcggtatacgaaccataccgcttcatcctaaagtacgaaaaacgcttgaggaatggatagatgagaacaagctctcgggcgaagactgtctttttgtaagaaactgtaacaagcggatttttaaaaacgccaaaaaagcaggcatattcatgggttcgcttttggggaaggggcagaacgaactggaaaatgaaaatataaccttttattcaggacgccatttttacaaaaccatgctgaacctctacaatatgggagatgttgaggaagtattcatgggccataaggtcagcaaaaatgtcagcgagcgttataatcacaaagacaagagaggagaaaaagaactccttgcggcagcaaaaagggcaatagaaatagtcgataattcactgtttcaatga

SEQ ID NO: 45058 - protein, 334 aa, Unknown
  Obtained from environmental sample
  DOMAIN (130)...(316): Phage integrase family
  misc_feature (1)..(334): Xaa is any amino acid
MIAFTKTLSSYLEKKRANTLFAVLRNYYTENSPYLIIDTARGRKINETSRQILHGFIINTFIPFLQKNKIRRFSNIKPVVMRNFQNYLLIEKKMLPQSINRQMGGIKAIFSHLFMAGIIKHNIVKDISPLRPANSRIRGCYSVDELKGIFKDTWKDKKSYLLCSIIYSTGIRNSELQNLKVKDLIVRENVDFLNIVKSKTSSGIRTIPLHPKVRKTLEEWIDENKLSGEDCLFVRNCNKRIFKNAKKAGIFMGSLLGKGQNELENENITFYSGRHFYKTMLNLYNMGDVEEVFMGHKVSKNVSERYNHKDKRGEKELLAAAKRAIEIVDNSLFQ

SEQ ID NO: 45059 - DNA, 399 bp, Unknown
  Obtained from environmental sample
  misc_feature (1)..(399): n is a, c, g, or t
atgaaagaattacagcccatcgccgaattcgcccggagaatcagagaaaacatcgaaactgttttccttggaaaaaccgctgttgttgatatgcttataaccgcttttcttgcccgagggcacatactgcttgaagatgtgccaggtacgggaaagacaattttggcgcgcgcattcgcgtcaagccttaacctcagctttgccagaatccagtgtacgccggatttgctgcccgccgacatactcggcgtttcggtatggcagcagaacgaagagttagaggacaaaatcgaaccttcggttcgcgggcgttttgtgtacaggcctgggccgctcgtgaatcaatttgtgcttgtggatgaaataaaccgcgctaccccgcgacccatccgcctttga

SEQ ID NO: 45060 - protein, 132 aa, Unknown
  Obtained from environmental sample
  DOMAIN (41)...(132): ATPase family associated with various cellular activities (AAA)
  misc_feature (1)..(132): Xaa is any amino acid
MKELQPIAEFARRIRENIETVFLGKTAVVDMLITAFLARGHILLEDVPGTGKTILARAFASSLNLSFARIQCTPDLLPADILGVSVWQQNEELEDKIEPSVRGRFVYRPGPLVNQFVLVDEINRATPRPIRL

SEQ ID NO: 45061 - DNA, 903 bp, Unknown
  Obtained from environmental sample
  misc_feature (1)..(903): n is a, c, g, or t
atgttaatatgggcaatctgcgtattgcttgccattttcctttttacgcccattgctctggctcagtttttatgtatcttctttctgctcatgttgataggctcaaggctctacgttgaataccttatcagaaaaatccgggtaatcaggcaggattcggaattgagggtgttccggcatgaatgggtacaggtggaactaaagctggaaaaccgcgggctgcttcccgcctttatgctggttcttggagacgcgtcgggaagtttggctgttctgaggttacgcaaaattatctgcgctttggggcggcgttcatggatcatgatgcgttggcagggttattgtgccgaccgggggatctttacccttggccctgctatggtacgtggagccgatcctttgggcctttttccgtttcagctaacggcagtcgaaacatcattgctttatgtataccctgttttatgttccatcagcattaagcgcatcgcgggtattcccctgggaaatataataagtcccaaccccctgtttgaagatactacccgttacagatcgctgcgccagtataatccgggggatgaacctcgccgcatcaactggaaaatgagcgcccgcatgggctccatcatggtcaatgaatacgatgccactgcctcatatccccttatgatttttcttaacgcggatcagaatgaatatccgttaaaaaagcggggtatctttattgaacgcgccattgaagccgctgccgctctttgcctgaaggccgcgcaggaacggcaggaattggggattgttctctacacttcttccggaaaggagggaatctctgttatcgcgccatccgcttttacccttgttcccattctgagcgatggcctcggcctatctgatcattga

SEQ ID NO: 45062 - protein, 300 aa, Unknown
  Obtained from environmental sample
  SIGNAL (1)...(21)
  DOMAIN (116)...(218): Protein of unknown function DUF58
  misc_feature (1)..(300): Xaa is any amino acid
MLIWAICVLLAIFLFTPIALAQFLCIFFLLMLIGSRLYVEYLIRKIRVIRQDSELRVFRHEWVQVELKLENRGLLPAFMLVLGDASGSLAVLRLRKIICALGRRSWIMMRWQGYCADRGIFTLGPAMVRGADPLGLFPFQLTAVETSLLYVYPVLCSISIKRIAGIPLGNIISPNPLFEDTTRYRSLRQYNPGDEPRRINWKMSARMGSIMVNEYDATASYPLMIFLNADQNEYPLKKRGIFIERAIEAAAALCLKAAQERQELGIVLYTSSGKEGISVIAPSAFTLVPILSDGLGLSDH

SEQ ID NO: 45063 - DNA, 753 bp, Unknown
  Obtained from environmental sample
  misc_feature (1)..(753): n is a, c, g, or t
ttgctgcccgccgacatactcggcgtttcagtgtggcggcagaacgaagaatttgaggacaggaaaggccgttttgtttacagaccgggaccgctggtgaatcaatttgtgcttgtggacgagataaaccgcgctaccccgcgcacccagtccgctcttttggaagctatggcggaagggcagatttccgttgacggagaacgccatgccttgcctgagcctttctttgtgctggctactgagaatcccgttgaatttgaaggaacctttccactgccggaagcccaaaaagaccgtttcctgctttcgctgggtatcggttatcctgacaccggctctgaagccctgattcttgaaaaccagcgccgccttacacatccggttaccgaccttaaaccggtggctcaggcagaggaaataacacctctacaagatgcggtaagccatattcatgttgacccgatggtcagggattaccttctaagccttgtaacggcaaccaggaatgaaagccgcctgcgagtcggtatatcgccccgcgggagtctcgccctgtatcgttcggcgcaagcctatgccgctgtgcaaaaccgcggctacgttaccccggaagatgtaaaaaaaatggcgggaagcgtattccgccagagactccttttatcttccgagtctattgtacgcggaatacagcctgagcggatcattcagacaatacttgatacgactcccatccccgaataccggacatcataa

SEQ ID NO: 45064 - protein, 250 aa, Unknown
  Obtained from environmental sample
  DOMAIN (1)...(102): ATPase family associated with various cellular activities (AAA)
  misc_feature (1)..(250): Xaa is any amino acid
MLPADILGVSVWRQNEEFEDRKGRFVYRPGPLVNQFVLVDEINRATPRTQSALLEAMAEGQISVDGERHALPEPFFVLATENPVEFEGTFPLPEAQKDRFLLSLGIGYPDTGSEALILENQRRLTHPVTDLKPVAQAEEITPLQDAVSHIHVDPMVRDYLLSLVTATRNESRLRVGISPRGSLALYRSAQAYAAVQNRGYVTPEDVKKMAGSVFRQRLLLSSESIVRGIQPERIIQTILDTTPIPEYRTS

SEQ ID NO: 45065 - DNA, 1065 bp, Unknown
  Obtained from environmental sample
  misc_feature (1)..(1065): n is a, c, g, or t
ttgggaactgtttttgacgaacagatttacgatgacatcgaaggcgacaagcgcgaaaactttatgttgcactacaactttcccccctattcagtcggcgaggttgggagaatgggaactggacgcagggagatagggcatggcaatttagcccaacgttctttaaaagcgatgattcccacaaaagatgaattcccgtatacggtccgcgtcgtctccgaaattatggagtctaacggctcttcttcaatggcgtcagtctgcggtggaaccctttccatgcttcatgccggagtcccgatgaaaaaacccgtagcgggcatagcaatgggtcttatcactgagggaaaagccggtcccggggacaggttcgcggtgttatctgacattttaggcgaggaagaccacttgggtgacatggactttaaagtcgcgggaacaaaagacggaataaccggttttcaaatggacataaaaatcgcgggtgtaagcccagaaattatgcgcaaggcgcttgatcaggcaaaacggggaaggatgcatattctttcgataatgaaccaatgtatagacaagcctgtcgagcaaatcagcgaatacgcccccaagattgtcactttacggattgacattgataagatcggggcgcttatcggtcccggcggaaagaacattaaagcgttatgcgaacaatactctgttaaaattaacacggaagacgacggcactgtgacgattttcggcaaaacttcaaaagacgcggaagacgcgaaagccgcggttgtaggaatcgcctgcgatccggaagttgataaggtatacaatggcactgtaaagcgcataatggactttggcgcgtttgtggagattctccccggtaaggaaggacttgtccacataagcaaactttcaaggcagaggatcgagaaagttaccgacgtgttaaaggaaggtcagcagatacccgttaaattgcttgaaattgacaaacagggtcgtctcaatctttcgtacatagacgccattgatccgtcgggcgctcccggcggtcaacgcaagaattaa

SEQ ID NO: 45066 - protein, 354 aa, Unknown
  Obtained from environmental sample
  DOMAIN (1)...(100): 3' exoribonuclease family, domain 1
  misc_feature (1)..(354): Xaa is any amino acid
MGTVFDEQIYDDIEGDKRENFMLHYNFPPYSVGEVGRMGTGRREIGHGNLAQRSLKAMIPTKDEFPYTVRVVSEIMESNGSSSMASVCGGTLSMLHAGVPMKKPVAGIAMGLITEGKAGPGDRFAVLSDILGEEDHLGDMDFKVAGTKDGITGFQMDIKIAGVSPEIMRKALDQAKRGRMHILSIMNQCIDKPVEQISEYAPKIVTLRIDIDKIGALIGPGGKNIKALCEQYSVKINTEDDGTVTIFGKTSKDAEDAKAAVVGIACDPEVDKVYNGTVKRIMDFGAFVEILPGKEGLVHISKLSRQRIEKVTDVLKEGQQIPVKLLEIDKQGRLNLSYIDAIDPSGAPGGQRKN

SEQ ID NO: 45067 - DNA, 444 bp, Unknown
  Obtained from environmental sample
  misc_feature (1)..(444): n is a, c, g, or t
gtgaatgaggtacttgtaaaagtagttaaaaatgctccgcgcgcggttcttccccagtacgaaacaggggggtccgccggtatggacttgcgcgcactccttgacgccgatatttcaatacctccccttggaagggtaaaaatccccacaggtcttaagctcgaaatccccgaaggttatgaggggcaggtgcgtccgcgctcaggtttggcgataaaaaaagggctaaccgttcttaattcgcccggcacgatagactccgattatagaggagatttagacataattttaataaatttgggctcaggtgatattataattaaagatggggagcgaattgcccaacttgtaatcgctcccgtttgtagggcgaaccttgtggaggttggcgatcttggcacaacggcgaggggcggcggcggttttggatctaccggcgcgtag

SEQ ID NO: 45068 - protein, 147 aa, Unknown
  Obtained from environmental sample
  DOMAIN (13)...(146): dUTPase
  misc_feature (1)..(147): Xaa is any amino acid
MNEVLVKVVKNAPRAVLPQYETGGSAGMDLRALLDADISIPPLGRVKIPTGLKLEIPEGYEGQVRPRSGLAIKKGLTVLNSPGTIDSDYRGDLDIILINLGSGDIIIKDGERIAQLVIAPVCRANLVEVGDLGTTARGGGGFGSTGA

SEQ ID NO: 45069 - DNA, 765 bp, Unknown
  Obtained from environmental sample
  misc_feature (1)..(765): n is a, c, g, or t
ttgtggaggttggcgatcttggcacaacggcgaggggcggcggcggttttggatctaccggcgcgtagagtgggcgcatacggcggctttattattgacggaatggcaatgaaagattttattgattcaattattttttattttcaacggcgaaacgccaattcccttgaaagcaaacgctttttatctaaaaccatattccattatatattatccgaaatgcttttttcgtttgttatttgtttcggttttttcttttttatcttctttgtaaaccaaatacttcttatggcgaaagaaattctcaccaaacgcgtgccttttaatcaagtcgcgctattaatacttttttcactgcccaccgtaatcgcaatgtcggccccgttcgcgtgccttgtaggaactcttatgaccgtagggcgtttaacgtccgataacgaaatacttgtcatgctctcatcaggcctgtcatataaaaatgtttttttcccggccataactgttgggataattatttcccttttatcattctttacaaacgacgtactgcttccggcgggtaccgtacaattcaacaaattgtggcgtaatattcttgtttccacccccgcgcttgaaatggaagccaattcggtaaaaaaattcaaggataccgtaattgtcacgggcggcgtaaaagacaatgtaattgaaaatttgcttatcatggataaaaccgaagacggtagcgcaggatttaatggaaacagcgctcggcctatctga

SEQ ID NO: 45070 - protein, 254 aa, Unknown
  Obtained from environmental sample
  misc_feature (1)..(254): Xaa is any amino acid
MWRLAILAQRRGAAAVLDLPARRVGAYGGFIIDGMAMKDFIDSIIFYFQRRNANSLESKRFLSKTIFHYILSEMLFSFVICFGFFFFIFFVNQILLMAKEILTKRVPFNQVALLILFSLPTVIAMSAPFACLVGTLMTVGRLTSDNEILVMLSSGLSYKNVFFPAITVGIIISLLSFFTNDVLLPAGTVQFNKLWRNILVSTPALEMEANSVKKFKDTVIVTGGVKDNVIENLLIMDKTEDGSAGFNGNSARPI

SEQ ID NO: 45071 - DNA, 1656 bp, Unknown
  Obtained from environmental sample
  misc_feature (1)..(1656): n is a, c, g, or t
gtgatggaatttatcggggacggaatcgaaaaactgacggttgattttaggaacgggattgacgtaatgacaaccgagaccgcttgctggtcttcaatatggaaaaccgacgcgcaggtgaaaaagtatcttgaagagcggggcaggggaggcgattacagggaattaaagcccgcttccgccgcatattacgacggatttataaaagtcgatctttctaaaattgaaccatgtatcgcgcttccttttcatccgagtaatgtttacacaataaaaaacctgcaaaaaaacgcaaaagatattttcgccaaaatagaaaaagaaaacaaagacgcgggtattaacctgaatctgggcgttaaatgccatgacggcggaatatgggcggatcaggcggttatagccggctgttccggcgggattttctcaaacatcatggcggcttctgacatattaaaggggcactcaactggaagcggcaatttttctttaagcgtgtatcccgaaagccagcctacttatcttgaactggtaagaaacggcgcggtagagacttttatgaaagcgggcgcgcttgtccgcgaggctttctgcggcccgtgtttcggcgcgggagacacgcccgcgaataacgagctttccatccgccacgttacgcgcaatttcccgaaccgcgaaggttccaagcccggagacgggcagatcgcctgtgtcgcgctcatggacgcgcgttcaatcgccgcgaccgcctttaacaaaggcaggataacggccgcgacggaactgcaagttccttatggcaagtacaagtttttctttgacaaggacgtgtacgacaagcgggtttataacggaacctcaaagcccctgccgcaaaccgatcttgtccttggccccaacatcagggactggcccgcgatgcccgcccttgccgagaatctactcgtaaagatagcgtgtttcatcacagacccggtaaccaccaccgacgagctgatcccctcgggcgagacatcttcatacaggtcaaaccccctcaggcttgcggaattcactctaagccgcaaagaccccaaatacgtgcagagagcgaaagatatacacgctcttgtacctcaaccgagcccgtcgggcgtcgaaccagaggttcgcggttcccctcttgaacaggcgcgccaaaacaataagcaagacccggagatcgccgcgctcctcaaaaaaatccatgccatacccgattgccctaatagtcgcaaagaacagatcggcattggcagcgcaattttcgcccgcaagcccggagacggttccgcccgcgagcaggccgcttcctgccagcgcgtgcttggcgcgtccgcgaacttcgccctggaatacgccaccaagcgctaccgttccaacctgattaactggggcatactcccctttatcatcaccgatgaaacagccctcggtcttgacagttggatttttatcccgaacatccaaaaacaggtgcgggaaaaagccgcagatatcaaagcttatgtgttaggcgacaacatgacggaaataaccgttacccttggcgagcttaccgacaccgagcgccagatactgctggacgggtgtttgataaattattatagggatcagggactggggactagggactag

SEQ ID NO: 45072 - protein, 551 aa, Unknown
  Obtained from environmental sample
  misc_feature (1)..(551): Xaa is any amino acid
MMEFIGDGIEKLTVDFRNGIDVMTTETACWSSIWKTDAQVKKYLEERGRGGDYRELKPASAAYYDGFIKVDLSKIEPCIALPFHPSNVYTIKNLQKNAKDIFAKIEKENKDAGINLNLGVKCHDGGIWADQAVIAGCSGGIFSNIMAASDILKGHSTGSGNFSLSVYPESQPTYLELVRNGAVETFMKAGALVREAFCGPCFGAGDTPANNELSIRHVTRNFPNREGSKPGDGQIACVALMDARSIAATAFNKGRITAATELQVPYGKYKFFFDKDVYDKRVYNGTSKPLPQTDLVLGPNIRDWPAMPALAENLLVKIACFITDPVTTTDELIPSGETSSYRSNPLRLAEFTLSRKDPKYVQRAKDIHALVPQPSPSGVEPEVRGSPLEQARQNNKQDPEIAALLKKIHAIPDCPNSRKEQIGIGSAIFARKPGDGSAREQAASCQRVLGASANFALEYATKRYRSNLINWGILPFIITDETALGLDSWIFIPNIQKQVREKAADIKAYVLGDNMTEITVTLGELTDTERQILLDGCLINYYRDQGLGTRD

SEQ ID NO: 45073 - DNA, 381 bp, Unknown
  Obtained from environmental sample
  misc_feature (1)..(381): n is a, c, g, or t
atgagcgggatttatgtagttatcggcggaggaattggagcgttatcaagatactttacgagtcaatttgtgaataatttgtacaataaaactttttccttggggactgtttttgtaaattgtataggagcgttattaatcggttttttaataaatatttttgatatgtttgcattaaatccaaaatggaaattattaatagttacgggctttttaggcagctatacgacattttcagcatattcacttgaaacggtaaattattttataaatggaaacataaaatacggcatattgaatatactgcttaacaatattctatgtatattgtttgtattatttgggttatggctaaataagataatatttacaaattcgtaa

SEQ ID NO: 45074 - protein, 126 aa, Unknown
  Obtained from environmental sample
  DOMAIN (3)...(119): CrcB-like protein
  misc_feature (1)..(126): Xaa is any amino acid
MSGIYVVIGGGIGALSRYFTSQFVNNLYNKTFSLGTVFVNCIGALLIGFLINIFDMFALNPKWKLLIVTGFLGSYTTFSAYSLETVNYFINGNIKYGILNILLNNILCILFVLFGLWLNKIIFTNS

SEQ ID NO: 45075 - DNA, 792 bp, Unknown
  Obtained from environmental sample
  misc_feature (1)..(792): n is a, c, g, or t
atgctggattccggcagtatatccggctggtttctcgattcgcaagatgacttcgcttttctcgccgacaggcttgaagagcttgcccgcagagctttgacccgttacgaaacatcagcctcgcagccggcaactgttacacaaccgatgtccgcgtcacagccgtttctttttgcggttggcgacggtaatcattcactggcaagcgccaaagaaatttgggaagaatacaaaaaggcgaacggcgtgaataatcatccctgccgttatgcgctggttgaaattgaaaatatctatgatccggctataaaattcgagccgatccaccgcgttgtgtttggactgggttttgaggagagcctcaatgtgctttcggcgcttcccggtttttccagccggactataggaggagctgaagagcttgtccgcatgacccgcgagcctgtaaaaggaaaccgcttcggacttatcagccaaaatcgttatgcgctagtcgagacaagcgtgggcgggttgtcaaccgcgtgcttgcagcccctgctggataacgccgtcggcgcttccaaaggcgctttgggtatcgactacattcacggcgaggatgaactgttccgcctttcgcataactctgacaagcaggcaaccggtatactgctgccgccggtgcagaaagctggtttttttgaaacagtcgccagaaacggcccccttcctcgaaagagtttttccatgggggaagccagtgaaaaacgtttttatatcgaatgcagaaaactttttacgaatttgtaa

SEQ ID NO: 45076 - protein, 263 aa, Unknown
  Obtained from environmental sample
  DOMAIN (2)...(257): Protein of unknown function (DUF1015)
  misc_feature (1)..(263): Xaa is any amino acid
MLDSGSISGWFLDSQDDFAFLADRLEELARRALTRYETSASQPATVTQPMSASQPFLFAVGDGNHSLASAKEIWEEYKKANGVNNHPCRYALVEIENIYDPAIKFEPIHRVVFGLGFEESLNVLSALPGFSSRTIGGAEELVRMTREPVKGNRFGLISQNRYALVETSVGGLSTACLQPLLDNAVGASKGALGIDYIHGEDELFRLSHNSDKQATGILLPPVQKAGFFETVARNGPLPRKSFSMGEASEKRFYIECRKLFTNL

SEQ ID NO: 45077 - DNA, 627 bp, Unknown
  Obtained from environmental sample
  misc_feature (1)..(627): n is a, c, g, or t
atgatgaaagtaatcgcctttaacggaagcccgcactacgacggcgtagtcgccaaaggaatctcaataatccaacgagaactggaaaaatcggccaccgtctccgttgagatagtccacgtcggccacaaacacatccgaggctgtatagactgccgcaaatgcggcgaaacccaccgttgcataatcgaagacggcgtagtaaacgaagccatcgacctattgcactccgcggacggaatcatcctcgggagcccggtctactacggcgggatcgccggaaccttcaagagttttctcgaccgcctcttttgcgccggcccgactatgcctttcaaagtcggcgcaaccgtcgtctctctcagacgatccggcggcatagccgcgtttagccagctcaacaactacttcagcctcgccggagtcataatcgcccccggcgtctattggaatatcatgcacggaaacagcgcccacgaaacgcttgaagaccaagaaggccagcaaatcatggagatccaaggccgaaacatggcgtggctgatcaaaacgctcgccgccggaaagaacatcgttccaatgcctaaaccggtggacgagaggaagaggacgaattttatacattga

SEQ ID NO: 45078 - protein, 208 aa, Unknown
  Obtained from environmental sample
  DOMAIN (2)...(180): NADPH-dependent FMN reductase
  misc_feature (1)..(208): Xaa is any amino acid
MMKVIAFNGSPHYDGVVAKGISIIQRELEKSATVSVEIVHVGHKHIRGCIDCRKCGETHRCIIEDGVVNEAIDLLHSADGIILGSPVYYGGIAGTFKSFLDRLFCAGPTMPFKVGATVVSLRRSGGIAAFSQLNNYFSLAGVIIAPGVYWNIMHGNSAHETLEDQEGQQIMEIQGRNMAWLIKTLAAGKNIVPMPKPVDERKRTNFIH

SEQ ID NO: 45079 - DNA, 924 bp, Unknown
  Obtained from environmental sample
  misc_feature (1)..(924): n is a, c, g, or t
atgggctggcaatgcgtcgtcaaaaagggcgagtttcgggagggagacctgggcgtctacttcgaggtggacagcttccttccggtggaggaacgctatgagtttttgcggaaatcctcatacaaggagaaccccgacaacggcgagggcttcaggatccgcaccgcgaagatgcggggccagctctcccaggggctgctgattccgtactcgtccttccccgaacttcgggatttaagcgagggcgccgacgttacggagatgctccgggtcaaaaaatggttcgtccccgaaacctccacggccggcgggatagtcataggcgagcgcccccacggaatcccgacctccgacgaaacgcggatccagtccgccccggagatgctcgaagagcttagaggcaagccctactacataaccaccaagatggacggcacctccggcaccgtatactatatcgacggaaaaatcggctgctgcagccgcaataaggagatcaaagacgaaaaaacctcgctctactggacgccgacctataaacacggcctcaaggaaaagttggccgcgcacggtaagaacatcgtgctgaccggagagatatgcggccccggcatacaaagaaacaaacttaagctgcaaagcgttgaatggtacgtctttgacgcgatagacgtgaacaccggcaaataccttccctacgacgatatgtgcaagctttgcaacgacttaggcgtcgccacagtccctttggaagaacggggagagaacttcgcgtactctttggaaacgctgctggaaaaagccaaaggcaagtacccgagcggacaagagaaggaaggcatagtggtcagggacctaaacaagcctaagtcggtgtcatttaaggttttaaataatgacgcactgctaaaagagaaggattaa

SEQ ID NO: 45080 - protein, 307 aa, Unknown
  Obtained from environmental sample
  DOMAIN (120)...(306): ATP dependent DNA ligase domain
  misc_feature (1)..(307): Xaa is any amino acid
MGWQCVVKKGEFREGDLGVYFEVDSFLPVEERYEFLRKSSYKENPDNGEGFRIRTAKMRGQLSQGLLIPYSSFPELRDLSEGADVTEMLRVKKWFVPETSTAGGIVIGERPHGIPTSDETRIQSAPEMLEELRGKPYYITTKMDGTSGTVYYIDGKIGCCSRNKEIKDEKTSLYWTPTYKHGLKEKLAAHGKNIVLTGEICGPGIQRNKLKLQSVEWYVFDAIDVNTGKYLPYDDMCKLCNDLGVATVPLEERGENFAYSLETLLEKAKGKYPSGQEKEGIVVRDLNKPKSVSFKVLNNDALLKEKD

SEQ ID NO: 45081 - DNA, 372 bp, Unknown
  Obtained from environmental sample
  misc_feature (1)..(372): n is a, c, g, or t
atggaggcgtcgtctccaagggagacacacatgcttgaggagcttacgataagaaattttgcactggtcgattctatttccctctccttccggcccggttttaacgtgcttacaggcgaaaccggcgcgggcaaatccattatcgtcggctcacttggatttcttatgggcgcaaaaaccgagactgacgttatacgatccggctgcgaggaagcgagcatttcagctatcgtatcaataggcaagagaaacaacggcgctttgaatggcttagaagccgtgaaatcaacagtgaagaggacactgttattgtccgccggaatattaaaacatcaggcaagggatcaatttacatacaggaaacgcctgtaa

SEQ ID NO: 45082 - protein, 123 aa, Unknown
  Obtained from environmental sample
  misc_feature (1)..(123): Xaa is any amino acid
MEASSPRETHMLEELTIRNFALVDSISLSFRPGFNVLTGETGAGKSIIVGSLGFLMGAKTETDVIRSGCEEASISAIVSIGKRNNGALNGLEAVKSTVKRTLLLSAGILKHQARDQFTYRKRL

SEQ ID NO: 45083 - DNA, 498 bp, Unknown
  Obtained from environmental sample
  misc_feature (1)..(498): n is a, c, g, or t
gtggtgatttcatctttggggatagcaaagctgatacgtttacaggcaagaacagaggttgcccccggcgaatttgcggaaattggctgctatcgttcggacgggcttataatcgctactcccaccggctccacggcgtattccatggcagccggcgggccaatattggatccggagatggaagcgcaaattatcagcccaatctgcccctttaccttgtcgaaccgcccgctggtgcttccgtcacggcaggcattacagataacggtctgtaaggagcagcgaagcggtgtgctgctgacttgcgacgggcaggaaaccttcgctctggaacccggtgatttaatcaccataaaacattcgccgcattatgcgatcctgattaccgcggggtattcatcgtattacaaagcgctggcggaaaaattggcttggacctccgaaagggggggcgcctccgatggaggcgtcgtctccaagggagacacacatgcttga

SEQ ID NO: 45084 - protein, 165 aa, Unknown
  Obtained from environmental sample
  DOMAIN (1)...(130): ATP-NAD kinase
  misc_feature (1)..(165): Xaa is any amino acid
MVISSLGIAKLIRLQARTEVAPGEFAEIGCYRSDGLIIATPTGSTAYSMAAGGPILDPEMEAQIISPICPFTLSNRPLVLPSRQALQITVCKEQRSGVLLTCDGQETFALEPGDLITIKHSPHYAILITAGYSSYYKALAEKLAWTSERGGASDGGVVSKGDTHA

SEQ ID NO: 45085 - DNA, 1092 bp, Unknown
  Obtained from environmental sample
  misc_feature (1)..(1092): n is a, c, g, or t
atgaagattgaagtttactctcctaccatcaggcgtaaggaaatggacgccgtccttaccgcgatggtggaggaccagattgggccgggagaacgttcccgccttcttctgcaaacagccaaagaacatctccgttttgattacgccctcgcgttgcgaagccctgtcactgccctccatctggcgctgaaagccctggaactaaaggagggggacggggtgctggtttccgcgctttccccgcgttattacgtccagacgcttgccgattttcgcctaacgcccctgttctgcgacgtgtcgtattcttttccctgcataagccgagagagcgttgaaaaagcgataatggcaaaaccggacggagtggagccccgctgcattatccttcaccatactttaggcttcgtgccggacgcggcgtctatcgccgggcttggcattcccgttattgaggatatttcccaaagttacagcccgcctctccctcaggaaggcgcagaccagaccgcagccgaaacttcgggcgcggcttcacagaattcccccgccactatccatggggtgtttgccattttgggccttgaggaaagggatatgcttacaggcggcggaggggcgatcctttttgccatgaacagaaaggacggccagatactgcgcgccttctcaaatatcccgcccgagtactgtctgcccgacattaacgcggccctggcgtccgtgcaattcagggaggcgccgcgcaatatggcaaggcgtcaggaaattgccagggcctatattcaggcaagccttcgtaccaaacataaacgttttgtttcccctgttgacggtattgaatataaccattatgcctttcccctggtgctggaaaccggcatgaaggacgttgcggcctatgcccgcaaaaaagagattatcgtggaaagcgcttttgagcaaagtctggcgggagccggaataagcgattcagtgttatgtccggtaagttattcattgtcattgcgaacggtgctgtttcctctttacccccggcttccctcgccggacgctcagcgggtttcccggctgataatgacccttccgtaa

SEQ ID NO: 45086 - protein, 363 aa, Unknown
  Obtained from environmental sample
  DOMAIN (8)...(360): DegT/DnrJ/EryC1/StrS aminotransferase family
  misc_feature (1)..(363): Xaa is any amino acid
MKIEVYSPTIRRKEMDAVLTAMVEDQIGPGERSRLLLQTAKEHLRFDYALALRSPVTALHLALKALELKEGDGVLVSALSPRYYVQTLADFRLTPLFCDVSYSFPCISRESVEKAIMAKPDGVEPRCIILHHTLGFVPDAASIAGLGIPVIEDISQSYSPPLPQEGADQTAAETSGAASQNSPATIHGVFAILGLEERDMLTGGGGAILFAMNRKDGQILRAFSNIPPEYCLPDINAALASVQFREAPRNMARRQEIARAYIQASLRTKHKRFVSPVDGIEYNHYAFPLVLETGMKDVAAYARKKEIIVESAFEQSLAGAGISDSVLCPVSYSLSLRTVLFPLYPRLPSPDAQRVSRLIMTLP

SEQ ID NO: 45087 - DNA, 1038 bp, Unknown
  Obtained from environmental sample
  misc_feature (1)..(1038): n is a, c, g, or t
ttgcgtattgcaagccggctggtaaagatcgggcgcgatattgagatggagtacggtattcccatcatcaataagcgcatcgcggttactccgatcgcgctggccgccgcttcctgcaacgaggaggatttcgctccttttgccgtaaccatggacgaagcagccagggagctggaggttgattttatcggcgggttttcggcgctggtccagaagggctttacctcaggcgacgagcggctgattaattctctgcctgacgcgcttgcgcaaacggagcgtgtctgcgcttcggttaatgtggcggcaaccaagagcggcataaacatggacgcggtacgccgcatgggggaaatcatcaaaaaaacggcggcaaaaaccgccagccgcgacgccataggctgtgcgaagctcgttgtgttttgcaacgcgccggaagacaacccctttatggcaggcgcatttcacggagtgggagaagcggaaacctgcctcaatgtcggcgtttcaggtcctggcgttgtaaaggccgcgatggaaaaccacaggaacgccagttttgacgaactggccgatatcataaaaaagaccgccttcaagataacccgtatgggccagcttgtcggtatggaggcggcagaccgtatgggggtacccttcggcattcttgacctttcactcgcgccgactccggcggtcggcgattcggtagcgcgcatccttgaggagatggggctcgaagccgccgggaactcacggaacaaccgcggcgctggcaatgcttaccgacatggtaaaaaaaggcggcgtaatggcctccacccatgtaggcgggtttttccggcgctttattcctgtttgcgaggacgagggcatggcggaggccgtgaaaaacggcgcaatcagcctggacaagctggaagccatgacctccgtctgttccgttggcctggacatgatcgccctgcccggcgacaccagcgccgccacgatctcggcgattatcgccgacgagatggcgataggaatggtcaataa

SEQ ID NO: 45088 - protein, 345 aa, Unknown
  Obtained from environmental sample
  DOMAIN (1)...(343): Uncharacterized ACR (DUF711)
  misc_feature (1)..(345): Xaa is any amino acid
MRIASRLVKIGRDIEMEYGIPIINKRIAVTPIALAAASCNEEDFAPFAVTMDEAARELEVDFIGGFSALVQKGFTSGDERLINSLPDALAQTERVCASVNVAATKSGINMDAVRRMGEIIKKTAAKTASRDAIGCAKLVVFCNAPEDNPFMAGAFHGVGEAETCLNVGVSGPGVVKAAMENHRNASFDELADIIKKTAFKITRMGQLVGMEAADRMGVPFGILDLSLAPTPAVGDSVARILEEMGLEAAGNSRNNRGAGNAYRHGKKRRRNGLHPCRRVFPALYSCLRGRGHGGGREKRRNQPGQAGSHDLRLFRWPGHDRPARRHQRRHDLGDYRRRDGDRNGQ

SEQ ID NO: 45089 - DNA, 315 bp, Unknown
  Obtained from environmental sample
  misc_feature (1)..(315): n is a, c, g, or t
ttgccagcgccgcggttgttccgtgagttcccggcggcttcgagccccatctcctcaaggatgcgcgctaccgaatcgccgaccgccggagtcggcgcgagtgaaaggtcaagaatgccgaagggtacccccatacggtctgccgcctccataccgacaagctggcccatacgggttatcttgaaggcggtcttttttatgatatcggccagttcgtcaaaactggcgttcctgtggttttccatcgcggcctttacaacgccaggacctgaaacgccgacattgaggcaggtttccgcttctcccactccgtga

SEQ ID NO: 45090 - protein, 104 aa, Unknown
  Obtained from environmental sample
  misc_feature (1)..(104): Xaa is any amino acid
MPAPRLFREFPAASSPISSRMRATESPTAGVGASERSRMPKGTPIRSAASIPTSWPIRVILKAVFFMISASSSKLAFLWFSIAAFTTPGPETPTLRQVSASPTP

SEQ ID NO: 45091 - DNA, 492 bp, Unknown
  Obtained from environmental sample
  misc_feature (1)..(492): n is a, c, g, or t
ttgaggagatggggctcgaagccgccgggaactcacggaacaaccgcggcgctggcaatgcttaccgacatggtaaaaaaaggcggcgtaatggcctccacccatgtaggcgggtttttccggcgctttattcctgtttgcgaggacgagggcatggcggaggccgtgaaaaacggcgcaatcagcctggacaagctggaagccatgacctccgtctgttccgttggcctggacatgatcgccctgcccggcgacaccagcgccgccacgatctcggcgattatcgccgacgagatggcgataggaatggtcaataacaaaaccagcgccgtgcgggtaatccctgttcccggcaaaaaagccggcgactgggccgagttcggcggcatcctgggcggtgcccccatcatggcggttaacgccgcaaaaagcgacgttttcatcaaccgcggcgggcggattcctgccccaattcacagcttcaggaactag

SEQ ID NO: 45092 - protein, 163 aa, Unknown
  Obtained from environmental sample
  DOMAIN (1)...(163): Uncharacterized ACR (DUF711)
  misc_feature (1)..(163): Xaa is any amino acid
MRRWGSKPPGTHGTTAALAMLTDMVKKGGVMASTHVGGFFRRFIPVCEDEGMAEAVKNGAISLDKLEAMTSVCSVGLDMIALPGDTSAATISAIIADEMAIGMVNNKTSAVRVIPVPGKKAGDWAEFGGILGGAPIMAVNAAKSDVFINRGGRIPAPIHSFRN

SEQ ID NO: 45093 - DNA, 306 bp, Unknown
  Obtained from environmental sample
  misc_feature (1)..(306): n is a, c, g, or t
atgaatatttttgaatcgataatgctgatttgtttcggtttcgcatggccaatttccatatataaatccgctgtatccaaaaaaaccgcaggcaaaagcctgttgttcctggtagtactgcaaataggctatgtggcaggtgttttgtttaaactaaccgaatactggagcaacctgaaaacaaacccgaacgaaaccatcagcataaatttatacctgtacatactcaattttgtaatgataacaatagacgagctattgtttctgagaaaccgcaagatagaggcaaacagtaaaaaaccctag

SEQ ID NO: 45094 - protein, 101 aa, Unknown
  Obtained from environmental sample
  misc_feature (1)..(101): Xaa is any amino acid
MNIFESIMLICFGFAWPISIYKSAVSKKTAGKSLLFLVVLQIGYVAGVLFKLTEYWSNLKTNPNETISINLYLYILNFVMITIDELLFLRNRKIEANSKKP

SEQ ID NO: 45095 - DNA, 1062 bp, Unknown
  Obtained from environmental sample
  misc_feature (1)..(1062): n is a, c, g, or t
ttgggaggcatccgccaaggaggcggcgaaatgagcaaacgattgaacgatctaaacgatcgattaaacaacctgcttgatgtaaaagacctgcggatgtattttcacacgggaacagggggaataataaaccgccaaaaaagatatacctatgcggtggatggggtctcttttagcataaagaagggtgaaaccctcggcctcgttggggaatccggctgcggcaagtccaccgttgtccgcgcggtatcgcgtcttcacacaccgacttccggtgaggtctaccttgacggaaagaacgtaacggcaatgaagagccgcgaacttttggaagcgcgcaggaatatgcagctcgtctttcagaacccctatggctttttgaaccccagaatgaccaccggcgacatcatcgccgagccgatgaggatatacaagcagcgcgggcttttggaaatgaccgataacgagatcatcaagcgcgttgaagaccttatggaaatggttggccttttgaagtattaccgcaaccgttatccgcacgagttttcaggtggccaaaggcagcgcattggcatagcccgcgctctggcactgaagccccagttgatcctcgccgatgagccgatttccgcccttgacgtttccatccaggcgcagattctgaaccttttcaaagacatacaaaaagagatggggctttcctatctttttatcgcccacgatctttcggttattgagtacatctccgaccgcgtggcggtaatgtaccttggaaaaatcatggagataagcaataacgacgatctctacaacaacccgcgccacccttacacccaagcccttttgtcggcggccccgatccccgaccccaaggtcgaagcccagcgcaaacggattattctgacaggggacgttccctctccgaacgttcaaaggccgggctgctatttctacgatcgctgtcagcaccgcatggacaaatgcaaggtaacacaaccggaactaaaagccggtaaggatgggaatgaggaacataaaactgcctgctttctttgtgaataa

SEQ ID NO: 45096 - protein, 353 aa, Unknown
  Obtained from environmental sample
  DOMAIN (261)...(328): Oligopeptide/dipeptide transporter, C-terminal region
  misc_feature (1)..(353): Xaa is any amino acid
MGGIRQGGGEMSKRLNDLNDRLNNLLDVKDLRMYFHTGTGGIINRQKRYTYAVDGVSFSIKKGETLGLVGESGCGKSTVVRAVSRLHTPTSGEVYLDGKNVTAMKSRELLEARRNMQLVFQNPYGFLNPRMTTGDIIAEPMRIYKQRGLLEMTDNEIIKRVEDLMEMVGLLKYYRNRYPHEFSGGQRQRIGIARALALKPQLILADEPISALDVSIQAQILNLFKDIQKEMGLSYLFIAHDLSVIEYISDRVAVMYLGKIMEISNNDDLYNNPRHPYTQALLSAAPIPDPKVEAQRKRIILTGDVPSPNVQRPGCYFYDRCQHRMDKCKVTQPELKAGKDGNEEHKTACFLCE

SEQ ID NO: 45097 - DNA, 450 bp, Unknown
  Obtained from environmental sample
  misc_feature (1)..(450): n is a, c, g, or t
ttgtgttaccttgcatttgtccatgcggtgctgacagcgatcgtagaaatagcagcccggcctttgaacgttcggagagggaacgtcccctgtcagaataatccgtttgcgctgggcttcgaccttggggtcggggatcggggccgccgacaaaagggcttgggtgtaagggtggcgcgggttgttgtagagatcgtcgttattgcttatctccatgatttttccaaggtacattaccgccacgcggtcggagatgtactcaataaccgaaagatcgtgggcgataaaaagataggaaagccccatctctttttgtatgtctttgaaaaggttcagaatctgcgcctggatggaaacgtcaagggcggaaatcggctcatcggcgaggatcaactggggcttcagtgccagagcgcgggctatgccaatgcgctgcctttggccacctga

SEQ ID NO: 45098 - protein, 149 aa, Unknown
  Obtained from environmental sample
  misc_feature (1)..(149): Xaa is any amino acid
MCYLAFVHAVLTAIVEIAARPLNVRRGNVPCQNNPFALGFDLGVGDRGRRQKGLGVRVARVVVEIVVIAYLHDFSKVHYRHAVGDVLNNRKIVGDKKIGKPHLFLYVFEKVQNLRLDGNVKGGNRLIGEDQLGLQCQSAGYANALPLAT

SEQ ID NO: 45099 - DNA, 510 bp, Unknown
  Obtained from environmental sample
  misc_feature (1)..(510): n is a, c, g, or t
atgtgccagagggtaatgatagcgatggccctttcttgcaacccggaaatcctaatcgcggacgaaccgaccacggcgctggacgtaacaattcaggcgcagatccttgatttgatgagggatttgacccacaagctcggcacggcggtgatcctcataacccactcccttggagttgtggcgggaatgtgcgacaacatctatgtcatgtacgcagggcgtgtggtcgagtatggtactgcggagcagatttttgagacgccgaaacacccatatacccgcggcctcatcaagtcggtgccgcgattggatcaacgaaaccgggacaggctcttttcaattccggggcagccacccaacgtaatagacctgccgccttgctgtccttttttcccccgttgttccgaggttacagagcgctgcaaaaatgcctaccctgaacaggtggattttggagacggccactgctcttcctgttgggaggcatccgccaaggaggcggcgaaatga

SEQ ID NO: 45100 - protein, 169 aa, Unknown
  Obtained from environmental sample
  SIGNAL (1)...(20)
  DOMAIN (1)...(73): ABC transporter
  misc_feature (1)..(169): Xaa is any amino acid
MCQRVMIAMALSCNPEILIADEPTTALDVTIQAQILDLMRDLTHKLGTAVILITHSLGVVAGMCDNIYVMYAGRVVEYGTAEQIFETPKHPYTRGLIKSVPRLDQRNRDRLFSIPGQPPNVIDLPPCCPFFPRCSEVTERCKNAYPEQVDFGDGHCSSCWEASAKEAAK

SEQ ID NO: 45101 - DNA, 918 bp, Unknown
  Obtained from environmental sample
  misc_feature (1)..(918): n is a, c, g, or t
gtgttgaatgtggggaacttcggtcagaatcccggcgattacgggttggcgcagacggtggcgaactcggcgctggtctttgtcctcttcgtgggcggtttcgggacaaagatgagcaggctcaggatggtgttcggcccggccatgatgttagcgtcgttgggcgtcatcatcaccgccgtggtcacctcggtttccttgtattggctgctccgtgcggtacacatcgacattgacgcgcagacgtctatgttgatagggtgtattatagcgtctacggacgcggcggcggttttttcgatactgcggtcgcggtcgctggatccgaagatgtcggcggcggttgagatcgagtcggcgaccaacgaccccatggccatcatcatgaccacgatcgccgtgggctttgcggtcgcttccgcctcgtcggaaggcggcggcggcggcctcatctcggtcggcacgatcgggatcctcgcgtggaagggcttgggcgggctggggatagggctgttggtcggcttggtcgcttgctggttgagcaggtttgtgactaacttggacaagggctacttttacatatacataatcgcgataatcatgctctcgttcggcgtggcggaggtggccggggccagcggcatcctctcggctttcgccgccggttttgttatgggcaacaagaacatcccctacaagtcgacctccacgacgcttctcgacgcgatgtctacgataggcaacgtggtgatcttcgtgctcctggggcttttggttttcccgagagaattcggcacgtttgacgttttcggcggcggcatactgttgttcatcatccttacgctcgtcgcgcgtccgatagcggtgttcctgtgcaccttctgggcgcggtactctttcaagagatgctctttctga

SEQ ID NO: 45102 - protein, 305 aa, Unknown
  Obtained from environmental sample
  DOMAIN (1)...(305): Sodium/hydrogen exchanger family
  misc_feature (1)..(305): Xaa is any amino acid
MLNVGNFGQNPGDYGLAQTVANSALVFVLFVGGFGTKMSRLRMVFGPAMMLASLGVIITAVVTSVSLYWLLRAVHIDIDAQTSMLIGCIIASTDAAAVFSILRSRSLDPKMSAAVEIESATNDPMAIIMTTIAVGFAVASASSEGGGGGLISVGTIGILAWKGLGGLGIGLLVGLVACWLSRFVTNLDKGYFYIYIIAIIMLSFGVAEVAGASGILSAFAAGFVMGNKNIPYKSTSTTLLDAMSTIGNVVIFVLLGLLVFPREFGTFDVFGGGILLFIILTLVARPIAVFLCTFWARYSFKRCSF

SEQ ID NO: 45103 - DNA, 1485 bp, Unknown
  Obtained from environmental sample
  misc_feature (1)..(1485): n is a, c, g, or t
ttggaaccagaaaagagttgtttgattctgtcgctcggttcaacgaggcggcgggaggattcgccgatgtttgagaatattatcgcgcaggcggcggcaggacagctaaaagaagatattatttcaaacaggcttgcgccttccatgcttttttttgggcctgccgcgtcagggaaaggcagcgccgcgatggagcttgcgcgttccatttcctgcgagaagggcgatgccctgtggaactgcgcctgtccttcctgcgtccgtcaccgttcccttatccacgccgatcttgcgatgattgggccccggaattttacggcggaaatagccgcttcccgcgccgcttttctgagggataccgcgtcagcggcgggccgttccctttttatccgttcactaaggaaactgcttgcgcgtttcgctccccctgtctgggagtacgatcctaaaccaaacaaacttaaccccctgccccttcttcattcgctggaagaagagcttgacgagtttgagacaataacggttgatctgtcatcggctgatccattagctgacaataagcatgacaaaaacagcgtattcgaaaagcttaccgcttctcttgttaagaacgctgtcaaacttgacgagtgcatcagcgaggctgtccccatagcgcaggtacgcaaggcggcatactgggccagactctccccctcaggaaaacgcaaaacattgatcattgaaaacgccgaccgcatggaagaaaaagcgcgaagcgccctgctcaaactgcttgaggaaccgcctgaatcgatcagcattatcctcaccgccctcaggcgggaggctgtcatgccgacgattctgtcacgccttcggccctaccgttttacagcccgaagcgccgttgaggaaaaagaaatcctccgcagggttttcagggatccccgctggactctggaggctgcgccttctaaagaaggcgcgccttccggggaaggcgaatcgcctaacacttccggtcttatcgggacatatcttgaatcctttcttccgcagccctcggacaagctgctgcccctcgccgcgttctttgccgccgctgtcgcgcgctcggccgtgggcttccaaaaaagccgcggcataaccgaaataccggaaaccgtcgccgctttgggaagctattgcgccaggatagcggagtccgccggtttggaacgccctgttgacgccaaagaaaccatttccacgctgctgtcccagagcagcgatttcgagggacgttctttcccgcgttttctcgcccttgtgcttgaccttgtgtcatggtcgcttgagcagtgcgtttccaatccgaatgtcgtcgcttgcagggaaacatggagactgcggatcagggaagcatacgcggcctattctgtctggaaccagaggccggaggccgcgctggaatcgctgtttttccgcctcagggaagaggcggcgggagcggcattgacatga

SEQ ID NO: 45104 - protein, 494 aa, Unknown
  Obtained from environmental sample
  misc_feature (1)..(494): Xaa is any amino acid
MEPEKSCLILSLGSTRRREDSPMFENIIAQAAAGQLKEDIISNRLAPSMLFFGPAASGKGSAAMELARSISCEKGDALWNCACPSCVRHRSLIHADLAMIGPRNFTAEIAASRAAFLRDTASAAGRSLFIRSLRKLLARFAPPVWEYDPKPNKLNPLPLLHSLEEELDEFETITVDLSSADPLADNKHDKNSVFEKLTASLVKNAVKLDECISEAVPIAQVRKAAYWARLSPSGKRKTLIIENADRMEEKARSALLKLLEEPPESISIILTALRREAVMPTILSRLRPYRFTARSAVEEKEILRRVFRDPRWTLEAAPSKEGAPSGEGESPNTSGLIGTYLESFLPQPSDKLLPLAAFFAAAVARSAVGFQKSRGITEIPETVAALGSYCARIAESAGLERPVDAKETISTLLSQSSDFEGRSFPRFLALVLDLVSWSLEQCVSNPNVVACRETWRLRIREAYAAYSVWNQRPEAALESLFFRLREEAAGAALT

SEQ ID NO: 45105 - DNA, 420 bp, Unknown
  Obtained from environmental sample
  misc_feature (1)..(420): n is a, c, g, or t
atgaataaaataaaaaaaattattaattatataatgtttgttacaggaaccgctttggttatattgacggtattttcgttgttgcttaacgtagaaatcaattttgttcctactatttttgaaattttcgccgcgaacatcgttattattctaggtctttttcttctcggaaaatttgaaatccgttatataattctggaatatttgattgatatcagctatataatagccgttcttatcgtattcggactcatatttgactggtattccgcgataccggtgtggcttcttatcgtgatggcggtcgtaatctacatatttgccttgatatttaccgttacaaagatcagaaaagacgcggaagaattaaacaaattactgcaaaaacaccggaaaaaacaggctgatagcgcgtcttaa

SEQ ID NO: 45106 - protein, 139 aa, Unknown
  Obtained from environmental sample
  SIGNAL (1)...(26)
  misc_feature (1)..(139): Xaa is any amino acid
MNKIKKIINYIMFVTGTALVILTVFSLLLNVEINFVPTIFEIFAANIVIILGLFLLGKFEIRYIILEYLIDISYIIAVLIVFGLIFDWYSAIPVWLLIVMAVVIYIFALIFTVTKIRKDAEELNKLLQKHRKKQADSAS

SEQ ID NO: 45107 - DNA, 447 bp, Unknown
  Obtained from environmental sample
  misc_feature (1)..(447): n is a, c, g, or t
atggttataaatcttgaacaaaatgatttacaaaaagacattgaaatatcaattaaatacccggtaaagagcaagattatagaacgtattgtctcatttttaaaatcggttgacacgcaaataaaatgttattcagatgacattgtaaaactggtaaatgtttctgatattttttacattgaaagtatagacggcaaaaccatcgtctgttgcgagaaagaaaaatatctttttaaaagccgtctgtatcagatatatgaaaaattaagggataatggttttatacaaattagtaaatattgtattttaaatattaacaagctggacaaattcagaccattagacaataatcgtctggaagcggtattatctaacggggtttacttatgtattaccaggaaatatatttccggtataaaacagatactacaggagatgaataaatga

SEQ ID NO: 45108 - protein, 148 aa, Unknown
  Obtained from environmental sample
  DOMAIN (47)...(144): LytTr DNA-binding domain
  misc_feature (1)..(148): Xaa is any amino acid
MVINLEQNDLQKDIEISIKYPVKSKIIERIVSFLKSVDTQIKCYSDDIVKLVNVSDIFYIESIDGKTIVCCEKEKYLFKSRLYQIYEKLRDNGFIQISKYCILNINKLDKFRPLDNNRLEAVLSNGVYLCITRKYISGIKQILQEMNK

SEQ ID NO: 45109 - DNA, 1098 bp, Unknown
  Obtained from environmental sample
  misc_feature (1)..(1098): n is a, c, g, or t
atggggttaaacatggaagaaaaaaaagcggtaacgagggaatacaaatcccgttatcaaaaggcaacgaaaaaagaaaagaagaccatactggacgaattcataaggctgaccggttatcaccggaaatccgccgtccgcctgttaaacgcgaagcgggtaaaacaggtcatggtctacatggacggcaagccggtaaaaatgaagccggagaaaaagcggcctacgaaccgaaaagggaaacgtatctacaccgatgaggttatcaacgccctgcgcctggtgtggacgttcttctggtacaaatgcgggaagatactcgccccgcttatgcggcagcagatggcgtgcatcgcccagtggccggccttcggcatcactggagaaactgcggaaaagctcataaagataagcccggcgtccatagaccggtacttgaaaaaagacaaggcagctcttaggctgaaagggaaaagtctcactaaacccttggattcgctgaaaagccgcatccccatccgtaccttttacacaagcgaggagcgtaaaaaacccggtttttggcaaattgacaccgttcaccattgcgggcaggccacatcgggccagtatttgcatacgttgaccgccaccgatgtcgcatcgggttggattgaactgtattccctcctcaataacgcccataaatggacttttgaggctttagcgcatatcaaaacaaccgctcttatccccagtcttgagtttcacagcgacaacggctcggaatttattaacaacgccacggagaactggtgcaaggataacggtataccttttaccagaagccgtgaccacaagaaaaacgacaactgtttcgtcgaacagaaaaacggagccgttgtccgtgagtatgttggctatgacaggcttgaggggttccaggaacaagccctcctcgccgctgtctatgagcctctggttcccttactcaacttcttcatgcctacccaaaaactaaaaagcaaaaccagaatcggctccaaagagatcaaggtttacgatgatcctgaaagcccgttccaaaggctttctaagagcttatccctaaataagtaa

SEQ ID NO: 45110 - protein, 365 aa, Unknown
  Obtained from environmental sample
  DOMAIN (180)...(358): Integrase core domain
  misc_feature (1)..(365): Xaa is any amino acid
MGLNMEEKKAVTREYKSRYQKATKKEKKTILDEFIRLTGYHRKSAVRLLNAKRVKQVMVYMDGKPVKMKPEKKRPTNRKGKRIYTDEVINALRLVWTFFWYKCGKILAPLMRQQMACIAQWPAFGITGETAEKLIKISPASIDRYLKKDKAALRLKGKSLTKPLDSLKSRIPIRTFYTSEERKKPGFWQIDTVHHCGQATSGQYLHTLTATDVASGWIELYSLLNNAHKWTFEALAHIKTTALIPSLEFHSDNGSEFINNATENWCKDNGIPFTRSRDHKKNDNCFVEQKNGAVVREYVGYDRLEGFQEQALLAAVYEPLVPLLNFFMPTQKLKSKTRIGSKEIKVYDDPESPFQRLSKSLSLNK

SEQ ID NO: 45111 - DNA, 486 bp, Unknown
  Obtained from environmental sample
  misc_feature (1)..(486): n is a, c, g, or t
atgaaacaaaagcattcatgggatattacagataagttctgggctatagcggagcctttaattcctaaaaaaacaagagaccctgataaagcatacaagcgaaaacaagggggaggccgcccgccaatggaacctcgaaaggcccttgaagccattttttatgtattgcgtaccggcatccagtggaaggctttgcctgtttcctttggctcttccagcgctgtccactgctatttcatgttttggtccgagaccggcttctttaaggccatgtgggcttgcggattacgaaagtatgatgaagtaaaaggcataaactggacatggctaagcggggacggctgcatgaccaaggctccattggcccaggaaacagtcggtgcaaatccaaccgaccgtgggaaaaaaagggagcaagcggcatatgctcgtagacggcataggggtacctattgccatggtagtaaccggagcaaacaggcatga

SEQ ID NO: 45112 - protein, 161 aa, Unknown
  Obtained from environmental sample
  misc_feature (1)..(161): Xaa is any amino acid
MKQKHSWDITDKFWAIAEPLIPKKTRDPDKAYKRKQGGGRPPMEPRKALEAIFYVLRTGIQWKALPVSFGSSSAVHCYFMFWSETGFFKAMWACGLRKYDEVKGINWTWLSGDGCMTKAPLAQETVGANPTDRGKKREQAAYARRRHRGTYCHGSNRSKQA

SEQ ID NO: 45113 - DNA, 417 bp, Unknown
  Obtained from environmental sample
  misc_feature (1)..(417): n is a, c, g, or t
gtgcaaatccaaccgaccgtgggaaaaaaagggagcaagcggcatatgctcgtagacggcataggggtacctattgccatggtagtaaccggagcaaacaggcatgatgtttcccagcttgaaacgcttttggattctatcgtcatagaaaggcctgacccattcgagcatcctcaaaatctctgccttgacaaagggttttccggcgagccggctttggaaacggttgtattaaagggttttatgccacatataaaaagtcggggagaggaaaaaagcagcaaagaacaaaatccggcatacaaagcccgccgatgggtagttgaagttacccactcgtggatgaatagattccgaaaacttctggttcgatatgagaaattagacaagacatatagaggactggcctggacttaa

SEQ ID NO: 45114 - protein, 138 aa, Unknown
  Obtained from environmental sample
  DOMAIN (2)...(138): Transposase DDE domain
  misc_feature (1)..(138): Xaa is any amino acid
MQIQPTVGKKGSKRHMLVDGIGVPIAMVVTGANRHDVSQLETLLDSIVIERPDPFEHPQNLCLDKGFSGEPALETVVLKGFMPHIKSRGEEKSSKEQNPAYKARRWVVEVTHSWMNRFRKLLVRYEKLDKTYRGLAWT

SEQ ID NO: 45115 - DNA, 714 bp, Unknown
  Obtained from environmental sample
  misc_feature (1)..(714): n is a, c, g, or t
atggaacaagattcaaacagagtaatgaaagaagccgcgggtaaggccgcggtagacgctcttgtaaaaagcggaatgaaactgggtcttggcacggggtctaccgccattcacgcggttcgcagggtaggcgaacttttggctgacggaacgttacgggacatcagcgcctttgccacaagttttcaaacggaaatcgagtgtgaaaaacttgggattccattttactcattgaattcaaaagagcttgcaagcgggctggacttaaccatagacggagccgacgaggttgatccacaaaaccgcgtgattaagggcgggggaggggcgatgttaatcgaaaaactagccgcgtatgcttccgccgaatacgctatcactgtggacgaatcaaaactgacggagcgcctagggggcggtttccccgttcccgtggaagttgttcccgaagcaagaacgcaggtaacaaaagcgcttgaaaaattaggtgcaaatgttataatcagggaagcggtaaaaaaagcgggacctgtaataacagaacatggaaacctgattttagatatccgctttaattctccgatagacccgcaattaatggaaacagaaataaacaacatcccaggcgttgtagaaaacggtttttttacaagaaagccgcctgtcgtattcattgcccgttcaaacggaacggtagaaaaaagaggaaaatga

SEQ ID NO: 45116 - protein, 237 aa, Unknown
  Obtained from environmental sample
  DOMAIN (55)...(232): Ribose 5-phosphate isomerase A (phosphoriboisomerase A)
  misc_feature (1)..(237): Xaa is any amino acid
MEQDSNRVMKEAAGKAAVDALVKSGMKLGLGTGSTAIHAVRRVGELLADGTLRDISAFATSFQTEIECEKLGIPFYSLNSKELASGLDLTIDGADEVDPQNRVIKGGGGAMLIEKLAAYASAEYAITVDESKLTERLGGGFPVPVEVVPEARTQVTKALEKLGANVIIREAVKKAGPVITEHGNLILDIRFNSPIDPQLMETEINNIPGVVENGFFTRKPPVVFIARSNGTVEKRGK

SEQ ID NO: 45117 - DNA, 1254 bp, Unknown
  Obtained from environmental sample
  misc_feature (1)..(1254): n is a, c, g, or t
gtggatattgaagaagatatgaaggtacaaagccttgaagaagcggcaagacntttcggaacaagaattatccgttcatatcacaatacagaaaggattattgacggtattcccgcaaaattaaattccatgaagcgcaccggtgatgagattgttaaaatggcgctgaaagccaattctacaagcgatgttgttaaagtttaccgcgccgcaaaagaaagcgatgttcatgataaaattgttctttgcatggggcattatggtttttactcgcggattctttgcgaaaaattcggctcttatatgacctattcaagcgcgttatctgaaactgaagttccgggggcggcgtggcaggtggatgttaaggagctaaacgaattgtaccgtttccgtaatatcacaaaaaaaacaaaactttacggtattaccggttatccgttaaaggccagtattagcacatggatttttaatttggctttcggttttgaaaacatcgacgctgtatatgtgccgtttccggcggactcaattaacaatattctggagcttgccgaagaattgggagttcagggactttcggttactgtcccatataaggaagctgttttgtccaagcttacaagacgttcggcggtagttcactctatcggggcttgcaatttcatgtcccgttcaatcgacggctggtttggtgataataccgacaataccagtttttcggcggcgattacgtcttttctcggcaaaaaaaatcttaaatggaaaaagattaccgtaatcggggcgggcggtgttgcccgttctgttgcagccgagattttccgtatgggaggtaaagcccttattttgaaccgtaccattcacaaggcaaaagatattgcgtcgctgtacgatcttcgctgggggggtctggacgaacacggaattgaattagtgtataaatattcggatataatcattcaggcaacaacggtcggaatggcaggatacgatgtttccgatccgcttgaactctacagttttaccggaaaagaaattgtgatggatttggtatattaccccgcgcagaccccgtttttaacacgcgccgcggcgtccgggtgcaaaaccatcaatggttacgatatggtaacgtatcaggcttgtcatcaatataaccaaataatggggagggaaatttcccagcagcttttatcgcgggttattaatatagtgggagcaagttcatggaacaagattcaaacagagtaa

SEQ ID NO: 45118 - protein, 417 aa, Unknown
  Obtained from environmental sample
  DOMAIN (1)...(128): Type I 3-dehydroquinase
  misc_feature (1)..(417): Xaa is any amino acid
MDIEEDMKVQSLEEAARXFGTRIIRSYHNTERIIDGIPAKLNSMKRTGDEIVKMALKANSTSDVVKVYRAAKESDVHDKIVLCMGHYGFYSRILCEKFGSYMTYSSALSETEVPGAAWQVDVKELNELYRFRNITKKTKLYGITGYPLKASISTWIFNLAFGFENIDAVYVPFPADSINNILELAEELGVQGLSVTVPYKEAVLSKLTRRSAVVHSIGACNFMSRSIDGWFGDNTDNTSFSAAITSFLGKKNLKWKKITVIGAGGVARSVAAEIFRMGGKALILNRTIHKAKDIASLYDLRWGGLDEHGIELVYKYSDIIIQATTVGMAGYDVSDPLELYSFTGKEIVMDLVYYPAQTPFLTRAAASGCKTINGYDMVTYQACHQYNQIMGREISQQLLSRVINIVGASSWNKIQTE

SEQ ID NO: 45119 - DNA, 507 bp, Unknown
  Obtained from environmental sample
  misc_feature (1)..(507): n is a, c, g, or t
atgaaaaagatattagtttttattataagtttatcgattaccgccgtatgttttgcccaaagcgaccctgttgaaggtttttggataagcgttgacgacaacaccaacaaaataaccgcaggctggcaaatttatcaggaaggcggaaaattatacggaaaaattttatcgttagcggattatccaagagacataatagccgttcgctgtaatgaaagttatcgcggctttccgctcaagggaaaagtaaacgcaatgcccgtcgccggaactccctggattttcggtctaacaaagagcaaaagcggcgaatggagcggcggcagcgtaattaaccccgaagacggaaaaatgtacaactgcaaaataattttccgccccgccgacggcaaaaagttcaagaccgacacccttgaaatgcgcggcgaaataggactgggcatagggcgcagtcaattctggcgcaagaccgacgcggcgaccgcggggggattgggacctaagtga

SEQ ID NO: 45120 - protein, 168 aa, Unknown
  Obtained from environmental sample
  SIGNAL (1)...(19)
  misc_feature (1)..(168): Xaa is any amino acid
MKKILVFIISLSITAVCFAQSDPVEGFWISVDDNTNKITAGWQIYQEGGKLYGKILSLADYPRDIIAVRCNESYRGFPLKGKVNAMPVAGTPWIFGLTKSKSGEWSGGSVINPEDGKMYNCKIIFRPADGKKFKTDTLEMRGEIGLGIGRSQFWRKTDAATAGGLGPK

SEQ ID NO: 45121 - DNA, 1077 bp, Unknown
  Obtained from environmental sample
  misc_feature (1)..(1077): n is a, c, g, or t
ttgtacataaaatgtctgcaagtgtataatatatctatgaaaatagagaaaaagacattcggcgttctttccgacggtaaaaaagttaaactttggactctcagggcgggcgatttaaaattgtcgctaacaaatttcggcgcggcatggacaagtttgattgttccctcgcgcggcggcgttaaggacgacattctgcttggctattctgggcttaacggctacctgaacaatgaaccgtttatcggcgtaacggtcgggcgttttgccaatcgtatcggcaacgcatctttttctttaaacgggaaaacatacgctctttcggcaaatgacggaaaaaattccctccattcgggaccgcgcggctttgacagacttctttggaaatccgaagcctacgaagaaaaaaaagcaatctttgtgcgttttgaaattgaaagtcccgacggcgactgcggttttccgggaaacttaaaagctgtggtaacctacggtcttacggaatccaatgaaataatttgcgattattacgcgaaagctgatatgcctacgcctgtcaatcttacaaatcacgcgtattttaatttggcgggggaagggaagggcgatatactttcccacgaggcgcttctttattcctcaacttatgttcaggttgataaaaacgccatccccacaggcaaactgattcccgtagagggaaccgattttgattttagaacgcggcgaaaaatttgttccaatgcttcatttttaaaaccgtttaaaggatacgatcattgttttacggtagacggagaaatcggtaaactgcgtccgtgcgccgaagttaacgagacgggttcggggcgttatatgaaagtttttacaacacagccgggagttcaattttatacgggtaaccaccttaaaagagttgaaggcaaacaaggttccgtttatacaaaacattcgggcttctgcctggaaacccagcattaccccgatacccccaacaggatcaactttccttcctgcgttgcggaacccggaaaagattatcacgaagaagcaaaatttgcgttctcgtttaactaa

SEQ ID NO: 45122 - protein, 358 aa, Unknown
  Obtained from environmental sample
  DOMAIN (30)...(354): Aldose 1-epimerase
  misc_feature (1)..(358): Xaa is any amino acid
MYIKCLQVYNISMKIEKKTFGVLSDGKKVKLWTLRAGDLKLSLTNFGAAWTSLIVPSRGGVKDDILLGYSGLNGYLNNEPFIGVTVGRFANRIGNASFSLNGKTYALSANDGKNSLHSGPRGFDRLLWKSEAYEEKKAIFVRFEIESPDGDCGFPGNLKAVVTYGLTESNEIICDYYAKADMPTPVNLTNHAYFNLAGEGKGDILSHEALLYSSTYVQVDKNAIPTGKLIPVEGTDFDFRTRRKICSNASFLKPFKGYDHCFTVDGEIGKLRPCAEVNETGSGRYMKVFTTQPGVQFYTGNHLKRVEGKQGSVYTKHSGFCLETQHYPDTPNRINFPSCVAEPGKDYHEEAKFAFSFN

SEQ ID NO: 45123 - DNA, 999 bp, Unknown
  Obtained from environmental sample
  misc_feature (1)..(999): n is a, c, g, or t
ttgatggccgagtcatcttttggcgatccatattttatcctcgccggagtgatcatggattacgcgggcatatccaagcggctcatcaatttcgcttcggtatgcgtaggtcatatccgccacggcatgatcgttgtggtggtcgtggttgcctgtttttttgcggcaatttccggttccggaccggcgacggttgcggcattgggcgctatcctcataccggcgatgattgccgctgggtacgacccggcgctttctaccggcctcatggcttcttcgggggcgataggcattattattccgccgagtatagcctttgtcgtgtacgcctcaatttcagacgtatcgataagcaggattttctcgggcggcattctgcccggcctcctcatgggagccgcttatgtgattgccgcaatatggggatcgcggcgcgaaaaacatataattgttaaacaaccccgcgcaacggccgcacaaagatggaaggcagggaaagaagcgttttgggggcttatgactccggttattatactgggcggcatttacggcggtatttttaccccaaccgaggccgcaggcgtcgcaattgtctatagtcttcttgtcggcgtagtcatacaccgggaagtcaagataaaaaacctttacaagatcttcgttgacgctgcggtaacttccggtacagtcatgtacatagtagcctgcgccagcgtgtttgcctggatcctgacaacatcgcacatcgccacagatatgtccaacgcgcttctggcattgagttcgaataaagtcatccttttgatcattatcaacatcatcttcctgatcgcaggatgttttttggacgcaacctccgccatatatattcttgttcccattatgctgccggtcatcagggcaatccaagttaacccgatacacttcggcgtcattgttacagtgaacctcgccataggacaggtaaccgccgccctgtgggggtcaacctttatgtag

SEQ ID NO: 45124 - protein, 332 aa, Unknown
  Obtained from environmental sample
  DOMAIN (1)...(328): DctM-like transporters
  misc_feature (1)..(332): Xaa is any amino acid
MMAESSFGDPYFILAGVIMDYAGISKRLINFASVCVGHIRHGMIVVVVVVACFFAAISGSGPATVAALGAILIPAMIAAGYDPALSTGLMASSGAIGIIIPPSIAFVVYASISDVSISRIFSGGILPGLLMGAAYVIAAIWGSRREKHIIVKQPRATAAQRWKAGKEAFWGLMTPVIILGGIYGGIFTPTEAAGVAIVYSLLVGVVIHREVKIKNLYKIFVDAAVTSGTVMYIVACASVFAWILTTSHIATDMSNALLALSSNKVILLIIINIIFLIAGCFLDATSAIYILVPIMLPVIRAIQVNPIHFGVIVTVNLAIGQVTAALWGSTFM

SEQ ID NO: 45125 - DNA, 657 bp, Unknown
  Obtained from environmental sample
  misc_feature (1)..(657): n is a, c, g, or t
atgtcgggcattctgggatcggcgccgctgtcatccactggtttcgcatggacgctcaaacaggacaagcgtaaggataccataacgctcgcttgttttggcgatggcgcaatgagcgaaggctcagtctacgaggctatgaacctcgcatccatcctgaaactgccgattctttatgttctggaaaataatcaggtggccatgaccacgccggcctgtgaagaagcgcccatagccgacctcgctgtccgggccgtgtcagcaggtatgcaaggcgttacgatagacggtaacgatattgaagccgttgttgaggcgctactcgccggcattgaaagggccgcgagaaacgagccgaaccttgtcgagctgaaaacctggcggtggcagggccaccacgtaggtgaaaagcaggagacctaccgcgacaccagcttcctcaagaacctcgacgcaatcgatcctgtcaagcgttttgagaaaaaactgctggagcgcggctttgccgatgaggcgcagttcaaaaaactttatgccgaacaggatgattttttatccgctgcttttgaaaaagccgcagagcttgaagctccggatcgtgaaacggtgcttaattataatgctatgtattcaaataatgcgggggcttcattatga

SEQ ID NO: 45126 - protein, 218 aa, Unknown
  Obtained from environmental sample
  SIGNAL (1)...(16)
  DOMAIN (2)...(201): Dehydrogenase E1 component
  misc_feature (1)..(218): Xaa is any amino acid
MSGILGSAPLSSTGFAWTLKQDKRKDTITLACFGDGAMSEGSVYEAMNLASILKLPILYVLENNQVAMTTPACEEAPIADLAVRAVSAGMQGVTIDGNDIEAVVEALLAGIERAARNEPNLVELKTWRWQGHHVGEKQETYRDTSFLKNLDAIDPVKRFEKKLLERGFADEAQFKKLYAEQDDFLSAAFEKAAELEAPDRETVLNYNAMYSNNAGASL

SEQ ID NO: 45127 - DNA, 588 bp, Unknown
  Obtained from environmental sample
  misc_feature (1)..(588): n is a, c, g, or t
atggatcatgagaacgattttaaaaacataatccgcctggactcggaattaaaccaaatccaggactacgatttattgctggaaagaatactgtacgaagcgagaaaagtcgtccattccgacgccggatcaatctacattacagtccctacggaagaaggcgaagaaggaacggaaaaactcgctataaaatattcacaaaacgacactatccaaaagaagatgccccccggacaaaaaatgatttattcgattttttcagtccttataaatgaaaaatccatttcaggctattgcgccttaaaaagggcatctatcaatgttcccgatatgtacaatattccggctgaaatgccgtataaatttaattcttcatttgacgtaattacagggtacaagacggtttccactcttactattccgttaattgccgctgataaccggcttatgggcgttattcaggttattaatcccaaagactcaaacgacaatatcgttccgttttccaacgacgatgaaaatatgcttacgcattttgccactaacgcgactatggttcttcaagggcgtacatcacaagggcgatga

SEQ ID NO: 45128 - protein, 195 aa, Unknown
  Obtained from environmental sample
  DOMAIN (22)...(187): GAF domain
  misc_feature (1)..(195): Xaa is any amino acid
MDHENDFKNIIRLDSELNQIQDYDLLLERILYEARKVVHSDAGSIYITVPTEEGEEGTEKLAIKYSQNDTIQKKMPPGQKMIYSIFSVLINEKSISGYCALKRASINVPDMYNIPAEMPYKFNSSFDVITGYKTVSTLTIPLIAADNRLMGVIQVINPKDSNDNIVPFSNDDENMLTHFATNATMVLQGRTSQGR

SEQ ID NO: 45129 - DNA, 669 bp, Unknown
  Obtained from environmental sample
  misc_feature (1)..(669): n is a, c, g, or t
atgattttgcgcatgataaaaatgtctgagcttcgcgacccgaaagaaacaggcactcatgtaaaccgcgtcgccggttactcggtggagatttacgataaatgggcttttcatcataagatccctgtcgatgaaagagaaaaatacagagactcgctgaaaatcagttccatgctgcatgatgtcggcaaggtggcgatttccgacgcgatccttaaaaagcccgcgcgttttacggcggaagaataccaaataatgcagaaccatactatttacggcgcaagtcttttccgcgatacaagctcttttattgaccagcttgccaaagatattgctctgacccaccatgaaaattgggacggcaccggttatcccggctggatcgatccatacaccggcaaaaccgaaaaagcagacaaagacggaaaaccactcgggaaaaagggcgaagaaatcccgcttggcggaaggattgtcgctattgccgacgtatatgacgcgctctgctcaagacgcgtatacaaagacccgtggaacgaaaaagacgtgcttgatgaaatgcgtaaactttcaggctcaaaatttgatcctgagttaattgatattttctttgaagtgctgccgaatattaagcaggcgcagaaccagtaccccgaggacgtaaaatag

SEQ ID NO: 45130 - protein, 222 aa, Unknown
  Obtained from environmental sample
  DOMAIN (17)...(168): HD domain
  misc_feature (1)..(222): Xaa is any amino acid
MILRMIKMSELRDPKETGTHVNRVAGYSVEIYDKWAFHHKIPVDEREKYRDSLKISSMLHDVGKVAISDAILKKPARFTAEEYQIMQNHTIYGASLFRDTSSFIDQLAKDIALTHHENWDGTGYPGWIDPYTGKTEKADKDGKPLGKKGEEIPLGGRIVAIADVYDALCSRRVYKDPWNEKDVLDEMRKLSGSKFDPELIDIFFEVLPNIKQAQNQYPEDVK

SEQ ID NO: 45131 - DNA, 531 bp, Unknown
  Obtained from environmental sample
  misc_feature (1)..(531): n is a, c, g, or t
atggctcaattaaacttagacgactatatcagaaaagtgccggatttccccaaaaagggaattctcttttatgacattacaagcattctcgcgtccccggaagctttcctttactgcatagaccgcatggtagaaatttacaaagacaagaaaatagacgccatcgccgcgatagaagcccgcggttttttatttgccgcccctttcgcgattcgtcttggcattccgttaattcccatccgcaagaaaggaaaactccccggcgttaccctctctaaaaaatacgatcttgaatacgcgcaggctgaaattgaagtccattcatcggatgttccgaaaggcaaacgcgtcctgcttaccgacgatttaatcgcaacaggcggcacgcttaacgccgcgaggtctctccttgtcgaaggcggagcgcaagttccggaaattttcggcatattggggcttccgtttctcaactttaaaaaagttctcgatcccactccctgtactacgttgattgattatcaatctgaatag

SEQ ID NO: 45132 - protein, 176 aa, Unknown
  Obtained from environmental sample
  DOMAIN (25)...(161): Phosphoribosyl transferase domain
  misc_feature (1)..(176): Xaa is any amino acid
MAQLNLDDYIRKVPDFPKKGILFYDITSILASPEAFLYCIDRMVEIYKDKKIDAIAAIEARGFLFAAPFAIRLGIPLIPIRKKGKLPGVTLSKKYDLEYAQAEIEVHSSDVPKGKRVLLTDDLIATGGTLNAARSLLVEGGAQVPEIFGILGLPFLNFKKVLDPTPCTTLIDYQSE

SEQ ID NO: 45133 - DNA, 630 bp, Unknown
  Obtained from environmental sample
  misc_feature (1)..(630): n is a, c, g, or t
gtgcgcatccttgtagacggggctcagtctgtagcgcatacgccgcttaacgtaacgagttgggacgcggattctttngtcttctccggccataaatttttcggccccacgggcataggcgcgctgtacggaaaagcggacgcacttgaagaggcaaagccgtatcagggcggcggcaacatgataaaagacgttacttttgaacgcacggtatacaacgacgccccggtaaaatttgaagcgggaacgggcaatattgccgacgccgttggcctcggcgccgcgctggactatgtttccggcataggaatagcgaacataagcgcctatgaacacgctctgttaaattacgcgacaggcgaactgaaaaaaataaacggcttgcgccttatagggaccgccgctgaaaaagcaagcgtcctgtccttcgttctcgacaacgcaagcgtagaacaagtaggtaaacacttggcaagcaaaggaatcgccgtccgcgccggccaccactgcgcccagccaatcctgcgccgcttcggactggaagccacagtgcgcccaacaatcgcgttctacaacacagcggaggaaattgataaattggttattgcgataaaggaaattgcaatataa

SEQ ID NO: 45134 - protein, 209 aa, Unknown
  Obtained from environmental sample
  DOMAIN (2)...(200): Aminotransferase class-V
  misc_feature (1)..(209): Xaa is any amino acid
MRILVDGAQSVAHTPLNVTSWDADSXVFSGHKFFGPTGIGALYGKADALEEAKPYQGGGNMIKDVTFERTVYNDAPVKFEAGTGNIADAVGLGAALDYVSGIGIANISAYEHALLNYATGELKKINGLRLIGTAAEKASVLSFVLDNASVEQVGKHLASKGIAVRAGHHCAQPILRRFGLEATVRPTIAFYNTAEEIDKLVIAIKEIAI

SEQ ID NO: 45135 - DNA, 438 bp, Unknown
  Obtained from environmental sample
  misc_feature (1)..(438): n is a, c, g, or t
ttgcgatttaaagacataccagaggagatctttacattggagcttcccaaagtcccggcggacagcgacgggagcaagatatgggactggctgcaatttctgcgagcaaagaagaaaggagaatttgatatgatagcgacaacaaatcccgaaatacaggaagcggtagacattctgtacgagataagcgcagatgataaagtaagggcggagtatgccgcgcgccaaaaggcatggatggacaggcagtcgcaatttgacggctatttcaagaaaggcatcgagaaaggcatcgaggaaggcattgaaaaaggcattgaaaagggcattgaaaaaggcataattaagactgctcacaacttaaaagcgttaggtgttacaacagacataattgttaaatcaaccggtttgtcacctgaagaaatagacaaactgtag

SEQ ID NO: 45136 - protein, 145 aa, Unknown
  Obtained from environmental sample
  misc_feature (1)..(145): Xaa is any amino acid
MRFKDIPEEIFTLELPKVPADSDGSKIWDWLQFLRAKKKGEFDMIATTNPEIQEAVDILYEISADDKVRAEYAARQKAWMDRQSQFDGYFKKGIEKGIEEGIEKGIEKGIEKGIIKTAHNLKALGVTTDIIVKSTGLSPEEIDKL

SEQ ID NO: 45137 - DNA, 360 bp, Unknown
  Obtained from environmental sample
  misc_feature (1)..(360): n is a, c, g, or t
atgaagtattcgcaatcttttatcccgaccctgcgggaagttcccacggacgcaataattgtaagccaccgccttatgttccgtgcgggtatgatccggcggctgggcaacggcctttttacttatctgcctttggggctgcgttctttcagaaaggtggagcaaattatccgcgaagaaatgaacgcaatcggctccctggaaataaaacccaccgtggttatacccggagagctttggaaggaatccgggcgctgggatagcatgggcgaggccctgctcagggtgaaaaaccgccttggcgcggactttgtggtgtccccaccgcgaagagccattttccgcccttgtgcgggatga

SEQ ID NO: 45138 - protein, 119 aa, Unknown
  Obtained from environmental sample
  misc_feature (1)..(119): Xaa is any amino acid
MKYSQSFIPTLREVPTDAIIVSHRLMFRAGMIRRLGNGLFTYLPLGLRSFRKVEQIIREEMNAIGSLEIKPTVVIPGELWKESGRWDSMGEALLRVKNRLGADFVVSPPRRAIFRPCAG

SEQ ID NO: 45139 - DNA, 1473 bp, Unknown
  Obtained from environmental sample
  misc_feature (1)..(1473): n is a, c, g, or t
ttggcgcggactttgtggtgtccccaccgcgaagagccattttccgcccttgtgcgggatgagcttgccagttaccgccagctccccatttcgctttaccagataaacaccaagtaccgcgatgaagtccgcccgcgctacggtgtaatgcgcggcagggaatttgtaatgaaagacgcctattcctacgatgctgacgaggcgagcctggaaaagagttaccaggacatgggccgcgcctaccgccgggttttcaaacgctacggcctttcggtgatctcggtcaaagccgactcaggagcgatgggcggaagcggctcggaagagtttatggtagaaagcgaaatcggggacaataccctgcttttctgcaaagactgcgactatgcggcaaacgtggaaaaagccgattgcatgccggactattcagccgtttcttctgcatctgcttcaacgccgcctgtcgaaaaaatcgacaccccgaacgtaaaaacaatagaagaactctgctcctttcttaaaaccgacgccaagacctttatcaaaaccctcgtttaccgggcggtaaaagtggagcttcagggtgccgaatgcgaggaagctttttacgccgtttgcatccgcggggacttggaaataaacgaagccaaactctgcgcccttttaaaggccgccgaagtgagccttgccagcgaatcggacgtggtgcgcctgaccggagcgcccgttggtttcgcgggccccgttggtttaagccagttgaaagtaattgctgacctcacagttacagccattaacgatggggtaacaggtgctcttgccaaagaccttcactacaagcacgtcgcctacaggcgtgatttccaggcctggatgaccgccgacgtgcgcacggtaaaggccggcgaccgttgctccctctgcggcggggaactatacgagaaaaagggcaacgagctgggacacatttttaagttgggctacaagtatacaaagtcaatgaatgtcagttatctggacgaaaagggagtaaggcagatccccctaagcggcagttatggcatcggccttgaccgcaccctggcaagcatcattgaggaacaccacgatgacgccggtatcatctggcctttaacagtggccccctatcacgtcatcatcgtgcccatcaaatacgacggggcagtgaaggcggcggcggacaagcttgccgaagacctggaacggctgggcattgaagtccttcttgatgacagggacgaaaggcccggtgtcaagttcaacgatgccgacctaatcggcattccctacagggtagtaatcggcgacaaaaacctcgcgagtgaaagcccaaaagtggaagtcaagcgccgttctgagaaagaaaaccgcctggttgagcttggtaaagccgcaggggagctgagagaggaaattatggctgagctggcggagatgaataaaaggctgtaa

SEQ ID NO: 45140 - protein, 490 aa, Unknown
  Obtained from environmental sample
  DOMAIN (155)...(296): YbaK / prolyl-tRNA synthetases associated domain
  misc_feature (1)..(490): Xaa is any amino acid
MARTLWCPHREEPFSALVRDELASYRQLPISLYQINTKYRDEVRPRYGVMRGREFVMKDAYSYDADEASLEKSYQDMGRAYRRVFKRYGLSVISVKADSGAMGGSGSEEFMVESEIGDNTLLFCKDCDYAANVEKADCMPDYSAVSSASASTPPVEKIDTPNVKTIEELCSFLKTDAKTFIKTLVYRAVKVELQGAECEEAFYAVCIRGDLEINEAKLCALLKAAEVSLASESDVVRLTGAPVGFAGPVGLSQLKVIADLTVTAINDGVTGALAKDLHYKHVAYRRDFQAWMTADVRTVKAGDRCSLCGGELYEKKGNELGHIFKLGYKYTKSMNVSYLDEKGVRQIPLSGSYGIGLDRTLASIIEEHHDDAGIIWPLTVAPYHVIIVPIKYDGAVKAAADKLAEDLERLGIEVLLDDRDERPGVKFNDADLIGIPYRVVIGDKNLASESPKVEVKRRSEKENRLVELGKAAGELREEIMAELAEMNKRL

SEQ ID NO: 45141 - DNA, 834 bp, Unknown
  Obtained from environmental sample
  misc_feature (1)..(834): n is a, c, g, or t
atggcgctccttgaagcggatgtcaacctgcgcgtggtcaggcgctttgtcaattccactattgaagaggcaaagggcgaaaaagtgctgcgcgccgtggatccgggccagcagtttgtaaagatcgtccatgacaagcttgtcacctatctgggcggcaatgatcccgaagagcgaaaactcaaactccggggaccagacgttatttccacggtgctgatgctgggcttgcagggatcaggtaaaaccaccagttcagccaagctggccctgcgactgaaaaaagaaggccgcaagcccctgttggtcgcctgcgaccttatacgccccgccgcaatggaacagcttgccgtactgggtaaacaaatcggcgtgcctgttcaccgcgaggaaggggcgacagacagcgcaaaagtttacagggacgctctggcctgggcaaaacagaacctgattgacaccctgattattgataccacgggccgcctgcagattgacgaaaccatgatggcggagctttcccggctgaaagaaaccgtacagcccgatgaaatgcttctggttgccgactctatgacaggccagtccgccgttgacatagcaaaaacctttgacgaaaaaatcggcctaacgggcgtaattctgaccaagtttgattcggacacgcggggcggcgcggcgctttcccttaaaaccattaccggcaagccccttaaatttacgggaaccggggaaaagcccgaagactttgagcctttccaccccgagcgcatggcgggacgcattctgggcatgggcgatgttgtagcttggtggaaaaagcccaggaggtaa

SEQ ID NO: 45142 - protein, 277 aa, Unknown
  Obtained from environmental sample
  DOMAIN (1)...(52): SRP54-type protein, helical bundle domain
  misc_feature (1)..(277): Xaa is any amino acid
MALLEADVNLRVVRRFVNSTIEEAKGEKVLRAVDPGQQFVKIVHDKLVTYLGGNDPEERKLKLRGPDVISTVLMLGLQGSGKTTSSAKLALRLKKEGRKPLLVACDLIRPAAMEQLAVLGKQIGVPVHREEGATDSAKVYRDALAWAKQNLIDTLIIDTTGRLQIDETMMAELSRLKETVQPDEMLLVADSMTGQSAVDIAKTFDEKIGLTGVILTKFDSDTRGGAALSLKTITGKPLKFTGTGEKPEDFEPFHPERMAGRILGMGDVVAWWKKPRR

SEQ ID NO: 45143 - DNA, 378 bp, Unknown
  Obtained from environmental sample
  misc_feature (1)..(378): n is a, c, g, or t
atgcccagaatgcgtcccgccatgcgctcggggtggaaaggctcaaagtcttcgggcttttccccggttcccgtaaatttaaggggcttgccggtaatggttttaagggaaagcgccgcgccgccccgcgtgtccgaatcaaacttggtcagaattacgcccgttaggccgattttttcgtcaaaggtttttgctatgtcaacggcggactggcctgtcatagagtcggcaaccagaagcatttcatcgggctgtacggtttctttcagccgggaaagctccgccatcatggtttcgtcaatctgcaggcggcccgtggtatcaataatcagggtgtcaatcaggttctgttttgcccaggccagagcgtccctgtaa

SEQ ID NO: 45144 - protein, 125 aa, Unknown
  Obtained from environmental sample
  misc_feature (1)..(125): Xaa is any amino acid
MPRMRPAMRSGWKGSKSSGFSPVPVNLRGLPVMVLRESAAPPRVSESNLVRITPVRPIFSSKVFAMSTADWPVIESATRSISSGCTVSFSRESSAIMVSSICRRPVVSIIRVSIRFCFAQARASL

SEQ ID NO: 45145 - DNA, 429 bp, Unknown
  Obtained from environmental sample
  misc_feature (1)..(429): n is a, c, g, or t
ttggtggaaaaagcccaggaggtaattgaccagaaagaagccctggaactccagaaaaaaatggagaaggaaaattttacccttgaggactggcttatgcagcttcgctcggtaaagaaaatgggttcccttcagtcaatgctggaaatgattcccggaatgcaggggcagataagcgaggacgacattgacaaggcgaacctgaaacgtcaggaggccatcatctcatccatgacccgcaaggagcgcgccaaccatttgatcataggccccccgcgccgcagccgcatagctaaaggttccggcacctcggtagcggaagtcgcccgtcttcttaaacaatttgagaaaatgcgcgtcatgatgaaaaaaatggcgaaaatgggaaaaaacccggcacagctaacacaaatgatagggaacaggtaa

SEQ ID NO: 45146 - protein, 142 aa, Unknown
  Obtained from environmental sample
  DOMAIN (25)...(122): Signal peptide binding domain
  misc_feature (1)..(142): Xaa is any amino acid
MVEKAQEVIDQKEALELQKKMEKENFTLEDWLMQLRSVKKMGSLQSMLEMIPGMQGQISEDDIDKANLKRQEAIISSMTRKERANHLIIGPPRRSRIAKGSGTSVAEVARLLKQFEKMRVMMKKMAKMGKNPAQLTQMIGNR

SEQ ID NO: 45147 - DNA, 816 bp, Unknown
  Obtained from environmental sample
  misc_feature (1)..(816): n is a, c, g, or t
gtggcggaatattacctgagccaaaaacagtataagctggccacgtatgcctatggccagtacatcaagcactgccccgacggagaaaaagccgccgccgccaatgaaaaatactcaaagctttcctcacgcatcagactggagaaatttaccgcgaatgatgtaaaccggaattaccgcaaggatacaatgctctttgccgaaggagagcctggagacgagctttttataattcaaaaaggttccataaaaattacaaaaatcgttgacaataaagaagtgcttcttgcaatgctgaaaccgggggatattctgggtgaaatggcgctgttggaaggcaagccgcgggccgccagcgcgttggcttatgatgactgtgacgtgatggccgtgaacaaggcaaactttgaattaatgattaagagtcagccccagatcatcgccaaaattaccattctcctttcggatcggctctggctgatttacaagcagttggccaatactctgattgacaatcccataggccggatgtatgacgcgctgcttatccagcttgaaaaaaaccgtgttcctctggacagcaaagccccatataccttcacttttgggcggcctgagttgattaacatggtcgggtttcccgagagaaagggtgatatactctttgcggagatgctggaaaacaagaaactccggataatagacaacaagatccatgttacatctacggaggaaattttcaaacaggccgaatacttccgcaagatggacaaaatagaaaaaaacaggaaagccgctcaacaaaataacaattaa

SEQ ID NO: 45148 - protein, 271 aa, Unknown
  Obtained from environmental sample
  DOMAIN (56)...(145): Cyclic nucleotide-binding domain
  misc_feature (1)..(271): Xaa is any amino acid
MAEYYLSQKQYKLATYAYGQYIKHCPDGEKAAAANEKYSKLSSRIRLEKFTANDVNRNYRKDTMLFAEGEPGDELFIIQKGSIKITKIVDNKEVLLAMLKPGDILGEMALLEGKPRAASALAYDDCDVMAVNKANFELMIKSQPQIIAKITILLSDRLWLIYKQLANTLIDNPIGRMYDALLIQLEKNRVPLDSKAPYTFTFGRPELINMVGFPERKGDILFAEMLENKKLRIIDNKIHVTSTEEIFKQAEYFRKMDKIEKNRKAAQQNNN

SEQ ID NO: 45149 - DNA, 1899 bp, Unknown
  Obtained from environmental sample
  misc_feature (1)..(1899): n is a, c, g, or t
atgaatagtaataattctttgtttattttatacttacatctaatacccatggactacgacacaatcgtcatcggcggcggtcacgccggaattgaagcgtcccttgcgacaagccgccttggattttccaccctcctcatcacacaaaaccccgacagaataggggcgctttcgtgcaaccccgcgattggcggcttatccaaaggcaaccttgtgcgcgaagtggacgctcttggcggcgagatggctaaattgacggacgcgacaatgattcaatatagagtgcttaaccgctcacggggccccgcggtacaggctccgcgcgcgcaggcggataaacaaatgtaccagatggcggcgcgttctgttttggaaaagcagaaaaaccttacgatttttatggataccgtaactgatttgataatagagaaggctatcgataaaaataccgtcgtgcagggagacaccgctatttccgccgcctcttgcgtcactgatggcgccaccgctaaagtttgcggtatcattacggcgcggggacatcgtataacggcgcgtaccgtgattctctccgccgggactttcatggaagggaaaatatttattggcgaatatgacgctccttgcggacggcttggggaagaagcggcggcaggactgggtaaatccttgcgccgtctgggctttcctgtaggacggttaaaaacgggaacaccggcgcggattgcggaaccatctatcgacttttctaaaatggaaaaacaggatggcgatgaaatgaggccgttttctttttgcgcttgtatgggagcgcaagacattgttaaaaacagaccttcattgccgtgctggattacttacaccaatacaagaacgcatgagattataaaagcgaatattcaccgttcacctttatttggagggaagataatcggcgtaggggcgcgttactgtccttctattgaagataaggttgtgcgatttccccagcgggaaaggcatcacatttttattgagccggaaggacttttcactaatgagatgtacatgaacggcgcgtccagttccctgcccgaagacgtacagagcgattttattcacagcatcaaagggcttgagaaggcgcacattgtccgccccggctacgcggtggagtacgattacattgatcccctcgatctttttccgtcgctggagtcaaagcgcctgtccggttttttcaccgcgggtcagaccaacgggtcttccggttacgaggaagccgccgcccagggaataatcgcgggaatcaacgccgcgatgaaaatgctgggaaagccgccttttatcctcggacgcgcggaagcttacatcggagtacttgttgacgatcttaccacgcttggaacgaaggaaccgtaccggatgttcacaagccgcgccgaacaccgtttaatgcttcgccacgacactgccgacacaaggcttactcccaaagggcgcgaagccgggcttgtagacgacgcccgctgggagcactttttggaaaagacaaaaaagctggacgaaataaaagaattgctcgcccggcgaaaagcggaagaagtttcagctaacgcgcttgaaagcaatgcacttgcagactacccggcggaactggtggaacgcgccctcttggacaaaaagtacgccggctacatcgaaaaggaaatccgttttgccgcgaaagccgccaaaatggacgctatcaaacttaatcccaacacggattattccgttatcagcggactttcatccgaggcaaaagagaaacttcaatccgtaaagccgctcaacgtgggacaggcggcccgaatccccggcatcaggcagggagatatagctatgttgattatcttggcgaggaattacataaattga

SEQ ID NO: 45150 - protein, 632 aa, Unknown
  Obtained from environmental sample
  DOMAIN (20)...(440): Glucose inhibited division protein A
  misc_feature (1)..(632): Xaa is any amino acid
MNSNNSLFILYLHLIPMDYDTIVIGGGHAGIEASLATSRLGFSTLLITQNPDRIGALSCNPAIGGLSKGNLVREVDALGGEMAKLTDATMIQYRVLNRSRGPAVQAPRAQADKQMYQMAARSVLEKQKNLTIFMDTVTDLIIEKAIDKNTVVQGDTAISAASCVTDGATAKVCGIITARGHRITARTVILSAGTFMEGKIFIGEYDAPCGRLGEEAAAGLGKSLRRLGFPVGRLKTGTPARIAEPSIDFSKMEKQDGDEMRPFSFCACMGAQDIVKNRPSLPCWITYTNTRTHEIIKANIHRSPLFGGKIIGVGARYCPSIEDKVVRFPQRERHHIFIEPEGLFTNEMYMNGASSSLPEDVQSDFIHSIKGLEKAHIVRPGYAVEYDYIDPLDLFPSLESKRLSGFFTAGQTNGSSGYEEAAAQGIIAGINAAMKMLGKPPFILGRAEAYIGVLVDDLTTLGTKEPYRMFTSRAEHRLMLRHDTADTRLTPKGREAGLVDDARWEHFLEKTKKLDEIKELLARRKAEEVSANALESNALADYPAELVERALLDKKYAGYIEKEIRFAAKAAKMDAIKLNPNTDYSVISGLSSEAKEKLQSVKPLNVGQAARIPGIRQGDIAMLIILARNYIN

SEQ ID NO: 45151 - DNA, 462 bp, Unknown
  Obtained from environmental sample
  misc_feature (1)..(462): n is a, c, g, or t
atggagaaggctattttggcgtataataatgcaatttccacgtatagagaaaccagggtaaaaactgcaagccaggggcagcttgtcatgatgctctacaatgaggcaataaaaagccttgatcggagcctggaattaataagcctaaataccggggggaaaaaaaatcccggaaatatcgaaaaaatctccaaagctatccttaaagcgcaggaaattattacggagctgatggtttccctggattttgaacagggcggtgaaattgccgctaaccttttctctctttatacctggttcaatcgggaacttttcgaagccaatatcaaccaggacgcaaaacgcatatccattgtaagaaaccacatcgaaaatcttcgcaacgcatggcaggaagtcgtgtcttcaaacgcttttgaaactgccagcaccgaggttttaggcgttaacatcgcaatgtga

SEQ ID NO: 45152 - protein, 153 aa, Unknown
  Obtained from environmental sample
  DOMAIN (8)...(137): Flagellar protein FliS
  misc_feature (1)..(153): Xaa is any amino acid
MEKAILAYNNAISTYRETRVKTASQGQLVMMLYNEAIKSLDRSLELISLNTGGKKNPGNIEKISKAILKAQEIITELMVSLDFEQGGEIAANLFSLYTWFNRELFEANINQDAKRISIVRNHIENLRNAWQEVVSSNAFETASTEVLGVNIAM

SEQ ID NO: 45153 - DNA, 1092 bp, Unknown
  Obtained from environmental sample
  misc_feature (1)..(1092): n is a, c, g, or t
ttgacggaagcagacggttttttcggaatagaaaacattgcggatattacaaacgtggtttcaaaaataacaggcggcgcgcaagataaaccggctaacgacgataaaccggagacgggcaagagaccgctcttatccttgccgggttcggcttatgtaaaaatcagcgaaggatgcaacaactgttgttccttctgcgcaattccgctaatccggggaaagcttgtcagccgcgaaattcccgatattgtagaagaatgccgcatccttcttgagcgcggtatcgcggaattgtgcataatcgggcaagacatcggagcctttggcaaagatacttgcgccgagtcgaagctgcctgaactgttaaaggcgatttcctcgctggaagggcatttttgggtgcgcctgttgtacattcaccccgatcattttccgctacaaattcttgacatcatggaaaaagatacgcgcttcctgccctactttgacattccctttcaacacgcatcgacaaaaatactttcggcgatgaaccggagaaacagcgctgaacagaatttaaaattacttgaaaccatccgtacccgcctgccgcgcgccgttatccgttccacattcctgcttggctttcccggcgaaacagaagaagatttcgccgcattactggattttcaggaaagagccaaattagactggcttggttgttttacctactcaagagaagaaggaactcccgcttattcgatgaaaagccgcgtaagcgcaaaaaccgcggcggcgcggaagagaacaattgaagaccagcaaatccccatcacggaaaaaaacatggaacgcttcacaggccaaactctggaagtattaattgaggagcgtattgacgccgccggcgaagcctgcgctgaggacacggaaaatttttggctgggacggctctactgccaagccccggaaatcgacggcgcggcggtgatagcggacagcggcgcggatgggattaatccgcaaataggaaaacttgccaagtgcaaagtaatcgcccgccgcgggtttgacttggaagtgaagttaatgatagatagtaacaactaa

SEQ ID NO: 45154 - protein, 363 aa, Unknown
  Obtained from environmental sample
  DOMAIN (53)...(225): Radical SAM superfamily
  misc_feature (1)..(363): Xaa is any amino acid
MTEADGFFGIENIADITNVVSKITGGAQDKPANDDKPETGKRPLLSLPGSAYVKISEGCNNCCSFCAIPLIRGKLVSREIPDIVEECRILLERGIAELCIIGQDIGAFGKDTCAESKLPELLKAISSLEGHFWVRLLYIHPDHFPLQILDIMEKDTRFLPYFDIPFQHASTKILSAMNRRNSAEQNLKLLETIRTRLPRAVIRSTFLLGFPGETEEDFAALLDFQERAKLDWLGCFTYSREEGTPAYSMKSRVSAKTAAARKRTIEDQQIPITEKNMERFTGQTLEVLIEERIDAAGEACAEDTENFWLGRLYCQAPEIDGAAVIADSGADGINPQIGKLAKCKVIARRGFDLEVKLMIDSNN

SEQ ID NO: 45155 - DNA, 732 bp, Unknown
  Obtained from environmental sample
  misc_feature (1)..(732): n is a, c, g, or t
ttgtctgttggcgataaaattacatttaaaacaatatccgcccaatactcagaaaaatttctatcgccaaaaatcacgggaatttttacttttgattacattaaattggacgaaaactacattgttctggatatagaaaggcttcaacgattattggttcttgatgaaggaacgcaatcgcttgtaatttttgttgacgatgaaaaaacaagcggcgctattacggtaaaagttaaaaaccttttgggggaggacagctatgttacagaatggaatgataattactgggtgtcaatattgaaagtggcgagtaacatatacacggttgtatttctggtattcctgattgtcgcaagctttctgataattaatacaatagtgatgatcatacatgagcgtatcaaggaaataggcatgatgggctgtcttggcatgacccgcgcggagattgtaaaaatatttttctttgaatcgtttttcatggcggctttcggcgctcttgccggagtggttataggcggggtaataactggcataggctcgcattatcctatacgcataggagatctgtacggaaacacgttcagcgagatgccgcttagcaacgcgattttcttccaattcagtccgattttgcttttacgcgcatggctgttaggtgttgtagtagcgtctattttcacattaataccgtcgcttaaaagcgcgtttgtagagccggttgaagcttaa

SEQ ID NO: 45156 - protein, 243 aa, Unknown
  Obtained from environmental sample
  DOMAIN (58)...(240): Predicted permease
  misc_feature (1)..(243): Xaa is any amino acid
MSVGDKITFKTISAQYSEKFLSPKITGIFTFDYIKLDENYIVLDIERLQRLLVLDEGTQSLVIFVDDEKTSGAITVKVKNLLGEDSYVTEWNDNYWVSILKVASNIYTVVFLVFLIVASFLIINTIVMIIHERIKEIGMMGCLGMTRAEIVKIFFFESFFMAAFGALAGVVIGGVITGIGSHYPIRIGDLYGNTFSEMPLSNAIFFQFSPILLLRAWLLGVVVASIFTLIPSLKSAFVEPVEA

SEQ ID NO: 45157 - DNA, 783 bp, Unknown
  Obtained from environmental sample
  misc_feature (1)..(783): n is a, c, g, or t
gtgccgggaacagggctttctgattgtgttacacaaattgtcagagactcgggaattgccgaataccacgagatgcaggatgatgttacgggaaacaacaagctcaataatttacaggaacttgtaaatgcggcaagcgaatatccgcaaaccagcgaaggtttgctggaattccttgaggacatcgaactggatcgctcgcttaaggacaatgccccgcaagacgcgcaaaattccgtgacgcttattacctttcacaatacaaagggtctggagtttaagcgtgtaataatgacggggcttgaacacggtatctttcccagagaggataaaaaggacgaagaactggaagaagaacgcaggcttttttatgtaggtgtaacgcgggcaatggatgaactctatcttacttcatgcatgatgaggcgtatgtacggaaaaacaatgccgatgcagccttcgctttttcttcacgagattgacacaagctgtctgcaaataaaagaactcgctccaacgcaaagcgccgctacgccgtattacacgggcaaaagaccattaatcgggcgaaattttaatccgcttaatccgcaaagtttacacgcaagcggcagcacaagcagcggcacaaatgccgaacttgaagaacgcgcaggatggcgaaaaggacagcgtttgtttcacgaagatcacggttacggcgcagtcatgggagtaaaggacagcgaggacggacccgttgtccatgtccgttttgattcagggcaggacaagcgattttaa

SEQ ID NO: 45158 - protein, 260 aa, Unknown
  Obtained from environmental sample
  misc_feature (1)..(260): Xaa is any amino acid
MPGTGLSDCVTQIVRDSGIAEYHEMQDDVTGNNKLNNLQELVNAASEYPQTSEGLLEFLEDIELDRSLKDNAPQDAQNSVTLITFHNTKGLEFKRVIMTGLEHGIFPREDKKDEELEEERRLFYVGVTRAMDELYLTSCMMRRMYGKTMPMQPSLFLHEIDTSCLQIKELAPTQSAATPYYTGKRPLIGRNFNPLNPQSLHASGSTSSGTNAELEERAGWRKGQRLFHEDHGYGAVMGVKDSEDGPVVHVRFDSGQDKRF

SEQ ID NO: 45159 - DNA, 855 bp, Unknown
  Obtained from environmental sample
  misc_feature (1)..(855): n is a, c, g, or t
atggtggacgagtatcaggacgcgaatgtcgcgcagttccacctgttaaaagaattgtgcggcccgcagacctatgtgtgcgtagtcggcgacgatgaccagtccatctaccgtttccgcggcgcggaagtaaaaaacattcttgagtttcccgaccgtttttcgggcgcggatattatccgccttgaacaaaattaccgctccacaaaccccatcttaaaagcggcgtcctgcgttgtaaactgcaaccgcggccgtttggggaaaaccctgcgcgccgagaaaggggacggtcccttgcctgttttgacatatctgtcggatcaggatgaagaagctagtttctgcgcggataaaattgaagcctccgtaaaaaagaaagaaaccacatggtcggattgggcaattctctaccgtaccaacgctcagtctcttggttttgaaacgctttttttacgcagaggaatcccctaccgcgtagtcggttctcttaaattttatgaaagagaagaaataaaagacgctcttgcgcttttgtcgttccttgtaaatccgcgcgacgaagtaaatttcagaagggtggtaaataaacctacaagaggggtaggacctgtaacagtggataaaattgtcgagacggcggattcatacggcggagatttgatcgaagcggggcgtagtttggaacttacgcaaaaggcgcgcgcgggtcttaacgcttttttcaaggtcattgaggacgcaaaggaattgttggaagacgaaaaaccattgtcggaagacaagaaagacaaagatgaaaaaaacatgaaaaaaaagacatcaaaaagaaaaaaaccgataagcaaaacctga

SEQ ID NO: 45160 - protein, 284 aa, Unknown
  Obtained from environmental sample
  DOMAIN (1)...(267): UvrD/REP helicase
  misc_feature (1)..(284): Xaa is any amino acid
MVDEYQDANVAQFHLLKELCGPQTYVCVVGDDDQSIYRFRGAEVKNILEFPDRFSGADIIRLEQNYRSTNPILKAASCVVNCNRGRLGKTLRAEKGDGPLPVLTYLSDQDEEASFCADKIEASVKKKETTWSDWAILYRTNAQSLGFETLFLRRGIPYRVVGSLKFYEREEIKDALALLSFLVNPRDEVNFRRVVNKPTRGVGPVTVDKIVETADSYGGDLIEAGRSLELTQKARAGLNAFFKVIEDAKELLEDEKPLSEDKKDKDEKNMKKKTSKRKKPISKT

SEQ ID NO: 45161 - DNA, 585 bp, Unknown
  Obtained from environmental sample
  misc_feature (1)..(585): n is a, c, g, or t
atgcgcgaagaatacccttcctaccttgaaccgctcaacaatgaacaacgccgcgccgttctccacacaggaaagccgctgttgatacttgcgggcgcggggtcgggaaagacaagggtaatcaccacaaaaatcgcttggcttatcagggaacagggaatggatccgcgctcaattctggcggtaacatttaccaacaaggccgcaagggaaatggcggaacgcgcgatattaattgagccgcgcgcggcagacgcaatgctgcggacttttcactcctttggggcgtggtttctaaggcgcaacggaagttttgcagggcttgattcgtcttttgtcatttatgacgacgacgacgttgtctcccttctttcaggcattatggaaaacgctcccaaacccgaagttaaacaatgcgcgcacaatatttcccgcgctaaggattattttctctctcccgacgatccgttacttgcaaatatcgacagccgtaaaaaattccgcagtatctacgcaagttatgaggagcgcatggcgcagatcggcaatgttgattttggggacttaattaaaaaacccngttga

SEQ ID NO: 45162 - protein, 194 aa, Unknown
  Obtained from environmental sample
  misc_feature (1)..(194): Xaa is any amino acid
MREEYPSYLEPLNNEQRRAVLHTGKPLLILAGAGSGKTRVITTKIAWLIREQGMDPRSILAVTFTNKAAREMAERAILIEPRAADAMLRTFHSFGAWFLRRNGSFAGLDSSFVIYDDDDVVSLLSGIMENAPKPEVKQCAHNISRAKDYFLSPDDPLLANIDSRKKFRSIYASYEERMAQIGNVDFGDLIKKPX

SEQ ID NO: 45163 - DNA, 837 bp, Unknown
  Obtained from environmental sample
  misc_feature (1)..(837): n is a, c, g, or t
gtgttgaatatgcgacgcgatctgcgcccatatcgacaatccggaaatagcattgatgatctgatgcgttatgtgcaaggcccggacttcccaacgggcggagttatttttggcaggaaaggcatccgcgaggcatgcaggaccggacggggaaaactgcttgtccgggggaaattcaacgttgagactaccaagtccggaaaagagaaaatagttttcacggaaattccgtatgatgtaaacaaggccgagctgctggaaaaaatcggccagcttatgcgcgacaaactgatcgacggcatcgcgaacgccaatgacgaatctgaccgcgagggcatccgcgttgtcatagaactgaaaaaaggcgccatcgtcaaggtcgtgcttaaccagcttttctccaggactccgttgcaaacgtctttcagcataattaaccttgccctggtgaacggcaagccccaatgcctcaacctgaaagaacttatccattattttattgagcaccgcgtggatgttgtcacccgccgcacgcgctacgatctccgcaaggccgaggaacgcgcacatattctggaagggcttatcatcgcccttgcgaatatcgacgaagtaatcgccattattaaagcaagccgcgatgtcgcgattgcccggcaaaaattgcaggaacgcttcagcctttcagaagcccagtcagaggcaatcgtcgagatgcgccttggccgcctgaccagccttgaagtcgaaaaaattgaaaaggaactggaagagtttaaggttcagatagcttatttcaagtcgctgcttgccgacgagaaaaactccgttcggtga

SEQ ID NO: 45164 - protein, 278 aa, Unknown
  Obtained from environmental sample
  DOMAIN (1)...(278): DNA gyrase/topoisomerase IV, subunit A
  misc_feature (1)..(278): Xaa is any amino acid
MLNMRRDLRPYRQSGNSIDDLMRYVQGPDFPTGGVIFGRKGIREACRTGRGKLLVRGKFNVETTKSGKEKIVFTEIPYDVNKAELLEKIGQLMRDKLIDGIANANDESDREGIRVVIELKKGAIVKVVLNQLFSRTPLQTSFSIINLALVNGKPQCLNLKELIHYFIEHRVDVVTRRTRYDLRKAEERAHILEGLIIALANIDEVIAIIKASRDVAIARQKLQERFSLSEAQSEAIVEMRLGRLTSLEVEKIEKELEEFKVQIAYFKSLLADEKNSVR

SEQ ID NO: 45165 - DNA, 1161 bp, Unknown
  Obtained from environmental sample
  misc_feature (1)..(1161): n is a, c, g, or t
gtgataaaggacgagacaaaggcaataagcgaaaaatacggcgacaaaaggcgaaccgagatcatatccggcgaggtggagaacatcaacattgaagaccttatcaaaaaagaagagatgatgattctcatatccaaccttggttatgtaaagagagtccccgtttcggcgtaccgcaaccagggacgcggcggaaaaggtatgcagagcgcgaaactcgccgaagatgattttgtcgaccagatttttgtcgcctccacccatgagtacattatgttcatcaccagcgcgggcaaggcttactggatgaaggtacacgaattacctgaaggcagccggacaagcaagggcgtccacataaaaagcctcttgacagtttcgcctaacgaagacatttccgcgattgtctctctcaaggatttttccgacactgaattcctgtttatgggaacggcgcggggcgttgtcaaaaaggccagaacctccgaatttgtcaacgcaaaaaccagaggcgttatcgcgattaaccttgacgacggggacaggcttgtaagcgccatgttgaccaacggctctgacgaaattgtgcttatttcccgcaggggccaggcccttcgcacccacgaggaccatatacgggcgatgggccgctcgtcgcgcggcgttactggcatgaagctctcaaacggcgacgagctgaccggcatgctgcgtgttgataccggtaaagatctcccgcccgaaaaaattgaaaaaatgctgatccttaccgaattcggctatggcaaaagggttgacttcagcgaattctcatcgcacgggcgcgggacaggcggccagagaatctacacggtcaatgaaaaaaccggcgagattataggctgtgtttccctgcttgacgacgatgagataatgtgcatcacaagccaggggaaatcaatcaagctcaaggtagacgaaatccgtgttatgggccgcgctgcccagggcgtgaggatactcagtatagacaagcctgattttgttatcggccttgaccgtgttgtaaaagaagacgaacaaattgttaaagaagacgaacaagttgttaaagaggacaaacaagttgttaaagaggacgaacaagttgttaaagaggacgaacctcttgaaggagagtaa

SEQ ID NO: 45166 - protein, 386 aa, Unknown
  Obtained from environmental sample
  DOMAIN (251)...(300): DNA gyrase C-terminal domain, beta-propeller
  misc_feature (1)..(386): Xaa is any amino acid
MIKDETKAISEKYGDKRRTEIISGEVENINIEDLIKKEEMMILISNLGYVKRVPVSAYRNQGRGGKGMQSAKLAEDDFVDQIFVASTHEYIMFITSAGKAYWMKVHELPEGSRTSKGVHIKSLLTVSPNEDISAIVSLKDFSDTEFLFMGTARGVVKKARTSEFVNAKTRGVIAINLDDGDRLVSAMLTNGSDEIVLISRRGQALRTHEDHIRAMGRSSRGVTGMKLSNGDELTGMLRVDTGKDLPPEKIEKMLILTEFGYGKRVDFSEFSSHGRGTGGQRIYTVNEKTGEIIGCVSLLDDDEIMCITSQGKSIKLKVDEIRVMGRAAQGVRILSIDKPDFVIGLDRVVKEDEQIVKEDEQVVKEDKQVVKEDEQVVKEDEPLEGE

SEQ ID NO: 45167 - DNA, 678 bp, Unknown
  Obtained from environmental sample
  misc_feature (1)..(678): n is a, c, g, or t
ttgtgcgacgaaataaacctgcttacgccgaaaacacagggaagcttctttcaggtaatggaagaacagagcgtaactatcgagggcaaatcgtaccgcctgcaagaccccttctttattatagctaccatgaacctgaagggcgttcacctgttcccccttcccgtgcctcagcttgaccgctttatgatacgcctctccctcggatatccgagcgaagaggacgagacggaaattatcaataagcacggcaagatagacgcgtgggacagctttaagagcgtaatcgacagcagggatttaatccgctggagaaaaatggtggacgaggttcacatgcaccccgaggtaacttcctaccttgtaaactgcgtcaggaaaacaaggtcgcatcctgacattgaaacaccggcaagcccgcgcgcgggagtgcgtatttcgcgccttgcccgttcgctcgctatgtgccgcggcatggattttgtttccgttgacataatcaaagaaatatttattcacgctatggctcaccgtataatcacccgcgatccctccataccgccggaagcgcctcttgctaatattttaaattcggtccctgttgaacctcaaccgagcctgaagggcgtcgaaccagaggttcgcggttcctctcttgaaccgaagcgggaacagtaa

SEQ ID NO: 45168 - protein, 225 aa, Unknown
  Obtained from environmental sample
  misc_feature (1)..(225): Xaa is any amino acid
MCDEINLLTPKTQGSFFQVMEEQSVTIEGKSYRLQDPFFIIATMNLKGVHLFPLPVPQLDRFMIRLSLGYPSEEDETEIINKHGKIDAWDSFKSVIDSRDLIRWRKMVDEVHMHPEVTSYLVNCVRKTRSHPDIETPASPRAGVRISRLARSLAMCRGMDFVSVDIIKEIFIHAMAHRIITRDPSIPPEAPLANILNSVPVEPQPSLKGVEPEVRGSSLEPKREQ

SEQ ID NO: 45169 - DNA, 1281 bp, Unknown
  Obtained from environmental sample
  misc_feature (1)..(1281): n is a, c, g, or t
atggccgagacgtattcttgtgcaactgctccgggatttgctggcatggcgaataacggaaacgtctccataatgctcgtggatcctaaaaagcgcaaaagaacccaacagcaaatagcaaacgatttgaggagaattttatccaaagtagagggtgttagaatttcaattcaacaggagcaaactattcgtgtaggttcgcggagtggcttacccgtgcaggtggtggttcaagcggcggagatagattccctgaaaaaatatttgcccggtcttatggataaaattcagcagagtccgcttctaacaatggcggacgtgaatttgaaattcacaaaaccgcaacttgacgttgagatgaatagagaccgtttgcgcacttctggcgttaccccgcgtgaagtggcaaccgcattgcaactggcgtatagcggtttaaggtacgggtattttttgaaagaagggaagcaataccagattatgggagaaatcaattcccaaaatcgttcagagccagcatccttgcaaactctttatgttagaaacagctcaggaaaattggtttcgcttgaccagcttgttgaattgaaagaacgtgcagttccgccgcaaattttcaactacaaccgttatgtgtccgcaacaatttccgcaagccctgcaccaaatgttgcgctgggagatgccataagcgaaatgcggggcataattaaaaaggaacttacagataatttcagaatggaactcacaggaacctcgcgggattttatggaagcatcgggcagtttggctttggtgtttgtgcttgcgctggttatagtgtatatgctgctagctgcccaatttgaaagtttcagacatcccttcaccattatgctaaccgtgccgcttgccctttcgggcgcgcttgcatcgctatattttggcggacataccatgaatatatttagccagatagggcttgtgatgttggttgggcttgtcacaaagaacggaattttgatagttgaatttgcaaatcagaggcgtgcgactgggctagaccttcgccacgccgttgctggcgcggcgggagcacgtctgcgccccattttaatgacaacttccacaaccatctttgggtttgcacccattgcgcttgcgctcggagcgggtgcagagagccgcgttcctatgggcgtagcggtgataggcggagttgttgtatccttggttttcagcttgtttgtggtgccagcggcttatttgcttataagcaaaaaagatgttgggcaaaactaa

SEQ ID NO: 45170 - protein, 426 aa, Unknown
  Obtained from environmental sample
  DOMAIN (1)...(419): AcrB/AcrD/AcrF family
  misc_feature (1)..(426): Xaa is any amino acid
MAETYSCATAPGFAGMANNGNVSIMLVDPKKRKRTQQQIANDLRRILSKVEGVRISIQQEQTIRVGSRSGLPVQVVVQAAEIDSLKKYLPGLMDKIQQSPLLTMADVNLKFTKPQLDVEMNRDRLRTSGVTPREVATALQLAYSGLRYGYFLKEGKQYQIMGEINSQNRSEPASLQTLYVRNSSGKLVSLDQLVELKERAVPPQIFNYNRYVSATISASPAPNVALGDAISEMRGIIKKELTDNFRMELTGTSRDFMEASGSLALVFVLALVIVYMLLAAQFESFRHPFTIMLTVPLALSGALASLYFGGHTMNIFSQIGLVMLVGLVTKNGILIVEFANQRRATGLDLRHAVAGAAGARLRPILMTTSTTIFGFAPIALALGAGAESRVPMGVAVIGGVVVSLVFSLFVVPAAYLLISKKDVGQN

SEQ ID NO: 45171 - DNA, 810 bp, Unknown
  Obtained from environmental sample
  misc_feature (1)..(810): n is a, c, g, or t
atgattggcgatgtggtcggcgatccgggaattgaaatcctgaaacgccgcctgcccgctttaatcagggaaaattccgcggattttgtggttgtaaacggcgaaaacgcggcggggggctttgggcttaccgccgatcttcttaaacgaatcatagccgccggcgcagatcttgtaaccagtggcaaccatatttgggaaaagcgcgaattctggcctactctggaaagcgaagagcgggttttgcgcccgtttaattacccggaagaaagcctcggtctaaagaccgtaggtaaaggctggataaaactggtaaagccttccacatgggggcctgttgcctggctgactataaaccttcagggccgggaattcatgaaagccattgactgccctttcaaagccttcgataatcttgaggcccttgaagcctcagccagcgcgaccggcgctgaaaaaccgctaatactggtggatttccacgctgaatcgacccgcgaaaaagaatccctggcctattaccttgacggccgcgccagccttatcgccggaacccacacccacatacaaaccgccgacgaaaggatccttccgaaaggcagcgcctacatcactgacatagggatgaccggtaccatagatggaattatcggcatggacaccaaaatatgccttgaccgtgcccggaaccaggtgctttaccgtatggaagtcgctggggcgtcttcgggagccagaacagcaatccagggtattgtcgcggaaatagacgccgaaagccggaaagcgttatcgataaagcggctatag

SEQ ID NO: 45172 - protein, 269 aa, Unknown
  Obtained from environmental sample
  misc_feature (1)..(269): Xaa is any amino acid
MIGDVVGDPGIEILKRRLPALIRENSADFVVVNGENAAGGFGLTADLLKRIIAAGADLVTSGNHIWEKREFWPTLESEERVLRPFNYPEESLGLKTVGKGWIKLVKPSTWGPVAWLTINLQGREFMKAIDCPFKAFDNLEALEASASATGAEKPLILVDFHAESTREKESLAYYLDGRASLIAGTHTHIQTADERILPKGSAYITDIGMTGTIDGIIGMDTKICLDRARNQVLYRMEVAGASSGARTAIQGIVAEIDAESRKALSIKRL

SEQ ID NO: 45173 - DNA, 816 bp, Unknown
  Obtained from environmental sample
  misc_feature (1)..(816): n is a, c, g, or t
atggtcagaattggccgaggtttcgacccggtccgcagggaaatagccaaggtaagcctggaaaggcttatcgccgatgggcgcatacaccctgccaggattgaagagatcgttaccaaggtaacaaaggacatctcccaaaagatctttgaagagggggaaaagatccttttcgaccttggaattcacaacatcaaacaggacgcgattcgcacgcttgggcggctttatttccgtaccagctacgggcagaacgtcctttaccactcaaaggaagtggcggttattgccgggatgctggcggcggaaatcggcgggtgcaaccgggaactggcgaagcgggccgccctgctccacgacataggcaaaggggtggaatccgactctgacctgaaccacgcggaaatcggtatggacatggcccgcaaacttggcgaagaccccagggtaattaacgccatcgggagccaccacaacgatatagagcctacctgcctggagtcggtactggttcagattgccgacgccatttcggctgcacgtccgggcgcccggcgtgaaacgctggataactacatcaagcggcttgaaaaccttgaaagcatcgcaacgggctttgtcggcgtagacaaggcttttgccatccaggccggaagagaactgcgaattatagtgaacaacgaaacgctaaacgatgaaagatccagggagctggcaagggaaatcgcccaaaagatcgaaagcgatctccgctaccccggcaggataaaagtaacgattatcagggaaacgagggttaccgagtacgcaaggtaa

SEQ ID NO: 45174 - protein, 271 aa, Unknown
  Obtained from environmental sample
  DOMAIN (86)...(180): HD domain
  misc_feature (1)..(271): Xaa is any amino acid
MVRIGRGFDPVRREIAKVSLERLIADGRIHPARIEEIVTKVTKDISQKIFEEGEKILFDLGIHNIKQDAIRTLGRLYFRTSYGQNVLYHSKEVAVIAGMLAAEIGGCNRELAKRAALLHDIGKGVESDSDLNHAEIGMDMARKLGEDPRVINAIGSHHNDIEPTCLESVLVQIADAISAARPGARRETLDNYIKRLENLESIATGFVGVDKAFAIQAGRELRIIVNNETLNDERSRELAREIAQKIESDLRYPGRIKVTIIRETRVTEYAR

SEQ ID NO: 45175 - DNA, 822 bp, Unknown
  Obtained from environmental sample
  misc_feature (1)..(822): n is a, c, g, or t
gtgtgggattttcgcctgcctcgcgcattagcggcaactcttgccggagcctcgctctctttgagcgggcttttattgcagagcatttttagaaatccgttagcaggtccctttgtgcttggcataagctctggtgcttcgcttggagttgcgttttttttgctcgctggttttggtctcggttcgctgggcttgctctctgcggcagctttgggagctatggcggttctcgcctttatagccaccttctcaaaatttatcccgggcaaaacaagtcttttggtgctgggtttaatggcaggttattttgcggatgccattgtttcaattttaatacacggcacacattcggaagccttgcgaggttttatctcttggggttttggttcttttggcaggttgcgttgggaagagttgccgtatttcgcaggctgcgttttgcttgggcttgcgttgtctgttttttgcgtgaagtatttgaacgcgatagctcttggcgatgacggcgcaaagagtttagggataaatgttaagcaaaagcgattgctttcgcttttggcggcagcggttttagctgcaaccgccacttcgttttgcggaccgataggttttataggaatggcaactccgcatttggcgaggggatttttcaatagcgacaatcagaggattttaattccggcttcgcttttgacaggtgctttgctcgctcttgcggcaggtcttttgtcgcaggggttgtggggaattccgccgcttccgctcaatgcggtggctagtttgatgggtgcgcctgtggtgatttgggtgttggtgaggtaa

SEQ ID NO: 45176 - protein, 273 aa, Unknown
  Obtained from environmental sample
  SIGNAL (1)...(27)
  DOMAIN (1)...(273): FecCD transport family
  misc_feature (1)..(273): Xaa is any amino acid
MWDFRLPRALAATLAGASLSLSGLLLQSIFRNPLAGPFVLGISSGASLGVAFFLLAGFGLGSLGLLSAAALGAMAVLAFIATFSKFIPGKTSLLVLGLMAGYFADAIVSILIHGTHSEALRGFISWGFGSFGRLRWEELPYFAGCVLLGLALSVFCVKYLNAIALGDDGAKSLGINVKQKRLLSLLAAAVLAATATSFCGPIGFIGMATPHLARGFFNSDNQRILIPASLLTGALLALAAGLLSQGLWGIPPLPLNAVASLMGAPVVIWVLVR

SEQ ID NO: 45177 - DNA, 321 bp, Unknown
  Obtained from environmental sample
  misc_feature (1)..(321): n is a, c, g, or t
ttggtatatgttgccatatactctaatgaaaatgattataaaaacgagacctcttttaccaaatttatcttacagtcggataataccgctttaacgtattttctggatttgcccgaaggggaatatgtggtttccgtatatcaggataaaaatggcgatgaaaaactcaattccggcctttttggaatgccttccgagcctgttggtaaaacaaactacaacctcaggggagcaccgggtaattttaacaaattgaaagtccctgtaaacaatagttcgacaaggctaatcgtcaacatgaggaaagtaagacttctatag

SEQ ID NO: 45178 - protein, 106 aa, Unknown
  Obtained from environmental sample
  misc_feature (1)..(106): Xaa is any amino acid
MVYVAIYSNENDYKNETSFTKFILQSDNTALTYFLDLPEGEYVVSVYQDKNGDEKLNSGLFGMPSEPVGKTNYNLRGAPGNFNKLKVPVNNSSTRLIVNMRKVRLL

SEQ ID NO: 45179 - DNA, 528 bp, Unknown
  Obtained from environmental sample
  misc_feature (1)..(528): n is a, c, g, or t
ttgaatcatcttttgaaggttcaaattacaaatctattatttggaggcatttttatggaaaatgttaaccgaaaccacaagaacagcgtcttttcctcgctgttcagcacaccggacgttttgagagaactctactcggctatcgagggtatacctatcccgccggatattcccatcaatattaacacacttacgaacgcactctacaggggacaaattaacgacgtgtcttttctaattgacaatcgtcttgtcgttctgattgagcatcagtctacagttaatgacaatatccccctgcgtttgctgatgtacattgcccgtgtgtatgagaaaatcgtcaaaaggagaaaaaggtatcagaataaacttgaaaaaatcccaaaacctgaatttatcgttctttacaatggtaaagaggattatcctgattccaaaatattaaaactgtccgacgctttcaaagacattgagggactaaaattatctcggagcaacgtaatgccttggaatactcggccaatctga

SEQ ID NO: 45180 - protein, 175 aa, Unknown
  Obtained from environmental sample
  misc_feature (1)..(175): Xaa is any amino acid
MNHLLKVQITNLLFGGIFMENVNRNHKNSVFSSLFSTPDVLRELYSAIEGIPIPPDIPININTLTNALYRGQINDVSFLIDNRLVVLIEHQSTVNDNIPLRLLMYIARVYEKIVKRRKRYQNKLEKIPKPEFIVLYNGKEDYPDSKILKLSDAFKDIEGLKLSRSNVMPWNTRPI

SEQ ID NO: 45181 - DNA, 1830 bp, Unknown
  Obtained from environmental sample
  misc_feature (1)..(1830): n is a, c, g, or t
ttgacagatacgccgcttataagcatagaagacctttctttacagcgacataatttcatgaatacacagcggcagacccccgccttcgttggctccgcgcaaagaaacgattattttgagcttctctacgctcaaggcatggacggaatgcaaacaggacgatcatcgggcaacctcggcaaccggaaagaacgctggtggtttgttcaaatggaaaaaatacaaaaaccgtttgtctcagaatcctattattcggtaggaaccaatatgcccgtaacctctattttttatcccataatgaatgaggggcaaatgattggtatcatggcgggcgatataaaactttccgcccttcacgatatggtcgttgaaatggcggttgaaggttcttattcctttatactggacggcaaaggcgtagttgtagctcacccgaacagcacctatcaggaggaaatgtacaatttcgcgaaattcatcaagactgtaactgtaaaggacgcggacgggaagcctatgcaaaacgcccagggaaacataaccgaagaacagccgttaataatttcggatgcctacaaatccgccatagaggacatgatgaagggaaataaaggctccgtgaaattcaatgaaaacggaaaaaccatttacctgaattaccagccggttacaatgaacggctcatccgatccctggtatgcgctttcaatcagggacagggacgtagccatgcggacaagaaacacggtagtaatggcaatattggcaagctccgcgggaattattttgatagccctgttgatagtattcatcattgcnaagacaatcagttcgccaataaaagaaatacaactgtttctgggaaaggtaaaggacggagatttaagcaataaagtaaccgtaaagacccgtgatgaaatcggaaatttggcggattacttaaatcttacaatagaaaatataagaaaccttatagggacaataaaacacaaaatagacgcgctgaccaataccggccatgaactttccgcaaacatggaaagaacttccgaatcggtagaccagatttcatataatttcgagggtatgaaaaccaaaatgggcaagcaggaagaaagcgccgccgaagcggataaagcggtgaaaaatattaaatccctcattaacaatatgaacaggctgatagacgaacagtctaccagtatcaatacttcgtcttccgcggttgagcaaatgaccgccaatatccattcggtaacgcacacccttatagaaaacagcaaaaatgtcaacgaattgacagaagcctcggagaacggaaaagtaggggttcaggcggtagcggaaaagatacaggaaatagcgcggcaatccgaagggcttttggaaataaacgcggtaatggaaaacatagccagccagaccaacctgctttccatgaacgcggcgattgaggcggcgcacgccggggaagtggggaaagggttcgccgtcgtcgcgggtgaaatccgcaaacttgccgaatcatcaagcaaccagtcaaagtcaaccgcggatatgttaaaaaagataaaagcgtccatagacgggataaccgcgtcttccaacgacgtccttgcgcgtttcgggattattgacgagaaagtaaaaacggtttcaacacatgagataaatatccgcaacgcgatgggagaacaggaagtaggcgggaaacaaatacttgattccatagaacgcttaaaagaaatcagcgtagcggtcagaaaagggggcgacggatatgctgcaatcaggcgatcacctgaacaggcagacaaccgaatttattaa

SEQ ID NO: 45182 - protein, 609 aa, Unknown
  Obtained from environmental sample
  DOMAIN (79)...(157): Cache domain
  misc_feature (1)..(609): Xaa is any amino acid
MTDTPLISIEDLSLQRHNFMNTQRQTPAFVGSAQRNDYFELLYAQGMDGMQTGRSSGNLGNRKERWWFVQMEKIQKPFVSESYYSVGTNMPVTSIFYPIMNEGQMIGIMAGDIKLSALHDMVVEMAVEGSYSFILDGKGVVVAHPNSTYQEEMYNFAKFIKTVTVKDADGKPMQNAQGNITEEQPLIISDAYKSAIEDMMKGNKGSVKFNENGKTIYLNYQPVTMNGSSDPWYALSIRDRDVAMRTRNTVVMAILASSAGIILIALLIVFIIAKTISSPIKEIQLFLGKVKDGDLSNKVTVKTRDEIGNLADYLNLTIENIRNLIGTIKHKIDALTNTGHELSANMERTSESVDQISYNFEGMKTKMGKQEESAAEADKAVKNIKSLINNMNRLIDEQSTSINTSSSAVEQMTANIHSVTHTLIENSKNVNELTEASENGKVGVQAVAEKIQEIARQSEGLLEINAVMENIASQTNLLSMNAAIEAAHAGEVGKGFAVVAGEIRKLAESSSNQSKSTADMLKKIKASIDGITASSNDVLARFGIIDEKVKTVSTHEINIRNAMGEQEVGGKQILDSIERLKEISVAVRKGGDGYAAIRRSPEQADNRIY

SEQ ID NO: 45183 - DNA, 486 bp, Unknown
  Obtained from environmental sample
  misc_feature (1)..(486): n is a, c, g, or t
ttgtctgcctgttcaggtgatcgcctgattgcagcatatccgtcgcccccttttctgaccgctacgctgatttcttttaagcgttctatggaatcaagtatttgtttcccgcctacttcctgttctcccatcgcgttgcggatatttatctcatgtgttgaaaccgtttttactttctcgtcaataatcccgaaacgcgcaaggacgtcgttggaagacgcggttatcccgtctatggacgcttttatcttttttaacatatccgcggttgactttgactggttgcttgatgattcggcaagtttgcggatttcacccgcgacgacggcgaaccctttccccacttccccggcgtgcgccgcctcaatcgccgcgttcatggaaagcaggttggtctggctggctatgttttccattaccgcgtttatttccaaaagcccttcggattgccgcgctatttcctgtatcttttccgctaccgcctga

SEQ ID NO: 45184 - protein, 161 aa, Unknown
  Obtained from environmental sample
  misc_feature (1)..(161): Xaa is any amino acid
MSACSGDRLIAAYPSPPFLTATLISFKRSMESSICFPPTSCSPIALRIFISCVETVFTFSSIIPKRARTSLEDAVIPSMDAFIFFNISAVDFDWLLDDSASLRISPATTANPFPTSPACAASIAAFMESRLVWLAMFSITAFISKSPSDCRAISCIFSATA

SEQ ID NO: 45185 - DNA, 579 bp, Unknown
  Obtained from environmental sample
  misc_feature (1)..(579): n is a, c, g, or t
atgctgcaatcaggcgatcacctgaacaggcagacaaccgaatttattaaaatcagcaatgaagcaatgaccgccatgaacgagatagtaaacggagcgatgaaggaaataaagtcggcagtaacttttgttgatgaaatgagcgccgaaaacagcaagaactttgacgcgcttaaagcggaatcatcaaaattcaaggtcgaatcaggcaacgagaagaaaaagatcatcgtagttgatgatgaagagacgattcttacaatggccaaaggtatgctggatcagcattacgaagttaccacagtgaattcaggcaagaaggcattggatttattcttcgatggttatactcccgctttagttatattggatttgtatatgcctgaaatgggcggctgggatacgtatatcaggatacgggaaataaccaaattgcacaaagttccgatagcgatatatacctcatcggaagagccggaagacaaggcaaaagcacaggaactgggagcggttgcatttataaaaaagccgctcagtaaagacaaactgcttgaaaaggttaacgcattggtggggtaa

SEQ ID NO: 45186 - protein, 192 aa, Unknown
  Obtained from environmental sample
  DOMAIN (74)...(188): Response regulator receiver domain
  misc_feature (1)..(192): Xaa is any amino acid
MLQSGDHLNRQTTEFIKISNEAMTAMNEIVNGAMKEIKSAVTFVDEMSAENSKNFDALKAESSKFKVESGNEKKKIIVVDDEETILTMAKGMLDQHYEVTTVNSGKKALDLFFDGYTPALVILDLYMPEMGGWDTYIRIREITKLHKVPIAIYTSSEEPEDKAKAQELGAVAFIKKPLSKDKLLEKVNALVG

SEQ ID NO: 45187 - DNA, 306 bp, Unknown
  Obtained from environmental sample
  misc_feature (1)..(306): n is a, c, g, or t
ttgaagcctgcgccagcatgggcttttgacgaagcctgccgtaacgcttctccaatccttcttgaacctataatggcagttgatttaagctgtccgcatgaatttgtcggcgaagtgatgagtcttgtaactcagcgcggcgggcatatacacagtatgaattcaaaaaccgacattgatgaaataaaagctcaggccccgatggaaaaaatgttcggctttatgacaagcctgcgcagcgtttcacagggacgggcaagtttcagccttgagttctctcactttgaaaaaaaagttgaacggtga

SEQ ID NO: 45188 - protein, 101 aa, Unknown
  Obtained from environmental sample
  DOMAIN (19)...(101): Elongation factor G C-terminus
  misc_feature (1)..(101): Xaa is any amino acid
MKPAPAWAFDEACRNASPILLEPIMAVDLSCPHEFVGEVMSLVTQRGGHIHSMNSKTDIDEIKAQAPMEKMFGFMTSLRSVSQGRASFSLEFSHFEKKVER

SEQ ID NO: 45189 - DNA, 1407 bp, Unknown
  Obtained from environmental sample
  misc_feature (1)..(1407): n is a, c, g, or t
gtgaaaagtcgaaataagcaaagaattatcaattggctgattgtagtttttataggctttgtgcttttggtttctctattttcatnttatatgattctcattgttccatctcagaatccagatggcaaattcacaaaggaaaatattttaaggaacctcaacggagaaagccgcgttttatattccgatggagcttccgttataggagctttttttgaaataaatcacaggttatatgtaccctacgattcaattccgcaaaccctcatagatgcaatagtctctgccgaagattccaaattttggaagcacaggggttttgatatgagcggttttatgcgtgctatgttcaacaatgtgaaaaacaggagttttaggcaaggtggcagcactcttagccagcaaactgtaaaaaatatttttggcagggaaaacaaaagcataaaatcaaaatggacagaacttgcagatgcccttagattggagaggcgttttagcaaacaggaaattttggaattctatctaaatcagtttcaagtttatggctccggcagaggtgccgccatagccgccatttattttttcaacaaaccgctctcccagcttagccttgaagaatgtgcttttatagcaggcacggtaaaaggaccatataactacgaccctcgtgtgcaaaaaacacccgaaaaagccgagaaagctttgaaaaaagggcaaatgagaaccaaatatgttttgaaacgaatgttggaaaaccattatatagatcaggaaacttttgacgctgcaaaaattcccgaattgaattacggagaattcaaattcaacgcctcttctcttttagataaaatagaccgcgaattgaacgaggatatttacgcagatgttttcgacgactttggaatagacgattggcggcgcgctcaaataaaaatagttacaacgctggacgtgaatttgcaagacaaggcagagcaagcagtgaaaaataatttaaacaacttgcaaaacaaaatagcagcagatacagcaaatccccttcagggtgctcttgtggctttaaagagcggtgctgttgtagcagcgcaatccgggcaaaacaacaccggctatgatagggtatttgttgccgaaaggcaacttggctcttcttggaaaccttttctttacgctcttgcactgaaattcggttggaaacctttggatgagttggaaaacgaatataacctattcacttatggcggaacggtttattttccaagacccgaccatacggataaaagcccaactgtaagcatagcttgggctgcggttcgctcggaaaacatagcgagcgtatggcttttggaacatttgctagacagactttcaacagaagaaataagagatttggcagaaaaaatatga

SEQ ID NO: 45190 - protein, 468 aa, Unknown
  Obtained from environmental sample
  DOMAIN (57)...(226): Transglycosylase
  misc_feature (1)..(468): Xaa is any amino acid
MKSRNKQRIINWLIVVFIGFVLLVSLFSXYMILIVPSQNPDGKFTKENILRNLNGESRVLYSDGASVIGAFFEINHRLYVPYDSIPQTLIDAIVSAEDSKFWKHRGFDMSGFMRAMFNNVKNRSFRQGGSTLSQQTVKNIFGRENKSIKSKWTELADALRLERRFSKQEILEFYLNQFQVYGSGRGAAIAAIYFFNKPLSQLSLEECAFIAGTVKGPYNYDPRVQKTPEKAEKALKKGQMRTKYVLKRMLENHYIDQETFDAAKIPELNYGEFKFNASSLLDKIDRELNEDIYADVFDDFGIDDWRRAQIKIVTTLDVNLQDKAEQAVKNNLNNLQNKIAADTANPLQGALVALKSGAVVAAQSGQNNTGYDRVFVAERQLGSSWKPFLYALALKFGWKPLDELENEYNLFTYGGTVYFPRPDHTDKSPTVSIAWAAVRSENIASVWLLEHLLDRLSTEEIRDLAEKI

SEQ ID NO: 45191 - DNA, 561 bp, Unknown
  Obtained from environmental sample
  misc_feature (1)..(561): n is a, c, g, or t
atgcaatctcgctgtgtttctgatatgagaagccggatatcgtattatagatcaaatctgctgaccgagcagataggtagtggtagcttgtactcggagctaaagcctgtgaaatccataatagtggcagattttgattttgtcccagaatcggagaaatgccacactatttttcaaacgctggaaaaggacgagcatttccctttcaatgatttggaggagatacacgttctttgcttgaaaaaattatctaaattaaataatgagaggttacgtgaatggctgaggttcattaactcggagaaaagagaggaatttatggatttggcaggaatagatccagtatttgtgaaagccgtagatgttttggctaagttcagtgcagacgaccataaccgtatgctttatgaggctcggttgaaggaatggcgggacaacaagtcgaggactgacggagccattaaggaagccaaatttgaaattgcttgcaagctcaagggtatgggtttttcggcttctcagatagctgaagctactggtctttcagagaaggaaatatga

SEQ ID NO: 45192 - protein, 186 aa, Unknown
  Obtained from environmental sample
  misc_feature (1)..(186): Xaa is any amino acid
MQSRCVSDMRSRISYYRSNLLTEQIGSGSLYSELKPVKSIIVADFDFVPESEKCHTIFQTLEKDEHFPFNDLEEIHVLCLKKLSKLNNERLREWLRFINSEKREEFMDLAGIDPVFVKAVDVLAKFSADDHNRMLYEARLKEWRDNKSRTDGAIKEAKFEIACKLKGMGFSASQIAEATGLSEKEI

SEQ ID NO: 45193 - DNA, 855 bp, Unknown
  Obtained from environmental sample
  misc_feature (1)..(855): n is a, c, g, or t
atgattaagaaaaggatcgttcaagaaccgcggtgggtaaaggcgctgttactcgttgcggccggcctgtttatgctgacatttataattttgccgcttgtaacgattttccgcgaggcgttaaaagccggcgccgtcggttattttaaatctttcgccgatccgggcgtcgcgttttcaatacgcctctccctgctgacggtattgatttgcgtccccgtcaatacctttttcggggtcgtcttggcttggctgataacgaagtacgagttccccggtaagaaacttctgattacgcttatcgaggtgccgttcagcatctcgcccgtgatcgccggattactctttatttttatgttcggttctttcggatggttcggaacatggcttatggatcacaatataaaaatagtcttcgccgttccgggaatagtcctcgcgaccctctttgtctctttcccgtttgtggcccgcgagctcataccgcttatgcgggagttgggaaaggacgacgaggaggccgcccttaccttgggcgcttcaggatttcagatcttttggaaggtaacgctgccgaacataaaatggggtttgttgtacggaattattctgacaaacgccagagctatgggagaattcggggctgtgtccgttgtgtccgggcttatcaggggcgtaacgacgaccatgccgctttatatagatattctttacggtgagtatatgttcaaatcagccttcgccgtggcgtcgctgctgacatttttggccttggtgacgattatcgtaaaagcggtattagagtatttcatcacggcgcaaagaaaagctaaggaggtggaaatacaatcatga

SEQ ID NO: 45194 - protein, 284 aa, Unknown
  Obtained from environmental sample
  DOMAIN (57)...(272): Binding-protein-dependent transport system inner membrane component
  misc_feature (1)..(284): Xaa is any amino acid
MIKKRIVQEPRWVKALLLVAAGLFMLTFIILPLVTIFREALKAGAVGYFKSFADPGVAFSIRLSLLTVLICVPVNTFFGVVLAWLITKYEFPGKKLLITLIEVPFSISPVIAGLLFIFMFGSFGWFGTWLMDHNIKIVFAVPGIVLATLFVSFPFVARELIPLMRELGKDDEEAALTLGASGFQIFWKVTLPNIKWGLLYGIILTNARAMGEFGAVSVVSGLIRGVTTTMPLYIDILYGEYMFKSAFAVASLLTFLALVTIIVKAVLEYFITAQRKAKEVEIQS

SEQ ID NO: 45195 - DNA, 348 bp, Unknown
  Obtained from environmental sample
  misc_feature (1)..(348): n is a, c, g, or t
atggttcggaacatggcttatggatcacaatataaaaatagtcttcgccgttccgggaatagtcctcgcgaccctctttgtctctttcccgtttgtggcccgcgagctcataccgcttatgcgggagttgggaaaggacgacgaggaggccgcccttaccttgggcgcttcaggatttcagatcttttggaaggtaacgctgccgaacataaaatggggtttgttgtacggaattattctgacaaacgccagagctatgggagaattcggggctgtgtccgttgtgtccgggcttatcaggggcgtaacgacgaccatgccgctttatatagatattctttacggtga

SEQ ID NO: 45196 - protein, 115 aa, Unknown
  Obtained from environmental sample
  misc_feature (1)..(115): Xaa is any amino acid
MVRNMAYGSQYKNSLRRSGNSPRDPLCLFPVCGPRAHTAYAGVGKGRRGGRPYLGRFRISDLLEGNAAEHKMGFVVRNYSDKRQSYGRIRGCVRCVRAYQGRNDDHAALYRYSLR

SEQ ID NO: 45197 - DNA, 1728 bp, Unknown
  Obtained from environmental sample
  misc_feature (1)..(1728): n is a, c, g, or t
atgaacgaaatactttcacgttatctgcctcgtattgaatttgacaactatgatgatttttataaaaattattgttgtaatgtgcctgataattttaatttcgcgtacgatgttgcagacgaatgggcaaggattcagcccgaaaaacttgcgctgctctggacggatgatacggaagcagtgaaatcttttacctttactgaaataaaaaacctttccgacaaggcggcgaacgcgcttctttcgttaggtgtcaagaagggcgatgttgtcatgcttgtattgaagcagcgtcctgaggtgtgggtgcttatgtgcgcgctttcaaaaatcggcgcaatttgcattcccggcacttatcagttgactgccaaggatttggaatacaggtgcaatattgccgatgttaaacttttaatagcggttgacgatccttcattgcttgaaaacatttccgtttcaagggcaaattgcgccaaactggaaaagatagctgttgtaggcagtacaattcctgacggttatattgatatgcgcgctgaaattgaaaaagcttcaatcgtatttaaaagaatcccgacagtaacaagcgacccgatgctggtttatttttcttccggtacaacgggaatgccgaagatggtaatacacaatcactccctgccgcttgggcatattgttacagcgaaatactggcagtgcgttgaagacaactgcgttcacctgactcaaaccgattcaggctgggcaaaattcgcatggggcaaaatttacggtcaatggatatgcggagccgcaatcggagtttacgatactgaaaaatttaccccaaaaggaatgttaacagctctccggcggctaaagcctgcgactttctgcgctcccgcgacagtgttccgttatctgattaaagaagacctttcagggtacgatttcagctatatccgccatactgcngtagccggggaacccttaagccccgaagtgtaccataggctaaaagagaaaaccggcctcgatcttcgcgagggttttggccagtcggaaacgtcggtaatggcggcggtgttcaaatggctgccggtgaggccaggctccatgggtaaacccgccccgttgtttggcatcagcctgttagatgaaaatggcgaaaggtgcgatgacggtattgccggaaacatgagcattaccatggcaggaaaaaatatgtacgaaatcgcggcaactcagaatggggcaggccaggtgggcgctccgcaaatcggcctgtcggacttccccggcctgtttcgcggttactggaaagacgaggaagttaccaaatcctgctggaataggggaacctaccaaaccggggacgtggcatggcgtgacggcgatggctatctatggtttgtgggcaggaacgatgacgtgattaaatgttccggctaccgcatcggcccctttgaagttgaaagcgccctcatggaacatcccgccgtactggaatgcgccgtaaccgccgcccccgatcccatgcggggccaggtggtgaaagccagtattgtgctgacgcgtggtttttctccttcggatgaactaatccacgaactgcaaaaccacgtcaagcacgttaccgccccctacaaatacccccgcattgtggaatttgtaccggagcttcccaaaacaataagcggcaaaatcaagcgaaatgttattagggaactttaccagaaagcctga

SEQ ID NO: 45198 - protein, 575 aa, Unknown
  Obtained from environmental sample
  DOMAIN (65)...(500): AMP-binding enzyme
  misc_feature (1)..(575): Xaa is any amino acid
MNEILSRYLPRIEFDNYDDFYKNYCCNVPDNFNFAYDVADEWARIQPEKLALLWTDDTEAVKSFTFTEIKNLSDKAANALLSLGVKKGDVVMLVLKQRPEVWVLMCALSKIGAICIPGTYQLTAKDLEYRCNIADVKLLIAVDDPSLLENISVSRANCAKLEKIAVVGSTIPDGYIDMRAEIEKASIVFKRIPTVTSDPMLVYFSSGTTGMPKMVIHNHSLPLGHIVTAKYWQCVEDNCVHLTQTDSGWAKFAWGKIYGQWICGAAIGVYDTEKFTPKGMLTALRRLKPATFCAPATVFRYLIKEDLSGYDFSYIRHTAVAGEPLSPEVYHRLKEKTGLDLREGFGQSETSVMAAVFKWLPVRPGSMGKPAPLFGISLLDENGERCDDGIAGNMSITMAGKNMYEIAATQNGAGQVGAPQIGLSDFPGLFRGYWKDEEVTKSCWNRGTYQTGDVAWRDGDGYLWFVGRNDDVIKCSGYRIGPFEVESALMEHPAVLECAVTAAPDPMRGQVVKASIVLTRGFSPSDELIHELQNHVKHVTAPYKYPRIVEFVPELPKTISGKIKRNVIRELYQKA

SEQ ID NO: 45199 - DNA, 564 bp, Unknown
  Obtained from environmental sample
  misc_feature (1)..(564): n is a, c, g, or t
ttggaaggaatttatatgaatgaaaaggtagcccatgttccggaaagaataaaggaattaagggagattcttgaaataagcgcccttgatatggcgaaagatacggaaattccttttgaaacctacagtaaatacgaaaacggcgacttggacatcccgatcagcgttttgtatacgatagcgggtcgtcttggaacggacgttaccgttcttcttacgggagaagaggcaagaatggacagcgccgccgtctgcagaaacggtaagggagtgcaaatcgagcgttatccgggatatgaattttcaagtcttgcgtataattttaggcgcagaaccatggagccgttacttgtaactcttgattcttcaaagccccccgccgcgcaggtatctcattcgggacaggaatttaactttgtaattgaagggcagataaaagtaacggttgtaaaaacagagcatgttttaaatcccggggactctatttattttgacgcgcgtctgcctcattcgcaaatcgccgtgaacggaacagcgcgatttttaacggtaattcaggaataa

SEQ ID NO: 45200 - protein, 187 aa, Unknown
  Obtained from environmental sample
  DOMAIN (17)...(71): Helix-turn-helix
  misc_feature (1)..(187): Xaa is any amino acid
MEGIYMNEKVAHVPERIKELREILEISALDMAKDTEIPFETYSKYENGDLDIPISVLYTIAGRLGTDVTVLLTGEEARMDSAAVCRNGKGVQIERYPGYEFSSLAYNFRRRTMEPLLVTLDSSKPPAAQVSHSGQEFNFVIEGQIKVTVVKTEHVLNPGDSIYFDARLPHSQIAVNGTARFLTVIQE

SEQ ID NO: 45201 - DNA, 672 bp, Unknown
  Obtained from environmental sample
  misc_feature (1)..(672): n is a, c, g, or t
atgctgggctatgaatatattaatacggaagatatccccgccgcttcaggctggttccagcggaaaggagatgagaatttgtatctccgcccaaaggatttttccctttcctattcaaaaaatttaaccatgaaagaactctggaaaaacaataccaataaggatttagatttttccattaacttaagatccggcatatttattaatctgcagcaatataccagctctaattttagtttttcacttggctttaccatggagataaacaaatttctcagcctgagcatagccgccgagtcttcgaactcgcgtattttccagtactttcacgactggccgggattcaacaacgctccgatagagctgccccccggcacccagacaaacatattcattgaccttttagattcttttcgttttgacgatgaagatttaaggaaaaaatcaggttttaagatgaaaactttccggatatcggcaactcactatttgggggactggaacgccgtgctgaactggtcaatggcgccttaccgtccgacaggcagccgccagtatgaaattaacaacgaagtgtctttcttgatccagtggataccaatcaacgagattaagtcagatataaaatataataagcgcaattctcccgaatgggaggtgaagggcctgtaa

SEQ ID NO: 45202 - protein, 223 aa, Unknown
  Obtained from environmental sample
  misc_feature (1)..(223): Xaa is any amino acid
MLGYEYINTEDIPAASGWFQRKGDENLYLRPKDFSLSYSKNLTMKELWKNNTNKDLDFSINLRSGIFINLQQYTSSNFSFSLGFTMEINKFLSLSIAAESSNSRIFQYFHDWPGFNNAPIELPPGTQTNIFIDLLDSFRFDDEDLRKKSGFKMKTFRISATHYLGDWNAVLNWSMAPYRPTGSRQYEINNEVSFLIQWIPINEIKSDIKYNKRNSPEWEVKGL

SEQ ID NO: 45203 - DNA, 1419 bp, Unknown
  Obtained from environmental sample
  misc_feature (1)..(1419): n is a, c, g, or t
ttgaggcgtatccgctggtacgggtcaaggctgctttcctttgagcctgatgtcgaaagcataccccagcggcgctatacggttaccgtgtcagaccggattaaatcgctgggaggaaaagaattgcagggcgagcgttcattcagttttgaaacagagcggctttcggcgctggaatggcagttgggtgacggcgagcgctggatctggaatggcaatgtgcatcccgaagacgcgaaacagatcaggataattttttcatacccggtcagccttgaggaaatagccaaatggatcgaggtgcgggccgggggcaaaacctggcctttcaggttggagcggcttcccaatattgacgagaagcgttaccggaaagaacagggcgttcttgtccacattaacgacaggcttcccctggataccgaggtggtaatggcgttaaaacagggggcgcgttcggagccgggctggcttggcacaaaagaagaaaaaacctggaacttccataccctgctgcccttcaaattcgaaaatgtttccgtgcgcagttattcacgcccccgaacccaggaaggcgattctattcccatttcacttgagttcagccaggaagtggaaccggacagcgttgaaaaatatttttcggttgatggttttcccgcgctaaaaaaagaaaatatccatgtttacggaagcacggttgtcattaacaacctgccgctggaatacgagaaaaaatacacggcgcgaatttcagcggaacttaaagacctgtacggacgctccctgggcaaggcgcaaaaggttgaagctgaagtgggcgaggcgaacagctatgtgtatttccgcaactcaggctcgcgtatgctggaagcgggttaccccgcaaaaatagcatgggaaacgcagaacccggtttcaatacgaggccggattgcccaggcgcaaaccccctacgaaagaattcccctgtcaggcctttcggaaatccaagtttcaaagctgccgcaaaattcaaaatgttattttatggaagacctttcacccttccttaacgcggcgggcaagggaagcgtcgcaatgcgatgggaataccagaccaagtctttctgggacaaaggaaaagtctatactaacaatgaatggcttacagtccaggtgactaatatcggcataacgctccgttacggctataatatggttctggtatgggcaactcatctttcggacgggactgccgtccccaacgccgatgtggaactcatggaaagcggcaatgttgttctcgccggcaaaaccgacgcgcagggccccttgcggtttttaacttccccaatggcgattttgtttccaggttcaccgaaccgcagggcagttattggagcaatacgtttggcaacggcttccgcgtccgggtaa

SEQ ID NO: 45204 - protein, 472 aa, Unknown
  Obtained from environmental sample
  misc_feature (1)..(472): Xaa is any amino acid
MRRIRWYGSRLLSFEPDVESIPQRRYTVTVSDRIKSLGGKELQGERSFSFETERLSALEWQLGDGERWIWNGNVHPEDAKQIRIIFSYPVSLEEIAKWIEVRAGGKTWPFRLERLPNIDEKRYRKEQGVLVHINDRLPLDTEVVMALKQGARSEPGWLGTKEEKTWNFHTLLPFKFENVSVRSYSRPRTQEGDSIPISLEFSQEVEPDSVEKYFSVDGFPALKKENIHVYGSTVVINNLPLEYEKKYTARISAELKDLYGRSLGKAQKVEAEVGEANSYVYFRNSGSRMLEAGYPAKIAWETQNPVSIRGRIAQAQTPYERIPLSGLSEIQVSKLPQNSKCYFMEDLSPFLNAAGKGSVAMRWEYQTKSFWDKGKVYTNNEWLTVQVTNIGITLRYGYNMVLVWATHLSDGTAVPNADVELMESGNVVLAGKTDAQGPLRFLTSPMAILFPGSPNRRAVIGAIRLATASASG

SEQ ID NO: 45205 - DNA, 444 bp, Unknown
  Obtained from environmental sample
  misc_feature (1)..(444): n is a, c, g, or t
ttgggactgggctggattattctttacggaagaagtttttcccgctcgccggccgcgcttgttatacttcacggggtaagcgctatgcctttcgcttttaattttatttccgaaggtttccgctcccttcccgccaacacattgaacgcggctgcggttttcggagctgatcccatacgcggacttttaaccgccgccctgccgctttcgcttaaccgcgtacgttccgcgtggggcttcgccgcggcgctcagtcttggagaacttaacgcggtgatgatgcttggcatggaaggctgggaaactctgcccctgtacatctaccgcgccgttgccgcttaccgttacgggactgcctgcgccgccggaaccttgctgattctttgctgcgccgcctgcttcctgctttccgaaacagggaggacacaatatgctcgaagttaa

SEQ ID NO: 45206 - protein, 147 aa, Unknown
  Obtained from environmental sample
  misc_feature (1)..(147): Xaa is any amino acid
MGLGWIILYGRSFSRSPAALVILHGVSAMPFAFNFISEGFRSLPANTLNAAAVFGADPIRGLLTAALPLSLNRVRSAWGFAAALSLGELNAVMMLGMEGWETLPLYIYRAVAAYRYGTACAAGTLLILCCAACFLLSETGRTQYARS

SEQ ID NO: 45207 - DNA, 540 bp, Unknown
  Obtained from environmental sample
  misc_feature (1)..(540): n is a, c, g, or t
ttggagcggattgaacaggccctggcggataaagaaaaaatctgtcaggagcgggaagatgcgctgaccaaggaagaagaacgctaccgttcggaattggaacgtgtttcaggcctcagttcggaagaagccaagcgcctcatcatccagaatctggaaagcgaggccaaacatgacgcccaggttttaatcaacaaaatcgagcaggaagcgaacctggccggagagaaaaaagccagggacatactcctcagtaccattcagcgtcttgccacggaggttaccggggaggtaaccgtagccacagttacccttcccaacgacgagatgaaggggcggatcataggccgggaaggccggaatatccgtaccctggaaaccctcaccggggtggacatcatcatagacgacacgccggaagcggtggttatctcctgtttcgaccctgtccgcagggaaatagccaaagtaagcctggaaaggcttatcgccgacgggcgcattcaccctgccagaattgaagaaatcgttacaaggtaa

SEQ ID NO: 45208 - protein, 179 aa, Unknown
  Obtained from environmental sample
  DOMAIN (100)...(159): KH domain
  misc_feature (1)..(179): Xaa is any amino acid
MERIEQALADKEKICQEREDALTKEEERYRSELERVSGLSSEEAKRLIIQNLESEAKHDAQVLINKIEQEANLAGEKKARDILLSTIQRLATEVTGEVTVATVTLPNDEMKGRIIGREGRNIRTLETLTGVDIIIDDTPEAVVISCFDPVRREIAKVSLERLIADGRIHPARIEEIVTR

SEQ ID NO: 45209 - DNA, 540 bp, Unknown
  Obtained from environmental sample
  misc_feature (1)..(540): n is a, c, g, or t
gtggcggttatcgccggaatgttggcggcggaaatcgggggctgtaaccgcgaactggcgaagcgggctgccctgctccacgacattggcaaaggcgtagaatccgactctgacctgaaccacgcggaaatcggcatggacatggcccgcaagctgggcgaagacccaagggtcattaacgccatcggaagccatcacaacgatattgagcctacctgcctggaatcggtgctggttcagattgccgacgcaatttcagccgccaggcctggcgcacggcgggaaaccctggacaactacatcaaacggcttgaaaaccttgaaagcatcgctactggctttgtcggcgtggacaaggcttttgccatccaggccggtagggaactgcggattatagtaaacaacgaaacgcttaacgatgaaagatccagggagctggcaagggaaatcgcccaaaaaatcgaaagcgatctccgctaccccggcaggataaaagtaacgattatcagggaaacgagggttaccgagtacgcaaggtaa

SEQ ID NO: 45210 - protein, 179 aa, Unknown
  Obtained from environmental sample
  DOMAIN (1)...(88): HD domain
  misc_feature (1)..(179): Xaa is any amino acid
MAVIAGMLAAEIGGCNRELAKRAALLHDIGKGVESDSDLNHAEIGMDMARKLGEDPRVINAIGSHHNDIEPTCLESVLVQIADAISAARPGARRETLDNYIKRLENLESIATGFVGVDKAFAIQAGRELRIIVNNETLNDERSRELAREIAQKIESDLRYPGRIKVTIIRETRVTEYAR

SEQ ID NO: 45211 - DNA, 483 bp, Unknown
  Obtained from environmental sample
  misc_feature (1)..(483): n is a, c, g, or t
atgacagacggctttacccgctgtcctcacattgtagaattggccccgggcgaagcaatgtacgtcccgccaggcatacttcacagttatataaaaggcatgggaattgagttgatggccgattccgacaatgtgcttcgcgggggccttagctccaaacacaccgacacgacggagcttttatccgtgctggagttttcccaattcaagcctgaaattatgaagcttccggatccgctttccttccgcttcatgtatcccgccccaatcaaggatttctctctttcggtaatgcatggccttggaacggctgtcccctacagcgagacaggcccgtccatactgatagttactaacggaaccctgataatagaccagtcaacagtaatggaaaccggaaggtccgcttttattcctccgcataaaaccctggagttttcaggaacatttaccgcttatttggcttcggcaaaaatttcctga

SEQ ID NO: 45212 - protein, 160 aa, Unknown
  Obtained from environmental sample
  misc_feature (1)..(160): Xaa is any amino acid
MTDGFTRCPHIVELAPGEAMYVPPGILHSYIKGMGIELMADSDNVLRGGLSSKHTDTTELLSVLEFSQFKPEIMKLPDPLSFRFMYPAPIKDFSLSVMHGLGTAVPYSETGPSILIVTNGTLIIDQSTVMETGRSAFIPPHKTLEFSGTFTAYLASAKIS

SEQ ID NO: 45213 - DNA, 435 bp, Unknown
  Obtained from environmental sample
  misc_feature (1)..(435): n is a, c, g, or t
atgcaaattcttgtggacgcggattcatgtccccgcccggcacgggaaatgatactgcgtttttcatccaggctgggtattaaaagcgtcttcgccgccaaccgtccgattcccggacttccggagtttgaaactgtgttttttgagctttgccctcccggcgaaggggaggcggacaggcgcattttggagctggcaaaaagcggagaccttgttatcacgcgggacttgcccctggccgaacagcttgtcgacgcgggcatagcggttttggacgacaggggcagggcttttacaaaagaaaatattcgcgagcaacgttcaataagggacttcacagtcggcctggcgaataacggcctcgattttgaaagaaccccgtcctacggcaaaaaagatgtgtcttcgcttgccacagcctggatcgggaattga

SEQ ID NO: 45214 - protein, 144 aa, Unknown
  Obtained from environmental sample
  DOMAIN (1)...(144): Uncharacterized BCR, YaiI/YqxD family COG1671
  misc_feature (1)..(144): Xaa is any amino acid
MQILVDADSCPRPAREMILRFSSRLGIKSVFAANRPIPGLPEFETVFFELCPPGEGEADRRILELAKSGDLVITRDLPLAEQLVDAGIAVLDDRGRAFTKENIREQRSIRDFTVGLANNGLDFERTPSYGKKDVSSLATAWIGN

SEQ ID NO: 45215 - DNA, 825 bp, Unknown
  Obtained from environmental sample
  misc_feature (1)..(825): n is a, c, g, or t
atggcgcttcaaaaagcccagattatgcgcaccatgatcctgagaatgattaaaatggcggagcttcgggatcccaaagaaacgggaacccatgtaaaccgcgtcgcgggctacgctgtggaaatttacgatcgctgggcaagccggaggggagtgccggaagaagaaaggaacaaatttaaagacagtttcaggattgcttccatgctgcatgacgcgggtaaggttgccattccggacattatcttaaaaaagcctgccaagtttacgcccgaagagtaccagataatgcagaaccatacggtttacggtgcggcgctttttgacgatcctcaatctccgcttgatattttggcccgtgatatagcttttacccatcatgaaaactgggacggcaccggctaccccggctgggtggatccacaaacgggactcccaattaaggcgggagaagacggcaagcccgtcgggaaaaagggcgaagagattcccctttcggggcggattgtaagccttgccgatgttttcgatgccctttgttccaaacgggtttataaggagccatggactgaggaagatgtgcttcttgaaataaaaaaactgtccggtacaaaattcgatcccgatctggtagaggttttctttgagatacttccctctatncagcagaatttcagcagtatatcccgacggcggctctcttttatctggtcaattcccgatccaggctgtggcaagcgaagacacatcttttttgccgtaggacggggttctttcaaaatcgaggccgttattcgccaggccgactgtgaagtcccttattga

SEQ ID NO: 45216 - protein, 274 aa, Unknown
  Obtained from environmental sample
  DOMAIN (28)...(179): HD domain
  misc_feature (1)..(274): Xaa is any amino acid
MALQKAQIMRTMILRMIKMAELRDPKETGTHVNRVAGYAVEIYDRWASRRGVPEEERNKFKDSFRIASMLHDAGKVAIPDIILKKPAKFTPEEYQIMQNHTVYGAALFDDPQSPLDILARDIAFTHHENWDGTGYPGWVDPQTGLPIKAGEDGKPVGKKGEEIPLSGRIVSLADVFDALCSKRVYKEPWTEEDVLLEIKKLSGTKFDPDLVEVFFEILPSXQQNFSSISRRRLSFIWSIPDPGCGKRRHIFFAVGRGSFKIEAVIRQADCEVPY

SEQ ID NO: 45217 - DNA, 1257 bp, Unknown
  Obtained from environmental sample
  misc_feature (1)..(1257): n is a, c, g, or t
atgccggtaatggcaacgcttgacataccacctgctcccgcgccggtaatgactgtgcctgtccaaccacctgccgcagtacaggaaaacaatgttttttgtacaaactgcggtgaaaaaatcgaggaagataccttattttgttctaaatgtggggctaaagttggaacaggttcattcggacaacaacgtatactacaggctgacagtatacccaaaataaagaaggttccgttgacgataatcctggccgcggcaggcgtcgcggtagtgctggtgattataatagcggtttcttcaaataaccagcctgttcagccgagttattcatcaggggcggaaaccgtatccaccccgccgagtaccagcaccccgtcttcgggagggacagaaactaaaacccgccttgacaacggcaaacgcctgtttgatcaatcaaactatgacggagcgattcaagagttgaatgaagcaatcaggcttgatcccaatatggcggaagcctacgcataccgctcgtgggcatacggacgcaaaaacaataacgatcaggcactttccgacgcgaacaaagcgattcagcttaacccacagctgggaataggttattttgtgcggngcagactgcaaagcgataacgaccgcgccatagcggactataccgaggcaatcagatttgatcctaaattttcattagcgtacaacaacaggggtaatgtgtattacgataagaaagactatgacctcgcgatagcgaactataccgaggtaatcaggcttgatcctaaaaattcaaaggtgtacgaaaagaggggcgatgcgtatagtataaaaggggactatgaccgcgccatagcggactacaatgagttactgcggataaaccctaacaaccgaacagccaaagacaaaatcgagagagcgttggaagataaaaatctgccacatataaccattgacatggataaggtagttgattactgggtgaacgaaggcgggtcgtttccatggtcatcgtccggctcatcgtccggctcatcgtcagggtcagggccaggttcaacgacattccgcagccagtaccatgtgcaagggactttcaccgcgaccgtcaacggcaaaatcacctcattcacaatcaacgagcttgtaagggcaacgtcccaagcagacgcgcggcagcaggtggaaagcgcaataaaaaaccaataccccaccgcgaacaacataaacataacgcggatataccagcaatga

SEQ ID NO: 45218 - protein, 418 aa, Unknown
  Obtained from environmental sample
  DOMAIN (166)...(199): Tetratricopeptide repeat
  misc_feature (1)..(418): Xaa is any amino acid
MPVMATLDIPPAPAPVMTVPVQPPAAVQENNVFCTNCGEKIEEDTLFCSKCGAKVGTGSFGQQRILQADSIPKIKKVPLTIILAAAGVAVVLVIIIAVSSNNQPVQPSYSSGAETVSTPPSTSTPSSGGTETKTRLDNGKRLFDQSNYDGAIQELNEAIRLDPNMAEAYAYRSWAYGRKNNNDQALSDANKAIQLNPQLGIGYFVRXRLQSDNDRAIADYTEAIRFDPKFSLAYNNRGNVYYDKKDYDLAIANYTEVIRLDPKNSKVYEKRGDAYSIKGDYDRAIADYNELLRINPNNRTAKDKIERALEDKNLPHITIDMDKVVDYWVNEGGSFPWSSSGSSSGSSSGSGPGSTTFRSQYHVQGTFTATVNGKITSFTINELVRATSQADARQQVESAIKNQYPTANNINITRIYQQ

SEQ ID NO: 45219 - DNA, 447 bp, Unknown
  Obtained from environmental sample
  misc_feature (1)..(447): n is a, c, g, or t
gtggatcacccgcaccttgatctccggcgtgctcagtttctcaagcgatgtggccagcgcctccacggagccgtccacgtctccctttatgatcaggttgaggttctggacgctacccgcctgtatctgttcgtagagattgtcgagcgatacggcgttgattccgcgcatctcccgctcacgttgcgcaaggcggcggcgcgcgctgatctccctcgcctctttctcgtcgtcaagcacccggaaagagtcgcccgcctgcggcgtgccggacagaccgatgataagcaccggctggctcgggccggcgttctcaactatagacccgcgctcgttgtgcaactcccgcacccgcccgctgtgaataccggtcacaaatgcgttccccttcgtaagcgtcccccgctgtatcaacaccgtggcgataggccccttacccttgtctaa

SEQ ID NO: 45220 - protein, 148 aa, Unknown
  Obtained from environmental sample
  misc_feature (1)..(148): Xaa is any amino acid
MDHPHLDLRRAQFLKRCGQRLHGAVHVSLYDQVEVLDATRLYLFVEIVERYGVDSAHLPLTLRKAAARADLPRLFLVVKHPERVARLRRAGQTDDKHRLARAGVLNYRPALVVQLPHPPAVNTGHKCVPLRKRPPLYQHRGDRPLTLV

SEQ ID NO: 45221 - DNA, 450 bp, Unknown
  Obtained from environmental sample
  misc_feature (1)..(450): n is a, c, g, or t
gtggcgataggccccttacccttgtctaactccgcctctatgaccacgccgtgcgcccgcccctcgggggtcgccttcaactccaatatctcagtctcaagcgcgagcacctccaagagtttttcgatgccctgcccggtcttagccgatatctccacgcaggaggtctgcccgccgtactcctcaaccaatacgttgtggttggccagctcgccctttatcttctccgggttcgccgtgggcaggtcgattttgtttatggccacgacgagcggcacactggcggccttcgcgtggtcgatagcctctcgcgtctgcggcatcaccgcggagtcggcggccacgaccagtactatcacgtcggtgatctgcgaacctctggcgcgcatagcggtaaaggcctcgtggcccggagtgtcgaggaacgttaccgaaccgtgcgacgtttga

SEQ ID NO: 45222 - protein, 149 aa, Unknown
  Obtained from environmental sample
  misc_feature (1)..(149): Xaa is any amino acid
MAIGPLPLSNSASMTTPCARPSGVAFNSNISVSSASTSKSFSMPCPVLADISTQEVCPPYSSTNTLWLASSPFIFSGFAVGRSILFMATTSGTLAAFAWSIASRVCGITAESAATTSTITSVICEPLARIAVKASWPGVSRNVTEPCDV

SEQ ID NO: 45223 - DNA, 603 bp, Unknown
  Obtained from environmental sample
  misc_feature (1)..(603): n is a, c, g, or t
gtgcgcccgcccctcgggggtcgccttcaactccaatatctcagtctcaagcgcgagcacctccaagagtttttcgatgccctgcccggtcttagccgatatctccacgcaggaggtctgcccgccgtactcctcaaccaatacgttgtggttggccagctcgccctttatcttctccgggttcgccgtgggcaggtcgattttgtttatggccacgacgagcggcacactggcggccttcgcgtggtcgatagcctctcgcgtctgcggcatcaccgcggagtcggcggccacgaccagtactatcacgtcggtgatctgcgaacctctggcgcgcatagcggtaaaggcctcgtggcccggagtgtcgaggaacgttaccgaaccgtgcgacgtttgaacctcgtaggccgcaatgtgctgcgtgatcccgcccgactccccggcgatcacgttagtctttcttatatagtcgagcagagaggtcttcccgtggtcgacgtgccccatcaccgtaaccaccggcgcgcgcggcagcatcgcccccgacacctcgtccgcttccgcgccgatctcatcgctcggaacgtactcctccattag

SEQ ID NO: 45224 - protein, 200 aa, Unknown
  Obtained from environmental sample
  misc_feature (1)..(200): Xaa is any amino acid
MRPPLGGRLQLQYLSLKREHLQEFFDALPGLSRYLHAGGLPAVLLNQYVVVGQLALYLLRVRRGQVDFVYGHDERHTGGLRVVDSLSRLRHHRGVGGHDQYYHVGDLRTSGAHSGKGLVARSVEERYRTVRRLNLVGRNVLRDPARLPGDHVSLSYIVEQRGLPVVDVPHHRNHRRARQHRPRHLVRFRADLIARNVLLH

SEQ ID NO: 45225 - DNA, 363 bp, Unknown
  Obtained from environmental sample
  misc_feature (1)..(363): n is a, c, g, or t
gtggcggaaattctcggtgaggtgtactactaccagggaaacaacagcgaagcattgcagtactttcaggaatatgtgaatcttgctccgggcggacagcggatagagagcgtgtattattttatcggggaaatttatatacggatggggaagtaccgtcatgcggatattgccctttctacggcagtccactggatgccgggaaatgccgcctggtggacgcggcttgcctttgcccgcgaaaacgcgggagatttgacggaggcggttagcgcctacgagaaggccatcgcgttgaatccccagcttcccgatgcgcggcgcggtctggatcgcacacggcaggcccttgccaaccgataa

SEQ ID NO: 45226 - protein, 120 aa, Unknown
  Obtained from environmental sample
  DOMAIN (70)...(103): Tetratricopeptide repeat
  misc_feature (1)..(120): Xaa is any amino acid
MAEILGEVYYYQGNNSEALQYFQEYVNLAPGGQRIESVYYFIGEIYIRMGKYRHADIALSTAVHWMPGNAAWWTRLAFARENAGDLTEAVSAYEKAIALNPQLPDARRGLDRTRQALANR

SEQ ID NO: 45227 - DNA, 1011 bp, Unknown
  Obtained from environmental sample
  misc_feature (1)..(1011): n is a, c, g, or t
ttgatcccgctgaaatcgcatcacttgattgaggcggaggctgcggcggggcatcccgaccttaatcggcctaaccgccggctctttgtagttggcggggggcagggcggcgccaacagcgccggatcggcaaaaagcgcgctgcttgaactgccgagctatctgctgaaagcgacagccggtgtaccggaaagcgaacaacccggcggtttgctgccgcacattctggaaatgtggatagagcaggcaaaggggggagggccgttcagttttaagccggaagaattttccttccattcgcggggttatttaaaaatacaggacggctgtaataacggctgtatttactgccgcgtatgccttgcccgcggtcccagcgtcagcctgccgccggaaaacgcccttgccgaattgcgttcttttgaagagcgagactgccctgaattgatgattaccggcgtgaatatcacccaatataatcattccggcctggatcttgccgggcttttgaaataccttctggaaggcagcgcctccatcgccctgcgtctttcatctcttgaaccggaaggaatcaatgacaggcttgcttcggttttggcccatccgcggatacgcccccattttcacctttcggtgcagtcgggcagtgatacagtactgcgccgcacggacaggggctatcatgcgcaaacagtaaaacagggggcggcgcttctgcgttcaggcaaagataatccctttctggcctgcgacattattgccggtttccccggcgaaaccgaggccgagtttgaccaaaccctcgccctgtgcgcggagattcgctttgcgtggatacacgcttttccctactcaaaacgtccgggaactacggccttttccctgaaaaaccctctgtgtgaacgggatacaacgcggcgggtggaagcgctgaccgcgctggccctgcggaacatgagggattatgcccaggcctggatgggccgcgaattatccgccgttgtgtga

SEQ ID NO: 45228 - protein, 336 aa, Unknown
  Obtained from environmental sample
  DOMAIN (104)...(272): Radical SAM superfamily
  misc_feature (1)..(336): Xaa is any amino acid
MIPLKSHHLIEAEAAAGHPDLNRPNRRLFVVGGGQGGANSAGSAKSALLELPSYLLKATAGVPESEQPGGLLPHILEMWIEQAKGGGPFSFKPEEFSFHSRGYLKIQDGCNNGCIYCRVCLARGPSVSLPPENALAELRSFEERDCPELMITGVNITQYNHSGLDLAGLLKYLLEGSASIALRLSSLEPEGINDRLASVLAHPRIRPHFHLSVQSGSDTVLRRTDRGYHAQTVKQGAALLRSGKDNPFLACDIIAGFPGETEAEFDQTLALCAEIRFAWIHAFPYSKRPGTTAFSLKNPLCERDTTRRVEALTALALRNMRDYAQAWMGRELSAVV

SEQ ID NO: 45229 - DNA, 663 bp, Unknown
  Obtained from environmental sample
  misc_feature (1)..(663): n is a, c, g, or t
atgaaattggctatgtctgaagaaatacgggataaaattgcgcaagagggaattatcgctgttttggaaatagagtccgaacaaaacgccgtgccgcttgcaaaggcgcttcttgaagggggaattaccgttattgagcttgccctgcgcacgcctgcggctattccttcaatttcgctgatcgctgaagaagttccgcaaatgtttatcggggtcggcactattattgagccgaaacaggcggcggcggtgcaaaaaaaggcgggtgtgcgtttcggcgtttccccgggaataaatccgcaaattgtaaaagaagcggcggcggtaaaattgccctttgcgcccggaattgccacaccaagcgaattggaacaggctatttccctaggctgccgtgttgtcaaattttttcctgcggagggcatgggcggtttgagttatctgaaaaatattaacgccccttataatcacctcggtataaagtacattccgcttggaggcgtaactgtaaacaatcttgccgattacgcaaagtttagccccatacttgccatcggcggaagttggatagcgaacaaagaactgataaaagcgcaggattggagcgaaattaccaaaagagccaaagaggcaaaagaaatttggaaatccgcccgttcctga

SEQ ID NO: 45230 - protein, 220 aa, Unknown
  Obtained from environmental sample
  DOMAIN (9)...(207): KDPG and KHG aldolase
  misc_feature (1)..(220): Xaa is any amino acid
MKLAMSEEIRDKIAQEGIIAVLEIESEQNAVPLAKALLEGGITVIELALRTPAAIPSISLIAEEVPQMFIGVGTIIEPKQAAAVQKKAGVRFGVSPGINPQIVKEAAAVKLPFAPGIATPSELEQAISLGCRVVKFFPAEGMGGLSYLKNINAPYNHLGIKYIPLGGVTVNNLADYAKFSPILAIGGSWIANKELIKAQDWSEITKRAKEAKEIWKSARS

SEQ ID NO: 45231 - DNA, 888 bp, Unknown
  Obtained from environmental sample
  misc_feature (1)..(888): n is a, c, g, or t
atgaagagccgccgttttcttttatttgttttattaacccttagtttttctcattttgccccgccgcttttcgctgatgaaacatcaggtagggtacaagggtggggcgatgcggacgccgcgctgcaatatgcaaaatgggcgcagcaggcggttaacgaaggccgctggagcgaagcgctggcaggtttggaacgcgcttctgattttgcaaatgtatcttccgatatttcctttatgctggctcttgcccgttttaatcagggaaaaagcagaattgacataatagaagcactggataaagcagtcgaaataaaccgctgggtattgtacaacaagaatgccgcgctgcttttaaaaattgaacagcttctcgctatgcgaaattattacagcgcgcttattattttgagacaaactgcggaaaacgcggattctgctatgcttcggcttcgcgctttttatggattgattttgaataacggaagcgcctccgatcttgctcaattcagaagccttatgctttcagtcatggaaaaatttccggaagatccgcgctcgtttcgcattttttttgaatatgcgcgtaacagaaatccaagaccgtcagcgttggcgcaaagcgatattaatcttctcaatcttgcattaaggaggcttcccttccttttggaaaccaaccctgaacttgcatggattgcggctccttttatccgggatgccgaagatgcgcgcaggcttaccgcgtcctaccgtgcgggaggaataccccatattcgcaacagggattttttcccaagcgcaggttctatccctgttgcgctcaatcttgggcttataaacgacacggagcggcagacgacttttttcaggaaaccgaggggttaa

SEQ ID NO: 45232 - protein, 295 aa, Unknown
  Obtained from environmental sample
  SIGNAL (1)...(25)
  misc_feature (1)..(295): Xaa is any amino acid
MKSRRFLLFVLLTLSFSHFAPPLFADETSGRVQGWGDADAALQYAKWAQQAVNEGRWSEALAGLERASDFANVSSDISFMLALARFNQGKSRIDIIEALDKAVEINRWVLYNKNAALLLKIEQLLAMRNYYSALIILRQTAENADSAMLRLRAFYGLILNNGSASDLAQFRSLMLSVMEKFPEDPRSFRIFFEYARNRNPRPSALAQSDINLLNLALRRLPFLLETNPELAWIAAPFIRDAEDARRLTASYRAGGIPHIRNRDFFPSAGSIPVALNLGLINDTERQTTFFRKPRG

SEQ ID NO: 45233 - DNA, 1119 bp, Unknown
  Obtained from environmental sample
  misc_feature (1)..(1119): n is a, c, g, or t
ttgttggacaggcttgttcctgtaacaggcttgaacaggagctatcttgcgacggcgcttggcaactatggcaacaaggagggcatggagaagccgcctgcaaaaggcaagaggaagcctcgccctgcggggaaacgcgggggacgccctgtcaaatacggggaagagttcgtaaaggttcttactgcaatttgggacgattacgggaaaccttgcgggaagcttttggttccgatgattcgcggcatgatagattttctggaaggatcgggaaatcccgattacggaataactaaagaaatcaggaagctgcttttggaagtgagcgcggcggaagcggacatactgttgaagccggcgcggaaggcgcttgaaatcaagggcgcaagcacgaggagggccgttcaaacgcctttgagaagccaaattcctgtcaggacatactttgaccgggacacggttaagcctggaaagtttgcatttgacacggttgcgcactgcggaggctcagcgagcgggcagttttgcaaaactttaacaggaacagacgtttattccgggtggtatgaagggcgcgccctgctaaacgcggctaactgctgggttaaggccgccatttccgacattcaggcaggccttcccttcccgatgacaggcgcgcattacgacaacggcatggaattcataaacgaaccgctgctgtcttggtgcattgctcagcacattgaggccactcgtaccaggccgtaccacaaaaacgacaactgctacgcggaacagaaaaactacgatgcggtcagaaaaaccgttgggtactttcgcttcgacaccgctgaagagtgcgcggcactggccgaagtgtacctttggctttgccccctgtataattactggatgccctcgtttcgcctaacggacaaggaaaaacaggatgacggccgctataagaaagtctacgaaaaagagcctaaaacgccgtacgagcgactgatggaatcgcctgacgtatcgccggagtgcaaagcggaacttgaacgcaggagggccgggcagaaccccgttgagctgaaccggaaattgaatgaggctgtcgggctgctcttgaaaataaaccngtga

SEQ ID NO: 45234 - protein, 372 aa, Unknown
  Obtained from environmental sample
  DOMAIN (151)...(331): Integrase core domain
  misc_feature (1)..(372): Xaa is any amino acid
MLDRLVPVTGLNRSYLATALGNYGNKEGMEKPPAKGKRKPRPAGKRGGRPVKYGEEFVKVLTAIWDDYGKPCGKLLVPMIRGMIDFLEGSGNPDYGITKEIRKLLLEVSAAEADILLKPARKALEIKGASTRRAVQTPLRSQIPVRTYFDRDTVKPGKFAFDTVAHCGGSASGQFCKTLTGTDVYSGWYEGRALLNAANCWVKAAISDIQAGLPFPMTGAHYDNGMEFINEPLLSWCIAQHIEATRTRPYHKNDNCYAEQKNYDAVRKTVGYFRFDTAEECAALAEVYLWLCPLYNYWMPSFRLTDKEKQDDGRYKKVYEKEPKTPYERLMESPDVSPECKAELERRRAGQNPVELNRKLNEAVGLLLKINX

SEQ ID NO: 45235 - DNA, 1242 bp, Unknown
  Obtained from environmental sample
  misc_feature (1)..(1242): n is a, c, g, or t
atgagtatgggcaaggacggcaaaaaggatcggcagcgcctggcgcatcttgggcgggaagagcgccgccggtttctcttctcggaatatccggatgcggcggagcttctcgcgagcgccgaggatcccttactgctctccggtctcagcgaaaagatgactgaaaattccataagcttttttgcgttacccttgggcatcgctgaaaattttgtgatcgacggcgctccgctctgtattcccatggcgactgaagaaccctcggtggtggcggcggcctcgtttgccgcagggctggttcgtctcggcggcgggtttgcggccgaggcgcaagaggcggaactgacggcgcaggtttttttggagcaggttccggagacattccgccaaagctgtctgcgctctcagagcggtcagggcgatcctgatcagccggagcgcgaggctctggacgcccggctccgcgcccttgccgaacaggttttgccgtcgctcatcgcgcgcggcggcgggtttgcgggcagcagcgtacacgcgcttgccgatattcccggagtcgtccgcgtggatatgcgtcttcgggtgtgcgacgccatgggcgcgaatatggccaacaccttcgccgaagccgccagatcgctgcttgaggatcgcatcgggggcagggcgctggccgccatcctcacgaacgagagcgccgggcggcttgcgcgggcgcgtttttcgttacccgcgcgtttcctgcgccgggacgggcagaagggcgaagagatcgcgcgcagacttgtactcctgtcgtggattgcgcatcatgatcgcgcgcgcgcgattaccgcgaataagggtgtgatgaacggcatcaccgcgcttgcgatcgcgaccggcaatgacagccgcgccgtcgaagcggcagcccatgcctgggcttcgcaaaccgggcgctatcttccgctcacgcgatacggattggataacggacatcttgccggggagatcattctgcccctgccgctgacttccgcgagcagcatggccaggctgcatccgggcgccatgttttccctcgcgcttctgggcaatccgggcgcgccggggcttgcggctattgccgcggccctggggcttgcgcaaaacctcgcggcgctgcttgccctggtgggcgaaggtattcaggccgggcacatgcggctgcatgggcggagagaagaacgggcagatgcgccaaattgcaaatacgaataa

SEQ ID NO: 45236 - protein, 413 aa, Unknown
  Obtained from environmental sample
  misc_feature (1)..(413): Xaa is any amino acid
MSMGKDGKKDRQRLAHLGREERRRFLFSEYPDAAELLASAEDPLLLSGLSEKMTENSISFFALPLGIAENFVIDGAPLCIPMATEEPSVVAAASFAAGLVRLGGGFAAEAQEAELTAQVFLEQVPETFRQSCLRSQSGQGDPDQPEREALDARLRALAEQVLPSLIARGGGFAGSSVHALADIPGVVRVDMRLRVCDAMGANMANTFAEAARSLLEDRIGGRALAAILTNESAGRLARARFSLPARFLRRDGQKGEEIARRLVLLSWIAHHDRARAITANKGVMNGITALAIATGNDSRAVEAAAHAWASQTGRYLPLTRYGLDNGHLAGEIILPLPLTSASSMARLHPGAMFSLALLGNPGAPGLAAIAAALGLAQNLAALLALVGEGIQAGHMRLHGRREERADAPNCKYE

SEQ ID NO: 45237 - DNA, 714 bp, Unknown
  Obtained from environmental sample
  misc_feature (1)..(714): n is a, c, g, or t
atggcgagttctcatcctttccgttctgtccggcatcgcccagagcgcgtcaagttttcaaacgatttacgcctgctctcccatttaaaagaaattgaggaaccgtttgaagcagggcaggtcggctcgtcggcaatggcgtacaagagaaaccccatgaggagcgaacgcatagcctcgctcgcgcggtatgtgacggttaacgcccaaaaccccgcgttaaccgcgagcgcgcagtggctggaacgcacccttgacgattcggctaaccggcgcatcgcgatccccgaagccttcctcgccgttgacggaatcctttccctgtatatcaatgtcgcgggcgcgcttaccgtttatccgcgcatgattaaaaaacacctggacgaggaactgccctttatggcgacggaaaatattttaatgcactgcgtaaaaaaaggcggggacagacagtcgcttcacgagaggatacggatacattcggtagaggcggcaaaaaaaataaaactggaaggcggggaaaatgatctgatagcccgcattatatcggacgcaaacttcgggttaggcgaagaagaaataaagggcctgctgtccgcggaaaatttcacgggcagggcggctgaacagaccggggagtttctggcggaagtcagaacaacgcttgaggccaataaagagcttctgggcgttgaaatcaagatcaccgtatag

SEQ ID NO: 45238 - protein, 237 aa, Unknown
  Obtained from environmental sample
  misc_feature (1)..(237): Xaa is any amino acid
MASSHPFRSVRHRPERVKFSNDLRLLSHLKEIEEPFEAGQVGSSAMAYKRNPMRSERIASLARYVTVNAQNPALTASAQWLERTLDDSANRRIAIPEAFLAVDGILSLYINVAGALTVYPRMIKKHLDEELPFMATENILMHCVKKGGDRQSLHERIRIHSVEAAKKIKLEGGENDLIARIISDANFGLGEEEIKGLLSAENFTGRAAEQTGEFLAEVRTTLEANKELLGVEIKITV

SEQ ID NO: 45239 - DNA, 1284 bp, Unknown
  Obtained from environmental sample
  misc_feature (1)..(1284): n is a, c, g, or t
atgcttacagcggtagtcggaattaactggggcgacgagggcaagggacgcatggtagatctgctgtccggaaaatacgatgtaatctgccgttatcagggcggcaacaacgcggggcatactgtcgttaacgacaggggcaaattcattctgaaccttctgccctcgggcatcctgcgcgaaggcgccgtcaatgtcatgggcaacggcatggtaattgatatagagcacctctgcggcgaggttaagacgcttaaggaaaaaggcattaatataacgcccgacaacctgaaaatcagcgataaggcctttatatgcatgccgttccacaagaagcaggatatactggaggaggaacggcttgccgacaagaaatacggctccacgcggcgcggcatagcgccggtgtacggggacaaatatatgaaaaaagggctgaggatcggcgatctgaccgattccaaaacccttaaacaaaagctgaccgacatcatcgaatggaaaaatattacgcttaacggatattcgggcgcggccggcgcggccggcgtgaatgcaaataatattttagactggctggatgaattcggaacgccgttctttccctttattgcggacacgacggattacctgaactcggccataaaggcaaaaaaagacatcctgttcgaggcgcagctcggcgcgttacgcgacattgactacgggatttatccttacaccacctcgtcccacacgattgccgcctacgcgaccgcgggcgcggggattcccggcaaaaagctcgacagcgtaatcggcataatgaaagcgtattcaagctgcgtgggcgaggggcccttcgccgccgaaatgtccggcgacgaagccgcggctttacgcgaggccggggccgaatacggcgcggcgacaggaaggccgcgcagggtaggcgggtttgacgtgccggcaagccggtacggcgttcaggttcagggcgccgatgaaatcgccctgacgaagctggacgtgctcgcgtaccttgataaaatacccgtctgcacggcgtatgaggttgacggggaaaaaaccagccgtttcccgtctggcagcgcgcttatgagggcaaagcccgtaatcgaatatttggacggcttcaaaaccgacatatcaaaatgccgtaaagtgaaggatttaccggacgcggcaatcaaatatattaaatacattgaagacgctgtcggctgccgcattaaatacgtttccgtcggagccgaacgcgatgactatgtgcaaatgaactaa

SEQ ID NO: 45240 - protein, 427 aa, Unknown
  Obtained from environmental sample
  DOMAIN (2)...(425): Adenylosuccinate synthetase
  misc_feature (1)..(427): Xaa is any amino acid
MLTAVVGINWGDEGKGRMVDLLSGKYDVICRYQGGNNAGHTVVNDRGKFILNLLPSGILREGAVNVMGNGMVIDIEHLCGEVKTLKEKGINITPDNLKISDKAFICMPFHKKQDILEEERLADKKYGSTRRGIAPVYGDKYMKKGLRIGDLTDSKTLKQKLTDIIEWKNITLNGYSGAAGAAGVNANNILDWLDEFGTPFFPFIADTTDYLNSAIKAKKDILFEAQLGALRDIDYGIYPYTTSSHTIAAYATAGAGIPGKKLDSVIGIMKAYSSCVGEGPFAAEMSGDEAAALREAGAEYGAATGRPRRVGGFDVPASRYGVQVQGADEIALTKLDVLAYLDKIPVCTAYEVDGEKTSRFPSGSALMRAKPVIEYLDGFKTDISKCRKVKDLPDAAIKYIKYIEDAVGCRIKYVSVGAERDDYVQMN

SEQ ID NO: 45241 - DNA, 435 bp, Unknown
  Obtained from environmental sample
  misc_feature (1)..(435): n is a, c, g, or t
atgaacatagcggcgcacaatcttgattttaaggaactgaacagccggatacggaacgccaaagaagccgtttgcatagacggctgttacgggcaaaggtttatcgcaagcggaatgaccggcaaaaacctgacgattaacggaacgccggggaatgcgttaggcgcttattttaacggcggaaccattatggtaaacggcaacgcgcaggatgccgtcggcgacacgatgaacgacggagaaattgtcattcacggcagcgcgggagacgcgctcggctacgccatgcggggcgggaaaatatatgtccgcgacaacgccggatacagggtcggcattcacatgaaagaatataaagaaaaaaaacctgtaattgtcattggcggcaaggcgggcagttttttgggcgaataccttgccggcggaatcatgtag

SEQ ID NO: 45242 - protein, 144 aa, Unknown
  Obtained from environmental sample
  DOMAIN (1)...(144): GXGXG motif
  misc_feature (1)..(144): Xaa is any amino acid
MNIAAHNLDFKELNSRIRNAKEAVCIDGCYGQRFIASGMTGKNLTINGTPGNALGAYFNGGTIMVNGNAQDAVGDTMNDGEIVIHGSAGDALGYAMRGGKIYVRDNAGYRVGIHMKEYKEKKPVIVIGGKAGSFLGEYLAGGIM

SEQ ID NO: 45243 - DNA, 903 bp, Unknown
  Obtained from environmental sample
  misc_feature (1)..(903): n is a, c, g, or t
atgaaagagtataaacttgaacatggcgataaattgataacggctgacggaaagagaattaacaggggcgatgtaataattaaacgcggcggggaagatattgtttctcctgaaatcgcgtatgcgcttgtattgaaaaagaaagaaggagaaaccctttaccttatcggtcaggatcaaaaaattgaaatcaggaacggttccgactttgaggcgcaaaaaggaacggtcgtggaagccaataaaaacattgcgacttttgacccgttctccgacccgattatcgcggaagcgagcggaattgttaaatatgaggatattattcttggcaccacgcttaaagaagaaactgacgaagacaccggcaacattgaaaagcgcataacggagttccagcatgaaagtaaacagccgcgcgtctttattgtcgatgataataataatcaagtcgcgtcatatcatatgccttccggcgcttatcttcaggttgacgaaggggagcgtattaaagcgggacgcacaatagcgaaaaccttaaaagaatcagcgaaagccatggacattacgtccggtcttccgcgcgtcagcgaactgtttgaagcgcgtaaacccaagagccctgcggttcttgcacaagtttcaggaaccgtgtatttcaaagacccggtgaaaggcaaacggaaaatttctattgtcgataattttggcagggaatttttgcacttaataccgatgaataaacggcttttggtgcgtgacggcgacacggtggaagcgggagaattgctctgtcagggagccattaatccgcatgacgttttgtatatcctgggcgaaggaaattacagcgttatctcatggacgaaatccagcaggtataccggcttcagggcgtgtcgataa

SEQ ID NO: 45244 - protein, 300 aa, Unknown
  Obtained from environmental sample
  misc_feature (1)..(300): Xaa is any amino acid
MKEYKLEHGDKLITADGKRINRGDVIIKRGGEDIVSPEIAYALVLKKKEGETLYLIGQDQKIEIRNGSDFEAQKGTVVEANKNIATFDPFSDPIIAEASGIVKYEDIILGTTLKEETDEDTGNIEKRITEFQHESKQPRVFIVDDNNNQVASYHMPSGAYLQVDEGERIKAGRTIAKTLKESAKAMDITSGLPRVSELFEARKPKSPAVLAQVSGTVYFKDPVKGKRKISIVDNFGREFLHLIPMNKRLLVRDGDTVEAGELLCQGAINPHDVLYILGEGNYSVISWTKSSRYTGFRACR

SEQ ID NO: 45245 - DNA, 816 bp, Unknown
  Obtained from environmental sample
  misc_feature (1)..(816): n is a, c, g, or t
atggacgaaatccagcaggtataccggcttcagggcgtgtcgataaacgacaagcatatcggcgttatagtccgccagatgatgcggaaagttgagatctgctttgtgggcgacacaaggtttatctatggccagatggtggacaagtaccgcttccacgaggaaaacgccagggttataaaagaaggcggccagcccgcaattgcccggcctttatttcagggtataaccaaggcgtcgttgaacatcgattcgttcctttctgcggcgagcttccaggaaaccacccgcgtactgaccaacgccgccattgccggcagcaccgactatctgcgcggcctgaaggaaaacataatcattggccatcctattcccgcgggcaccggcatgaagcgttaccgtaacgtcaagctgtacgatgaagacagccaggatttggaaaagcagatgcaggagatccttgaacagcgcaggcttgaggcggagtatatcgccgaagggcacagaaggggcaaacagggtgtcggcgacctgctgggtgccatacaacgcgttatcaatcagcgattttttgtttaccgcgtaattaagagcttcacgtactgccagctcgttggtgggggctttggcgaacagcatgaccgcgcccgtggccatgaacgcgcccagcacggaagccacgggaaccaagaaaacccccgcgccgccggccacgagagccaggacagcccccagcgccccgccgctactgacgcctatcaggccagggctggccagcgggttgcggaagtaggcctgcatcaccacgccggatga

SEQ ID NO: 45246 - protein, 271 aa, Unknown
  Obtained from environmental sample
  misc_feature (1)..(271): Xaa is any amino acid
MDEIQQVYRLQGVSINDKHIGVIVRQMMRKVEICFVGDTRFIYGQMVDKYRFHEENARVIKEGGQPAIARPLFQGITKASLNIDSFLSAASFQETTRVLTNAAIAGSTDYLRGLKENIIIGHPIPAGTGMKRYRNVKLYDEDSQDLEKQMQEILEQRRLEAEYIAEGHRRGKQGVGDLLGAIQRVINQRFFVYRVIKSFTYCQLVGGGFGEQHDRARGHERAQHGSHGNQENPRAAGHESQDSPQRPAATDAYQARAGQRVAEVGLHHHAG

SEQ ID NO: 45247 - DNA, 627 bp, Unknown
  Obtained from environmental sample
  misc_feature (1)..(627): n is a, c, g, or t
gtgctggttggcgcgacgctgggctcatccggcgtggtgatgcaggcctacttccgcaacccgctggccagccctggcctgataggcgtcagtagcggcggggcgctgggggctgtcctggctctcgtggccggcggcgcgggggttttcttggttcccgtggcttccgtgctgggcgcgttcatggccacgggcgcggtcatgctgttcgccaaagcccccaccaacgagctggcagtacgtgaagctcttaattacgcggtaaacaaaaaatcgctgattgataacgcgttgtatggcacccagcaggtcgccgacaccctgtttgccccttctgtgcccttcggcgatatactccgcctcaagcctgcgctgttcaaggatctcctgcatctgcttttccaaatcctggctgtcttcatcgtacagcttgacgttacggtaacgcttcatgccggtgcccgcgggaataggatggccaatgattatgttttccttcaggccgcgcagatagtcggtgctgccggcaatggcggcgttggtcagtacgcgggtggtttcctggaagctcgccgcagaaaggaacgaatcgatgttcaacgacgccttggttataccctgaaataa

SEQ ID NO: 45248 - protein, 208 aa, Unknown
  Obtained from environmental sample
  misc_feature (1)..(208): Xaa is any amino acid
MLVGATLGSSGVVMQAYFRNPLASPGLIGVSSGGALGAVLALVAGGAGVFLVPVASVLGAFMATGAVMLFAKAPTNELAVREALNYAVNKKSLIDNALYGTQQVADTLFAPSVPFGDILRLKPALFKDLLHLLFQILAVFIVQLDVTVTLHAGARGNRMANDYVFLQAAQIVGAAGNGGVGQYAGGFLEARRRKERIDVQRRLGYTLK

SEQ ID NO: 45249 - DNA, 738 bp, Unknown
  Obtained from environmental sample
  misc_feature (1)..(738): n is a, c, g, or t
atgagaaccactaaaatagaatggaccgacaaaacatggaatcccgttaccggttgcacaaaggtatcgacgggttgcgctcattgttacgctgaaatcatggcgcatcggcttcatgctatgggtatggataaatacgcaaacggatttacccctaccatgcacgacgatattcttgacgaaccgttagaatggaaacaaccacataccgtctttgtttgctctatggcggatttgtttcacgatgccgtatcgttccgttttattgataaggttatggatacaatcaggcaggctggacaccaccgttatcaaatactcacaaaacgggctgatagaatggcgaaatactttgcaaaagctgatatccctagtaatgtgtggctcggagtaaccgttgaagcaccatctgtgttgtcgcgcatagattcgctccgagaattacaggcatctatccgtttcctatcctgtgagccactagtagaagacttaggtattattgaccttacaggtattgattgggttattgttggtggagaaagtggtgtgaaagctcgtcctatgaaacctgagtgggttcgttcgattttaaaacaggcaaataaacaaggggcggcattctttttcaagcaatgnggaacttggggttctgacggcgttaagcgaaataaaaaagctaacggaaaagcgcttgacggtaaaatcattcaaaagatgcccacattggcaatgaggtga

SEQ ID NO: 45250 - protein, 245 aa, Unknown
  Obtained from environmental sample
  DOMAIN (2)...(240): Phage protein Gp37/Gp68
  misc_feature (1)..(245): Xaa is any amino acid
MRTTKIEWTDKTWNPVTGCTKVSTGCAHCYAEIMAHRLHAMGMDKYANGFTPTMHDDILDEPLEWKQPHTVFVCSMADLFHDAVSFRFIDKVMDTIRQAGHHRYQILTKRADRMAKYFAKADIPSNVWLGVTVEAPSVLSRIDSLRELQASIRFLSCEPLVEDLGIIDLTGIDWVIVGGESGVKARPMKPEWVRSILKQANKQGAAFFFKQXGTWGSDGVKRNKKANGKALDGKIIQKMPTLAMR

SEQ ID NO: 45251 - DNA, 933 bp, Unknown
  Obtained from environmental sample
  misc_feature (1)..(933): n is a, c, g, or t
atggcgaggcagaccgggaactggcggcattgttcattcaagcaggacccggctcatcctgagcgatttataaaagccggtcatctttacgcaatgggattgatcgacgaaatcctgcactatgtgattgccttataccgtgaggaagtacagcccgatgcctttgagactgcattgaacaggcttgagaataatctgggcgatagtaaaacaagcggacttttaactgcgtttaccggacaatttccgcccaggaaagtgtacaccggagaaaaaatattaaatgaatatttaaacggcaaagaagaaggagaaagctgccgtgctctggaaatagaagagacaatgatgctttcgcttgcgaatcttaatcctgctttcagtccgtttaaatttatgtttgatgataaagatttgtccaaaaatactgtttatcccgatgcgattgaagaattaaaagcgcattttaaagaacttcctccttttggccctgacggcatgaatctgtgggatcttcttcgctctcccgctctggcttcgcctgattcacttcttggtcagcttgagtatatgcggaaacattggggaatgctcctctcaaaatttatggcacggcttctaatgagtcttgatgttataagcgaagaaaataaaccgggtttcttaggtcctggtcctacagaagttttaacttttgcggggcttgatgaatacgaaaaattcagtcccgatcaggaatggatgccaagaacagtattaattgcaaaaagtacacttgtctggctttttcagatttcacaaaaatacgaaagacaaatcacacgccttgatcagatacctgatgaagaaattgacgaacttgcacgccgggggctttacgggggctttggcttatcggcctttgggaacgcagcaaggcaagcaagaccataa

SEQ ID NO: 45252 - protein, 310 aa, Unknown
  Obtained from environmental sample
  misc_feature (1)..(310): Xaa is any amino acid
MARQTGNWRHCSFKQDPAHPERFIKAGHLYAMGLIDEILHYVIALYREEVQPDAFETALNRLENNLGDSKTSGLLTAFTGQFPPRKVYTGEKILNEYLNGKEEGESCRALEIEETMMLSLANLNPAFSPFKFMFDDKDLSKNTVYPDAIEELKAHFKELPPFGPDGMNLWDLLRSPALASPDSLLGQLEYMRKHWGMLLSKFMARLLMSLDVISEENKPGFLGPGPTEVLTFAGLDEYEKFSPDQEWMPRTVLIAKSTLVWLFQISQKYERQITRLDQIPDEEIDELARRGLYGGFGLSAFGNAARQARP

SEQ ID NO: 45253 - DNA, 1761 bp, Unknown
  Obtained from environmental sample
  misc_feature (1)..(1761): n is a, c, g, or t
ttgatcgcgagcgttttccacattatcggcgtatgccagcagttctccattgtgcgttttgacgccgcaatgacgctcgctaaaagacacattcagcggctctggtatcctgttcccggaagcggcggggcaatcgcaagccgcgcggaacattcaatcagtaccgaagaatttaacaggcgcattccaaatgaattctggcgcgaggttgttgaccgctgcgcggctgaagcgccgcacacattgctgcttgccgaagcgttctggatgatggaaggttattttgtccgcactttgggaatgcaccgcgtttacaattcagcttttatgaatatgctgaaaaacgaggaaaactcgaagtatcgttctaccataaaaaacacaatggagtttgatccagaaattcttaaacgctttgtcaactttatgaataatcccgacgaggaaaccgctgtcgcgcagttcggcaaaggcgataaatattttggtatctgtacattgctcgtaacaatgccgggactgccgatgttcggccacggtcaaattgaaggctttgaggaaaaatacggaatggagtaccgccgttcctaccgcgacgaacagcccgacggctatatggtagatcgtcatgaacgcgatattttccccttgatgaaaaggcgctatctcttttcaggcagcgaaaatttcaggatttacgatttgtattgcggcgacagtgtaaacgagaatgtttttgcctattcaaaccgcgtgaaaacaggcggcggagaagaaaaaacgctgatcttctacaataattcctattacgaaaccgccggctggataaaaatgagcgatcctgccattccgtatgaaggcggtacacgcagagacagtctgagcgaagctcttgctatacacggtgagaatcattattttacgctgttacgcgaacaaaaatcgaatttgtggtttatccgttcttccaaggcaatatgtgaaaacggattttttgctgggcttaaaggctatgagacacaggtatatctggatatttatgaagtagaagataataacggccgctgggcaaggcttaacaacgatttacagggcaagggagttcctgatttattggccgcaattaaggatattttccttggtgaactttattacaggtttacggaaattttcgctcctgagttgattaataacctttgtgaatcgtctttcaaaaaatcagttgttgaaacgctgaataaacttgtaaaagaatttatagaggccgcagctcattttataaccggagcgaacggcgtttatgacgcatggattccggatacagttgtaacggaagacggaaaagatgttagctgcaaatttacagcggttggcaataatgttattttgaaggaattcggctctttagttgacaggctggcaaaaataacggacgagattaaaaaacccgcattcccgctttctgcctttacgaactgtaaggaaaagaaacaattgctttgttctgttattttgggttatggagtaatttcacttctacgttctgtaatcggaaaagaagcaaacggcgatcatgcggcatctctcgcttttacacactgggacctaggccgtaaacttagggatattttctatcgctttggcgcttctgaaaatgaagtctggaaaattactgatattgcaagggttgttttaaagaagaccgggtttgagcctttcggaaaaagggaacaaaatttcggccgatctgatcaatggtaa

SEQ ID NO: 45254 - protein, 586 aa, Unknown
  Obtained from environmental sample
  misc_feature (1)..(586): Xaa is any amino acid
MIASVFHIIGVCQQFSIVRFDAAMTLAKRHIQRLWYPVPGSGGAIASRAEHSISTEEFNRRIPNEFWREVVDRCAAEAPHTLLLAEAFWMMEGYFVRTLGMHRVYNSAFMNMLKNEENSKYRSTIKNTMEFDPEILKRFVNFMNNPDEETAVAQFGKGDKYFGICTLLVTMPGLPMFGHGQIEGFEEKYGMEYRRSYRDEQPDGYMVDRHERDIFPLMKRRYLFSGSENFRIYDLYCGDSVNENVFAYSNRVKTGGGEEKTLIFYNNSYYETAGWIKMSDPAIPYEGGTRRDSLSEALAIHGENHYFTLLREQKSNLWFIRSSKAICENGFFAGLKGYETQVYLDIYEVEDNNGRWARLNNDLQGKGVPDLLAAIKDIFLGELYYRFTEIFAPELINNLCESSFKKSVVETLNKLVKEFIEAAAHFITGANGVYDAWIPDTVVTEDGKDVSCKFTAVGNNVILKEFGSLVDRLAKITDEIKKPAFPLSAFTNCKEKKQLLCSVILGYGVISLLRSVIGKEANGDHAASLAFTHWDLGRKLRDIFYRFGASENEVWKITDIARVVLKKTGFEPFGKREQNFGRSDQW

SEQ ID NO: 45255 - DNA, 726 bp, Unknown
  Obtained from environmental sample
  misc_feature (1)..(726): n is a, c, g, or t
atgcggttttataccggctggtcccaggatttttttgccggttaccccggtgatttgaagcgcccggacacggtgctgattgacctgggggtaagcctcttccactatgaaaaaagcgggaggggttttagcttctcggccgcggagaaacttgatatgagactggatccaacgaaaggattttcggcagcggagcttttagcgcaaagacctgagaaggaaattgccgatattatttataacaacgccggcgagcggtattcgcggcgtattgcgaaagcgatagtgcaggagcggcagaagggggcgatttccactgccgcggccctttcggaactggtaaagcgggcggtgccgcctgcgtacaggcacgggcccatacacccggcgaccaaaaccatgatggcgctgcgtattgagaccaaccgggagctggaaaggcttcccgaactccttgagggcgcgctcaatgttttaaaaccgggcggaaggttgggagttatcagcttccattccttagaggatagggtagtcaagaacttcttcagaatgaagaacagggattgtatctgccccccgcagcaggcagtctgcaaatgcgccggtgtgcggtcggtaaacattctgaccccgaaaggcgtgactgctgatgaagatgaaattaaacggaacccgccttcgcggagcgccaggctgagggttgcggagaaaaaaggagaagactag

SEQ ID NO: 45256 - protein, 241 aa, Unknown
  Obtained from environmental sample
  DOMAIN (1)...(238): MraW methylase family
  misc_feature (1)..(241): Xaa is any amino acid
MRFYTGWSQDFFAGYPGDLKRPDTVLIDLGVSLFHYEKSGRGFSFSAAEKLDMRLDPTKGFSAAELLAQRPEKEIADIIYNNAGERYSRRIAKAIVQERQKGAISTAAALSELVKRAVPPAYRHGPIHPATKTMMALRIETNRELERLPELLEGALNVLKPGGRLGVISFHSLEDRVVKNFFRMKNRDCICPPQQAVCKCAGVRSVNILTPKGVTADEDEIKRNPPSRSARLRVAEKKGED

SEQ ID NO: 45257 - DNA, 387 bp, Unknown
  Obtained from environmental sample
  misc_feature (1)..(387): n is a, c, g, or t
atgtttaccgaccgcacaccggcgcatttgcagactgcctgctgcggggggcagatacaatccctgttcttcattctgaagaagttcttgactaccctatcctctaaggaatggaagctgataactcccaaccttccgcccggttttaaaacattgagcgcgccctcaaggagttcgggaagcctttccagctcccggttggtctcaatacgcagcgccatcatggttttggtcgccgggtgtatgggcccgtgcctgtacgcaggcggcaccgcccgctttaccagttccgaaagggccgcggcagtggaaatcgcccccttctgccgctcctgcactatcgctttcgcaatacgccgcgaataccgctcgccggcgttgttataa

SEQ ID NO: 45258 - protein, 128 aa, Unknown
  Obtained from environmental sample
  misc_feature (1)..(128): Xaa is any amino acid
MFTDRTPAHLQTACCGGQIQSLFFILKKFLTTLSSKEWKLITPNLPPGFKTLSAPSRSSGSLSSSRLVSIRSAIMVLVAGCMGPCLYAGGTARFTSSERAAAVEIAPFCRSCTIAFAIRREYRSPALL

SEQ ID NO: 45259 - DNA, 555 bp, Unknown
  Obtained from environmental sample
  misc_feature (1)..(555): n is a, c, g, or t
atgttcaaggaatttctttttcccctgtacaggcacttcactccttttaacgtattttcatacctcaccttcaggggcgcttatgcggcgctgacaacgcttctgatatgtttcctttttggcgggaagatcatagaagccctgacaaggctgaaaatcgggcagtccatacggagcgacggcccggcaacccatcttgtaaaatccggaacgccgactatgggggggatttttattatcggctcggtgattatttccatggcgctctggggggattcggataataggatggtgtggcttgccatggccgcctttaccgcctttgggataataggatttattgacgactacctgaaagtcagccgccgtaattcagacggcctgcccgcctgggggaagcttgccgggcagtttgccgtggcgctgggagtcgtgctgtacctgtatttttccgcgggcagcgacggcgcgacatcgcgcagcgaggtaacctcgctgtatattccgttcttcaagaatccaggttgtcgacctcggatctcgtgccgactttga

SEQ ID NO: 45260 - protein, 184 aa, Unknown
  Obtained from environmental sample
  misc_feature (1)..(184): Xaa is any amino acid
MFKEFLFPLYRHFTPFNVFSYLTFRGAYAALTTLLICFLFGGKIIEALTRLKIGQSIRSDGPATHLVKSGTPTMGGIFIIGSVIISMALWGDSDNRMVWLAMAAFTAFGIIGFIDDYLKVSRRNSDGLPAWGKLAGQFAVALGVVLYLYFSAGSDGATSRSEVTSLYIPFFKNPGCRPRISCRL

SEQ ID NO: 45261 - DNA, 1374 bp, Unknown
  Obtained from environmental sample
  misc_feature (1)..(1374): n is a, c, g, or t
ttgatggccgaggtccgatctcttggggcgcggcttctttcctttgggaaatcccaagcggatgccggcttttcttccgtaaccgccgattcccggacagcgaaggaaggctcgctttttgcggcgctccccggttcaaactgcgacggccattcattcgtggaagcggccttcaaaaacggggcctgcgccgctcttgtggaaagcgataaaatcgaaacattcaaattggccggcattgcggaatccctgggaagaacgctcgttgctgttgataatccgcttgaggggctgcagaaagccgccggggcgtatctggaaaaattccccggccttttgaaaatcgccattaccggctcgtcgggaaaaaccaccgccaaggaaatagccgcaaaaattatcggcatcgagaagcgcgtgacaatgaaccccgggaattacaattccgaaatcggcctgcccctgtcagtttttaatttaaggcccggcgacgaggtcggcgtatttgagatgggcatgaaccatgaaggggaaatctccgccctggcccgggtgcttaatcctgatatcgcgctgattacaaatataggttccgcccatatcggaattctcggcagcagggacgctatagctaaagagaaaaaaaatattttttcggaattcagggggaagggcgtcgcgctgattccggaggattccccttaccgcgattttcttgccgaaggggtgcggggcagggtctctttttacggggaaaaatcctttgcccagcttggcggcgtanaggacttaggcctggacgggagcgaaattatatgggacgggaaacaggcgcgctttagtctgccgggcaggtacaaccttgccaacgcgtttgccgccattgccgtcgcgcgggaaatacccggtagcgcggacgcaatcaggcagggcattgaatcggtcaggctttgttcgggcgcggcgaaatcatcccgcggcaaagtgaccgttattcaggactgctataactccattccggaatcgcttgttgtcgcgctggaattctgcgaaagcctggactggccgggccgccgtgtgtacataatcggagaaatgctggagttaggcgaagattccgaaaaggctcacgaaggcatgggacgccttttggcggagagcaaagctgacatggtgttcctctacgggaaagaaaccgccgctgccgtcagagcgcttgataaagatcgcttttttcatacatgcagtatggatgagtttaaggccgccgttaacggttatgtgcgggacggggatcttgtactcctgaaaggctcccgcggctgcgccctggaaagggttttcggcggcctcgatcatggggggcacgtctga

SEQ ID NO: 45262 - protein, 457 aa, Unknown
  Obtained from environmental sample
  DOMAIN (308)...(403): Mur ligase family, glutamate ligase domain
  misc_feature (1)..(457): Xaa is any amino acid
MMAEVRSLGARLLSFGKSQADAGFSSVTADSRTAKEGSLFAALPGSNCDGHSFVEAAFKNGACAALVESDKIETFKLAGIAESLGRTLVAVDNPLEGLQKAAGAYLEKFPGLLKIAITGSSGKTTAKEIAAKIIGIEKRVTMNPGNYNSEIGLPLSVFNLRPGDEVGVFEMGMNHEGEISALARVLNPDIALITNIGSAHIGILGSRDAIAKEKKNIFSEFRGKGVALIPEDSPYRDFLAEGVRGRVSFYGEKSFAQLGGVXDLGLDGSEIIWDGKQARFSLPGRYNLANAFAAIAVAREIPGSADAIRQGIESVRLCSGAAKSSRGKVTVIQDCYNSIPESLVVALEFCESLDWPGRRVYIIGEMLELGEDSEKAHEGMGRLLAESKADMVFLYGKETAAAVRALDKDRFFHTCSMDEFKAAVNGYVRDGDLVLLKGSRGCALERVFGGLDHGGHV

SEQ ID NO: 45263 - DNA, 597 bp, Unknown
  Obtained from environmental sample
  misc_feature (1)..(597): n is a, c, g, or t
ttgccagaaatatatccacggaagcgtcgctttcttccttgcaaagataccgcggggaatcaggcgcagataaacaatgaaacggtcgccgaataccttgaagcgcttgaaagactcatggtggttgaacccctaccggcgtggagggcgcatatccgttcaagcgacacattgcgaaaagcgccaaaacggcactttaccgatccttccctagccacggggattcttggcatttcgcccaaaaaattggcttctgatttaaactacttcggtcttttatttgaatcccttgttatccgtgatttgagaatctacgccggtctgcatgatggaaaagtttaccattaccgcgattcaagagacatggaagcagacgcgataatagaatacccagacggaaaatgggcggcgtttgaagtgaaaatgggattcggcgcccaggacgaagcggcgaagaacctgcttgctttcgcgaaaaaaattgatcaggaaaaaatgggaccgcccgccgcattaaccgtaattacagctaacggcatcgccgcccgcagaaaagacggcgttaacgtagtgccgctttcagtcttaacggcttaa

SEQ ID NO: 45264 - protein, 198 aa, Unknown
  Obtained from environmental sample
  misc_feature (1)..(198): Xaa is any amino acid
MPEIYPRKRRFLPCKDTAGNQAQINNETVAEYLEALERLMVVEPLPAWRAHIRSSDTLRKAPKRHFTDPSLATGILGISPKKLASDLNYFGLLFESLVIRDLRIYAGLHDGKVYHYRDSRDMEADAIIEYPDGKWAAFEVKMGFGAQDEAAKNLLAFAKKIDQEKMGPPAALTVITANGIAARRKDGVNVVPLSVLTA

SEQ ID NO: 45265 - DNA, 558 bp, Unknown
  Obtained from environmental sample
  misc_feature (1)..(558): n is a, c, g, or t
atgtctacgattgcccccgacattctcaccatcagttttgacgggttgagcaagtcatggcgtgccaccggtttccgcgccggctggatggttctttccggcgataaaaaaaaggcggcggattatattgaagggcttgatatgcttgccaatatgcgcctgtgtcccaatatgcccgcccaatacggcattcagaccgccctgggcggctatcagagcatcaaagacctgatcattcccggagggcgtttgcacgaacagcgggatgccgtaatcaatcttgttaatgaaatccccggcctttccgtggtaaaaccgaaaggcgctttgtactgttttcccaaagcggacattaaacgcttcaacataaccaacgatgaaaagtttatgctcgacctgctccgcgagcagcatttactgttggttcacggcacgggctttaactggaaagaacccgatcatttccgtattgtgttccttcccgacaaagacacccttacggacgcaatgcgcaggctaaagatatttctggaaaactacaaacaaaataataaataa

SEQ ID NO: 45266 - protein, 185 aa, Unknown
  Obtained from environmental sample
  misc_feature (1)..(185): Xaa is any amino acid
MSTIAPDILTISFDGLSKSWRATGFRAGWMVLSGDKKKAADYIEGLDMLANMRLCPNMPAQYGIQTALGGYQSIKDLIIPGGRLHEQRDAVINLVNEIPGLSVVKPKGALYCFPKADIKRFNITNDEKFMLDLLREQHLLLVHGTGFNWKEPDHFRIVFLPDKDTLTDAMRRLKIFLENYKQNNK

SEQ ID NO: 45267 - DNA, 339 bp, Unknown
  Obtained from environmental sample
  misc_feature (1)..(339): n is a, c, g, or t
gtgctggcgcataacaaaaatttttcaggcggcttttacagccttatcgcgggttttaatgaagcgggagaaagccttgaggaaaccgtcgcaagagaaataaaagaagaaataaatattgtcgttactgacatccgttacattttatcccagccctggccatttcccggttccctgatgctcggcttttccgccagctatgacggcggagaaataaaacccgacggaattgaaattgacgacgcaagatggttttcaagagaagctctgcctaaccttcccggaagcgcctctgtttcaaggttcctgattgatctatggattatcggcaagctgtag

SEQ ID NO: 45268 - protein, 112 aa, Unknown
  Obtained from environmental sample
  DOMAIN (1)...(109): NUDIX domain
  misc_feature (1)..(112): Xaa is any amino acid
MLAHNKNFSGGFYSLIAGFNEAGESLEETVAREIKEEINIVVTDIRYILSQPWPFPGSLMLGFSASYDGGEIKPDGIEIDDARWFSREALPNLPGSASVSRFLIDLWIIGKL

SEQ ID NO: 45269 - DNA, 348 bp, Unknown
  Obtained from environmental sample
  misc_feature (1)..(348): n is a, c, g, or t
ttgatattattgcaaagcattggttatgaacaatcattggaaacaatagacgaatggttaaatagcaaaaataaaaatcacagaagagctgtcactgaagggttaagaatatggacaaatagaccatttttcaaggataacccagaagaagcaattagaatattatcagagcataaaaccgatgaaagcgaatatgtaagaaaatctgttggaaatgcattaagggatataagcaaaaaatatcccgaattaataaaaaacgaattaaatagatggaaattggatacaaaagaaataaataaagtatataaattggcaagcaaatttattcaagaagaaaattgttag

SEQ ID NO: 45270 - protein, 115 aa, Unknown
  Obtained from environmental sample
  misc_feature (1)..(115): Xaa is any amino acid
MILLQSIGYEQSLETIDEWLNSKNKNHRRAVTEGLRIWTNRPFFKDNPEEAIRILSEHKTDESEYVRKSVGNALRDISKKYPELIKNELNRWKLDTKEINKVYKLASKFIQEENC

SEQ ID NO: 45271 - DNA, 480 bp, Unknown
  Obtained from environmental sample
  misc_feature (1)..(480): n is a, c, g, or t
atgatggaaaagatagcaagctttcaggtagatcatctgaggctaaagcccgggctttacgtttccagaaaggatcgctttggttcggcaacaattaccacttntgatatgcgcttaaaacagcccaatacggagccggtgatagatcaacctgcgctccatacttttgagcatcttggcgctacgttccttcgttcgcataaggaatgggcagagagggtagtgtactttggcccaatgggctgtcgtactggattttatgctatttttgaaggcgatctctcctcagaggctatacttcctctaataagagaaatgctcgaatggataaccgctttcgagggcgcaattcccggcgcatccgccaaagaatgcggcaattggcaggagcaaaaccttgagatggctaaattggaagcccgccgctatgccgcccttttggaaaaggccggaagtgaaaactttaactatccggcataa

SEQ ID NO: 45272 - protein, 159 aa, Unknown
  Obtained from environmental sample
  DOMAIN (3)...(158): S-Ribosylhomocysteinase (LuxS)
  misc_feature (1)..(159): Xaa is any amino acid
MMEKIASFQVDHLRLKPGLYVSRKDRFGSATITTXDMRLKQPNTEPVIDQPALHTFEHLGATFLRSHKEWAERVVYFGPMGCRTGFYAIFEGDLSSEAILPLIREMLEWITAFEGAIPGASAKECGNWQEQNLEMAKLEARRYAALLEKAGSENFNYPA

SEQ ID NO: 45273 - DNA, 828 bp, Unknown
  Obtained from environmental sample
  misc_feature (1)..(828): n is a, c, g, or t
atgtcattaataatgatttatgagcatatactcaacgcaaacaggcgattcggtaccgagcctgttgatatagttcattccggattccattgcgaacctgaaacgatccaaagcaatgttataattgcccctttatggagacctgaattgtttagcgattattttgacagcatgattcaggatttagacggcatatttaaaatatggactttatcaaaagccaatttaaaaattacatatattgttacaggcatgggggcttcaaatgtaattgacatagttttggcgctcggctgtacgccatgcgagaaaataattttcgtaggttctgtaggtgcgctcgatacacatataggaattggcgatatagttattcctgaatactcaatatgcggcgatggagcgtgcaggtatttgacaaacaaaacaataactgaaaatgatacgtttggggaaaagaactacccgagtaaagagcttttcgacaagatagtctcaaaaacgaaagaaatagctgggaaaaatagcgtaaattgccacatagggaaaaattttagcgtagacactataattgcccaatttgcccatcttgatgaaataattaacatgggctgcacttgtattgaaatggagacatccgtgttgtttaaagccgcagaaatatgcaaaatcaacgccggtgcggtatttagtgtttcggataatacgctcttaagaaaatcgctgttatcgggaatgacaaaagaagaaaaagatcatgaaagaaacgtgcgtagaaatgtattaataaaaatagtaatggaaagtttttgtgacacaggagtgtaa

SEQ ID NO: 45274 - protein, 275 aa, Unknown
  Obtained from environmental sample
  DOMAIN (39)...(266): Phosphorylase family
  misc_feature (1)..(275): Xaa is any amino acid
MSLIMIYEHILNANRRFGTEPVDIVHSGFHCEPETIQSNVIIAPLWRPELFSDYFDSMIQDLDGIFKIWTLSKANLKITYIVTGMGASNVIDIVLALGCTPCEKIIFVGSVGALDTHIGIGDIVIPEYSICGDGACRYLTNKTITENDTFGEKNYPSKELFDKIVSKTKEIAGKNSVNCHIGKNFSVDTIIAQFAHLDEIINMGCTCIEMETSVLFKAAEICKINAGAVFSVSDNTLLRKSLLSGMTKEEKDHERNVRRNVLIKIVMESFCDTGV

SEQ ID NO: 45275 - DNA, 906 bp, Unknown
  Obtained from environmental sample
  misc_feature (1)..(906): n is a, c, g, or t
ttgcttattgttaatgatttagaaaaatactctgcgctgattaatgaatgttatttatccaatgaaagcgaattagacttaaatttattgcatgaacattacaaagaaattattgaagaaacaaataagccgttagtaaaagggattatttccgaattgtacgctccaagtgatgataaaaatataatgccaaatgaacgtgttttttataccgcgcgaaacgcaatgtatatcgatactgcaaggcaattaatcgggaaactgccgcaggaaacacaaaaatattttttagcgcccttgttgtcggaagcgtcaatacacgcaaatacttcgggggtttttaaggggttctataaaaacaaagaaaccgggattggtcaattcggcggaaagaaccaggacgcattgttcagaataaaaggagatattgaattgccgtttccgatattcagtaattttaattgcgatacgctcgtctataaccaggattcaaatgaattgataaaatcattgcccgaagttgatattgcctatttagacccgccttataatcaacacccttacgggtcaaattattttatgttgaatttgatactggactattcctatcctgaaaatacaagcaagatttcgggcatacctgaaggttggaaacgctccgattacaacaaaggaaactgcgccttaaaatcattaacagctcttgttgaaaatataaaggcaaaatttgtgataatatcatttaattccgaagggtttataagcgccgaagatatgaaaaatatgttacagaaaataggctcgcttgaagtattggaaacaaagtataatactttcagaggaagcagaaatttgaataaccgtgaaattcatgtaaaagagtatttatatttattggagaaataa

SEQ ID NO: 45276 - protein, 301 aa, Unknown
  Obtained from environmental sample
  DOMAIN (2)...(262): D12 class N6 adenine-specific DNA methyltransferase
  misc_feature (1)..(301): Xaa is any amino acid
MLIVNDLEKYSALINECYLSNESELDLNLLHEHYKEIIEETNKPLVKGIISELYAPSDDKNIMPNERVFYTARNAMYIDTARQLIGKLPQETQKYFLAPLLSEASIHANTSGVFKGFYKNKETGIGQFGGKNQDALFRIKGDIELPFPIFSNFNCDTLVYNQDSNELIKSLPEVDIAYLDPPYNQHPYGSNYFMLNLILDYSYPENTSKISGIPEGWKRSDYNKGNCALKSLTALVENIKAKFVIISFNSEGFISAEDMKNMLQKIGSLEVLETKYNTFRGSRNLNNREIHVKEYLYLLEK

SEQ ID NO: 45277 - DNA, 1005 bp, Unknown
  Obtained from environmental sample
  misc_feature (1)..(1005): n is a, c, g, or t
gtgtccccgaaactgcggaatcaaccgccttgcgggcgaagtcggcttttgcggagaaaccgccgaattgcgaatcggggcggcagtaattcacaatggcgaagaatctccgcttgtcggaacaggtgggtcagggacatttttatcagcggttgcaatttagggtgcgctttttgccaaaattaccagatttcgcaaggtgaagatgagaacgcctctagtcctaccttgggtaacctgagtagccaatgcagccttggcagcttaagctgccggggcagaatcgtatctgcgtatgagtttgcgcaaatatgcacggcgttatgtgaaaagggagcggaaaatatcaatattgtaacggggagccacgttgtaccgggacttattgaaggatttatcgcgatgcgaaaggcgggcgtacaacttccaatactgtggaattcatccggttatgacggaatggaatcgttggaattgttaaaggactatgttgacatttaccttcccgatttaaaaacattggatggcgaagtatcggaaaaattttttaacgcgccggattatcctgatgtggtgacggccgctgttttaaaaatgattgaatttgcgggcggaagatttcctaataacgcgcgtgaaaaaattattatccgtcaccttgttttaccgggttatcttgaatccacgcgctccgtcctgcgctggtttgcggataaagtaaaagacagggcaatgctttccttaatgacgcaatatacgcctatcccaaacagaagacggcaaatgccgcaacgttatttatcggcggaagaatataaaacggttatcaagtggcttgatgaatttaaaatagaagacggtttttgtcaggagcttgttaccggcagcgattggctgccggatttcaagcgtcataacccgttttcatcggaactttccgtacctgtgtttaccagccaaactttaacccaatgtaaagccaaaaccgttgcctgtccaacttga

SEQ ID NO: 45278 - protein, 334 aa, Unknown
  Obtained from environmental sample
  DOMAIN (46)...(236): Radical SAM superfamily
  misc_feature (1)..(334): Xaa is any amino acid
MSPKLRNQPPCGRSRLLRRNRRIANRGGSNSQWRRISACRNRWVRDIFISGCNLGCAFCQNYQISQGEDENASSPTLGNLSSQCSLGSLSCRGRIVSAYEFAQICTALCEKGAENINIVTGSHVVPGLIEGFIAMRKAGVQLPILWNSSGYDGMESLELLKDYVDIYLPDLKTLDGEVSEKFFNAPDYPDVVTAAVLKMIEFAGGRFPNNAREKIIIRHLVLPGYLESTRSVLRWFADKVKDRAMLSLMTQYTPIPNRRRQMPQRYLSAEEYKTVIKWLDEFKIEDGFCQELVTGSDWLPDFKRHNPFSSELSVPVFTSQTLTQCKAKTVACPT

SEQ ID NO: 45279 - DNA, 798 bp, Unknown
  Obtained from environmental sample
  misc_feature (1)..(798): n is a, c, g, or t
ttgcaaattatggtgatgaaagagcggcgtatgctggaacaggcctttgccccgctgggggtagatgtccgttggcatatgataaacaacggccccgctcaggccatggccatggctgccggttctttggatattgcccctgtgataaattccgcatcggtgatccttgcgaatgcggcaggcaacccggtagagattgccgctttggtaagccggccccggcaaacttttgcccttatggtcggccctaagggacctcgcaatatacgcgaactgcgggggaaaaccgtggcaggcgccaagggatcggtactccaccagatgttgatagccgctctggtaaaagaaggaatgaaggcctctgatattaagtttattcaaatggatataaatgaagcccggagtgcgcttttggcgaaccgcgtggatgccgcattgcagacatcaagccttatcatccgtaatgaagaagcgggaatgcgtaccctctttaccgcagacggttatattaccccgctgctttttaccgcagtgcgcccggcatttgcaaagaactacccggaactgctgcagatttatttggatcagcagaataaagcctatgattggatcatcgccaatacaacagaagctgtcgaaatcggttcccgtattcatcagatttcgatagaagaagggatgaaactctaccgctggagcggtctgactaaagcgatggaagcggaggatgtaagttccctggaagcggatgtggattttttataccagcaagatatgatcgaacagactcggccataa

SEQ ID NO: 45280 - protein, 265 aa, Unknown
  Obtained from environmental sample
  misc_feature (1)..(265): Xaa is any amino acid
MQIMVMKERRMLEQAFAPLGVDVRWHMINNGPAQAMAMAAGSLDIAPVINSASVILANAAGNPVEIAALVSRPRQTFALMVGPKGPRNIRELRGKTVAGAKGSVLHQMLIAALVKEGMKASDIKFIQMDINEARSALLANRVDAALQTSSLIIRNEEAGMRTLFTADGYITPLLFTAVRPAFAKNYPELLQIYLDQQNKAYDWIIANTTEAVEIGSRIHQISIEEGMKLYRWSGLTKAMEAEDVSSLEADVDFLYQQDMIEQTRP

SEQ ID NO: 45281 - DNA, 876 bp, Unknown
  Obtained from environmental sample
  misc_feature (1)..(876): n is a, c, g, or t
ttgggattctcgtcaatggccgaatcgccggtacttaaaatcaatgggaagaaaaattcggatgtttacttgcaatcgcttgatattcaggtagaagtaaccggaagcctagcttccacgcgttacacgatggttttcaaaaacaaatccgaccgtgttttggaaggcgaactgacctttccgttgcccgacgagtgcagcgtaacattctacgcgttggatattaacggcaaaatgcgggaggctgtgccggtggacaaagccaaagctacggagatttttgaggagatagaacagcggcgggtggatcccggattgctagaaaaagtggaaggcaataattttcgcacacgcgtctaccctattccggccaaaggaatacgcactgtttcaatcggttacgaggaagtattgacgctcgaaaacaagtcgctgcattaccgtctgcctatgacgtatcccgatccgctcgaaaacttttccgtaaaggcgaccgtttggaagagcaaccttaaacctatcgtcccagaatccgtcgagcaacttcgttttgataggacggacggaaattatgtcgccgtgtttgcccgcaaaaattaccgtccggcccgtatgctgaacttcagcgtgccggtgccggtcgatgtcccgcaggttatgatgcaaccggtacaaggaagccgctatttcttcgcgtctgtcgcgccgaatttgaaaacacgcaaaaaacattgggataaggatttggctataatttgggacgtatcgcttagcggttcgcaacgcgatctaaaacgtgaaatggaagcgcttgatattatctttgccgataagaaaacgcgaatgtctatctttacttttttgacaatacattaa

SEQ ID NO: 45282 - protein, 291 aa, Unknown
  Obtained from environmental sample
  DOMAIN (20)...(136): Vault protein inter-alpha-trypsin
  misc_feature (1)..(291): Xaa is any amino acid
MGFSSMAESPVLKINGKKNSDVYLQSLDIQVEVTGSLASTRYTMVFKNKSDRVLEGELTFPLPDECSVTFYALDINGKMREAVPVDKAKATEIFEEIEQRRVDPGLLEKVEGNNFRTRVYPIPAKGIRTVSIGYEEVLTLENKSLHYRLPMTYPDPLENFSVKATVWKSNLKPIVPESVEQLRFDRTDGNYVAVFARKNYRPARMLNFSVPVPVDVPQVMMQPVQGSRYFFASVAPNLKTRKKHWDKDLAIIWDVSLSGSQRDLKREMEALDIIFADKKTRMSIFTFLTIH

SEQ ID NO: 45283 - DNA, 837 bp, Unknown
  Obtained from environmental sample
  misc_feature (1)..(837): n is a, c, g, or t
atgaccgcttcctgcgtcgctcacggctctcttcatccaatatcaaaatcaattgtttcgttatgtgaaaagaaagacatagatagggattatgaaatcaaagaacatatcggaaaaggaattgaaggcagaaaaggagacgatactatttatcttggcagttacaactggatacgttctctcggctacgatgtaagcgcccaatacgaggatgcgggaacttgcgattgggttataaaaaacggacagattttaggctgtattgtattcaaggacactcccagagacgacgcggcacaaacggtaagcgagttaaaacaacttggcgtttcaaaaacctgtctgctgacaggagatcatttccaatctgcaaaaaaaatacaagacgccgttggaattgatgaaatgcaatgcgaattgctgccggaacagaaactaagccacgttgaaaaaatgatggaaacccataccgttacggttatcggcgacggcatcaacgacgcgcttgctctctcggaagctcatgtaggtatagcgatgggagcaatgggttccgatacggctattcaaagcgcggacatcgcgctaatgaacaacaatctttccaatattccttttgtaatcaaactagcccaaaaaacaaaaaacattatttatcaaaacattattttagcgttttccgtaagtatcgttatgatatttttagccggagcgggaataataacgccaatagtgggcgcgtttttccataacatcggagcgtttttagtgttgcttaacagcggacgggtattgtcgcagaattattccgaaaaattttcacacaaagatcactaa

SEQ ID NO: 45284 - protein, 278 aa, Unknown
  Obtained from environmental sample
  DOMAIN (1)...(184): haloacid dehalogenase-like hydrolase
  misc_feature (1)..(278): Xaa is any amino acid
MTASCVAHGSLHPISKSIVSLCEKKDIDRDYEIKEHIGKGIEGRKGDDTIYLGSYNWIRSLGYDVSAQYEDAGTCDWVIKNGQILGCIVFKDTPRDDAAQTVSELKQLGVSKTCLLTGDHFQSAKKIQDAVGIDEMQCELLPEQKLSHVEKMMETHTVTVIGDGINDALALSEAHVGIAMGAMGSDTAIQSADIALMNNNLSNIPFVIKLAQKTKNIIYQNIILAFSVSIVMIFLAGAGIITPIVGAFFHNIGAFLVLLNSGRVLSQNYSEKFSHKDH

SEQ ID NO: 45285 - DNA, 552 bp, Unknown
  Obtained from environmental sample
  misc_feature (1)..(552): n is a, c, g, or t
ttgcccggcgtagaggttacaatccgcgaccccgacacgggcgaggaatgtcccgacggcgtacacggagagttttgctgccgaggttataacacaatgaagggttactacaaattgccggaagctaccgcccaatgtatcgacaaaaacggatggcttcattcgggcgacaggggagtgaaagataaggacggcaattttagggttacggggcgcttaaaagacatgataatccgcggaggagaaaatatttctcccaaagaagtagaggactttttgtacaccatgccgggcgttaaagacgtgcaggtagttggaattaccagcgagaaatacggcgaggaagtaggcgcttttgtcattctccaccccgacataaaaatgaacgttgaggatgtgcgcgactattgccgcgataaaatcggcagatacaaaatccccaaatatgtgttctttgttgacaattacccgcttacatcaagcggcaagatacaaaagtatctgttacgcgaaatgggggataaattggttaaagagcaacttgctcgctaa

SEQ ID NO: 45286 - protein, 183 aa, Unknown
  Obtained from environmental sample
  misc_feature (1)..(183): Xaa is any amino acid
MPGVEVTIRDPDTGEECPDGVHGEFCCRGYNTMKGYYKLPEATAQCIDKNGWLHSGDRGVKDKDGNFRVTGRLKDMIIRGGENISPKEVEDFLYTMPGVKDVQVVGITSEKYGEEVGAFVILHPDIKMNVEDVRDYCRDKIGRYKIPKYVFFVDNYPLTSSGKIQKYLLREMGDKLVKEQLAR

SEQ ID NO: 45287 - DNA, 876 bp, Unknown
  Obtained from environmental sample
  misc_feature (1)..(876): n is a, c, g, or t
ttgccgtttaagtggattaccaaagcgattgaacacggaaagcacgttgttactgcgaacaaggcactactcgcaaagcacggcagcgaaatatttcccattgccggagaaaaaaggtgccatattctttttgaggcggctgttggtggtggcattcccattattcgtaccttgcaagaagctttggttgggaacaaaataaattccctgagctgcataataaacggaacctgtaattatattttaacaagaatgactgccgagggtctttcttttgaagaagttttaaaagatgcgcaaagactgggttttgcagaggcaaacccgtcttttgacatagacggcatagatgccgcccataaaaccgcaatactcgccagcttgtgcagcgggcgttttgttgattttgaaaaaattcacataactggaataagcggcataactgcgcaagatattaagtttgtagatgaacttggcggcgttgtgaggctactaggcttgtacaacaagctcggcgatagcgttgatgtgcgcgttcacccgtgcattgttcccagtgagcatttgctagcgagcgttaaatatgtgctaaatgcagtttatttgcaatgcgataatcttggaccaactctccaaacaggtgctggcgcaggcaggcttccaaccgcaagcgcggtagtggcagaccttgtgtctctagctcgttcctcagaaacggggcacatagagcctttgcccatgggttggtttcaaaaagaaaattctgctactctggttcccattggcgaaacttccactcgttattatttccgttttgtacaaagacaattacgagtatctcaaaatcacggaatctgggcgagatcaatatcatag

SEQ ID NO: 45288 - protein, 291 aa, Unknown
  Obtained from environmental sample
  DOMAIN (53)...(231): Homoserine dehydrogenase
  misc_feature (1)..(291): Xaa is any amino acid
MPFKWITKAIEHGKHVVTANKALLAKHGSEIFPIAGEKRCHILFEAAVGGGIPIIRTLQEALVGNKINSLSCIINGTCNYILTRMTAEGLSFEEVLKDAQRLGFAEANPSFDIDGIDAAHKTAILASLCSGRFVDFEKIHITGISGITAQDIKFVDELGGVVRLLGLYNKLGDSVDVRVHPCIVPSEHLLASVKYVLNAVYLQCDNLGPTLQTGAGAGRLPTASAVVADLVSLARSSETGHIEPLPMGWFQKENSATLVPIGETSTRYYFRFVQRQLRVSQNHGIWARSIS

SEQ ID NO: 45289 - DNA, 1023 bp, Unknown
  Obtained from environmental sample
  misc_feature (1)..(1023): n is a, c, g, or t
atgcagaaattcgcggatgaagcgcttattgaggtttcatcaggcgcaggcggaaacggctgcgtagcctttcaccgtgaaaaatacgtgccgcgcggcgggccatcggggggcgatggcggtcggggcggggatgcgattttcacaatcaggcgtaatttgcggactctttcgcatctcaggtataagcagagttacagggcagagaacggccttgacggctcaggcagaaaccgccacggacgtaacggcgaagatgtgcttataccgctgccgcccggttcagtgataaaggacgcaggaaccggagagcttataagagatttcggcaaggatgaaagggacttcgtttttttgaaaggcggaaacggcggctggggaaacgttcatttcaagtcgtcagtgaaccaggccccaagaaaagccctgccggggaaacccggcgaaaagaggcacgtccaggtggagcttcagatgctggcggatgtggggctggtgggctttccaaacgcgggaaaatcatcccttttggacaagtttacaaatgctcggccaaggatagccccatatcccttcacgaccaaaattcccaatctcggcgttctaacacttggcaaaggcccgggcttatccgaagataactcaagggatataattatagctgatattccggggctcatcgagggcgcttcagagggtcttggtctgggaattcgctttttgaagcatatttcccgtaccgcggctctggcttttcttatagacctgggggaggacaattacctggacgcttttgacacgttgtacaaggaactcgatgcgttttccgtggaactaaccataaaacggcgggtcgttgttggcacaaaactggaccttgagaatgccgaaagcaggcttgaggaattgaaaaagaaataccctaaggaaaaggttttgggaatttcggtttttttggggcttggcttacaagatttggcatcgcttttgagttctatggtcgaagaggaggaaccagcgtga

SEQ ID NO: 45290 - protein, 340 aa, Unknown
  Obtained from environmental sample
  DOMAIN (161)...(292): GTPase of unknown function
  misc_feature (1)..(340): Xaa is any amino acid
MQKFADEALIEVSSGAGGNGCVAFHREKYVPRGGPSGGDGGRGGDAIFTIRRNLRTLSHLRYKQSYRAENGLDGSGRNRHGRNGEDVLIPLPPGSVIKDAGTGELIRDFGKDERDFVFLKGGNGGWGNVHFKSSVNQAPRKALPGKPGEKRHVQVELQMLADVGLVGFPNAGKSSLLDKFTNARPRIAPYPFTTKIPNLGVLTLGKGPGLSEDNSRDIIIADIPGLIEGASEGLGLGIRFLKHISRTAALAFLIDLGEDNYLDAFDTLYKELDAFSVELTIKRRVVVGTKLDLENAESRLEELKKKYPKEKVLGISVFLGLGLQDLASLLSSMVEEEEPA

SEQ ID NO: 45291 - DNA, 1590 bp, Unknown
  Obtained from environmental sample
  misc_feature (1)..(1590): n is a, c, g, or t
gtgaaaccggcacttgaaaccacaacagactctttttccgcgcccgccgtcgaactctgcggtatatacaaagtatatccaggttctgataaaaaggccaacaacaacataagcctggaacttcgcaggggggagatactttgcatcgccggtgaaaacggcgcgggcaagacaaccctgatgaaaatacttgacggccttgaagcgccgagcaaaggcgaaatccgcgttaacggcaatgatgtcaccattgattctccgcttgccgcccgaaagctggggatcggaatggttcatcagaactttatgttgttccccgaatacacagtcgctgaaaacatcgtcatgggcgtagaaccgcgtaagtggggctttctatttaacggcgcggaggcaaaggataaagccgcaaaggtgatagatgcccatcatttttcaattacgcctgacatatctgtaaaaagtctcagcatcggggaaatgcagcaggttgaaatttgccgcctcctttacaggaacgcggacatcatcattcttgatgagccaagctcggtgcttaccgagaatgaaaccgcagcgctgttcaaaaccctaagggcattggcggctgcgggaaaatctatttttctcataacgcacaaactgcatgaaatcaaaaccattgcggacagggttgccgtactcaggcgcggcgaattggcggggattcgcgagacgaaagatgtagacgagtatgaaattgcccatttaatgatcggcgaaaacaaaattgattatcgcagggaagacaggaaaaaaacagacagcaacggcaaacctgttattgtttttgacaatgttacagtgctaagacatgggcagcagcgtcccttgctgaataaagtttcattcgaggtgcgatccggcgaaatagtcggttttgcaggagtgggcggaaacgggcttggcgtactggaggcagttcttggcggcttcctccatcccgcagccggaaaaataacacataacgggaaggacatttccttgttgggtatacgccgcctccgcaggcaggggcttgcctatgtgccggccaacaggcagcaggtgggaagttctctgagcgctacagtcgatgaaaatttaatgatagaccgccgccatgcgttttcccgcatggggtttcttgacacgggcgcgatacgcgatttttcagacgggcttatcaatcgttacaatattgagggcgcgacgggaaacagtcccgccgcctcgctttccggcggcaatttgcaaaaattggtcttggcgcgtgaaattgaccagttcagagactattttgttttttccgaaccgacctggagcctggatataatagccagcggcttcgtctggtctgaaatagccgccttgcgcgaaaaaggcgcggctatcatactaatatccaccaaccttgacgagattctcgcccttgccgaccgggtcatcgtaatgttccgcggcagcgcgattgcggaattcgataattttgttgataacgctattaaagaaaaaatcggtaactgtatgcagggacttttgccaaatacgccggataatgataatgactaa

SEQ ID NO: 45292 - protein, 529 aa, Unknown
  Obtained from environmental sample
  DOMAIN (302)...(494): ABC transporter
  misc_feature (1)..(529): Xaa is any amino acid
MKPALETTTDSFSAPAVELCGIYKVYPGSDKKANNNISLELRRGEILCIAGENGAGKTTLMKILDGLEAPSKGEIRVNGNDVTIDSPLAARKLGIGMVHQNFMLFPEYTVAENIVMGVEPRKWGFLFNGAEAKDKAAKVIDAHHFSITPDISVKSLSIGEMQQVEICRLLYRNADIIILDEPSSVLTENETAALFKTLRALAAAGKSIFLITHKLHEIKTIADRVAVLRRGELAGIRETKDVDEYEIAHLMIGENKIDYRREDRKKTDSNGKPVIVFDNVTVLRHGQQRPLLNKVSFEVRSGEIVGFAGVGGNGLGVLEAVLGGFLHPAAGKITHNGKDISLLGIRRLRRQGLAYVPANRQQVGSSLSATVDENLMIDRRHAFSRMGFLDTGAIRDFSDGLINRYNIEGATGNSPAASLSGGNLQKLVLAREIDQFRDYFVFSEPTWSLDIIASGFVWSEIAALREKGAAIILISTNLDEILALADRVIVMFRGSAIAEFDNFVDNAIKEKIGNCMQGLLPNTPDNDND

SEQ ID NO: 45293 - DNA, 435 bp, Unknown
  Obtained from environmental sample
  misc_feature (1)..(435): n is a, c, g, or t
gtggatatgcccaaggtatatacggcgtatttcaaggattcgcgggcggtaaggcagtttgaggaaaagagcgcgaaagtacagagcgatatcgacaaaatgacgaaagagatacaggacttaaaatcacgccacgcggacgcgttattacgggacgatcagagcgaggttttaaggctggataatttaatttacagaaggtctgaatatttaagggaattttaccagacaaggacggcggaacttgaaaatgagaaaaaaaagctgatgcagtccggttcttttttggatcaagtatatgatgagattcgttatatcgccgaaagcgaaggttacagcatggttatggagaaaaacaataacatcctttggttcagcaatacgatagatattacggacaaattaatcacaaacctgcaaaaaaaacaaagataa

SEQ ID NO: 45294 - protein, 144 aa, Unknown
  Obtained from environmental sample
  DOMAIN (1)...(140): Outer membrane protein (OmpH-like)
  misc_feature (1)..(144): Xaa is any amino acid
MDMPKVYTAYFKDSRAVRQFEEKSAKVQSDIDKMTKEIQDLKSRHADALLRDDQSEVLRLDNLIYRRSEYLREFYQTRTAELENEKKKLMQSGSFLDQVYDEIRYIAESEGYSMVMEKNNNILWFSNTIDITDKLITNLQKKQR

SEQ ID NO: 45295 - DNA, 450 bp, Unknown
  Obtained from environmental sample
  misc_feature (1)..(450): n is a, c, g, or t
atgacatctacaaaaatttcagttacacgtctcccccactctgttggtttatcgttgcctattagaatgacgcaggggtctagcgggtgcgatgtttgcgccgccgtaagtgaggaggttgttatcaatcccggatgccgcgtgttgatacctacggggttgaaattctgtatccccgaaggatttgaggtacaggtacgcccgcggagcggcctcgcttggaagaacggggtaaccgtcctgaacgctccggggacaatcgacgcggattatcggggggaggtgcagatcatcctgatcaaccacggtgatcagccctttacagtgaaacgcggcgacaggatagcgcagttggttccggcggcggtggctgttgatactatatttatagaagacgaagttccggacgatacgtcgcgaggcgcgggggggttcgggcatacggggtga

SEQ ID NO: 45296 - protein, 149 aa, Unknown
  Obtained from environmental sample
  DOMAIN (15)...(149): dUTPase
  misc_feature (1)..(149): Xaa is any amino acid
MTSTKISVTRLPHSVGLSLPIRMTQGSSGCDVCAAVSEEVVINPGCRVLIPTGLKFCIPEGFEVQVRPRSGLAWKNGVTVLNAPGTIDADYRGEVQIILINHGDQPFTVKRGDRIAQLVPAAVAVDTIFIEDEVPDDTSRGAGGFGHTG

SEQ ID NO: 45297 - DNA, 678 bp, Unknown
  Obtained from environmental sample
  misc_feature (1)..(678): n is a, c, g, or t
atgcccaaaaacactaatctccctaccgtagtccttgtcggccgcccgaatgtaggtaaatccacgctttttaaccgcctgctccataaacgcaggactatcaccgatcccacgcctggcgttacccgagaccccatagaggcggacgctcttatcaacggcaaaccagttaggctcattgacacagggggctttaagcttgatagggagtggggagtggggagtggggaatggggacgcagagggtgcggtggacgtataacagataacagtattgacgatctggtcgtcggaaaaaccttcgccacggttgaaaaagccgacctcatcgtactgcttctggaagcaggcgagataaccagcgaagacgaggaattcataaaaattctgcggccttaccgcggccggcttattatcgctgtcaataagaccgaagggggcaggcgggaggcagactcctggaatctgctgtcatacggatttgaaaaaatctttatgatctccgccgaacacggcgataatatcggagagctttgcgaagagatcataaacaggattgatttttctgaggtagccgcacatgcggggcgaggaagatcgtcgtcctattcgcataacgattctggggaagcccaacacgggcaagtccccattatccaacaggctcacgtcgtctaa

SEQ ID NO: 45298 - protein, 225 aa, Unknown
  Obtained from environmental sample
  DOMAIN (8)...(192): AIG1 family
  misc_feature (1)..(225): Xaa is any amino acid
MPKNTNLPTVVLVGRPNVGKSTLFNRLLHKRRTITDPTPGVTRDPIEADALINGKPVRLIDTGGFKLDREWGVGSGEWGRRGCGGRITDNSIDDLVVGKTFATVEKADLIVLLLEAGEITSEDEEFIKILRPYRGRLIIAVNKTEGGRREADSWNLLSYGFEKIFMISAEHGDNIGELCEEIINRIDFSEVAAHAGRGRSSSYSHNDSGEAQHGQVPIIQQAHVV

SEQ ID NO: 45299 - DNA, 687 bp, Unknown
  Obtained from environmental sample
  misc_feature (1)..(687): n is a, c, g, or t
gtgatcgaggggagtttccgctggaagtcccgcgatttcaccatcctcgacacggccggcatccgaagaagaaccaaagtaaacgaaaacatcgagtattactcggtgaaccgcgccattaaaaccatagacgaagcggacattgtgattctgctgatagactccgcggagggccttagcgagcaggacaagaagatcaccgccctcgcccacaacaaaggcaggggcattatcatggcgcttaacaaatgggacaccgctcccaagataaaaaacgcctttgaagcggcaagggaccgtatccattttctgttcggcaaaatggaattcgcgcctgtgctgcccatcagcgcgaaagacggatacggcgttgacaagatgcttaacacggcgataacaatgtacagccaactcaatacccaggtggagacaagccgcctcaaccaggcccttcagcgctggcttgaggaatatcccccgccgtcagggccgcagacccgtttcagcgtaaaatacgccgtacagaaatcggcaaaccccgttcaatttatttttttcgtttcccgccccaaagcggtcagcgaggcgtatatttcttatctgcggaacaggatacgcaaagatttggggttttcgtttgttccggtggaagttaaggtgaggagttcgaagaaagagaaaaaataa

SEQ ID NO: 45300 - protein, 228 aa, Unknown
  Obtained from environmental sample
  DOMAIN (1)...(85): GTPase of unknown function
  misc_feature (1)..(228): Xaa is any amino acid
MIEGSFRWKSRDFTILDTAGIRRRTKVNENIEYYSVNRAIKTIDEADIVILLIDSAEGLSEQDKKITALAHNKGRGIIMALNKWDTAPKIKNAFEAARDRIHFLFGKMEFAPVLPISAKDGYGVDKMLNTAITMYSQLNTQVETSRLNQALQRWLEEYPPPSGPQTRFSVKYAVQKSANPVQFIFFVSRPKAVSEAYISYLRNRIRKDLGFSFVPVEVKVRSSKKEKK

SEQ ID NO: 45301 - DNA, 696 bp, Unknown
  Obtained from environmental sample
  misc_feature (1)..(696): n is a, c, g, or t
atggaagcgctgctgaaaagcctcctggagcaggagggtgacaggcaccggacggaaataatctttgtcgatgaccgatcagacgatgaaagccccgccatgctcgccaaattcgcaaaagacgcggcggagcggggcatggaaaactgcaaaattatcaccctgagggagaaccccggtccaaactacaaacagtacgccctgtcggcaggcatagcccaggcgcggggagattactacctgttcaccgacggcgactgcgaggtgccgcccggctggatccgcgccatgtcccgccgcatgtccgacccggaagtcggcgcggttatcgggccggtgttcaagaaaaaacaggggaagggatttttcagcctgtatcaatgttatgatcacgcggtgcgctacaactaccttgccggggcaataggcctgggcgcggcaggtggcggctttgggaacaacatcattgtcagcagggcggcgcttgaggccgccggcggttacgacgcggttccgccttccccaaccgaggacgccgcgttaatctcgttgatacgctcccagcgcaaataccgcgtacacgccattgccctgcccgacgcggctgtggaaaccgtcgccgaaaaaacatggcgcggctttatcagccagaccctccgctggaaaacggcggcctgttcagccccgagccaataa

SEQ ID NO: 45302 - protein, 231 aa, Unknown
  Obtained from environmental sample
  misc_feature (1)..(231): Xaa is any amino acid
MEALLKSLLEQEGDRHRTEIIFVDDRSDDESPAMLAKFAKDAAERGMENCKIITLRENPGPNYKQYALSAGIAQARGDYYLFTDGDCEVPPGWIRAMSRRMSDPEVGAVIGPVFKKKQGKGFFSLYQCYDHAVRYNYLAGAIGLGAAGGGFGNNIIVSRAALEAAGGYDAVPPSPTEDAALISLIRSQRKYRVHAIALPDAAVETVAEKTWRGFISQTLRWKTAACSAPSQ

SEQ ID NO: 45303 - DNA, 693 bp, Unknown
  Obtained from environmental sample
  misc_feature (1)..(693): n is a, c, g, or t
ttgaagaaacgcttgcgccgtgcagcggcttgctgtttacgttgcgggaatatccggtcgtcttcggcggctcactcttggcgcggattatggaggatgtcaaaaatggttaaagatatcatatactcaataaaatcgccgtatcgccaaagtatggacatcgtagggtacaccttcggcgccggcgaacgctcgtgctgcgtggtgggggcgttgcgcggcaatgagattcagcagatggcgatctgcgcccagttggttgatacgctcaaacgcttggaggaaaacgggtgcgtcatttccggcaaaagcataatgattatcccgtgcgccaacaactactccatgaacatcggcaagcgcttctggacgatggacaacaccgacatcaaccgcatgtttcccggctacgaccagggcgagacgacgcagcgcatcgcggacggtctgttcaagactatcagggactacgtccacggcatacagatggcgagtttctaccgcgagggcgagttcctgccgcatatcaaggtaatggacaccgattacggtaagatagaaacctacgaatcgctcacggatttcggtctgccctacggcctgctcaggacgccgcacccctacgacaccacgacgctgaactacaattggcaggtatggggttgccgcgcctactcgctcttctctacctaa

SEQ ID NO: 45304 - protein, 230 aa, Unknown
  Obtained from environmental sample
  SIGNAL (1)...(23)
  misc_feature (1)..(230): Xaa is any amino acid
MKKRLRRAAACCLRCGNIRSSSAAHSWRGLWRMSKMVKDIIYSIKSPYRQSMDIVGYTFGAGERSCCVVGALRGNEIQQMAICAQLVDTLKRLEENGCVISGKSIMIIPCANNYSMNIGKRFWTMDNTDINRMFPGYDQGETTQRIADGLFKTIRDYVHGIQMASFYREGEFLPHIKVMDTDYGKIETYESLTDFGLPYGLLRTPHPYDTTTLNYNWQVWGCRAYSLFST

SEQ ID NO: 45305 - DNA, 813 bp, Unknown
  Obtained from environmental sample
  misc_feature (1)..(813): n is a, c, g, or t
gtggctgctttgcccgttacggagaacttcattatacagaagaaccgcatagagaacaacataggaccagcgtgcaagcgtgtttgcgttgttacagggactcacggcgatgaattggaaggacagtatgtttgtgcacggctggcgaagattttgaacaaagataaacagaaactctctggcatagtggatatttatcccgctctgaatccgctggggattgattccgttacgcgaggatttccgatgtttgacttggatatgaaccgcatatttccaggttcgccgtctggggtgctagcagaagctgtggcttatgatgttatccgcgacattgaaggtgcggatatgtgcatagacatacattccagcaatatttttctgcgtgagataccgcaggtacgtgtaagcgaacaaacagcagccgagttgttgccttatgctgtgatgctcaatgtagatctcgtatggatacacgcatcggcgaccgtgctggaatcaacacttgcacacacactcaacacacatggagttaagactttggtggttgagatgggtgttggaatgcgcatcacggagagctactgcatacaactcgtggacggcatactgaatcttctgcgcgatctcggtatgtggagcgggcgccggcggacagacgcggacgccgctggtctcaaaagatcacaacgtcggtttcttgaattccgacgcgggggggatattcatcccgcgcgccgtacacggcagccacgtcaataccggcgacagcgtcggcatcgttatagacccgctcaccggcgcaatcgttga

SEQ ID NO: 45306 - protein, 270 aa, Unknown
  Obtained from environmental sample
  DOMAIN (24)...(270): Succinylglutamate desuccinylase / Aspartoacylase family
  misc_feature (1)..(270): Xaa is any amino acid
MAALPVTENFIIQKNRIENNIGPACKRVCVVTGTHGDELEGQYVCARLAKILNKDKQKLSGIVDIYPALNPLGIDSVTRGFPMFDLDMNRIFPGSPSGVLAEAVAYDVIRDIEGADMCIDIHSSNIFLREIPQVRVSEQTAAELLPYAVMLNVDLVWIHASATVLESTLAHTLNTHGVKTLVVEMGVGMRITESYCIQLVDGILNLLRDLGMWSGRRRTDADAAGLKRSQRRFLEFRRGGDIHPARRTRQPRQYRRQRRHRYRPAHRRNR

SEQ ID NO: 45307 - DNA, 1569 bp, Unknown
  Obtained from environmental sample
  misc_feature (1)..(1569): n is a, c, g, or t
gtgaaaacggctcaacctttcaagttttatactgaatatttagatgaaattcagtatcttcctcagcaggaattttcaggcgtggctattcttccgtataaaacagcggcggcggctcattttgactgccatattattctgggagcgggacaggaaagcctatccgttgtttattcacgccttgctttcttgcccaaaaaaaagcgtgaggaattgggaattcccgacgaagacgcttctttggaatttatcaatatgcacaaatataactctgaaaaaatatcggctttcttttgcagtgaacaaactttttcaggctttgccattccgcattcaagaattaacgctccttccgagccaaaaacgtgttattcggcagacgctgcgtttgacggtaaattcgcgcaagacccttttaatattgaagcttacttttattcttcgctctcaaataaagaaaagagtcagaaactgcatgataaccagataaacggatttgcaaattggaaaaaccgcagagcggcaaaaagcgcatcaagcggaaaatggactgtgagcgaagaaataaagaacagtataaaaaaagcgttcgcaaaatcaggcaagtacagtgtttccgccacatcgcttcaaaaatattatcaatgctcttttaagtggctctttggaaatgtcttcggtatcgagaatacgcaaatagaaactacgctaatggcggaaaatatttcgggtcttgtttaccacgccgtattaaataattttttcacagagctgaaaaatgacgctccccttcttggacccatacaaactgattccggtctgtctcttcccccctcttaccgcgccctgcttgaaaaaagtataaataaaatttttaactttttcccattattaaaacaagacggaagccctcagatgagcgcccttaccgcccgtctgttacgcgccgggaaagatgattttatccatcatcttgacgggtgcctatcttctttccttatcttttttgccggatacagggtcgccggaagcgaatgtaattataaatgtgaagaagacacatatatccttaacggatttgtcgattgcattttaaaagaaactcatgaaggaactgataaatatgtaatcgtggattttaaattaaaaaatttgccagcacgttgtgattgcacggcggacgaagaaacgccccttacggattttcaacttcccatgtatataactttaatcgaaaaaaatgaacaatttgatgtgtataccgccctcttttacagtattatcgatcaaaaaccgctggttttattcggaacgattcatgatgagaacacaaataaaaatattccgtctaaagaagaggatcaaattatccgaagtagtgaacgttatatgaaaatttttaatgaatttaaaaacagaacggggcaatttacaaaagaaatatcgtccggtaattttacggtttttccgcgggaaaacagtgattgttttaactgcgattatcagcgtatatgccggacagtctatattatcggacgcgaaaattattattctttggggaaacattga

SEQ ID NO: 45308 - protein, 522 aa, Unknown
  Obtained from environmental sample
  misc_feature (1)..(522): Xaa is any amino acid
MKTAQPFKFYTEYLDEIQYLPQQEFSGVAILPYKTAAAAHFDCHIILGAGQESLSVVYSRLAFLPKKKREELGIPDEDASLEFINMHKYNSEKISAFFCSEQTFSGFAIPHSRINAPSEPKTCYSADAAFDGKFAQDPFNIEAYFYSSLSNKEKSQKLHDNQINGFANWKNRRAAKSASSGKWTVSEEIKNSIKKAFAKSGKYSVSATSLQKYYQCSFKWLFGNVFGIENTQIETTLMAENISGLVYHAVLNNFFTELKNDAPLLGPIQTDSGLSLPPSYRALLEKSINKIFNFFPLLKQDGSPQMSALTARLLRAGKDDFIHHLDGCLSSFLIFFAGYRVAGSECNYKCEEDTYILNGFVDCILKETHEGTDKYVIVDFKLKNLPARCDCTADEETPLTDFQLPMYITLIEKNEQFDVYTALFYSIIDQKPLVLFGTIHDENTNKNIPSKEEDQIIRSSERYMKIFNEFKNRTGQFTKEISSGNFTVFPRENSDCFNCDYQRICRTVYIIGRENYYSLGKH

SEQ ID NO: 45309 - DNA, 612 bp, Unknown
  Obtained from environmental sample
  misc_feature (1)..(612): n is a, c, g, or t
atgggagatataaaagaaaaaaattccggggttatcaacggcattatttcgctgggcaataaagttaacaaaatacgcgatattgtaagggttattaacactattacagatcagacgaaagtaatcgcatttaacgcggcgctggaagcggcaggcgccggggaaaccggcaaacgtttcgcggtggtcgccgccgaggtaaacaggctggccgacgatatagccgttcttacccgccagattcgggaacaggttgaggaaattcaaagctcttcttcctcgctgatcgtatacagtgaggaaggttccgacagaatagccgaaggctataaactcatcaaggatttggaagatgtttttaaggaaataaaggccggcgcggaaataacatccaaccaggcgcaggctattactgtctccacacagcagcagttgaagtccagcgaaaaaatcagcttcgccatcgccgaagtttcacagggagtaaaacattttataggagctgtcgaaaacgcggcatcgtccgccggaaccctgacagaacgcactcgtgaacttgaacgcttcctgacggcgcaaagcgcgcagagcgggaaagaagcaatcggatag

SEQ ID NO: 45310 - protein, 203 aa, Unknown
  Obtained from environmental sample
  DOMAIN (3)...(196): Methyl-accepting chemotaxis protein (MCP) signaling domain
  misc_feature (1)..(203): Xaa is any amino acid
MGDIKEKNSGVINGIISLGNKVNKIRDIVRVINTITDQTKVIAFNAALEAAGAGETGKRFAVVAAEVNRLADDIAVLTRQIREQVEEIQSSSSSLIVYSEEGSDRIAEGYKLIKDLEDVFKEIKAGAEITSNQAQAITVSTQQQLKSSEKISFAIAEVSQGVKHFIGAVENAASSAGTLTERTRELERFLTAQSAQSGKEAIG

SEQ ID NO: 45311 - DNA, 1011 bp, Unknown
  Obtained from environmental sample
  misc_feature (1)..(1011): n is a, c, g, or t
atggcggttgataaatccaggtacattaaccaatttgccgaagaagggcttgaaaatatctcgaccgtacaaaaactgctttttgagatcaaagaaggcacttctgttcaggatgaccttgttacactgatgcgcgcgctgcataccctgaaaggatcggcgcgtatgctggaatttaaaaacattgaaactgtttctcacgcgctggaaacggcgtttgcctccctgaaagaagagcgaatatccctcaatgacaaggcgataaaactgattcttgccgggctggacgaagttaaagcgggaatcgaaaaaatcaaatcaggcgaaagagacgacataagatccgcggtgtttcagaaggaattgtcgtctcttgccgcaaacgaggaatttgccgttcccgaggccgataccgaagatcagatccggcagaaaccaaagcccgaagacgccaaacacaacaaggaagacctaaaatcagaaagcataagaataccgcttgaacggatcgacaaggttatccatgacatggcggcgcttcaatcgctggagatcatcgccagaaatatagcgagggacacagaatcgcttaacgccgcgtcaaggcagttttcaaaactgatcagcgtaaatttgccctggaattcccccataattcaggaattccggtcaatagaactgataaccggaaaacttggctctcttgtcagaaattactccctggatgtcggcaaccacatcaggggcgcttatgacagcataatttcattaaggatgctgcccctttccacagtgcttgacgaatacccccgccaggtttttaccattgcctctgaattgggcaagaaggtaaaaatccacattgagggatctgaaaatgaaattgacaaaaatcttattgaatcattgtccgaggtgttcctccacatgataaggaattccatcgatcatggaattgaaacccccgaggaacggcgcaaggctggaaaaaacgagaccccggacttttga

SEQ ID NO: 45312 - protein, 336 aa, Unknown
  Obtained from environmental sample
  DOMAIN (7)...(108): Hpt domain
  misc_feature (1)..(336): Xaa is any amino acid
MAVDKSRYINQFAEEGLENISTVQKLLFEIKEGTSVQDDLVTLMRALHTLKGSARMLEFKNIETVSHALETAFASLKEERISLNDKAIKLILAGLDEVKAGIEKIKSGERDDIRSAVFQKELSSLAANEEFAVPEADTEDQIRQKPKPEDAKHNKEDLKSESIRIPLERIDKVIHDMAALQSLEIIARNIARDTESLNAASRQFSKLISVNLPWNSPIIQEFRSIELITGKLGSLVRNYSLDVGNHIRGAYDSIISLRMLPLSTVLDEYPRQVFTIASELGKKVKIHIEGSENEIDKNLIESLSEVFLHMIRNSIDHGIETPEERRKAGKNETPDF

SEQ ID NO: 45313 - DNA, 1284 bp, Unknown
  Obtained from environmental sample
  misc_feature (1)..(1284): n is a, c, g, or t
ttggaaatttcatctgaagggatcacccttagcgccggggcagaagcgggcgcgtaccggggccttcaggttctgcgccaactgtttctctcaggcttcagcgaaggccgcctttctctgccctgcggcaaaatcgaagaccatccccgtttcccctggcgcggccttatgctggactgttcccggtatttttattcgattgagtttatcaagaaagttttggacgcgctttcattgcagcatataaacattttccactggcacctcagcgatgaccagggctggcggcttccggtcgcttcttatccgctgcttaccgaaattggttccaggcggcggcaacaccgtttgagcggcaggtttacaggcggtttttataccgaagcggaaatacgcgacattgtttcgtttgccgctgagcggcatatcgaggtagtgcccgagattgatcttccgggccacgccagcgctattctggcggcctatcccggcctgggttgcacaggcggcccatatatggtggaagaccgtttcggtattttcgaggatgtactttgcgccggcaacgataatattttcccccttgcggaagctgtcttcgacacccttgcggatctctttccttccaaatatgtgcacataggcggggacgaggttctcttcaaccgctgggcagaatgtccaaaatgcaaaaaacgccttaatgagcttggccttagcgaagccccgcaactgcaaagctggatcactttgcgccttgtccagatgctccgcaagcggggcaagatcgccatcggctgggacgaggttttggaaaacaccgaaaaatttccgttacctgacgatgtgattgttcagtcatggcgtggaaaaaaaggcgggaacaaagccacagcttccggacaccgcgttatcatgtcgccgatgactgacggctgctacctggatttcagggccatagaccgaccggaagaaataggccgactcggtgtcggtaccataacccagagcttcagccttgacccggtaacggaagaaatggacgaggccgccgcttcgctggttttgggcgggcaggggaatctctggtcggaaattatctatgccggaaaaatcgccgagtacatgatcttcccgcgtatctgcgccattgccgaaaccctctggtcgcaaaggaaacaaaaaaccgcgtcggacttggcggaatttgcccagcggcttgcggtccatcaaaacagacttgataagctgggactgcttcagtaccgcgggccgcttggttaa

SEQ ID NO: 45314 - protein, 427 aa, Unknown
  Obtained from environmental sample
  DOMAIN (51)...(392): Glycosyl hydrolase family 20, catalytic domain
  misc_feature (1)..(427): Xaa is any amino acid
MEISSEGITLSAGAEAGAYRGLQVLRQLFLSGFSEGRLSLPCGKIEDHPRFPWRGLMLDCSRYFYSIEFIKKVLDALSLQHINIFHWHLSDDQGWRLPVASYPLLTEIGSRRRQHRLSGRFTGGFYTEAEIRDIVSFAAERHIEVVPEIDLPGHASAILAAYPGLGCTGGPYMVEDRFGIFEDVLCAGNDNIFPLAEAVFDTLADLFPSKYVHIGGDEVLFNRWAECPKCKKRLNELGLSEAPQLQSWITLRLVQMLRKRGKIAIGWDEVLENTEKFPLPDDVIVQSWRGKKGGNKATASGHRVIMSPMTDGCYLDFRAIDRPEEIGRLGVGTITQSFSLDPVTEEMDEAAASLVLGGQGNLWSEIIYAGKIAEYMIFPRICAIAETLWSQRKQKTASDLAEFAQRLAVHQNRLDKLGLLQYRGPLG

SEQ ID NO: 45315 - DNA, 627 bp, Unknown
  Obtained from environmental sample
  misc_feature (1)..(627): n is a, c, g, or t
atgaaggtaatattagtcaacggaagcccgaacgccaacggatgcacatttacagggcttagcattattaaagaacagttggcaaagcatggagttgattccgagatatttcaggtagggaaaaaaccaatcataggatgtaccgcttgcagaacttgtaaacagccggggaaaacaggaatatgcgtttataacgatgatatggtaaatacagtcggtcaggctttcagagaagcagacggtattatactcggttctcctgtgcattttgcttccgcttccggcgcagcgacctcattctttgatcgtttattttacagtctggagcctgaagccaagagattgaaattcggcgcgtgtattgttagttgcaggagagcaggctcaaccgctacattcgaccaattgattaaatattttaccctttcgcaaatgcctgtcatatcgtcttgttactggaacggcatacatggatatacaccggaagacgtgtacgccgataaagaaggcgtccgtacattaacaatattggcaaacaacatggcatatctcatcaaatgcaagcaacaaagcaatattgaactgccggaagagccgccgatggtcatgacaaattttatccgctga

SEQ ID NO: 45316 - protein, 208 aa, Unknown
  Obtained from environmental sample
  DOMAIN (1)...(183): NADPH-dependent FMN reductase
  misc_feature (1)..(208): Xaa is any amino acid
MKVILVNGSPNANGCTFTGLSIIKEQLAKHGVDSEIFQVGKKPIIGCTACRTCKQPGKTGICVYNDDMVNTVGQAFREADGIILGSPVHFASASGAATSFFDRLFYSLEPEAKRLKFGACIVSCRRAGSTATFDQLIKYFTLSQMPVISSCYWNGIHGYTPEDVYADKEGVRTLTILANNMAYLIKCKQQSNIELPEEPPMVMTNFIR

SEQ ID NO: 45317 - DNA, 1059 bp, Unknown
  Obtained from environmental sample
  misc_feature (1)..(1059): n is a, c, g, or t
ttgaaggcgttttcgcaggtgtacacggcggaaccttccgtagaagatacaatcgccattttgcgcgggcttaaagagaggtatgaagtccaccacggcgtgcggattaaggacgaagctcttgtggcggcggcgactttatccagccgatacattacaagccgttttctgccggacaaggcgattgaccttgttgatgaagccgcaagccgccttaaaatggaattggacagccgtccgaccgagcttgataaactggagcgcaaacttttacagctttcgatagaaaagcaggcgctttcccgtgaagaagatacggcttccaaagatcgcctttcaaaactggaaaaagaaatcgcagaccttacagccgagcgcaacgcaatgaacgcccgctgggaaaacgaaaaaatcgacattcaaaaaatccgccaaattaaacagcggatagaagaactgaaaattgaagagactcgctatgaacgtgcaggcgatctttcaagagcggcggaagtaaaacacggcatgattcccgaagcgcaaaaacagcttgccgctcttacggatcaaatggagaaaaaaagagagaacgcaaaaggaggcgaagcttccgcgcttctgcgtgaggaagtcagcgaagaggacatcgccagcgtggtgtcaacgtggacgggcattcccgtctccaagatgctctccggcgaattgcaaaaatatttggacctggaaaaagctcttgaaaagcgggttgtcggtcagcatgaagctctcgccgcagtcgccgacgccatcagacggaacaagtcggggctttccgatgcggcgcgcccgttggggtctttcctcttttttggaccgacgggcgtcggcaaaacggaactcgccaaaacgctggcggactttttgtttcatgatgaaaaagccctcaccagaatcgacatgagcgagtacggagaaaaacattcggtaagccgccttatcggcgctccgcccgggtatgttggtatgagcagggcggtcagcttacagaggcggtcagacgccgcccctacagcgtga

SEQ ID NO: 45318 - protein, 352 aa, Unknown
  Obtained from environmental sample
  DOMAIN (276)...(349): ATPase family associated with various cellular activities (AAA)
  misc_feature (1)..(352): Xaa is any amino acid
MKAFSQVYTAEPSVEDTIAILRGLKERYEVHHGVRIKDEALVAAATLSSRYITSRFLPDKAIDLVDEAASRLKMELDSRPTELDKLERKLLQLSIEKQALSREEDTASKDRLSKLEKEIADLTAERNAMNARWENEKIDIQKIRQIKQRIEELKIEETRYERAGDLSRAAEVKHGMIPEAQKQLAALTDQMEKKRENAKGGEASALLREEVSEEDIASVVSTWTGIPVSKMLSGELQKYLDLEKALEKRVVGQHEALAAVADAIRRNKSGLSDAARPLGSFLFFGPTGVGKTELAKTLADFLFHDEKALTRIDMSEYGEKHSVSRLIGAPPGYVGMSRAVSLQRRSDAAPTA

SEQ ID NO: 45319 - DNA, 303 bp, Unknown
  Obtained from environmental sample
  misc_feature (1)..(303): n is a, c, g, or t
atgtttttctccgtactcgctcatgtcgattctggtgagggctttttcatcatgaaacaaaaagtccgccagcgttttggcgagttccgttttgccgacgcccgtcggtccaaaaaagaggaaagaccccaacgggcgcgccgcatcggaaagccccgacttgttccgtctgatggcgtcggcgactgcggcgagagcttcatgctgaccgacaacccgcttttcaagagctttttccaggtccaaatatttttgcaattcgccggagagcatcttggagacgggaatgcccgtccacgttga

SEQ ID NO: 45320 - protein, 100 aa, Unknown
  Obtained from environmental sample
  misc_feature (1)..(100): Xaa is any amino acid
MFFSVLAHVDSGEGFFIMKQKVRQRFGEFRFADARRSKKEERPQRARRIGKPRLVPSDGVGDCGESFMLTDNPLFKSFFQVQIFLQFAGEHLGDGNARPR

SEQ ID NO: 45321 - DNA, 558 bp, Unknown
  Obtained from environmental sample
  misc_feature (1)..(558): n is a, c, g, or t
gtgatcctttttgacgaaatcgaaaaaggacacccagaagtgtttaatgtgtttttgcaaatactcgacgacggcagattgacggacggacaggggcgagttgtcgattttaaaaatgtaatcatcattatgacaagcaacttgggatcggacttgatactggaagcgaaaaaccccgaaaccctgcgcgactctttaatggaacttctaaagcacagcttccgacccgaatttataaatcgaattgacgaaaccgtaattttcaaccgccttggacagggcgaaatcggcaagatagtcgatattcagctaacgcggctttcggctcgtcttgcggagcgcaaaattacgcttacgctgacaaatgccgcaaagaccctgctcgccgagagaggatacgacccgatgttcggcgcacgtccgctgaaaaggactattcaaagcgaccttgaaaatccgcttgcgaagcagattatcgcaggcagtatccgagaaggcgataccgttacagccgatattgcgccggataagcaaggaattgtttttaagaaaaaataa

SEQ ID NO: 45322 - protein, 185 aa, Unknown
  Obtained from environmental sample
  DOMAIN (1)...(85): ATPase family associated with various cellular activities (AAA)
  misc_feature (1)..(185): Xaa is any amino acid
MILFDEIEKGHPEVFNVFLQILDDGRLTDGQGRVVDFKNVIIIMTSNLGSDLILEAKNPETLRDSLMELLKHSFRPEFINRIDETVIFNRLGQGEIGKIVDIQLTRLSARLAERKITLTLTNAAKTLLAERGYDPMFGARPLKRTIQSDLENPLAKQIIAGSIREGDTVTADIAPDKQGIVFKKK

SEQ ID NO: 45323 - DNA, 849 bp, Unknown
  Obtained from environmental sample
  misc_feature (1)..(849): n is a, c, g, or t
ttgttaccgaatgaatttgttgacctattaataattgatccgccttataatttagataagaattttaatggcttcaaattctcaaaaacaaatgatgatgcctatttggaatatttgaaaagctggtttcccaaaatactgaatacattaaagccaaatggttctgtatatatttgcggtgattggaaaagcactttttgtttatatcaaattatgcgggataataccataatcaggaacagaattatttggcaaagagaaaaaggaaggggggcaaaagcaaactggaaaaattctaccgaagacatttggtttggaacaaaaaatgatgaatattattttaatgttgaagcagtgaagcaaaaacgtaaagtaattgctccctacagagaaaatggcaaaccaaaagattgggaagaaacagaagaaggtaatttcagattaacataccccagtaatttttgggatgacatatctatcccttattggtcaatgccagagaacaccgatcaccccacacaaaaaccggaaaaattaattgcaaaactaattttagcgagctgtcctgaaaatggtattgtattggatccatttttgggttcaggaacaacatctgtcgtggcaaaaaaattgaatcgtaaatatgttggaatagaaataaacgaagaatattgttgttgggtagaaaaacggttggctttatctgataccgataagaatattcaagggtattcgggtggagttttttgggaaagaaacacattgaatattcaaatgagagaaaacaaaaaaggcgtatataaaaatttaaacaagccaagtatggagttattttcagaggtaatgtaa

SEQ ID NO: 45324 - protein, 282 aa, Unknown
  Obtained from environmental sample
  DOMAIN (7)...(230): DNA methylase
  misc_feature (1)..(282): Xaa is any amino acid
MLPNEFVDLLIIDPPYNLDKNFNGFKFSKTNDDAYLEYLKSWFPKILNTLKPNGSVYICGDWKSTFCLYQIMRDNTIIRNRIIWQREKGRGAKANWKNSTEDIWFGTKNDEYYFNVEAVKQKRKVIAPYRENGKPKDWEETEEGNFRLTYPSNFWDDISIPYWSMPENTDHPTQKPEKLIAKLILASCPENGIVLDPFLGSGTTSVVAKKLNRKYVGIEINEEYCCWVEKRLALSDTDKNIQGYSGGVFWERNTLNIQMRENKKGVYKNLNKPSMELFSEVM

SEQ ID NO: 45325 - DNA, 1971 bp, Unknown
  Obtained from environmental sample
  misc_feature (1)..(1971): n is a, c, g, or t
ttggaacacggcgaactcgatatggtaatggcgaatattacccagcttctcatgatgagcaattactatgagcgcacgggctacaaggcaaatttcgtttttaattataattctaaatcgacttttggatttaatctgaacgagacgattctgtgttctattgtggacaaggccctccgccttattgacaacaggggaatttcgggacagtggatgcggaaaacataccattacagagtaaaactggcgcgatcccagcgtacatggttaaccagcgtggcagccctctttttctgcatactggttcttttgtcttttctgatttataaaaaccgccgtcttggaaagtggcttgaaaaactgatacaaaaacggacaaatgaactggtgattcagagcgcgactctttccgccgcatttgatgcgactcccgatctgatattttgcaaagatttgaattcgcgttttacacgatgcaacaaaacttttgaaaattattttaatgtccgtcaggcggacattatcgggaaagggaacgttgacggtttgggaatatccgccgaattggcggagcaatacaaagaatgggagctcaaggttgtcaacgagggacggacgctggtatttgaagaatatatctcctccgccgacggaacaaaacagctttttgaaacatccgtagttccgatgaggcaaaacggacagataatcggagtgctggctatatcgcataacataaccgagcgtaaggcgatggaagaacaggcgctgagcgccagccgcgcgaagtcggcgttccttgccaatatgagccacgagatacgaacgcccatgaacgccattatcggcatggtcacgataggaaaatcagcttccgacattgagcgcaaggattactgctttggcaagattgaggacgcttcttcgcacctgttgggtgtaatcaacgatattctggacatgtccaaaattgaagccaacaagtttgagctttcacctgtaaaatttaattttgaaaagatgatccagtcggcggtcaatgtcgttaacttccgtttagacgaaaagaatcagaaattcacggtacatatcgacaaacaaattcccaaaatcctcattaccgatgatcagcgtctgattcaggtcatcaccaaccttctggggaacgcggtcaaattcacgcctgaacacggttctatcggtcttgacgcgcggtttctgggggaaaaagacgatctgtgtaccatagaggttacggtaagcgacacggggatcggcatcagccccaaacagcaggaaaatttgtttaattcttttcagcaggcggagatcaccacggcgcgccggtttggtggcaccggcctgggcctcgcgatttgcagaagcattgttgaaatgatgggcggggctatccgggtaagctccgagcaagggaagggttccgcttttacatttacggtactggtgaaaaaggacgcttcggcggatgatgtgacaaacgcccctccggaagaggagcaaaatacggaagaaggggaacatgatcttgacggactctttgcgggacggcgcatactgttggccgaagacgtggaggtaaaccgcgagatagtagtggccctgcttgaaccgacgcgcttggagatagactgcgccgaaaacggggcggaagccgttcacaaattcaacgtagctccggccgcccggtacgacctgattttcatggacatacagatgccggaaatggacggttatgaggcgacaaagcgcatcagggctattgaggcggtacgaaataacagcacgagtttcaccaaaaataaaacccgggacaatgtcagcgagcaattattggaacgaccaaagggagttccaataattgcaatgaccgcaagcgtgttccgtgaagacatcgataaatgtatccaatcgggtatgaacggccatgtggggaagccnggtgaattttga

SEQ ID NO: 45326 - protein, 656 aa, Unknown
  Obtained from environmental sample
  DOMAIN (140)...(251): PAS fold
  misc_feature (1)..(656): Xaa is any amino acid
MEHGELDMVMANITQLLMMSNYYERTGYKANFVFNYNSKSTFGFNLNETILCSIVDKALRLIDNRGISGQWMRKTYHYRVKLARSQRTWLTSVAALFFCILVLLSFLIYKNRRLGKWLEKLIQKRTNELVIQSATLSAAFDATPDLIFCKDLNSRFTRCNKTFENYFNVRQADIIGKGNVDGLGISAELAEQYKEWELKVVNEGRTLVFEEYISSADGTKQLFETSVVPMRQNGQIIGVLAISHNITERKAMEEQALSASRAKSAFLANMSHEIRTPMNAIIGMVTIGKSASDIERKDYCFGKIEDASSHLLGVINDILDMSKIEANKFELSPVKFNFEKMIQSAVNVVNFRLDEKNQKFTVHIDKQIPKILITDDQRLIQVITNLLGNAVKFTPEHGSIGLDARFLGEKDDLCTIEVTVSDTGIGISPKQQENLFNSFQQAEITTARRFGGTGLGLAICRSIVEMMGGAIRVSSEQGKGSAFTFTVLVKKDASADDVTNAPPEEEQNTEEGEHDLDGLFAGRRILLAEDVEVNREIVVALLEPTRLEIDCAENGAEAVHKFNVAPAARYDLIFMDIQMPEMDGYEATKRIRAIEAVRNNSTSFTKNKTRDNVSEQLLERPKGVPIIAMTASVFREDIDKCIQSGMNGHVGKPGEF

SEQ ID NO: 45327 - DNA, 915 bp, Unknown
  Obtained from environmental sample
  misc_feature (1)..(915): n is a, c, g, or t
atgaagaaaaaattaaaactcttccttatttatcgtacacaaataattttattaattttatccgtatcaatacttttcttctcatgcgccacgcgtcccctaccggagccggcgcggaccgcgcccgaatctttcgcgacagccgaggcggtgcttccgaattggcagccggtagcgcagggcgtcggtttttttcacgggagagccgcagtccccgaatacgagttttgggcgcttaaaatcgagcttgccgcgccggctctgcaaattatcgtgaaaggcggagcggatgacgcggcgggcggaacgttaagcgcaaaggtttcaagttttgtaagcgcgaacggcttaaccgccggaattaacgccgctccttttgacatttcctcttcaaaagaggggcaggcgattaaaaatgtgggcatcgttatttccggcggcaaacaaatttcaccgccaagtccgcgctacgacgcgcttgttttttacaaagacgggaaagcggcgattgttaatcaggcggctattaaatcatctgaaaacatagaaaacgcggtgggcggcttttatcanatacttgtaaacggcgctcccgctgaacggactctgacccagagaaaccgcgagcctcggagcgccgccggaatttccgaagacgngaaatttctttatctcgtggtaattgacggcaggcgcgcggacagcgccggcggcacggagaaagagactgccctgctcctgctcgcgctcggttcatggaacgggcttaatcttgacggcggcggatcaacagcgcttgctttacgcggcgaggacggtaaggtgagagtggttaatacgcctgttcacgggggaattttggggatggaacgcgcggtggcggggtgcttggggatattggcggggaaattgtaa

SEQ ID NO: 45328 - protein, 304 aa, Unknown
  Obtained from environmental sample
  SIGNAL (1)...(28)
  misc_feature (1)..(304): Xaa is any amino acid
MKKKLKLFLIYRTQIILLILSVSILFFSCATRPLPEPARTAPESFATAEAVLPNWQPVAQGVGFFHGRAAVPEYEFWALKIELAAPALQIIVKGGADDAAGGTLSAKVSSFVSANGLTAGINAAPFDISSSKEGQAIKNVGIVISGGKQISPPSPRYDALVFYKDGKAAIVNQAAIKSSENIENAVGGFYXILVNGAPAERTLTQRNREPRSAAGISEDXKFLYLVVIDGRRADSAGGTEKETALLLLALGSWNGLNLDGGGSTALALRGEDGKVRVVNTPVHGGILGMERAVAGCLGILAGKL

SEQ ID NO: 45329 - DNA, 1587 bp, Unknown
  Obtained from environmental sample
  misc_feature (1)..(1587): n is a, c, g, or t
atgactttaaccattccatggcgcgatagtaatatttttttcagccaggatagccaaaacctctttacttcaagtgaaaggggcgaaagcggggttagaatatttaatattaataatgggcgtgaaattaaagcatttaacaacgtaaacggtatttctgtaataagtccggattggaaacaatttgttgttgctagagaaggtggaggtttctggatatttaatgcagagacaggtaatcaaataaaacctggaaaaatgctttctagtcgtatctattctatatcttacaactcggacggaaaacgcattataataggacaaaacgactatgcaataatatatgatgtacaaacaaccgatatgatcggttccataagaggtcatactgcaacccttcgatcatcatcctactctccagacggcaagtggatactaagcgcggcggaggacggtactgtccgtatctggagcgcggaaacctttattgaaaaagcccgacttatttcctttgatgacggcgaatggcttaccatgacacctgacggctattataacgcaagcgcgaaaggcgaccaataccttaatgtgcggttgggcaataccgtaaccggcatagaccgctaccgcgctacctttaacaaaccggctattgtacaggcgcggctttccaatagcggcagaatggcggcgcacaaggattatattacttcggtggctgtgaacccaggcagtacaaggatcgcctcggtttcccttgacaatatcaaactttgggatttggaaagcgggagggaattgcgtaccattagcaatatcggcggttcggtaaacgctatcagctttagccctgacggaaagactctaatcccacggtgcggaggacaagacaatcaggatatgggacgcggaaacaggcagggcattacggactatcagcggacacggcgattatgtgaacgaagccgctacagtccagacggtaagcgtattgcctcatgcgcggacgataaacttatcaagatttgggacgctgaatcgggcagggaaatcagaactttaagcggacatacggatttggtaactgtggtggcatggagtcctgacggaaagcggatcgcctccggttctgatgaaaaagaaaaggcaatcagaatatgggacgcggaaagcgggcgtgttttgcaaacaatttcggggcagagtggccgggtaaggtgtattgcgtacagcccagacggaaaaaaaatagcttcttgtaccgcagaagaaccggcacttaagatatgggacgcagaaaccggaaggcaaataagaagcatacctattgaagatggtgcaccttattctttggcatggagtcctgatggtaaacgccttgcggtaggttatatttgggataagagtgatggctgtatgtatatttttaatgcggaaactggcgcagaaatacacgatatttgggtaaacggtactccccagtcattaacttggactccagacggcagacggatcatcactgccagtaatttcaatgacgctcgggttatcaaggtatttgacgctttaagcgggaatgagttgtaa

SEQ ID NO: 45330 - protein, 528 aa, Unknown
  Obtained from environmental sample
  DOMAIN (349)...(381): WD domain, G-beta repeat
  misc_feature (1)..(528): Xaa is any amino acid
MTLTIPWRDSNIFFSQDSQNLFTSSERGESGVRIFNINNGREIKAFNNVNGISVISPDWKQFVVAREGGGFWIFNAETGNQIKPGKMLSSRIYSISYNSDGKRIIIGQNDYAIIYDVQTTDMIGSIRGHTATLRSSSYSPDGKWILSAAEDGTVRIWSAETFIEKARLISFDDGEWLTMTPDGYYNASAKGDQYLNVRLGNTVTGIDRYRATFNKPAIVQARLSNSGRMAAHKDYITSVAVNPGSTRIASVSLDNIKLWDLESGRELRTISNIGGSVNAISFSPDGKTLIPRCGGQDNQDMGRGNRQGITDYQRTRRLCERSRYSPDGKRIASCADDKLIKIWDAESGREIRTLSGHTDLVTVVAWSPDGKRIASGSDEKEKAIRIWDAESGRVLQTISGQSGRVRCIAYSPDGKKIASCTAEEPALKIWDAETGRQIRSIPIEDGAPYSLAWSPDGKRLAVGYIWDKSDGCMYIFNAETGAEIHDIWVNGTPQSLTWTPDGRRIITASNFNDARVIKVFDALSGNEL

SEQ ID NO: 45331 - DNA, 795 bp, Unknown
  Obtained from environmental sample
  misc_feature (1)..(795): n is a, c, g, or t
ttgtggcgggcttctccgccgtgttatcatttggttatggggattgaaaaaatagcgaagggaaatttagacgtaaaaatagaagactgttacaatgacgagtttgacataatcaaagacgctgtaaactctatggcggcggacataaaaacgtatatggaagaaaaattgcagacagaacgcaaattaaatgaaagccgtatttccatcctgctttcacaaatacagccgcattttttatacaacgcccttgccgtcatatcaaggctgtgcgacaaagaccccgccgaggccaaaaaagctaccataaatttctcaaattatctaagggcgaatatgaatcttttagagcgcacagaaccaatcccgtttgaaaatgaattaaaccacactataggctttttgaatttggaaaaagccatgtacggcgatgcgttaaatgtaatatatgacatacaaacaaaaaattttaatattccggctcttaccgttcagcccattgttgaaaatgcagtaaaacacggcataggcaagaaagaaggcggcggcgctgttaccatttcaactaaagaaacagacagctgttatctagtcattatttcagacgacggcgcggggtttttttctgaaaaaactgacgacgacggacaacagcacatcggaattaacaatgtccgactaagactatccgcgcaatgccgcggttctcttaaaatagatagtaaaccgggcgcggggacaaccgccacaataactattcccaaaaacggcaatcaggaggcgcacgcaaaatga

SEQ ID NO: 45332 - protein, 264 aa, Unknown
  Obtained from environmental sample
  DOMAIN (155)...(256): Histidine kinase-, DNA gyrase B-, and HSP90-like ATPase
  misc_feature (1)..(264): Xaa is any amino acid
MWRASPPCYHLVMGIEKIAKGNLDVKIEDCYNDEFDIIKDAVNSMAADIKTYMEEKLQTERKLNESRISILLSQIQPHFLYNALAVISRLCDKDPAEAKKATINFSNYLRANMNLLERTEPIPFENELNHTIGFLNLEKAMYGDALNVIYDIQTKNFNIPALTVQPIVENAVKHGIGKKEGGGAVTISTKETDSCYLVIISDDGAGFFSEKTDDDGQQHIGINNVRLRLSAQCRGSLKIDSKPGAGTTATITIPKNGNQEAHAK

SEQ ID NO: 45333 - DNA, 795 bp, Unknown
  Obtained from environmental sample
  misc_feature (1)..(795): n is a, c, g, or t
atgaacatactcgccatagacgataacgtattggctttggaagaacttgtttcatcggttaaggaagcgtgtccgaatgatgaggttcacagtttctccaagccgtcagaacttctggcctatgcaaaagaaaattattgcgacatagcgtttttggacattgaaatgtgggggatgaacggcatagaacttgcgaaaaagctaaaagaaatacacagcaataccaacatcgtatttgtaaccggatattcaaaatatgccctggattcctatacggttaaggcaagcgattatgtaatgaagccggttaccaaagaagcggttaaagaggctctggaaaacctccgctttcctgtcaaaacagaatcaaataaaagagtgcgagtgcagactttcggcaattttgaagtttttgtagatgaaaacccggtcttgtttacccgttccaagacaaaagaattgtttgcctatcttgtaagccgcaaaggggctttatgcggcaataatgaaataattgccgcaatttgggaagaaaagagtgattcgccgtctctgcaaagccactttaggcatttagtggcggatttaatcaagacacttaaatccttgaatgtcgaagacgtaataatcagaaaatggaaaaacatggcggttgtgcctgataaactatcgtgcgatttttatgagatgcttaaaggcaacgcgaaggcggttaataattacgcgggtgaattcatggcgcaatacagttgggctgaaattgatgccgcatatctggagagcaaaaagaaataa

SEQ ID NO: 45334 - protein, 264 aa, Unknown
  Obtained from environmental sample
  DOMAIN (1)...(113): Response regulator receiver domain
  misc_feature (1)..(264): Xaa is any amino acid
MNILAIDDNVLALEELVSSVKEACPNDEVHSFSKPSELLAYAKENYCDIAFLDIEMWGMNGIELAKKLKEIHSNTNIVFVTGYSKYALDSYTVKASDYVMKPVTKEAVKEALENLRFPVKTESNKRVRVQTFGNFEVFVDENPVLFTRSKTKELFAYLVSRKGALCGNNEIIAAIWEEKSDSPSLQSHFRHLVADLIKTLKSLNVEDVIIRKWKNMAVVPDKLSCDFYEMLKGNAKAVNNYAGEFMAQYSWAEIDAAYLESKKK

SEQ ID NO: 45335 - DNA, 801 bp, Unknown
  Obtained from environmental sample
  misc_feature (1)..(801): n is a, c, g, or t
atggacttttctccgcacacaaaaaattgccgaagaacaaattgcggccatagagtggcatccgtaatgcgttgcaaatttacctgcgaatacaatggctttgcattttctggctggcaagagcagctaaaagatggagttatacgcgaaaaaactgtgcaaagcgagttggaaagggctttttccatagctcttaggcaaaaaataagcattgttggtgcaggcagaacagatgctggagttcacgcaagggggcaggttgcacattttgattgcgaagaacaggatttgaactgccaagttttggaaaaatcggtaaatgccctgagcgataaaaatgtgtgcataagaaatttggaattatgccctgtcgattttcacgctcgctacaacgcaaaagagaggtattacatatacacgctttgcacagagcctatggttttgggtggggaatatatttgggaatgtggctacaaactaaatacagaacttatggcagaagaggctaaatgttttttgggctttcacgatttcaaggctttttcggtagcgaggaaagacggcaaaagcaccgtttgcgagttgaaggaatttcgtttggagaaaaatgggaatctgatttgctggcatatttgcggcaaccgttttttacataaacaagtgcgctcaatgacgggcattctttttgatattggcaggggtcgttatggacttggctctgtgaataaaattttcagcggacagttcaaaggggagagaacttgggcacctccacagggcttggttttggaagncggttag

SEQ ID NO: 45336 - protein, 266 aa, Unknown
  Obtained from environmental sample
  DOMAIN (168)...(264): tRNA pseudouridine synthase
  misc_feature (1)..(266): Xaa is any amino acid
MDFSPHTKNCRRTNCGHRVASVMRCKFTCEYNGFAFSGWQEQLKDGVIREKTVQSELERAFSIALRQKISIVGAGRTDAGVHARGQVAHFDCEEQDLNCQVLEKSVNALSDKNVCIRNLELCPVDFHARYNAKERYYIYTLCTEPMVLGGEYIWECGYKLNTELMAEEAKCFLGFHDFKAFSVARKDGKSTVCELKEFRLEKNGNLICWHICGNRFLHKQVRSMTGILFDIGRGRYGLGSVNKIFSGQFKGERTWAPPQGLVLEXG

SEQ ID NO: 45337 - DNA, 1152 bp, Unknown
  Obtained from environmental sample
  misc_feature (1)..(1152): n is a, c, g, or t
atggaaaaagccattctaataggaataaccacgcagcgcgtaaaacccgcgcaagcacaagaacacttgctggaattgcagcgtttggcagaaacggctggggcaagcgttgcagagactttccttcaaagggttcaggcttttaatccggctacgctcataggcgagggcaaaatagaggaagtgcgtttagccgttgaaaaacacgatgcctctttggttgtttttgatgaggatttgagcggctcgcaggtgcgaaatttggaaaaacgtttgccagagataaaagtgctggatagaacggggcttatacttgatatttttgcacatcacgccaaaactgcggaaagccgacttatggtggaagtggcgcaaatgcagtatttaatgccacgcctcacccgtgcctgggttcatctttcaaggcaggtgggcacgggcggagcaagccccggaattggaatgcgaggacctggcgaaactcagttggaagtggataggcgtttggtgcgcaaacgaattcaggaactcaaagccaaattaaaaaaaatagagcgtgacagggaaaaccaagaaaggcgaagggaaaatacatttcacgttggcttggttggttacacaaatgcggggaaaagcacccttgcaaaccgcttaacaggtgcaaacgtatatgtggaagacaaactctttgcaaccttagacagcacaacccgcaaatttcatttagcagatggacaagacattatattgagcgatacagttggctttattcgcaaattgccgcaccacttggtagagacattcaaaagcacacttggcgttgccgccaacgcagactgtattcttgaagttatagattctgccgctgccgattacaaagagcatattgaggtaagcaaaaaaattctagacgaattggttgatccttccattccacgtttttgcgtgttcaataaaaccgatgccgcaagtgatgaacgcaaagaagagatagcctcaaattaccctgatgccattttaatcagtgcacttgaaaatatcggtatggaaatgctaaaaaaacgccttatgaaagaacttgctaaatggacttttctccgcacacaaaaaattgccgaagaacaaattgcggccatagagtggcatccgtaa

SEQ ID NO: 45338 - protein, 383 aa, Unknown
  Obtained from environmental sample
  DOMAIN (199)...(321): GTPase of unknown function
  misc_feature (1)..(383): Xaa is any amino acid
MEKAILIGITTQRVKPAQAQEHLLELQRLAETAGASVAETFLQRVQAFNPATLIGEGKIEEVRLAVEKHDASLVVFDEDLSGSQVRNLEKRLPEIKVLDRTGLILDIFAHHAKTAESRLMVEVAQMQYLMPRLTRAWVHLSRQVGTGGASPGIGMRGPGETQLEVDRRLVRKRIQELKAKLKKIERDRENQERRRENTFHVGLVGYTNAGKSTLANRLTGANVYVEDKLFATLDSTTRKFHLADGQDIILSDTVGFIRKLPHHLVETFKSTLGVAANADCILEVIDSAAADYKEHIEVSKKILDELVDPSIPRFCVFNKTDAASDERKEEIASNYPDAILISALENIGMEMLKKRLMKELAKWTFLRTQKIAEEQIAAIEWHP

SEQ ID NO: 45339 - DNA, 543 bp, Unknown
  Obtained from environmental sample
  misc_feature (1)..(543): n is a, c, g, or t
gtggtttgcgtcagctggtttgacgcggtgaagtactgtaactggctttccgtcaaagaaggtcttaaaccggcgtataccattgccgaccaaaccgtaaactgggacaatcgcgcgaatggttatcgcctgcccaccgacgctgaatgggagtacgcctgccgcgccggaacaacaacgcccctttctacaggcgagagcatttccacaagccaggcaaactacaatggcagtatagcccacaactacggcaacataggattgtttcgcaaagctaccgtaagcgccggctctttccctgccaacgcgtggggcatatacgacatgcacggcaatgtctgggaatggtgctgggattattacagcaatccaaatacgacacaattatcaaacccgaccgggcccgcttccggcacgcacaggataaaccgcggcggcggctggtcctctcccggaaagcttctgcgttcggctgttcgcgccagcgacttccctgaaactgccggcagtaatctgggcttccgcatagcaaagaataaataa

SEQ ID NO: 45340 - protein, 180 aa, Unknown
  Obtained from environmental sample
  DOMAIN (1)...(178): Domain of unknown function (DUF323)
  misc_feature (1)..(180): Xaa is any amino acid
MVCVSWFDAVKYCNWLSVKEGLKPAYTIADQTVNWDNRANGYRLPTDAEWEYACRAGTTTPLSTGESISTSQANYNGSIAHNYGNIGLFRKATVSAGSFPANAWGIYDMHGNVWEWCWDYYSNPNTTQLSNPTGPASGTHRINRGGGWSSPGKLLRSAVRASDFPETAGSNLGFRIAKNK

SEQ ID NO: 45341 - DNA, 1416 bp, Unknown
  Obtained from environmental sample
  misc_feature (1)..(1416): n is a, c, g, or t
atgtcttttaagaaattnttcggcgttagttttctctttttgctttttgccgctgcctctgttttcggacagcctcagccgtattccaggggcgcaattcttgacgaggaagcgtatagtaagcttcccaaaaaagcgactcttgctacccgctcttatgaaggactgccaaaatcgttttccttaaaacaatactcgcctattcccggagaccagtccgattacggaacctgtgtcgcttgggcttccgcatacgcggcaagaacaatctctgaatctgtcgccctgaaccgcaggaatcaaactgaaacaacccagaatgttttttcgccggtatatgtttatcggactataaatcccaacgatcccgaatgccagcgcggctctgaaatttacaccgctttgaacttgcttcgggactcgggcgcggtcagaatgttagacgttgaacgtactgtcgattttacaagcgtcgatatttccaattacatggaaagtagaaaataccccatcggcggttatgttaccctgttttccagagaagacaaacaaaaacccgctcttatcacgcggatagttaagaaaagtttaaccgagggaaaacctgtcgttatcggcatgaatactcctaattcatttcttgaggcgaaaaatatttgggagcctacggaaagccccaaccgtttttacggcggtcatgccatgtgcgtgataggctatgacgacgataagggcgcttttgagattatcaacagctggggaagaaaatggggaaacgggggatttatctggatctcctataaggcatttgttgactttgtaatggaaagttacgagatgatagaaaatctcgctattttcagcgacacggtaaaatacgaaggcttcggcagaatagagataatcggcagggacgcgccgagaaccgcggctcttacccttacccaagaaggttattacaaaacatcggaagcgtttacacaaggaacgcagctccgctttatcgtaggagcaagtgaaaacgcctatgtatattcctttgcggtctcccagccggcgcgtaacaacaatttctattcaccggctcttttgttcccgcaagccggcatctctccgctccttaattaccgcgacagcgccgtggcgataccagccgaggacaaggtactggagcttgatgctgaatcaggtatggagtatctgataacgctttactcaaaacagcccctggacgtacaggccattatgcggcgctttgtttcaactaaaggaactctcggggaacgcctcgcgacagccacaggcagcaaccctntgctctctctttcgtataacgccaaagaagcggcctttaccgcaacgacggataactcccgcgccgtagccgccctggttgtggcaatagagcaccgataa

SEQ ID NO: 45342 - protein, 471 aa, Unknown
  Obtained from environmental sample
  SIGNAL (1)...(23)
  misc_feature (1)..(471): Xaa is any amino acid
MSFKKXFGVSFLFLLFAAASVFGQPQPYSRGAILDEEAYSKLPKKATLATRSYEGLPKSFSLKQYSPIPGDQSDYGTCVAWASAYAARTISESVALNRRNQTETTQNVFSPVYVYRTINPNDPECQRGSEIYTALNLLRDSGAVRMLDVERTVDFTSVDISNYMESRKYPIGGYVTLFSREDKQKPALITRIVKKSLTEGKPVVIGMNTPNSFLEAKNIWEPTESPNRFYGGHAMCVIGYDDDKGAFEIINSWGRKWGNGGFIWISYKAFVDFVMESYEMIENLAIFSDTVKYEGFGRIEIIGRDAPRTAALTLTQEGYYKTSEAFTQGTQLRFIVGASENAYVYSFAVSQPARNNNFYSPALLFPQAGISPLLNYRDSAVAIPAEDKVLELDAESGMEYLITLYSKQPLDVQAIMRRFVSTKGTLGERLATATGSNPXLSLSYNAKEAAFTATTDNSRAVAALVVAIEHR

SEQ ID NO: 45343 - DNA, 840 bp, Unknown
  Obtained from environmental sample
  misc_feature (1)..(840): n is a, c, g, or t
gtggatcaattgcttagaaatccttctccgcttccaaaaataatcaaagggtttttgatatgtcttgctgtgttggcccttgtcggaggggcaggctatttttttgcttaccttttgcctaaaaaaactgatgccccccaaacgacggtaaggacagccgccgagtatttgctgaacaacgatattttagaacgcagattctatccgggtgattcgattctggttgttgaaggatctaattcctataagctggttttttcaggtgtaagtgacgcgatcacaattaccacccccagagggccagttatgctggatctgggtcaggaagtaaccgtcgatttaaatactgacggctttggtgaactgcggatcattgcggcggattttgtcaaaaacgataatacggccggagctctgcttcgttttgaacaggaagtctcgccgcaaatggcagcgtcgtctgagatccccatagagacccttattagctcaagcagtgaagtgcctctggttctccttagcgcaacaggcgcttttccttttacccttcaggccgtattccagggctattgcctgttccgccacgagatcctttttgagcgggacaagccgggccgcaacgagcagtactatcagcgctcggatgagctcaacattaccgccatgaacggaatacggctgggtatctcaaacgcccaggcagtaaaactccaagtgattggcgcgggccggactgtgccttttgaaagcggcggcgcgagtgaagttgtagccgcagatctccgctgggtgcgggatgatgaaaaccgttaccgcctggtactgctccggctggaataa

SEQ ID NO: 45344 - protein, 279 aa, Unknown
  Obtained from environmental sample
  misc_feature (1)..(279): Xaa is any amino acid
MDQLLRNPSPLPKIIKGFLICLAVLALVGGAGYFFAYLLPKKTDAPQTTVRTAAEYLLNNDILERRFYPGDSILVVEGSNSYKLVFSGVSDAITITTPRGPVMLDLGQEVTVDLNTDGFGELRIIAADFVKNDNTAGALLRFEQEVSPQMAASSEIPIETLISSSSEVPLVLLSATGAFPFTLQAVFQGYCLFRHEILFERDKPGRNEQYYQRSDELNITAMNGIRLGISNAQAVKLQVIGAGRTVPFESGGASEVVAADLRWVRDDENRYRLVLLRLE

SEQ ID NO: 45345 - DNA, 1122 bp, Unknown
  Obtained from environmental sample
  misc_feature (1)..(1122): n is a, c, g, or t
ttggcgaaagcccttgtggaagaactaaaaggtttgggtattaaggacgtaacgctcaccgatcactgttatgtgatagccagtctgcccgcaagtaaaggtaaggaaaactgcccaacagttggatttcttgcccatcttgatactgccgctgatgtgtgtggcaaggatgtgaaggcttgcctggtagaaaactatgatggaaaatccatagacttaggcggcggtcaaagccttgatcccgcttttgatccggcgctggcagggcacaaggggaaggcccttatccacaccgatggaaacacactcctgggcgctgacgacaaggcagggattgccattattgccgccgctgccgaataccttttaaaacacagtgaaattccccacgggccgttggagatcatattctctcccgatgaagaaaccggcaaagggcttcccgtctttccggatagcgctgtccacgccaaggtatgctacaccctggacggcggccccttgggcgaacttgagtgggagtgttttaacgcgtgggccgcgcagataaagttttcaggcgtctcgatgcatttgggacaggcgcggggcgttatggtcaacgccgcccttatggcttcggtttacgctaccatgctgcccagaaacgaaagccccgaagcgaccgacggctattacggctactattgccccctttcattaaaggggaatgtagaaaacgcggagctggaagtgtttatccgcgactttgacaaaaaagaaggcgaaagaaaaattgccgcgctggacactttcgcccgcgctgtggaaactcagtttccaggtggaaaaatagaggtaagcagcaaagtccagtatttaaacatgaaggaaaaaatcggctcgcatcctgaggtgatagaaaaactgcgtcaggcttttttaaacacccatgttgaaataaaagaaaagcccattcggggcggtaccgacggttccagacttaccgagatgggcatacctaccccgaatatttttacaggcggccgcaactatcacagccgccttgagtggctttccgtcccggaaatgattgcctcatgccgccttgttgtggagttaatcaggctttggggcgggtga

SEQ ID NO: 45346 - protein, 373 aa, Unknown
  Obtained from environmental sample
  DOMAIN (94)...(370): Peptidase family M20/M25/M40
  misc_feature (1)..(373): Xaa is any amino acid
MAKALVEELKGLGIKDVTLTDHCYVIASLPASKGKENCPTVGFLAHLDTAADVCGKDVKACLVENYDGKSIDLGGGQSLDPAFDPALAGHKGKALIHTDGNTLLGADDKAGIAIIAAAAEYLLKHSEIPHGPLEIIFSPDEETGKGLPVFPDSAVHAKVCYTLDGGPLGELEWECFNAWAAQIKFSGVSMHLGQARGVMVNAALMASVYATMLPRNESPEATDGYYGYYCPLSLKGNVENAELEVFIRDFDKKEGERKIAALDTFARAVETQFPGGKIEVSSKVQYLNMKEKIGSHPEVIEKLRQAFLNTHVEIKEKPIRGGTDGSRLTEMGIPTPNIFTGGRNYHSRLEWLSVPEMIASCRLVVELIRLWGG

SEQ ID NO: 45347 - DNA, 1257 bp, Unknown
  Obtained from environmental sample
  misc_feature (1)..(1257): n is a, c, g, or t
atggctganaaaacctatgaggaatggcttacggcgtttcggcaaagaaaggttcatatttcatcacagcggggagtactggatcagcgggaaatactggatcttcttgaggctcttaattccagaaacccggaatgggagggcatttcgcttgaatatctaccggagaaaattcagacagctgaactgtgtttcgcggcggtagaaaagtctggctacgagcttaaatttgtaccggaagaacataagacggcggaactctgccttacggcggtccagacgcatggtcaggcgcttcagtatgtgccggatgagcacattacagcggaattgtgccttacagcggtaatgcaggacggactcgcgcttgcccatgtgcctgaaaaatttcagtcagcgttattatgtcttgcggcggttatgaataatcatgaggcgcttgagtatgtacctgaaaaattcaaaacggcggaactttatattgcggcagcagctcaacagaaaaacagggcgcttccagatgtgcaaataaaatcaaatgacaatgatctccaatttatgtcggaagaacctaagacggcggaattgtgctttgcgtcagtaatgcgggacggattctctctttcctatgtaccggaaagacttaggtcagcgctattatattttacggcagtaatatgtaatggcatcgcacttcaacttataccggaggagcacaaaacggcggaactgtgccttgcggcggtaatgaataattatgaggcttttgagtatgtgcccgaaaaactcaaaacagcggacctttatcatgcggcggttcgggagaatggcagggcgcttcaacttatgccggaagaacacaaaacggcggaattgtgcctcgcagcggtaatgaataattatgaggcgcttgagtacgtgcctgaaaaattcaagacagcaggactttatcttgctgcggttcgggagaatggcagggcgcttcaacttatgcctaaagaatacaagacggcggaattgtgtctttcggcggtaatgaataattatgaggcgcttaagtacgtgccagaaaaattcaagacagcaggactttatcatgcggcggttcaggaaaatggcagggcgcttcaacttgtacctgaagaatacaaaacggcgaaactgtgtcttgcggcagtactaatagatggtagtgcgcttgaatatgtgcctaagaagttgagaaagcaagttaagaaagtagcgaggataaagtaa

SEQ ID NO: 45348 - protein, 418 aa, Unknown
  Obtained from environmental sample
  misc_feature (1)..(418): Xaa is any amino acid
MAXKTYEEWLTAFRQRKVHISSQRGVLDQREILDLLEALNSRNPEWEGISLEYLPEKIQTAELCFAAVEKSGYELKFVPEEHKTAELCLTAVQTHGQALQYVPDEHITAELCLTAVMQDGLALAHVPEKFQSALLCLAAVMNNHEALEYVPEKFKTAELYIAAAAQQKNRALPDVQIKSNDNDLQFMSEEPKTAELCFASVMRDGFSLSYVPERLRSALLYFTAVICNGIALQLIPEEHKTAELCLAAVMNNYEAFEYVPEKLKTADLYHAAVRENGRALQLMPEEHKTAELCLAAVMNNYEALEYVPEKFKTAGLYLAAVRENGRALQLMPKEYKTAELCLSAVMNNYEALKYVPEKFKTAGLYHAAVQENGRALQLVPEEYKTAKLCLAAVLIDGSALEYVPKKLRKQVKKVARIK

SEQ ID NO: 45349 - DNA, 588 bp, Unknown
  Obtained from environmental sample
  misc_feature (1)..(588): n is a, c, g, or t
atggctgaaaaaacctataaggaatggcttgaggcgtttcgacacagaaaggttcttaattcaccggaacagagatttattgatcttatgcttagtagtcctaaggcagactgtcagcacatgtcgcttaaagatgtgccggaggaacacaggacagtagaactatgccttgtggcggtagaaacatatggctatgaacttcaatttgtacccgaagaacacaaaacggcggaactgtgcctcgcggcggtccagacgcatgacaaggagcttcgggatgagcaagaggaacagggccttacggcggagacgcatggccaggcgcttcagtatgtaccggaagaactcaagacagctgaattgtgccttgcggcggtaatgcaggacggattagcgcttgtatacgtaccggaaaggcttcagtcaccgttattatatcttgcggcggtaatgaataatcacaaggcttttgagtatgtgcctgaagagttcaaaacggcggaactgtgtttcgcggcggcacaacagagaagcagggcacttgaagatggccccgagaactcaaaaagtgttattgccctcgactga

SEQ ID NO: 45350 - protein, 195 aa, Unknown
  Obtained from environmental sample
  misc_feature (1)..(195): Xaa is any amino acid
MAEKTYKEWLEAFRHRKVLNSPEQRFIDLMLSSPKADCQHMSLKDVPEEHRTVELCLVAVETYGYELQFVPEEHKTAELCLAAVQTHDKELRDEQEEQGLTAETHGQALQYVPEELKTAELCLAAVMQDGLALVYVPERLQSPLLYLAAVMNNHKAFEYVPEEFKTAELCFAAAQQRSRALEDGPENSKSVIALD

SEQ ID NO: 45351 - DNA, 972 bp, Unknown
  Obtained from environmental sample
  misc_feature (1)..(972): n is a, c, g, or t
gtgaaatctctcttcaagcaaaaagaccttaccaagcggatttcagtttgttcggtagacgagcttggcactatagccggcatggtgaacgatttttgcgagcatttaagcggcggaatcgggaaaataaaatataaaatcaacgggcttgaccataccagttatgaactttccattaatatgcacaatacttccgcggccgtggaacaaatcacgtctacccttgacagcatgaaagacctcatggtcaagcaggaatacggcgcggaagaagcgggcaaagcggtaagcgtaattaaagaaaatattgacagccttaaaacgatgatagaacagcagacagacagcgtaaatatgtcgtcttccgccattgaggaaatgaccgcgaatattcattctgtaaaccagaccttgatcgaaaacagcaaaaacgtctctatattgtccgaagcgtctgaaaacgggaagacgggccttcagactgtcgcgcaggagatacaggaaatagcccatgattcagaagggcttctggaaataaactcggttatggaaaatatagccagccagactaatttgctttcgatgaacgcggcaattgaagcggcccacgccggagaggccggcaggggctttgccgtcgttgccgaagaaatccgcaaactcgcggaatcatcgggggatcagtcaaaaacaacgactactatgctgaagaaaataaaaacgtccatagacaacattacaaaatcttccaacgaagtattgaaccgtttcggcgctatagacgaaagcgtaaaaacagtttccgtgcatgagcaaaatattcttcatgcgatggaagaacaggaagtcggcggaaagcagatactggactccataggcaggctgcgggacataacggcctcggtaaaaaaggctctgataacatggaggaatcgggaaaaacccttgttaaggacacggatgaattcataa

SEQ ID NO: 45352 - protein, 323 aa, Unknown
  Obtained from environmental sample
  DOMAIN (111)...(312): Methyl-accepting chemotaxis protein (MCP) signaling domain
  misc_feature (1)..(323): Xaa is any amino acid
MKSLFKQKDLTKRISVCSVDELGTIAGMVNDFCEHLSGGIGKIKYKINGLDHTSYELSINMHNTSAAVEQITSTLDSMKDLMVKQEYGAEEAGKAVSVIKENIDSLKTMIEQQTDSVNMSSSAIEEMTANIHSVNQTLIENSKNVSILSEASENGKTGLQTVAQEIQEIAHDSEGLLEINSVMENIASQTNLLSMNAAIEAAHAGEAGRGFAVVAEEIRKLAESSGDQSKTTTTMLKKIKTSIDNITKSSNEVLNRFGAIDESVKTVSVHEQNILHAMEEQEVGGKQILDSIGRLRDITASVKKALITWRNREKPLLRTRMNS

SEQ ID NO: 45353 - DNA, 588 bp, Unknown
  Obtained from environmental sample
  misc_feature (1)..(588): n is a, c, g, or t
atggaggaatcgggaaaaacccttgttaaggacacggatgaattcataaaaaccagcaaagaaacggtagaaggcatgaacgagatactgaaaggtattcatcagataaatgtttcagtaggacatgtcaacgatgtgagtcaggaaaacaacaaaaattttgaatcattaaaacaggagacgcaaaaatttgaggataccgccggcgacgagaagaaaaaaatacttgtggttgatgacgacggcattcatcttgaaatggtgaaaacggtgctgtcaaacgaatatgacgtgtctaccgccagatcggggaaagaagcgctcggcttgttctatcaggggcttgtcccgcagttaatattactggacttgataatgccggatatggacggatggaatacatatggcaagataagggcgataggcagcttatacgacactccgatagcgtttttcacgtcttcaagcgatccgaaagacataaaacacgcgcaggaaacgggcgcggttgactatttcaagaagccgtttaacgcggacgatctgacgcacagggtaagaaaaatccttacgggaagacagccgtaa

SEQ ID NO: 45354 - protein, 195 aa, Unknown
  Obtained from environmental sample
  DOMAIN (73)...(187): Response regulator receiver domain
  misc_feature (1)..(195): Xaa is any amino acid
MEESGKTLVKDTDEFIKTSKETVEGMNEILKGIHQINVSVGHVNDVSQENNKNFESLKQETQKFEDTAGDEKKKILVVDDDGIHLEMVKTVLSNEYDVSTARSGKEALGLFYQGLVPQLILLDLIMPDMDGWNTYGKIRAIGSLYDTPIAFFTSSSDPKDIKHAQETGAVDYFKKPFNADDLTHRVRKILTGRQP

SEQ ID NO: 45355 - DNA, 681 bp, Unknown
  Obtained from environmental sample
  misc_feature (1)..(681): n is a, c, g, or t
atggcgagggatctgctcgaaagtcactccgcgcagtatatgcttaccaagcatatagagaacatagccgaggctgtaaaaatggttggccttcggggcataagaaatctgctgtattcctacgggacccagctaatccttggcagcgattcggcggagaaaaaggaattatgggaacatagttataaaaccgcgttttatgctcatagccttatttatagattcaagcgaaatatacttcttcttgattttgcctatgtaagcggtattctgcatgacataggaaaaataattttttcgaatgcccacccggatttattaaacaaactccgaggtttttccgctgaaaggaaaatccccaaatccacgcttgagtatctttccgccggaatgaaccacgccggaataggcgcccttatcgcggaaaaatggaatttccccgaagagctggtcgcggctatacgctaccaccacaacccctcggcggccccagaggattgccgaaccctggtagacagcgtttaccttgcggatatgttctgcgagtatcaaaagggcaatgtcacctttgaacagtttgaatcggacccgctgaaaaatttcggtatttccggcaaacagcagctggacgatctaattaagcagcttaacgccggactgaaaaaggcaaaagccggttga

SEQ ID NO: 45356 - protein, 226 aa, Unknown
  Obtained from environmental sample
  DOMAIN (57)...(183): HD domain
  misc_feature (1)..(226): Xaa is any amino acid
MARDLLESHSAQYMLTKHIENIAEAVKMVGLRGIRNLLYSYGTQLILGSDSAEKKELWEHSYKTAFYAHSLIYRFKRNILLLDFAYVSGILHDIGKIIFSNAHPDLLNKLRGFSAERKIPKSTLEYLSAGMNHAGIGALIAEKWNFPEELVAAIRYHHNPSAAPEDCRTLVDSVYLADMFCEYQKGNVTFEQFESDPLKNFGISGKQQLDDLIKQLNAGLKKAKAG

SEQ ID NO: 45357 - DNA, 1035 bp, Unknown
  Obtained from environmental sample
  misc_feature (1)..(1035): n is a, c, g, or t
atgacgatcgttgaattattggaggctttaatcagggcatcccgcgcaggcgacgcagaacatgtggtaaagaccttcgcaaaatttccccacaaccccaactttgcccaaaaggcggcagacctagcaattaagtgcggccgacaagacctagccacaaagtggcgcgacatgcagatagaggcaataccgggaaagaatgacgtggaatacctggaagccgtgctgccaacaggtagcactccccttgtcatactcgtcaacggagaggtagatcccctcaatcccctctttgcttctctcggacaagtcgccatggaaaacaaacagctcagccaactgctggagtcggaggagtttgccgagtggcaactgaggggcgccgcgctgaacaaagagttgtcaggcataatgcagcaaagggaaggctggtctggcagtgacacaacatgggcgatgctaatcgacaccgatggcgagttataccatttcacattattaatgcaattaattatgataccctctttgaaggagggaatcatcatggccaggccaaaaacagtgttcactgaggaactcgcggagcgcgcccgggcagacctggccgcgctgggccgcagcgatctcgcgacgaagctgcgggccatcgcctccgccgcaaaacacccggcggagctggtcgcggacatcttgggagtggcggcggaaacaatctggagatggggggcggcatacagcaaagacggcgtgggcggcctccaggcgaagcccaaaaaggcgaggggctcaaaactgacggcggcccagaaggaagaagtcctgtcatgggtcgacgagtcaaggacgccaaaaggcaagcacgtccactggacgctggagaagctgaggcaggccgccatcagcgagttcggggtcgctttgagcgtaaacgccatctgggcgtggctgcgcaaagaggggcggaagccaaaggtgccaaggccaaggcactacgaggcggacgcgcaggcgcaggaggactttaaaaaaaactag

SEQ ID NO: 45358 - protein, 344 aa, Unknown
  Obtained from environmental sample
  misc_feature (1)..(344): Xaa is any amino acid
MTIVELLEALIRASRAGDAEHVVKTFAKFPHNPNFAQKAADLAIKCGRQDLATKWRDMQIEAIPGKNDVEYLEAVLPTGSTPLVILVNGEVDPLNPLFASLGQVAMENKQLSQLLESEEFAEWQLRGAALNKELSGIMQQREGWSGSDTTWAMLIDTDGELYHFTLLMQLIMIPSLKEGIIMARPKTVFTEELAERARADLAALGRSDLATKLRAIASAAKHPAELVADILGVAAETIWRWGAAYSKDGVGGLQAKPKKARGSKLTAAQKEEVLSWVDESRTPKGKHVHWTLEKLRQAAISEFGVALSVNAIWAWLRKEGRKPKVPRPRHYEADAQAQEDFKKN

SEQ ID NO: 45359 - DNA, 1509 bp, Unknown
  Obtained from environmental sample
  misc_feature (1)..(1509): n is a, c, g, or t
gtgacgatggcgagttatgattaccttaccagagttctgcaggagcggattaataattggcagggcagggcagtatccggcaattcgggttttgtcgtacaggtaggcgattctgtcgcttccgtttacgggttgaccggcgcggtttacggagagcaggttgagtttacgtccggcgcgaccggaatcgttcttaaccttgaggatgagaatacgggcgtcgttattttatccggcgaaaacctggttaaagaaggcgacgaggtaaaaggaaccggcaaagtcgtgtccgtccccgcgggcaattccctgttcggcagagttgtaaaccccctcggcaaagccgtggacggcaagggcccgataaccgccgaagagtatctgcccattgaatcgcccgccgcgcccgtgattgaccgcggcagcgtggacacccctttgcagaccggcaccatttccgttgacgcgatgatcccaatcgggcgcggtcagagggaactgattatcggcgacagacaaacaggaaagacggcgatttccatcgacacaatcatcaatcaaaagggaaagaacgttatctgcgtgtactgcgcgatagggcagaaatcttcctcgacagcggcgttaatcggaaaacttgaggaacacggcgcgatggactacacctttgtagtgttagcgtccgcatcggattcagccgcccttcaatacatagcctcatacgccgccgtcgcgatggcggaacattttatgcgtcagggaaaggacgtgcttgtgatctacgatgatctttcaagcacgctgttgcctaccgcacaatctctctgcttctgcggcgcccgcccggacgcgaggcttttccccggcgacgtattttaccttcattcgcgtcttttggaacgcgcggtaaaactttcaaaggccaggggcgccggctcaataacagccatgcccattgttgagactcaggccggcgacatttcggcctatattcccacaaacgtaatttcaataacggacgggcagatattccttgattccgagttgttcaattcgggtttccgcccggccatagacgtgggactttcggtaagccgcgtcggaggttcagcgcagacaaaggccatgcggaaaatctccggacgcatcaggctggacctcgcccagtaccgcgagatggcggccttcgcccagttcggaagcgatttggacaaggccacccaggacaaactggcacagggagagcggcttatggaagtgctgaaacagccccagctttcaccctacccgcttgtggatcaaatagcgattcttttcctggctgttgaaggctatcttctggatgtcaagaccgaaaatgtttcagcgtttgtaaaagaatttttaacgcacctaaaaagccagaaagcggatctgatgaagggcatcgcggatacgggagtcgtttccaaggaacaggaagatgaattgcgcctgactgtggaaaccttcaaaggaaataaaaaataa

SEQ ID NO: 45360 - protein, 502 aa, Unknown
  Obtained from environmental sample
  DOMAIN (25)...(93): ATP synthase alpha/beta family, beta-barrel domain
  misc_feature (1)..(502): Xaa is any amino acid
MTMASYDYLTRVLQERINNWQGRAVSGNSGFVVQVGDSVASVYGLTGAVYGEQVEFTSGATGIVLNLEDENTGVVILSGENLVKEGDEVKGTGKVVSVPAGNSLFGRVVNPLGKAVDGKGPITAEEYLPIESPAAPVIDRGSVDTPLQTGTISVDAMIPIGRGQRELIIGDRQTGKTAISIDTIINQKGKNVICVYCAIGQKSSSTAALIGKLEEHGAMDYTFVVLASASDSAALQYIASYAAVAMAEHFMRQGKDVLVIYDDLSSTLLPTAQSLCFCGARPDARLFPGDVFYLHSRLLERAVKLSKARGAGSITAMPIVETQAGDISAYIPTNVISITDGQIFLDSELFNSGFRPAIDVGLSVSRVGGSAQTKAMRKISGRIRLDLAQYREMAAFAQFGSDLDKATQDKLAQGERLMEVLKQPQLSPYPLVDQIAILFLAVEGYLLDVKTENVSAFVKEFLTHLKSQKADLMKGIADTGVVSKEQEDELRLTVETFKGNKK

SEQ ID NO: 45361 - DNA, 333 bp, Unknown
  Obtained from environmental sample
  misc_feature (1)..(333): n is a, c, g, or t
ttgattgatgattgtgtcgatggaaatcgccgtctttcctgtttgtctgtcgccgataatcagttccctctgaccgcgcccgattgggatcatcgcgtcaacggaaatggtgccggtctgcaaaggggtgtccacgctgccgcggtcaatcacgggcgcggcgggcgattcaatgggcagatactcttcggcggttatcgggcccttgccgtccacggctttgccgagggggtttacaactctgccgaacagggaattgcccgcggggacggacacgactttgccggttccttttacctcgtcgccttctttaaccaggttttcgccggataa

SEQ ID NO: 45362 - protein, 110 aa, Unknown
  Obtained from environmental sample
  misc_feature (1)..(110): Xaa is any amino acid
MIDDCVDGNRRLSCLSVADNQFPLTAPDWDHRVNGNGAGLQRGVHAAAVNHGRGGRFNGQILFGGYRALAVHGFAEGVYNSAEQGIARGDGHDFAGSFYLVAFFNQVFAG

SEQ ID NO: 45363 - DNA, 378 bp, Unknown
  Obtained from environmental sample
  misc_feature (1)..(378): n is a, c, g, or t
ttgcgcttaatcgaagaagaaattttcaagggacttaacatacctttccgcgtagtggatacctgcacaggcgacttaggcgcgcccgcctaccgcaaatgggacttggaagcgtggatgcccgggcgcaacggcggcgaatggggcgaagtcacctctacctcaaactgcacagattatcaggcgcgaagactcaacatccgctttaaagacgacgacggtaaaaacaaatacgttcacatgttaaacggcacggcaatcgctatatcccgcgcaatcatagccgtcttagaaaatttccaacaagcggacggcacagtgcgccttccgaaggcgttggttccttattgcgggtttgatgtgataaagaagaaataa

SEQ ID NO: 45364 - protein, 125 aa, Unknown
  Obtained from environmental sample
  misc_feature (1)..(125): Xaa is any amino acid
MRLIEEEIFKGLNIPFRVVDTCTGDLGAPAYRKWDLEAWMPGRNGGEWGEVTSTSNCTDYQARRLNIRFKDDDGKNKYVHMLNGTAIAISRAIIAVLENFQQADGTVRLPKALVPYCGFDVIKKK

SEQ ID NO: 45365 - DNA, 906 bp, Unknown
  Obtained from environmental sample
  misc_feature (1)..(906): n is a, c, g, or t
atgacggaattagccgcatctctggcgtctccgcgaaaagcgatgatcatggtaaaagcgggacaggcggtagacgatacaatcgaacagcttttggaagtttttgaaaaaggcgacattatcattgacggcggcaattcaaattatcaggatacaatgcgaagaacagcctatgttgagtcaaagggactgttgtatataggaaccggcgtttcaggcggagaggaaggcgcgttaaagggaccttctataatgccgggcggctctcccgcggcgtggccatttgtaaaaccgatgttacagggaatatgcgcgaaggtagagggaggcgttccctgctgcgactgggtgggtgaaaacggcgcaggtcactttgttaaaatggtgcataacggcattgaatacggtgatatgcagttaatctgtgaaacctacgatttgatgaaaaacgtcctgggactgtcctgtgacgagatgggaaatgtttttgaagagtggaacaacggctcgctcggcagttaccttatagaaataacaagggatattctccgctacaaagacacagacggcaaacccctcgccgaaaaaatacttgataccgcggggcagaagggaaccggcaaatggacaggcatcgccgccctggaatttggagtccccctcactttaattggagaggccgtctttggacgctgtctttccgccgcanaggacgagcgtgtaaaagcggcaaaagtttttagctctccaaaaatttcctctcccgccgacaagacggcgtttgtaaaagatttggaaaaagcattgtacgcttccaaggttgtatcttacgcgcagggctatcttttaatgagggaagcggcaaagagtacaagtggaatcttaactatggcggcatcgcgctga

SEQ ID NO: 45366 - protein, 301 aa, Unknown
  Obtained from environmental sample
  DOMAIN (1)...(119): NAD binding domain of 6-phosphogluconate dehydrogenase
  misc_feature (1)..(301): Xaa is any amino acid
MTELAASLASPRKAMIMVKAGQAVDDTIEQLLEVFEKGDIIIDGGNSNYQDTMRRTAYVESKGLLYIGTGVSGGEEGALKGPSIMPGGSPAAWPFVKPMLQGICAKVEGGVPCCDWVGENGAGHFVKMVHNGIEYGDMQLICETYDLMKNVLGLSCDEMGNVFEEWNNGSLGSYLIEITRDILRYKDTDGKPLAEKILDTAGQKGTGKWTGIAALEFGVPLTLIGEAVFGRCLSAAXDERVKAAKVFSSPKISSPADKTAFVKDLEKALYASKVVSYAQGYLLMREAAKSTSGILTMAASR

SEQ ID NO: 45367 - DNA, 375 bp, Unknown
  Obtained from environmental sample
  misc_feature (1)..(375): n is a, c, g, or t
atgtggcgcggcggctgcataatacgctcggtcttcctgggcaagataaaggaagcgtttgataagaaccccgctttggacaacctgctattagatcccttctttacaaagatactggaggatgcccaggattcctggcgcagggttatttcggcggctgtacagagcgggataacaacgccggcattcagcagcgctcttgcctactttgacggctaccgcagcgaacggcttccggcgaatcttttgcaggcccagcgcgactacttcggcgcgcatacctacgagcgcatagacaaagcacgaggggagttcgcccataccaactggaccggccacggcggcacgacgagcgcgtctacttatgtcgtgtaa

SEQ ID NO: 45368 - protein, 124 aa, Unknown
  Obtained from environmental sample
  DOMAIN (1)...(111): 6-phosphogluconate dehydrogenase, C-terminal domain
  misc_feature (1)..(124): Xaa is any amino acid
MWRGGCIIRSVFLGKIKEAFDKNPALDNLLLDPFFTKILEDAQDSWRRVISAAVQSGITTPAFSSALAYFDGYRSERLPANLLQAQRDYFGAHTYERIDKARGEFAHTNWTGHGGTTSASTYVV

SEQ ID NO: 45369 - DNA, 795 bp, Unknown
  Obtained from environmental sample
  misc_feature (1)..(795): n is a, c, g, or t
ttgattataatcgatcttggcacaggtattcgaccgcttggcgactggctgattgcgaatgatttaaagaaatacgggaaaatagacgcggatatttttataacgcatactcactcggatcatctgcttgggtttcccatgtttaccccgctttacatacgcggcactgaattgcgtataacagctcccgtttcttttgaaaatgacagccttaaatcaataattgaaactcagctttcgcataaatactggcctgtacgcgcgggagaacttgccgcgcatattgaatacagtcaaattaaggaaacagcgcttaatctgggaggcggtcttgcggttaccagcaaattccttaatcatccgattttatgccttggatatcgttttgattatcaggggaaatcaattgccgttgtttatgatcacgaaccattttataatctttttactgtaaatcccgatgataaaaattataatgaagaagatgcaaaagaaggcgaaattgccgcagcggaagaaaatgaaaaaattattaattttgtcaaaggcgcgaatataataatccatgacgctcaatattcggaaaaggaatatttatcgcataacggctgggggcattgttcttttgcccatgcggttaggacgaaaacctgcgcaaacgcgaaaaaactggttttttttcatcatgatccggcgcatacggacagtcagcttgaacagtttgaaaaaacatacgctaaagacgcagaaaaagaaattttaatggcaaaggaaggaatgattctgcaggcctga

SEQ ID NO: 45370 - protein, 264 aa, Unknown
  Obtained from environmental sample
  misc_feature (1)..(264): Xaa is any amino acid
MIIIDLGTGIRPLGDWLIANDLKKYGKIDADIFITHTHSDHLLGFPMFTPLYIRGTELRITAPVSFENDSLKSIIETQLSHKYWPVRAGELAAHIEYSQIKETALNLGGGLAVTSKFLNHPILCLGYRFDYQGKSIAVVYDHEPFYNLFTVNPDDKNYNEEDAKEGEIAAAEENEKIINFVKGANIIIHDAQYSEKEYLSHNGWGHCSFAHAVRTKTCANAKKLVFFHHDPAHTDSQLEQFEKTYAKDAEKEILMAKEGMILQA

SEQ ID NO: 45371 - DNA, 828 bp, Unknown
  Obtained from environmental sample
  misc_feature (1)..(828): n is a, c, g, or t
ttgaatttacgaaaaataataatattttttatcttttttgccgtttgtttttccgtctttcctcaggaaaaacaagatgatgtcgttagcgatgataatgaaatcatcattgatgaaatattacaagacgacatttatactgaagagtcaatttttataataaattcttttaattacaacgtaaaaggcagaactcttccttttgtattaaacacaaaaacagaattaaaaaaaggcgaagaaataataggaaaaacacatcttaccaaatttataaatgataaaagccagcttcttataaatgaaagggtattaaaggacgatgtaagaatagaatacacaataggcgaattaacggaagacggcaaatatccagtagatttggaaatatacgttgaagatacatttaatataatcgcccttccgtatcctaaatatgattcaaattacggtctttcattcacaattaaagcgcgtgattacaatttccttggttcaatgcagcctttcagggtagatttaggttacaaaaaagatcaggaagagcgcacttatttttcgttaatgctggattcaggttttccgttccaggcatttggacttaactggttttttgattttgacaactatttttactaccgtcccgaattagaaaaacctttttattacaaaaacagatcggcattatcagttgatattccggtaaaacatacaacccttaacttgtggtttggggaatcattctattggaatgatgaaaattcagacgattacaaagatacttacggtgatgtcaggaaggcgctcggccgaatctgtcattggtaa

SEQ ID NO: 45372 - protein, 275 aa, Unknown
  Obtained from environmental sample
  SIGNAL (1)...(24)
  misc_feature (1)..(275): Xaa is any amino acid
MNLRKIIIFFIFFAVCFSVFPQEKQDDVVSDDNEIIIDEILQDDIYTEESIFIINSFNYNVKGRTLPFVLNTKTELKKGEEIIGKTHLTKFINDKSQLLINERVLKDDVRIEYTIGELTEDGKYPVDLEIYVEDTFNIIALPYPKYDSNYGLSFTIKARDYNFLGSMQPFRVDLGYKKDQEERTYFSLMLDSGFPFQAFGLNWFFDFDNYFYYRPELEKPFYYKNRSALSVDIPVKHTTLNLWFGESFYWNDENSDDYKDTYGDVRKALGRICHW

SEQ ID NO: 45373 - DNA, 915 bp, Unknown
  Obtained from environmental sample
  misc_feature (1)..(915): n is a, c, g, or t
gtgcctcttttcgcctttatcatagccgatgaaaataccgcctacatcgccgccaaaatttcaaacggcattgattacccttgcgttattttaaaaagtggcgaagaaaataaaacttggcagtccgtagaaacaatacttttcgccgctaacaaagcgtcccttggcagagactgcgtttttatcgccgtcggcggcggagtaattggcgacatggccggctttgcagcatcaatttatatgcgcggctgctgttttgttcttgtttccactaccctgcttggcatggttgacgcatccgtcggcggcaaaacaggttttgatctttttggcataaagaactttgttggcagtttttatcccgcgcaaagcgtatatatttcgttagacgctctttgtacattaccgcaggcggaaataaaaagcggcatggcggaactaataaaaactgccgtcctttgcggcgatgattttattgagcagttaacgccgttagcggaaaattttaacaatttaaataaatttttagaagacggcacgcttcataagtgcatagaaagggctgtattgtacaagggtggcgttgcaagcgaagactttcgcgaatcgggaaaacggatgcttttaaatcttgggcatacttttggacacgcccttgaaagcgctgccggattggggaatattacgcatggggaagccgtcgcatggggtatggtacgagcctgcgaacttggaacggcgttaggcgttacgccgcgcgaaagggcgaaaaaaattataaatcttattaaatcatccggttatgaatgctcctgcccccatccctccgccggtgacaaggatttattattaaacgcgatgaaaagcgataaaaagaaaaaaagcgggaaacttaacgtttataattccggatga

SEQ ID NO: 45374 - protein, 304 aa, Unknown
  Obtained from environmental sample
  DOMAIN (3)...(294): 3-dehydroquinate synthase
  misc_feature (1)..(304): Xaa is any amino acid
MPLFAFIIADENTAYIAAKISNGIDYPCVILKSGEENKTWQSVETILFAANKASLGRDCVFIAVGGGVIGDMAGFAASIYMRGCCFVLVSTTLLGMVDASVGGKTGFDLFGIKNFVGSFYPAQSVYISLDALCTLPQAEIKSGMAELIKTAVLCGDDFIEQLTPLAENFNNLNKFLEDGTLHKCIERAVLYKGGVASEDFRESGKRMLLNLGHTFGHALESAAGLGNITHGEAVAWGMVRACELGTALGVTPRERAKKIINLIKSSGYECSCPHPSAGDKDLLLNAMKSDKKKKSGKLNVYNSG

SEQ ID NO: 45375 - DNA, 702 bp, Unknown
  Obtained from environmental sample
  misc_feature (1)..(702): n is a, c, g, or t
atggtatatgtggaaggcggcacattcaagatggggacagtcagcggtggaaacgataatgaaagaccagtacatacggtaacgttaaaaagtttttatataggcaaatacgaagcaacacagaaagaatggcatgaggttatggagaacaatccaagtgcattcaaaggagaaaacctgcctgtagaaacaataagctggtatgaagcaatagattattgcaacaaacgcagtataaaggaagggcttacacccgcctatagcggctccgacgataacataacctgtaactggaacgtaaacggttaccgcctgcctacggaagcagagtgggaatacgcggcgaggggcggcaacggttcgccgggaaattacacttattcggggagcaacacgattgacgatgtggcatggtatgacggaaacagcgggaaaaggacgcagcctgttggaacaaaggcggcgaacagtttaggtatacacgacatgagcgggaatgtttgggagttgtgctgggactggtatggcagttattcaaacgattctcaaattgacccaagaggagcggctactggtgactacaaagtgataagaggtggtagttggtacagtattgcttcctatgcgaggtcggtgaatcggagctactaccacatgtttggcagtgataatggcatcagtttccggcttgtgcgctcttga

SEQ ID NO: 45376 - protein, 233 aa, Unknown
  Obtained from environmental sample
  DOMAIN (1)...(232): Domain of unknown function (DUF323)
  misc_feature (1)..(233): Xaa is any amino acid
MVYVEGGTFKMGTVSGGNDNERPVHTVTLKSFYIGKYEATQKEWHEVMENNPSAFKGENLPVETISWYEAIDYCNKRSIKEGLTPAYSGSDDNITCNWNVNGYRLPTEAEWEYAARGGNGSPGNYTYSGSNTIDDVAWYDGNSGKRTQPVGTKAANSLGIHDMSGNVWELCWDWYGSYSNDSQIDPRGAATGDYKVIRGGSWYSIASYARSVNRSYYHMFGSDNGISFRLVRS

SEQ ID NO: 45377 - DNA, 474 bp, Unknown
  Obtained from environmental sample
  misc_feature (1)..(474): n is a, c, g, or t
gtgattaatgaatgtctgggcgtggacaaagagcaggcggaaaaatcgcagtctgcggatattgcgaatatctttgcggggcggcgcatactgctggttgaagacgtggaaattaaccgcgagattgtactgaccctgcttgaaccgacaaagttggaaatagactgcgccgagaacggcgcgcaagcggtccgtatgttcagcaaagacccgaataagtacgaaatgattttcatggatatacaaatgccggaaatggacggctatgaggcggcacggcgtattcgctcttttgaggcggaacttaataagaacggcacggaacagccaaagggaattccgatagttgccatgacagcgaatgtttttaaggaagatattgaaaaatgccttgacgccggcatgaacagccatgtaggcaaacccgttgattttggggaagttttggaccgccttcgcacatatctgggataa

SEQ ID NO: 45378 - protein, 157 aa, Unknown
  Obtained from environmental sample
  DOMAIN (28)...(153): Response regulator receiver domain
  misc_feature (1)..(157): Xaa is any amino acid
MINECLGVDKEQAEKSQSADIANIFAGRRILLVEDVEINREIVLTLLEPTKLEIDCAENGAQAVRMFSKDPNKYEMIFMDIQMPEMDGYEAARRIRSFEAELNKNGTEQPKGIPIVAMTANVFKEDIEKCLDAGMNSHVGKPVDFGEVLDRLRTYLG

SEQ ID NO: 45379 - DNA, 798 bp, Unknown
  Obtained from environmental sample
  misc_feature (1)..(798): n is a, c, g, or t
atggttgacgcccattgccatccatttgatctcgcggaatgtttgtcccacctagccgaagaagaacggcggaatcttggcgtgatctgcgcctcaagcgcggctacactggaagaatttgaatactgcgaaaggctttcgattcaggcaaaacaggataaggctgcgccgttattgccgtgttttgccgtacacccgcaaatggcattaataaccaaaaccacccccaatgttacgcgatattcattgcgggataacctgtctgttctggacgcgcttgcgcggcagggccgcctttgcgcggtgggggagaccggctttgatttatacaacgccgacttcagggaaaccgagaaaacacaggatgagctgtttgcggtacatcttgaaacagccctgcaatacggtctgcctctggtgatacattcgcgccgtgcgatgcacaagatctttgccagcgccgagtcgcttaaaaaatgcagggcgcttgtgttccattcatggtcaggcacacagggggagggcgaggcattgctcagacggggaattaacgcttttttttcttttggcgtggcgataacgcttaaccacaaggaagcgatgcgctgctgcgcggctttcccggcggaacgcctgctcaccgagacagacaccccattccagccccccaggggcagggagttctcccgttacgcggatataaagacaattcttggcgcgatagaagccttgcgcggcggggaaaaaatgcaagagcgcattgaaacaaatttcaatatggcgttcggtggggactag

SEQ ID NO: 45380 - protein, 265 aa, Unknown
  Obtained from environmental sample
  DOMAIN (1)...(263): TatD related DNase
  misc_feature (1)..(265): Xaa is any amino acid
MVDAHCHPFDLAECLSHLAEEERRNLGVICASSAATLEEFEYCERLSIQAKQDKAAPLLPCFAVHPQMALITKTTPNVTRYSLRDNLSVLDALARQGRLCAVGETGFDLYNADFRETEKTQDELFAVHLETALQYGLPLVIHSRRAMHKIFASAESLKKCRALVFHSWSGTQGEGEALLRRGINAFFSFGVAITLNHKEAMRCCAAFPAERLLTETDTPFQPPRGREFSRYADIKTILGAIEALRGGEKMQERIETNFNMAFGGD

SEQ ID NO: 45381 - DNA, 696 bp, Unknown
  Obtained from environmental sample
  misc_feature (1)..(696): n is a, c, g, or t
atgaagcggctgctccgggacgcgggcatccccatcgggaaatttcttgtccttcgcgccggtgaaacttactccagcgggctcaatttgcataacgccatgcccggttttgccgatgttataaaaaccctgggcctgccgttttttgtaaaaccggcgaacatgggttcttccgtgggtgtcggaaaagtgcataacgagaccgaataccccgccgccgtcaaggacgcgtttcaatacgacaataaaattattctggaagagtttatccccggccgggaactggaatgtgcggtcctgggcaacgaagatctccgcgtgtcggttcccggcgaggtcatctcaacccacgaattttattcctacgacgcgaagtatctggacgaaaacggggcggccctggaaatacccgcgaaaatccctgcggaaaccgcaaagcgggtgcaggaactcgcggcgcagaccttcagggccctctgctgtgaggggcttgcgcgggtggatttttttctgcgtgaaaacggcgaagtgctggtcaacgaaatcaacaccatgccgggcttcaccaagatcagcatgtaccccaaactctgggaggcttcgggaatttcctacgccgatctaataagcagcctgattgatcttgcctttgaacgctttgaaaaagagcgaaagctaaaaaccagcgtcgtgtag

SEQ ID NO: 45382 - protein, 231 aa, Unknown
  Obtained from environmental sample
  DOMAIN (1)...(213): RimK-like ATP-grasp domain
  misc_feature (1)..(231): Xaa is any amino acid
MKRLLRDAGIPIGKFLVLRAGETYSSGLNLHNAMPGFADVIKTLGLPFFVKPANMGSSVGVGKVHNETEYPAAVKDAFQYDNKIILEEFIPGRELECAVLGNEDLRVSVPGEVISTHEFYSYDAKYLDENGAALEIPAKIPAETAKRVQELAAQTFRALCCEGLARVDFFLRENGEVLVNEINTMPGFTKISMYPKLWEASGISYADLISSLIDLAFERFEKERKLKTSVV

SEQ ID NO: 45383 - DNA, 768 bp, Unknown
  Obtained from environmental sample
  misc_feature (1)..(768): n is a, c, g, or t
ttgccattgaggatgccccgattgagttttctctggtttttctcaggtaaaaaaagcagcaaggtaaacggcctgtacaaacccgacagccgtgagatcgtcatccataaccgcaattttgatcaggacgcggcgggtgagaacctgttgttgtacacagcgatccacgaatacgcccaccatctccatgcctgctctcagggaggcaaactttcgccccgttcgcacacatctgaattttgggcgatcttccacgcgcttctggaaaaagccgagtcaaaaaaaatctaccgtgacgtcttcgccgacgcgccggaacttacagccctgaccgaaaccatccggaaaaagtacctccaggaaaacggcagcctggtcaaggaaatgggcaaacatctattgaaagcgcatgagctctgcaccgcaataggggtgcgttttgaggactatgttgaccgcgtgctgcggataccccgcaccgccgcgaacatggcgatcaaaatgttcaattacgaccttaatccgcagacaggcgcggataatatgcgcttcctcgccggtatccgcgacgccggtgatcgaaaagccgccgagacagccctgcttaaaaacaaaagtccggatacggtaaaaacggcaattcgccaaaaagccaaaaacgaagatcctgtactaatgcttgaacgggaaaaaaaccgccttgaacgcaccatacagacgctttccaaacggcttgaagaagtgaagaaggagcttgggcagaaataa

SEQ ID NO: 45384 - protein, 255 aa, Unknown
  Obtained from environmental sample
  misc_feature (1)..(255): Xaa is any amino acid
MPLRMPRLSFLWFFSGKKSSKVNGLYKPDSREIVIHNRNFDQDAAGENLLLYTAIHEYAHHLHACSQGGKLSPRSHTSEFWAIFHALLEKAESKKIYRDVFADAPELTALTETIRKKYLQENGSLVKEMGKHLLKAHELCTAIGVRFEDYVDRVLRIPRTAANMAIKMFNYDLNPQTGADNMRFLAGIRDAGDRKAAETALLKNKSPDTVKTAIRQKAKNEDPVLMLEREKNRLERTIQTLSKRLEEVKKELGQK

SEQ ID NO: 45385 - DNA, 840 bp, Unknown
  Obtained from environmental sample
  misc_feature (1)..(840): n is a, c, g, or t
atgtattgtgaaattataaatatttctattattaacaaagaaatattcaggcttgatgtaatctggcagggggaagcgcaatcaaaacttgcggcgccaaaggccggacagttttttatgataaagccgaaacggagcgcggtttttctcggcaggccgatctgcgtggcgctctttcagcctgccgttaaagacaaagaatatatccacagaaaagcgcggggaaaaaaaactccataccagaggtacttaacggggaaatatctggaatccgatatagttgtatttttaatcgcaaagataggcaggggaactacggaacttgcctccatgcgaacaggcgaagagatcgaacttatcggcccgcagggaaacgcgtggacggattttttaccagttgaaaaaaacaccgcaaaacccatagccctgatcggcggcggcctgggaattgccccgcttaacgcgctgttatgtgaagaaaccggccacaatttcgttttatacgccggtttcaaaaccggttttaaaagcattgaagaaaaagccactttcgtcgggccggcttttaacgcgcaaaacatcatcattgcgagcgaagacggcaaaatcggaaaaaagggactcatcctcgattttttggagccggaaaaatatgccgccgtttgcgcctgcggcacgctgcccatgttaaaagcagtcgcgaaaaaatgcaaagccaaaggggttccctgttttatcagcatggaaagccggatggcctgcggcgtgggggcttgcctgggatgcacgattaaaactattaacgggaatcgccgttgctgcgccgacgggccttattaa

SEQ ID NO: 45386 - protein, 279 aa, Unknown
  Obtained from environmental sample
  DOMAIN (142)...(235): Oxidoreductase NAD-binding domain
  misc_feature (1)..(279): Xaa is any amino acid
MYCEIINISIINKEIFRLDVIWQGEAQSKLAAPKAGQFFMIKPKRSAVFLGRPICVALFQPAVKDKEYIHRKARGKKTPYQRYLTGKYLESDIVVFLIAKIGRGTTELASMRTGEEIELIGPQGNAWTDFLPVEKNTAKPIALIGGGLGIAPLNALLCEETGHNFVLYAGFKTGFKSIEEKATFVGPAFNAQNIIIASEDGKIGKKGLILDFLEPEKYAAVCACGTLPMLKAVAKKCKAKGVPCFISMESRMACGVGACLGCTIKTINGNRRCCADGPY

SEQ ID NO: 45387 - DNA, 792 bp, Unknown
  Obtained from environmental sample
  misc_feature (1)..(792): n is a, c, g, or t
atggccgaggtgcccgcctacggcgacctaaccgtgggggacggattccaaaagcacagctaccccttcgggataatggtcaacgcatgcggggaccgcttcgtggacgagggcgccgacttccggaactacacctacgccaagtacggccaggagatcctcgcccagcccggccagttcgcctggcaggtcttcgatcacaaggtcgtgcatcttctgcgcgacgagtaccggatccgtgaggtcaccaaagcggtggccgacagcatcgaggacctcgcaacaaagatggaaggtatcgaccctgccggattcctcgccaccgtgaaggagtacaacgctgcggtcctcaccgaagtgcccttcgacccaacggtcaaggacggcagggcgacaactggtttggcgataaacaaatccaactgggccaacccactcgacacgcctcccttctacgcctacgcggttacatgcggcatcactttcaccttcgggggcctgcacatcgacacctccggacgagtcctgagcatcgaaggggagccgatagccggcctttacgccgcgggggagctcgtcggcggactcttctatttcaattatccgggcggctcgggcctgatgtcgggcgccgtgttcggccgagcggccgggaccgatgcggcacgcagcgccgtacggcgccagaacgagcaatcgaaaaccggggaagccagcgccggcgtaccgccagcggacaagctgcctaatgctgcgaatggcacggcgacgatagggaccaccaatcgatga

SEQ ID NO: 45388 - protein, 263 aa, Unknown
  Obtained from environmental sample
  misc_feature (1)..(263): Xaa is any amino acid
MAEVPAYGDLTVGDGFQKHSYPFGIMVNACGDRFVDEGADFRNYTYAKYGQEILAQPGQFAWQVFDHKVVHLLRDEYRIREVTKAVADSIEDLATKMEGIDPAGFLATVKEYNAAVLTEVPFDPTVKDGRATTGLAINKSNWANPLDTPPFYAYAVTCGITFTFGGLHIDTSGRVLSIEGEPIAGLYAAGELVGGLFYFNYPGGSGLMSGAVFGRAAGTDAARSAVRRQNEQSKTGEASAGVPPADKLPNAANGTATIGTTNR

SEQ ID NO: 45389 - DNA, 354 bp, Unknown
  Obtained from environmental sample
  misc_feature (1)..(354): n is a, c, g, or t
atgatcagatcggccgaggaacgtcctcggacggacctgggcgcggccactcaggggatcggcggtgcgctcttcgaggagatcgtctacgacggcccccagatcgtcaacgccaacctggtcgagtaccgggtgccgcgtgtcaccgacatggcggtccggatcgacagccagatcgtcgagcgcggcgacggccccggcccctacggctcaaagccggtcggcgagggagcgatgacagtggtgggaggagcgatgatctcagcggtcgccgccgccactggcgcgtgggccgatcgcctgccgctcaaccccgagagagtgctcgaacttatccggcgaggccagcgttga

SEQ ID NO: 45390 - protein, 117 aa, Unknown
  Obtained from environmental sample
  misc_feature (1)..(117): Xaa is any amino acid
MIRSAEERPRTDLGAATQGIGGALFEEIVYDGPQIVNANLVEYRVPRVTDMAVRIDSQIVERGDGPGPYGSKPVGEGAMTVVGGAMISAVAAATGAWADRLPLNPERVLELIRRGQR

SEQ ID NO: 45391 - DNA, 1149 bp, Unknown
  Obtained from environmental sample
  misc_feature (1)..(1149): n is a, c, g, or t
ttgaagaaggcaccnatgctcaaaaaacagcacggcgaggacaaagtgttcgatttttctcttggaaatcccgatcttgagccacccccggcttttcacagggttttcctgaagctggctaatgaggatagaaaggggtcccacggctacatgagcaacgccggtttccccgaggtgcgggaggctttagcccgaaaagcatccaaagagcacggcgaagacattgacggctctcatatagttatgtcctgcggcgcggcaggtgggcttaacgtagtttttaagtccatcctgaaccctggtgacgaagtcatcgtttcccgcccctactttatggaataccggccttataccgcaaaccacggcggaaaaatagtcgaagtcgatgccctttcggatttcaacctggatgtccagggaataaagacaaaactttctcctcaaactgcggctgtgcttatcaattccccccacaatcccacgggccgcatctaccctgaggaaactattgctgagcttgcggacgctctggaagagcacggcaaaaaatgcggcagaaaaccttaccttgtttccgatgagccttacagggagctggcctacgacggcattgaagtcccgcccgtcctttgccgctattccgaatccatcgttgtcagctcctactcaaaaagcctttccctgccaggagagcgaataggttacattgccgtcggaaagtacatagaggacaagcaaaaccttttaggcgctttaagctacgccactcgtattctcggctttgtaaacgcccctgccctgatgcagcgcattgtcgccgagctgacttccgccaaggtggatgtggacgtatacgccagacggcgggcggcgtttaccaaaatcctcgacgaggcgggaatcgagtacgcgaagccccagggcgctttttatctgttctgtcaagttccccaaaggggaacagtgcccggaagagaaaacaccgacgacctggcttttgtcgatcacctgaaaaagttccttgtccttggcgtgcccggctccggtttcggaaagccaggctggctgcgctttgcctactgcgttgacgaaaagatcataaaagccgcaggcgaagctattaaaaaggccatggaaagctggaagtag

SEQ ID NO: 45392 - protein, 382 aa, Unknown
  Obtained from environmental sample
  DOMAIN (14)...(374): Aminotransferase class I and II
  misc_feature (1)..(382): Xaa is any amino acid
MKKAPMLKKQHGEDKVFDFSLGNPDLEPPPAFHRVFLKLANEDRKGSHGYMSNAGFPEVREALARKASKEHGEDIDGSHIVMSCGAAGGLNVVFKSILNPGDEVIVSRPYFMEYRPYTANHGGKIVEVDALSDFNLDVQGIKTKLSPQTAAVLINSPHNPTGRIYPEETIAELADALEEHGKKCGRKPYLVSDEPYRELAYDGIEVPPVLCRYSESIVVSSYSKSLSLPGERIGYIAVGKYIEDKQNLLGALSYATRILGFVNAPALMQRIVAELTSAKVDVDVYARRRAAFTKILDEAGIEYAKPQGAFYLFCQVPQRGTVPGRENTDDLAFVDHLKKFLVLGVPGSGFGKPGWLRFAYCVDEKIIKAAGEAIKKAMESWK

SEQ ID NO: 45393 - DNA, 336 bp, Unknown
  Obtained from environmental sample
  misc_feature (1)..(336): n is a, c, g, or t
gtgatcgtagatcttttttccgcggtaatttcaggcggacttacgtcaaattatgtaaacagaaaacctgatcatacaggtatctgtcattactttatggcaattgattacggaatattcggcgataaaaccgcaatacgcgcaaacatgtcaaaatttttgcaggaattgagagacagtaaaaaagcagcggggcataaccgtatttacacacacggagaaatggaaacggaattaatggctcaaaggataaacggacaaattcccgtaaatataaaaacactcgaagaaatgcggaaaatagcgcttacgttaaaagtagactttccgttttaa

SEQ ID NO: 45394 - protein, 111 aa, Unknown
  Obtained from environmental sample
  misc_feature (1)..(111): Xaa is any amino acid
MIVDLFSAVISGGLTSNYVNRKPDHTGICHYFMAIDYGIFGDKTAIRANMSKFLQELRDSKKAAGHNRIYTHGEMETELMAQRINGQIPVNIKTLEEMRKIALTLKVDFPF

SEQ ID NO: 45395 - DNA, 1719 bp, Unknown
  Obtained from environmental sample
  misc_feature (1)..(1719): n is a, c, g, or t
atgtcttgggtatcccgcacccgccccgtaattccgctctntgttctgctggggcgcgtttttataatcctctttggctggctgaacggcccagcgttngcagttaatttgataagtgccataagttcaattctatgctgcctgctggtctttgaaataaccgttaaaattttgccaaaagagttggacgagcgtatttactttaaacagagtttacgctgcctgctgggattttttgctgcttcaatttccatttttggcaacactttttggttcagcgcggtggaagctggagcttacgcccccgcaatgctcttgataatgttgcaaatttgggctgttttaaaatggaaggaaacccgtggcaataaatatttgctttttattttatacatagcgtctctggggcttggcgttcacactttttgcttgctgcctttgcccgcaatttttgtttttgttttgttcaatagaattaaattttcggttaagctgttttttgccgctgcatttttaatcgttttgggattttcctctcagttatatttacccattcgttcatccacggaacccattttaaacgaaaataacccagcagaattcaagaattttttagatgtgctaaacagaaagcaatatggcaatatgaatatgtttgagcgggcgttgtatcgcagagctcctcttatcggtcaatttggattttcagcaaacataggttatctgggctatcatttaaaccaatgggtgccagcacctttgggagcgcaaaattttggggcttggagagaaaatcccgtagaaaaattgcaattctttcaccggataatttttgagtttttgctcatagctgtatttgcaggtgtatggctatacagaaaaaactctgctgtggttttggtaagctccatgtttttgctctgctctgctggcttggtgctttatctaaatatggcggatggcacaaggccggatagctataatgtaaagcaatggaactcgcaaataaaggaactgcgaaaatttgtgccggattcaattccagatttgccaagccttaaacagataaatatgcaattctctttttactacgccttgcccggtaatatgcgcggaggctggttgaacaacgcaacggcagcggatgggataaggacatatatggcttgggacgatgctctggaagaacagggcaaaacaatgccttctccgccggaaaacgtccgtagagaagtgcgcaacagggattattttttcacaccggcttttctgttttttgcgataatggctgcggttgcttgcagcacgcttctgcaaaaataccgcaatatggaaagattgattgcgcctctgctcgtctttgcatgggcaatgcctttcatttgcaatttcggtatacacaatcgctcaaaggatttcactgcacgtgactttgcggtcaacattttgaacagtattccgcaaaacggaattctaataacttatggcgacaacgacacattcccgctgtggtatatgcagatggcggaaaattaccgcacggatgtagtggtgataaatgaaattctttcccacggcgaatggtatagagagcagattctaaagaaacatcctaatttaattgaaaatggagatttaattgaaaacaaggaaagttttatgcgcaaagtaatagggggcaattgggctgagggaagtgttaattctcggccgatctga

SEQ ID NO: 45396 - protein, 572 aa, Unknown
  Obtained from environmental sample
  misc_feature (1)..(572): Xaa is any amino acid
MSWVSRTRPVIPLXVLLGRVFIILFGWLNGPAXAVNLISAISSILCCLLVFEITVKILPKELDERIYFKQSLRCLLGFFAASISIFGNTFWFSAVEAGAYAPAMLLIMLQIWAVLKWKETRGNKYLLFILYIASLGLGVHTFCLLPLPAIFVFVLFNRIKFSVKLFFAAAFLIVLGFSSQLYLPIRSSTEPILNENNPAEFKNFLDVLNRKQYGNMNMFERALYRRAPLIGQFGFSANIGYLGYHLNQWVPAPLGAQNFGAWRENPVEKLQFFHRIIFEFLLIAVFAGVWLYRKNSAVVLVSSMFLLCSAGLVLYLNMADGTRPDSYNVKQWNSQIKELRKFVPDSIPDLPSLKQINMQFSFYYALPGNMRGGWLNNATAADGIRTYMAWDDALEEQGKTMPSPPENVRREVRNRDYFFTPAFLFFAIMAAVACSTLLQKYRNMERLIAPLLVFAWAMPFICNFGIHNRSKDFTARDFAVNILNSIPQNGILITYGDNDTFPLWYMQMAENYRTDVVVINEILSHGEWYREQILKKHPNLIENGDLIENKESFMRKVIGGNWAEGSVNSRPI

SEQ ID NO: 45397 - DNA, 702 bp, Unknown
  Obtained from environmental sample
  misc_feature (1)..(702): n is a, c, g, or t
atgaaatttctagtaataattcccacatacaacgaaatggaaaatattccagagattattccctgtattttggagcaaaatgagaatttggaaattctggttgtggatgatggctctccagacggcacaggagattttgttgaaaatttatccaaaggaaacagcagggttcaccttntgcggcgtgaaaaaaagatgggcctcggaacagcctacgtagcaggctttaagtgggcactggaaaaagattacgatagaatttttgaaatggatgcagacggctcccacagcccgcaggcattgaatacttttttgaaagaagcagaaagcgcagatttggttttgggaagccgctatttgaacgggaaaatttcagttgtaaattgggactggaaaagattggttttaagctactgcgcaaatctctacacaagatttgcaacgggaatgcccttttacgatgccacaggtggctttaaatgctttagccgcgaggctctgcaaaaattagaccttggcaaactaaagagcgatggctattgctttcaaatagaaaccacccacactctttggaaaaaaggactcaaaataaaggaaatccccataattttcacagaccgcacaaaaggatcttcaaaaatgagcggtggcataatatctgaggctttctttttggtgctgaaactgagattcaggtcttga

SEQ ID NO: 45398 - protein, 233 aa, Unknown
  Obtained from environmental sample
  DOMAIN (4)...(171): Glycosyl transferase family 2
  misc_feature (1)..(233): Xaa is any amino acid
MKFLVIIPTYNEMENIPEIIPCILEQNENLEILVVDDGSPDGTGDFVENLSKGNSRVHLXRREKKMGLGTAYVAGFKWALEKDYDRIFEMDADGSHSPQALNTFLKEAESADLVLGSRYLNGKISVVNWDWKRLVLSYCANLYTRFATGMPFYDATGGFKCFSREALQKLDLGKLKSDGYCFQIETTHTLWKKGLKIKEIPIIFTDRTKGSSKMSGGIISEAFFLVLKLRFRS

SEQ ID NO: 45399 - DNA, 582 bp, Unknown
  Obtained from environmental sample
  misc_feature (1)..(582): n is a, c, g, or t
atgcgcacaatagagcaaataacgagtaaaggcttgccactgagaggcaacgatatagacacagaccgcattattcccgcaaggtttttaaaaagcgtaacctttgacggtcttggcgaacacgcctttgaagatgatattgaaggcattagcaaacaaggcggcacacatccttttagggattctaaatataaaggggctggtattttggtttccaatcgcaattttggatgcggctccagcagagagcatgcaccgcaagctctctttcgatttgggataaaagcgataatagccgaaagctatagcgaaattttctttggaaactgcgtttccatcggcattccctgttttgttgcaagccacgaaacagcagaggaaattttagattgcatagagaaaaatccatctgttgaattttctgttagcgttaaggagcttaaagccaagtttggagaaaaatcgtataagctcaaattagcagatggaccgcgcgggcagtttttagatggctcttggcacgcccgaagcgttttgcttttgaacaaggaaaaaattgaagctctggcaaattcgttatga

SEQ ID NO: 45400 - protein, 193 aa, Unknown
  Obtained from environmental sample
  DOMAIN (1)...(123): Aconitase C-terminal domain
  misc_feature (1)..(193): Xaa is any amino acid
MRTIEQITSKGLPLRGNDIDTDRIIPARFLKSVTFDGLGEHAFEDDIEGISKQGGTHPFRDSKYKGAGILVSNRNFGCGSSREHAPQALFRFGIKAIIAESYSEIFFGNCVSIGIPCFVASHETAEEILDCIEKNPSVEFSVSVKELKAKFGEKSYKLKLADGPRGQFLDGSWHARSVLLLNKEKIEALANSL

SEQ ID NO: 45401 - DNA, 753 bp, Unknown
  Obtained from environmental sample
  misc_feature (1)..(753): n is a, c, g, or t
ttgacaatccattttggacagtgcgcaatatttacaaagtttgcagaagcaatggtgggtatcgttgatatgaaggtgtatcacggtagcgatacctacattgaaaagattgatttaaagaagtgcaaaccaggcaaagattttgggcgttggttttatgtaacgaatatacgctcacaagctgtggaaatggcagaacgtgtaacgagatggagtaaaaagcaagctgttgtaaccgaatttgaatttgacgaatatgcttgggaagacgaagatttgaatgtgttgcgctttgataaatatgatgaaacatggttggattttatagttagcaaccgcatgcaaaaaggaacaaatcaatctcacgattatgatatagtggaaggtcccattgcagatgatagggttgctcggcgtgtaatgagatacattaagggtagtatttctaaaaccgattttcttgaagatttggttcatagtaagcctacacatcaaatatgtttttgtaccgttaaatctctgcaaatgttggaattgatagataacaccgcanatattgaaatagaggacataagcgaggcgattattaggtctctcttaatagatggaaagataaaaaccgatgaagtgtatgataaatattataattccaatactataaaaaaacttgaaaatcttaattcaatcttgcatcttaagccttggcaagagatttatgagttgctgaagaaggaattgaaaatcaatcgttaa

SEQ ID NO: 45402 - protein, 250 aa, Unknown
  Obtained from environmental sample
  misc_feature (1)..(250): Xaa is any amino acid
MTIHFGQCAIFTKFAEAMVGIVDMKVYHGSDTYIEKIDLKKCKPGKDFGRWFYVTNIRSQAVEMAERVTRWSKKQAVVTEFEFDEYAWEDEDLNVLRFDKYDETWLDFIVSNRMQKGTNQSHDYDIVEGPIADDRVARRVMRYIKGSISKTDFLEDLVHSKPTHQICFCTVKSLQMLELIDNTAXIEIEDISEAIIRSLLIDGKIKTDEVYDKYYNSNTIKKLENLNSILHLKPWQEIYELLKKELKINR

SEQ ID NO: 45403 - DNA, 807 bp, Unknown
  Obtained from environmental sample
  misc_feature (1)..(807): n is a, c, g, or t
atggcgcgggcggataaatccagacaggccgcggtggccgcggacgcgcagacgaatgtgcccaatgactggagaaacgccgagacaaaaaacacctccgcgaagggcgcgaagacaggcacgctggatgaaatgaaggccgccaccgcgctgtttgtttccgcggcggacgcttatgacgacgctgccagaaagagccagcagcaggccgccaaggacaaagacgacgccaacaaggcgctgcaggcggcgatagcgcgtatggagaagtcccgcaaggacgcccaggacgcgaaagccaatgtaaatttgccgaatgactggaataacgccgaaaccaaaaacaggactgcggccgccgccaagcggggcactgtcgccgagattaaggcggcggctcccttgtatatcgcggcggcggacgcttatgatgatctcataaagaaaaatgtggctttcatgagtacgcaagacccaaaaccggcggcggacgccaaggcccgcgcggagcaggaacggcaaaaagcgttagatgtaaaggccaatatagcctccgcggctgaatttaacggcgcggacatgctcttcaaccaggcggagggggatctaaataaaaagtcttttacaacggcggcggaactctataacaagtcggcggatcagtttatggccgccacccttttgacggaaaagaaacggacgcttgccggtgatacggttgaggaagcaaagaagagatcagcccaaagcgcggatttcgcggttaacacaggggttgcgatggagggaaacaatgaaaaaatctag

SEQ ID NO: 45404 - protein, 268 aa, Unknown
  Obtained from environmental sample
  misc_feature (1)..(268): Xaa is any amino acid
MARADKSRQAAVAADAQTNVPNDWRNAETKNTSAKGAKTGTLDEMKAATALFVSAADAYDDAARKSQQQAAKDKDDANKALQAAIARMEKSRKDAQDAKANVNLPNDWNNAETKNRTAAAAKRGTVAEIKAAAPLYIAAADAYDDLIKKNVAFMSTQDPKPAADAKARAEQERQKALDVKANIASAAEFNGADMLFNQAEGDLNKKSFTTAAELYNKSADQFMAATLLTEKKRTLAGDTVEEAKKRSAQSADFAVNTGVAMEGNNEKI

SEQ ID NO: 45405 - DNA, 798 bp, Unknown
  Obtained from environmental sample
  misc_feature (1)..(798): n is a, c, g, or t
ttgccggtgatacggttgaggaagcaaagaagagatcagcccaaagcgcggatttcgcggttaacacaggggttgcgatggagggaaacaatgaaaaaatctaggttattgttaggtgtaattttatccgtatgtttgacggccgcgtccctttcggcggcggaggaaagcgcccagtattcggaatttatcaaggagcttcttaacaaccagtatatgcttgagaatcgcaggctgatagtccttgcggaaaacgcttacaatgacgccaaatatgatgacgcggttaagtacgcgcaggaggccaataaatacgcccaaatgtcagacgagtatgtgcgtctgcagataaagataaaagaggcaaatgacgcgattatggcggcccaggcccgtcttgatagtgtaaaactaacgaacgcccatataaagtacgcggcaatttacgaaaaagcggaagaaattttcgcggaagccctggctcatcgttccaaagaggaatgggatccggcaaaggagtcggcgcttgcggttcttgccattttgtcggaaataccgggtgtcccgattcttcctgcgcaatacgtagttaaaacctggcaaggcacaagagactgtctgtggaacatagccgcgaaaaaggagatttacggagatccctggaagtggagaatcttatacaacgcaaacagggataaattaccgatacccggcaatcccgacctggtagagcccggaacgcttcttgacattcccagcattgcgggcgaatatagagcaggagtattagaagactaa

SEQ ID NO: 45406 - protein, 265 aa, Unknown
  Obtained from environmental sample
  misc_feature (1)..(265): Xaa is any amino acid
MPVIRLRKQRRDQPKARISRLTQGLRWRETMKKSRLLLGVILSVCLTAASLSAAEESAQYSEFIKELLNNQYMLENRRLIVLAENAYNDAKYDDAVKYAQEANKYAQMSDEYVRLQIKIKEANDAIMAAQARLDSVKLTNAHIKYAAIYEKAEEIFAEALAHRSKEEWDPAKESALAVLAILSEIPGVPILPAQYVVKTWQGTRDCLWNIAAKKEIYGDPWKWRILYNANRDKLPIPGNPDLVEPGTLLDIPSIAGEYRAGVLED

SEQ ID NO: 45407 - DNA, 819 bp, Unknown
  Obtained from environmental sample
  misc_feature (1)..(819): n is a, c, g, or t
ttgaacaacgctttccgcgctcttggcagggcaagcagttcggacaaagaaaaagccgacgcggccgcagattttttaattgatttttacaatgaccgcaatgtcggtgaaaacgcgagagagataataatcgctattggcgagacaaagtccccaaaagcggttccccttctctctgggttagcgtccaatccggacgagcgtaccccattgcgaattgccgcgttagacgccctatccagagtaggcgatccggcggggcttgacgcggttctaagctgtataagcacaaacgaccccaatgtgcgttccgccgcggtcgccgctttaggcccgttttcaggcgagaaagtggacaaggccattttggacgctttccgcgattcatattaccgaacccgcatagcggcggcgcaggcaagccgcgagcgtaaacttgtcgcggccgttccatacctgcaattccgcgccgaacgcgacgatgttccgaatgtcaaggacgaagccgttaaggcgttaggtgaaatcgcgaacgatgacgcaatggcggttctggataatttgtttaaggaaagaaaaaactcggatcgtatccgccttatttgcgcgcaaatgctgatgaaaaacgccggccagaaaaatttaacccgcgtaatcatagaacttgacgaggcaaagcaaaaaaaccagacagccctttacaacggtttcttaaaaataatcggagaggctaagattgacggggacacaagcgagatggaaaaacttacgcggcgttttctgcaaacggcggcatattggaaaattgtacggtcttga

SEQ ID NO: 45408 - protein, 272 aa, Unknown
  Obtained from environmental sample
  misc_feature (1)..(272): Xaa is any amino acid
MNNAFRALGRASSSDKEKADAAADFLIDFYNDRNVGENAREIIIAIGETKSPKAVPLLSGLASNPDERTPLRIAALDALSRVGDPAGLDAVLSCISTNDPNVRSAAVAALGPFSGEKVDKAILDAFRDSYYRTRIAAAQASRERKLVAAVPYLQFRAERDDVPNVKDEAVKALGEIANDDAMAVLDNLFKERKNSDRIRLICAQMLMKNAGQKNLTRVIIELDEAKQKNQTALYNGFLKIIGEAKIDGDTSEMEKLTRRFLQTAAYWKIVRS

SEQ ID NO: 45409 - DNA, 1233 bp, Unknown
  Obtained from environmental sample
  misc_feature (1)..(1233): n is a, c, g, or t
atggcaacacccataaaacgtattgaaaaagattttcttttaaaagtgctttacgacgagcaaattcccgtcatgtatttaaaatcgaaaacccaatatattcttatggttgaaaagcccacgaaagggcaaatgttcttcaagtctgaccgcccgattgaaggaataaagagccgcaaaaaacttgatctcatgtttgattaccggggacaggtaattatattttccgtggaagttgttgattataaagatgaacacatcattgccctggaaccggatgccctgtataaaaatctggatcgttctttttccagggtatcaacacctacggatcttcaggtgcagtttacttttcttggggatcgatattcccttacctatccgaaaataacagaatacgacgcgttgaatcctgccgatttaataaataactcagatccaaaaaatttaagcggcttaattgaacaaatggcgcagtggataaaaaattacgccacaaattataagctggtcattttcaaagacaccaagcctgctaccaccgaagaaaaactgcttgcggaatcaggcaaagccctgtacctcccttcaaccctgggaacctttccttccgaagatccctaccctaaaaaaagaattataacgaaagaaattttctataagtacctggaaagcacaggtgtcgatcaaaaatatttagatgaggcctgcgctcgttttgtcgtaaagaaacacaaagccggcgttttctcggatctttgggcgccgattttatttcatgaatatgtgatcggttacattcacatttggatcagcaaagaaggaatgacgccgtttgatcatacagtaatagaaaatatgttccagttctcaaaaattctggcctattcacttaagctcaacgggtattttgaatcagggaaactaagaaacgagtcttttgagggcaagataattgatataagcgcttccggactgctttttacatatcctaattccacttttgccgatacgctgatacccgatagtgaacttgcaatacaactcaagacagatcgccggacggtaaacaccaaggcgaaaattgtgcgccgctataaagacaacattcagaggtacttcggctgcagtttcgttgacctggagcctgaagatctccgcttcctctttgaatttatttacggcaagacttttaccgatgaggacgctgcttttttttcagggcaggtttag

SEQ ID NO: 45410 - protein, 410 aa, Unknown
  Obtained from environmental sample
  DOMAIN (289)...(395): PilZ domain
  misc_feature (1)..(410): Xaa is any amino acid
MATPIKRIEKDFLLKVLYDEQIPVMYLKSKTQYILMVEKPTKGQMFFKSDRPIEGIKSRKKLDLMFDYRGQVIIFSVEVVDYKDEHIIALEPDALYKNLDRSFSRVSTPTDLQVQFTFLGDRYSLTYPKITEYDALNPADLINNSDPKNLSGLIEQMAQWIKNYATNYKLVIFKDTKPATTEEKLLAESGKALYLPSTLGTFPSEDPYPKKRIITKEIFYKYLESTGVDQKYLDEACARFVVKKHKAGVFSDLWAPILFHEYVIGYIHIWISKEGMTPFDHTVIENMFQFSKILAYSLKLNGYFESGKLRNESFEGKIIDISASGLLFTYPNSTFADTLIPDSELAIQLKTDRRTVNTKAKIVRRYKDNIQRYFGCSFVDLEPEDLRFLFEFIYGKTFTDEDAAFFSGQV

SEQ ID NO: 45411 - DNA, 660 bp, Unknown
  Obtained from environmental sample
  misc_feature (1)..(660): n is a, c, g, or t
atggaattcacagtgccgcccggcgcctgcattgggataatcggccccaacggcgcgggcaagaccacgcttttcaaaatcatcaccggaagggagaaagccgacgccgggattctacggcttggtgaaagcgttaagctcgcctgggcggaccaaatgcgggaaggccttgaagacgacaaaaccgtatgggagcagctttcaaacggccttgatataatcaagctgggaggggaaaacggctcaggaggcaaggaagttaattccagggcatattgttcctggtataacttttccggggcagatcagcagaaaaaggtaggcgtactttccggcggcgagcggaaccgacttaacctggcgcttatgctgaaagaaggcgccaatgtcctgcttttggacgagcccacaaacgatcttgatgtgaataccctgcgggcgctggaagacgccattgatacattcgccggggtaagcctggtaattagccacgatcgctggtttttggatcgcattgcaacccacattctggcttttgaagacggagaagttgtgtggtacgacggcaactggtcagagtacgccgagtggcggcgggaaaagctgggagcgcaagcggacagaccgcatcgctatgtatacgncaaactggagcggtag

SEQ ID NO: 45412 - protein, 219 aa, Unknown
  Obtained from environmental sample
  DOMAIN (8)...(182): ABC transporter
  misc_feature (1)..(219): Xaa is any amino acid
MEFTVPPGACIGIIGPNGAGKTTLFKIITGREKADAGILRLGESVKLAWADQMREGLEDDKTVWEQLSNGLDIIKLGGENGSGGKEVNSRAYCSWYNFSGADQQKKVGVLSGGERNRLNLALMLKEGANVLLLDEPTNDLDVNTLRALEDAIDTFAGVSLVISHDRWFLDRIATHILAFEDGEVVWYDGNWSEYAEWRREKLGAQADRPHRYVYXKLER

SEQ ID NO: 45413 - DNA, 537 bp, Unknown
  Obtained from environmental sample
  misc_feature (1)..(537): n is a, c, g, or t
atggataaccagtacggcaagaacgcggttttcttctgcacaaacgacgcccatacggaaccgctgcttaagcagcttttcgcttacggaggattatttgtagaagccgacctacccagcccgctcatggggtatcccggcgctttgggtattgacctttccgccgaggcgggtgatttcccagcgatcctaaagaaagttgaagacgcggttaaagccaagggcggtgcgggcaagttcggaacatgggcattctcttacgggtttaccgcttccgcgggcttgggcgaattcgcaaaacgcgtcctggacgggaaagccaaaatagacagcgcatcggatctctacgcggctctgggcgaatttacccccggcgcgaaatggaacggcggtttctatattgacgccgcaaccggcgtgcgcgccaggaatcagcttcttatttacatggatacttacattatgggcaagggcttcctccccacaaccgcacagactgttccggagaagtattaccagattaagttccagcgttaa

SEQ ID NO: 45414 - protein, 178 aa, Unknown
  Obtained from environmental sample
  misc_feature (1)..(178): Xaa is any amino acid
MDNQYGKNAVFFCTNDAHTEPLLKQLFAYGGLFVEADLPSPLMGYPGALGIDLSAEAGDFPAILKKVEDAVKAKGGAGKFGTWAFSYGFTASAGLGEFAKRVLDGKAKIDSASDLYAALGEFTPGAKWNGGFYIDAATGVRARNQLLIYMDTYIMGKGFLPTTAQTVPEKYYQIKFQR

SEQ ID NO: 45415 - DNA, 1599 bp, Unknown
  Obtained from environmental sample
  misc_feature (1)..(1599): n is a, c, g, or t
atgagtgatgtaccgttattacggcttgaaggtatcactaaagatttttacggcgccacagttctttccggcataggcttttcccttaatcagggtgaaattttgggccttgtcggagagaatggggccggtaaaacaacaatgatgcacatactcttcgggatgtcggatattatcaataccggaggtttcggcggctcaatttttatcgaaggtaagccggttacattncaatcgccctttgaggccctggacgccggtattggcatggtacatcaggaattttcccttatacccggttttacggcttgtgaaaatattgtgctgaaccgggagccgaccctttttaacgcggcggtggagcttttcggtgaaaggctcgccaccctcaaccgccccaggatgcgtgagcgctcggaaaaaaccattgccaaactgggcgtgaatattaccccggacactctggtaatggagatgcccgtggcccacaagcagttcacggaaatcgcccgcgaaatcagccgcgaccaggtaaaaattctggtgctggacgagcctacggcggtgcttaccgaaaccgaagccgacatactcctggaaagcctgaagcgcctttccggcgaaggcatagggatcatttttatttcccaccgccttcatgaggttacaaaaatctgccaccgggttttggtgctcagggacggacaggtaatccgggacacgccgaacaaagatctgtcggtgcaggatattaccacctggatggtaggccgtgaaatttcaggccgccccgccgacagcgttaggcgcaatcttgagggcgaagcctttaaggtggaaaatctttgggtggacatgcccggcgaaaccgtgcgggatgtttcattctcggtaaggaaaggggaaattttcggcattgggggtcttgcgggccagggaaaactgggcatccccaacggcatcatgggccttttcgcggcgggcggcaaagcgtggatagacggcgaaagcctggaactgggctctcccaggaggatacttgacgcgggcgtcgcctttgtttccgaagaccgccgtggcgtgggccttttaatggatgagagccttgagtggaacatcgctttcgggatcatgcagatcaaaggccgtaatttgaaaaaattcttcggcgggcttttcagcctgcgggacgaaaaagccatgcgtcatcttgccgaggaatacatcaaaaagctggaaataaaatgcaccggatcaaagcaggccgccaaagagctttcgggcggcaaccagcagaaggtatgcctttccaaagcttttgccctggaaccaaaactcctctttgtttccgaacctacgcggggcatagacgtgggggcaaaaaagatcgtgctggacaccctgcgcttttataatcagagcaagggaacgacaattgtaatgatttccagcgagcttgaggaacttcgctcaatatgcgacagaatcgccattgtggacgaagggaagatcgcgggaattttaccgcctgagtcgcctgcggcggaattcgggttgttgatgtcgggtgagaagaagggaagagctaatggtatttag

SEQ ID NO: 45416 - protein, 532 aa, Unknown
  Obtained from environmental sample
  DOMAIN (301)...(502): ABC transporter
  misc_feature (1)..(532): Xaa is any amino acid
MSDVPLLRLEGITKDFYGATVLSGIGFSLNQGEILGLVGENGAGKTTMMHILFGMSDIINTGGFGGSIFIEGKPVTXQSPFEALDAGIGMVHQEFSLIPGFTACENIVLNREPTLFNAAVELFGERLATLNRPRMRERSEKTIAKLGVNITPDTLVMEMPVAHKQFTEIAREISRDQVKILVLDEPTAVLTETEADILLESLKRLSGEGIGIIFISHRLHEVTKICHRVLVLRDGQVIRDTPNKDLSVQDITTWMVGREISGRPADSVRRNLEGEAFKVENLWVDMPGETVRDVSFSVRKGEIFGIGGLAGQGKLGIPNGIMGLFAAGGKAWIDGESLELGSPRRILDAGVAFVSEDRRGVGLLMDESLEWNIAFGIMQIKGRNLKKFFGGLFSLRDEKAMRHLAEEYIKKLEIKCTGSKQAAKELSGGNQQKVCLSKAFALEPKLLFVSEPTRGIDVGAKKIVLDTLRFYNQSKGTTIVMISSELEELRSICDRIAIVDEGKIAGILPPESPAAEFGLLMSGEKKGRANGI

SEQ ID NO: 45417 - DNA, 432 bp, Unknown
  Obtained from environmental sample
  misc_feature (1)..(432): n is a, c, g, or t
atggaaagaataccgcttacttcggttattcgaatcgatgagcaaaagtgcgtcaactgttacgcctgtattaccggctgtccggttaagtactgcatggacggctcaaaagaaaaagtcatcataaactcagacctttgtatcggctgcggaaactgtattacagtctgtcatcacgaagcccgccaccttgtggatgacacctctcattttttttcggacctgaaacggggagacaacattatcgccattgtcgcgccggctgtcgcgtcggttttccccggcaagcacctcaaccttaacggctgccttaaatcaatgggcgttaaagatttttttgacgtaagcctcggcgcggaactcaccgttttcatacctcaatttattcaggcaaaaaagccgaagcggtcctcggccaatctgtcatggtaa

SEQ ID NO: 45418 - protein, 143 aa, Unknown
  Obtained from environmental sample
  DOMAIN (40)...(63): 4Fe-4S binding domain
  misc_feature (1)..(143): Xaa is any amino acid
MERIPLTSVIRIDEQKCVNCYACITGCPVKYCMDGSKEKVIINSDLCIGCGNCITVCHHEARHLVDDTSHFFSDLKRGDNIIAIVAPAVASVFPGKHLNLNGCLKSMGVKDFFDVSLGAELTVFIPQFIQAKKPKRSSANLSW

SEQ ID NO: 45419 - DNA, 1119 bp, Unknown
  Obtained from environmental sample
  misc_feature (1)..(1119): n is a, c, g, or t
atgagatttgacaaaatgggggcaagctatcagggtgatccggccagcgcccttctgnaagtgctggatccggaacagaatgtcgctttcagggatcattatctggatatgccttttgacatttcccatattttctttattgttacagctaacaccctggacacaattccgcccccgcttctggaccgcatggagataatacagcttcccggctatatcgacacggaaaagctggaaatcgcccgcaggtaccttgtccccaaaagccttgagaaaaacggcctgaaaaaaaaccaggtcaagtacaccaaggacagccttttgcatatagccaactcctacgcccgcgaggccggcgtcaggaattttgaaaaaaaccttgacaagattcaccgcaagctggcgaagcagatagttgaggagagggagaaagccgacgggaacggcgttccaggagaagacgccgctgccgcgaagcccgtcatattccccatagataaaaagctgattgagaagcatttgggcaagcctgtcttcccagaaggcgacataaaaaaagcggacaggccgggaatgtcggtggggcttgcctggacaagcatgggcggcgacaccctggtaatcgaggcgacttcggttccgggcaaagaagggctgacccttacaggcaaaatgggcgacacgatgaaggaaagcgccgccatcgccatgaccgtggcgcgcaagctggccgtagaacgttaccgggtcgcgcaggactggtttgatttcaaccatatacacctgcacattcccgaaggcgccacgcccaaagacggcccctcggccggaataacgatggcaacggccctgctttccttgatgcgggagcaggttgttaccgaccggctggtaatgaccggagagctttccctgaccggccaggtgctgcccataggcggccttaaagaaaaaaccgtcgccgcccggcggaacagggcgcggcacatcattattccccgtcaaaatgaacgggatttggacgatattcctgattatgtaaaaaaagacatcagttttcacccggttgaacgctttgaagaagtgctggcgttggctttacccgaccacagccgttaa

SEQ ID NO: 45420 - protein, 372 aa, Unknown
  Obtained from environmental sample
  DOMAIN (164)...(369): Lon protease (S16) C-terminal proteolytic domain
  misc_feature (1)..(372): Xaa is any amino acid
MRFDKMGASYQGDPASALLXVLDPEQNVAFRDHYLDMPFDISHIFFIVTANTLDTIPPPLLDRMEIIQLPGYIDTEKLEIARRYLVPKSLEKNGLKKNQVKYTKDSLLHIANSYAREAGVRNFEKNLDKIHRKLAKQIVEEREKADGNGVPGEDAAAAKPVIFPIDKKLIEKHLGKPVFPEGDIKKADRPGMSVGLAWTSMGGDTLVIEATSVPGKEGLTLTGKMGDTMKESAAIAMTVARKLAVERYRVAQDWFDFNHIHLHIPEGATPKDGPSAGITMATALLSLMREQVVTDRLVMTGELSLTGQVLPIGGLKEKTVAARRNRARHIIIPRQNERDLDDIPDYVKKDISFHPVERFEEVLALALPDHSR

SEQ ID NO: 45421 - DNA, 1071 bp, Unknown
  Obtained from environmental sample
  misc_feature (1)..(1071): n is a, c, g, or t
gtgaaaactgatgtctttttttacataatcaggaatatcgtccaaatcccgttcattttgacggggaataatgatgtgccgcgccctgttccgccgggcggcgacggttttttctttaaggccgcctatgggcagcacctggccggtcagggaaagctctccggtcattaccagccggtcggtaacaacctgctcccgcatcaaggaaagcagggccgttgccatcgttattccggccgaggggccgtctttgggcgtggcgccttcgggaatgtgcaggtgtatatggttgaaatcaaaccagtcctgcgcgacccggtaacgttctacggccagcttgcgcgccacggtcatggcgatggcggcgctttccttcatcgtgtcgcccattttgcctgtaagggtcagcccttctttgcccggaaccgaagtcgcctcgattaccagggtgtcgccgcccatgcttgtccaggcaagccccaccgacattcccggcctgtccgctttttttatgtcgccttctgggaagacaggcttgcccaaatgcttctcaatcagctttttatctatggggaatatgacgggcttcgcggcagcggcgtcttctcctggaacgccgttcccgtcggctttctccctctcctcaactatctgcttcgccagcttgcggtgaatcttgtcaaggtttttttcaaaattcctgacgccggcctcgcgggcgtaggagttggctatatgcaaaaggctgtccttggtgtacttgacctggttttttttcaggccgtttttctcaaggcttttggggacaaggtacctgcgggcgatttccagcttttccgtgtcgatatagccgggaagctgtattatctccatgcggtccagaagcgggggcggaattgtgtccagggtgttagctgtaacaataaagaaaatatgggaaatgtcaaaaggcatatccagataatgatccctgaaagcgacattctgttccggatccagcacttncagaagggcgctggccggatcaccctgatagcttgcccccattttgtcaaatctcatcgatcatga

SEQ ID NO: 45422 - protein, 356 aa, Unknown
  Obtained from environmental sample
  misc_feature (1)..(356): Xaa is any amino acid
MKTDVFFYIIRNIVQIPFILTGNNDVPRPVPPGGDGFFFKAAYGQHLAGQGKLSGHYQPVGNNLLPHQGKQGRCHRYSGRGAVFGRGAFGNVQVYMVEIKPVLRDPVTFYGQLARHGHGDGGAFLHRVAHFACKGQPFFARNRSRLDYQGVAAHACPGKPHRHSRPVRFFYVAFWEDRLAQMLLNQLFIYGEYDGLRGSGVFSWNAVPVGFLPLLNYLLRQLAVNLVKVFFKIPDAGLAGVGVGYMQKAVLGVLDLVFFQAVFLKAFGDKVPAGDFQLFRVDIAGKLYYLHAVQKRGRNCVQGVSCNNKENMGNVKRHIQIMIPESDILFRIQHXQKGAGRITLIACPHFVKSHRS

SEQ ID NO: 45423 - DNA, 804 bp, Unknown
  Obtained from environmental sample
  misc_feature (1)..(804): n is a, c, g, or t
gtgtttatcaaaaaagaacagggaactggctgcgcgattcaaaaaaagattcaaaaagaaattaatgaaaaaattgaaaaatcccagcgggattattttctcaaggaagaactcaaggcgataaagggagagcttggaatgaccacagacgccaagagttctgattatcagcgattcaaggaaaaaattgacgctttcaaatttgaaggggaaataaaagagatagttgatcaggaacttgaaaagtttaatctgatggaaccaaattccgcggaatttatagttacgcgcaattatcttgatatgattgtcagcctgccctggactgaaccaaaatctgaaagttttaacatgaagaacgcccaggcgattttggaagctgaccattatggccttaaagatgttaaaagccggatagtggaataccttgccgtgcggaaactgagaagcagtttggcagaaagtacatcccctgtgaaaaacaagactgctgtagaagacaaggtttcttcagaaggcaaagcttcttcagaagacaagacatcttcagaagccaagatttccataggaacttcagtttcccaggggtccattatttgtctggttgggccgcccggtgtcgggaagacttcggttggcaagtccattgcccgcgctctgggcaaacagtttttccgtttttcggtcggtggaatgcgtgatgaagctgagataaaaggccaccgccgcacctacatangcgcgatgccgggtaaaattattcagggacttaagatcatcaagacaaagacccggtattcatga

SEQ ID NO: 45424 - protein, 267 aa, Unknown
  Obtained from environmental sample
  misc_feature (1)..(267): Xaa is any amino acid
MFIKKEQGTGCAIQKKIQKEINEKIEKSQRDYFLKEELKAIKGELGMTTDAKSSDYQRFKEKIDAFKFEGEIKEIVDQELEKFNLMEPNSAEFIVTRNYLDMIVSLPWTEPKSESFNMKNAQAILEADHYGLKDVKSRIVEYLAVRKLRSSLAESTSPVKNKTAVEDKVSSEGKASSEDKTSSEAKISIGTSVSQGSIICLVGPPGVGKTSVGKSIARALGKQFFRFSVGGMRDEAEIKGHRRTYIXAMPGKIIQGLKIIKTKTRYS

SEQ ID NO: 45425 - DNA, 600 bp, Unknown
  Obtained from environmental sample
  misc_feature (1)..(600): n is a, c, g, or t
gtgaatgctcctcatcatagacgaaatgagtcggtagggcttcccgtcagttacacggaagtaaagattgtaaatccgggaccggacggcattggcgagattgcctgtaagtcgccttctataatgctgggatattttgaaaacgaagaagcgacaaaagaaattattaccgaagacggctggcttttaacaggcgaccttggcttccgtgatgaagacgggtacatctatattcgcggacggaagaaaaatcttattgtcggttccggcgggaaaaatgtataccccgaagaagtcgaggcgcactttgccggtttacgttcaattgccgaaatacttattgtcggcagaaaaacatccggcggggaaattatttacgccgttatagttcccaattatgaattgataaaagaagattatcccggcatggaaaataacgacgactatatttttaatctggtaagaaaagaaattgatgaagtaaatcgatccttgccggtttttaaaaagatcagcgatttttgtatacggaaagagccgtttgaaaagaacgcccagcaaaaaataaggcgtttcatgtacaagaattacgagaactaa

SEQ ID NO: 45426 - protein, 199 aa, Unknown
  Obtained from environmental sample
  misc_feature (1)..(199): Xaa is any amino acid
MNAPHHRRNESVGLPVSYTEVKIVNPGPDGIGEIACKSPSIMLGYFENEEATKEIITEDGWLLTGDLGFRDEDGYIYIRGRKKNLIVGSGGKNVYPEEVEAHFAGLRSIAEILIVGRKTSGGEIIYAVIVPNYELIKEDYPGMENNDDYIFNLVRKEIDEVNRSLPVFKKISDFCIRKEPFEKNAQQKIRRFMYKNYEN

SEQ ID NO: 45427 - DNA, 444 bp, Unknown
  Obtained from environmental sample
  misc_feature (1)..(444): n is a, c, g, or t
ttgcttttggaagatatgaacgacgagccgatacggatttttatagattctcccggcggagacgcggacgcaggctacgctatttttgatatgattcgttttgtaaagccgaaaatttggacaatcggcatgggacttgtcgcaagcgccgcggctatcattcagcttgccgctccaaaggaaagacgcgtaggactgccgaacagccactaccttatccaccagccgctttcagggattcgaggcgtcgcaacggacattgaaatccacgcaaaagaacttgaaaaactgcgggagaaaataaaccgcctaatcgcggaagaaacaggcaactccgtaactcaggttgaaaaagacacagaccgcgactattggatgaacgcggcggaagctgtgaaatacggattaatcagcaaagtaataacaaaccggtctgagctttag

SEQ ID NO: 45428 - protein, 147 aa, Unknown
  Obtained from environmental sample
  DOMAIN (3)...(144): Clp protease
  misc_feature (1)..(147): Xaa is any amino acid
MLLEDMNDEPIRIFIDSPGGDADAGYAIFDMIRFVKPKIWTIGMGLVASAAAIIQLAAPKERRVGLPNSHYLIHQPLSGIRGVATDIEIHAKELEKLREKINRLIAEETGNSVTQVEKDTDRDYWMNAAEAVKYGLISKVITNRSEL

SEQ ID NO: 45429 - DNA, 303 bp, Unknown
  Obtained from environmental sample
  misc_feature (1)..(303): n is a, c, g, or t
atgggtattacattggaaaaaagccgtaaatttgcgataaggatttataacctttacaagtacctttgcggagaaaaaaaggaatacgtccttgcaaaacagctattacgttccggcacatcaataggcgcaaacctaaccgaagcccaatattcggttagcaagaaagaattttgggtaaaagcaaaaatcgcattaaaagaatgtgccgaaaccgaatactggcttgaccttctcaaagagataaatatattaaatcagaatgagtatgacagtataataattgactcgtgccgattctga

SEQ ID NO: 45430 - protein, 100 aa, Unknown
  Obtained from environmental sample
  misc_feature (1)..(100): Xaa is any amino acid
MGITLEKSRKFAIRIYNLYKYLCGEKKEYVLAKQLLRSGTSIGANLTEAQYSVSKKEFWVKAKIALKECAETEYWLDLLKEINILNQNEYDSIIIDSCRF

SEQ ID NO: 45431 - DNA, 423 bp, Unknown
  Obtained from environmental sample
  misc_feature (1)..(423): n is a, c, g, or t
ttgactaatggattaaatatgttcaaatttgttcgttatttggccggtttatcagaaaatattgtttatacagacgaattaaacaatctcgcgcaacatggggcggttatccttgccaaattaggacagttaacacattcgccttcaaagcccgatgatatggatgaggctttttacaaaaaggctaaagaaagcacagggtcgtcaaatatctacatgagtagtgcgaagtctggtactttagaagaggccgtaagaaatttttgcgatgattccggcgaaagtaatatcggagcacttggtcatagacgctggatgcttaatcccccacttggaaaagtaggatttggctacgcaacatcattgactggtatttttatcccaataaaaatttttgacaatagcaatacgggaaaaaactga

SEQ ID NO: 45432 - protein, 140 aa, Unknown
  Obtained from environmental sample
  misc_feature (1)..(140): Xaa is any amino acid
MTNGLNMFKFVRYLAGLSENIVYTDELNNLAQHGAVILAKLGQLTHSPSKPDDMDEAFYKKAKESTGSSNIYMSSAKSGTLEEAVRNFCDDSGESNIGALGHRRWMLNPPLGKVGFGYATSLTGIFIPIKIFDNSNTGKN

SEQ ID NO: 45433 - DNA, 738 bp, Unknown
  Obtained from environmental sample
  misc_feature (1)..(738): n is a, c, g, or t
atgctctctgccgtaagtaccatacacacagaaaaaatctgcaaaacttatggcggcagaaccgttgttagagacgtttctttgagcgtttctagaggcgaaatagtggggcttttggggcctaatggagcaggcaaaacaacatctttttatatgatagttgggcttgttaaaccagacaaggggcatgtatttttagattcacaagacataagctatttgccaatgcacagccgcgcaaaactaggccttggctatcttccgcaagaggcttctattttccgcaaactttcggtggaaaataatataatggcaattttggaaactcttaaattgaaccgcaagcaacgcaaagaaaggctggagcagttgctggaagaatttaaaataacgcatataagaaaaaccatttcgcacagttgttccggtggcgagcgcagaaggctggagatagcgcgagcactagcgagcgagccgggctttcttttgctagacgaaccttttgccggcatagacccaatagcagtggatgatattaaatcaataataagcacattgagagcgaaaggcatgggagttttgataacagaccacaatgttagggaaacgctttcaataacagatcgtgcctacgttatgtacaaaagcgaggtgcttactgaaggcacctcacagtttttggctaatgatgaagaggcaaagagaatttatcttggcgaatcattctctttgggttga

SEQ ID NO: 45434 - protein, 245 aa, Unknown
  Obtained from environmental sample
  DOMAIN (33)...(216): ABC transporter
  misc_feature (1)..(245): Xaa is any amino acid
MLSAVSTIHTEKICKTYGGRTVVRDVSLSVSRGEIVGLLGPNGAGKTTSFYMIVGLVKPDKGHVFLDSQDISYLPMHSRAKLGLGYLPQEASIFRKLSVENNIMAILETLKLNRKQRKERLEQLLEEFKITHIRKTISHSCSGGERRRLEIARALASEPGFLLLDEPFAGIDPIAVDDIKSIISTLRAKGMGVLITDHNVRETLSITDRAYVMYKSEVLTEGTSQFLANDEEAKRIYLGESFSLG

SEQ ID NO: 45435 - DNA, 321 bp, Unknown
  Obtained from environmental sample
  misc_feature (1)..(321): n is a, c, g, or t
atgctaaccggctctatgggtcttttgccaagtgcaagcatagcagaaggtgattttggactttacgaacccgcaggcggttccgcaccagatatcgcaggcaaaggcatagcaaacccaatagcacaaatactctcagctgcccttatgcttcgctacacctttaaagaagaagcagcggcaaaagcaattgagcaggcagttgaagatgttatatcaaaaggcattcgcaccggagatatctgggttgaaggccaaaaaaaggccagtacagaagaaatgggaaacgcagttatggaaactctatgctctctgccgtaa

SEQ ID NO: 45436 - protein, 106 aa, Unknown
  Obtained from environmental sample
  misc_feature (1)..(106): Xaa is any amino acid
MLTGSMGLLPSASIAEGDFGLYEPAGGSAPDIAGKGIANPIAQILSAALMLRYTFKEEAAAKAIEQAVEDVISKGIRTGDIWVEGQKKASTEEMGNAVMETLCSLP

SEQ ID NO: 45437 - DNA, 657 bp, Unknown
  Obtained from environmental sample
  misc_feature (1)..(657): n is a, c, g, or t
ttgtttttttttgaaattgaaatgggtcgggtttgtggcgcagcttatgatttacacaagcacccgctgccaaaaagtacaataaaaattgcagaggccgcccaagccatactatttggctcggtnggtggacanaaatggaaaaaactgccaccggactnccacnccgaaaggggcgcgcttttgccgcttcgcaagcattttaaactttattgcaatttgagacccgcaagagtgtacaaggctctcgccagtgcctgcccgctaagagcagatattgtaggcgatggttttgatatcctatgcgttagggaattgacgggagatgtctattttgggcagccaaaaggcagagagggcacaggagaaaacgaaaaaggctttgacacaatggtttatagccgctacgaggtggaacgcatagcccgctttgcttttgaagccgcaagcctccgcagaaaaaaacttgcaagcatagacaaagccaatgttttgaccactagcgttttttggcgcgaaattgttaaagaaatatcaaaagaataccctcaaattgaacttgaacatatatatgtggacaatgcggctatgcagctcataaaacgcccacgggactttgatgttatgctctgccccaacctattgggcgatatctaa

SEQ ID NO: 45438 - protein, 218 aa, Unknown
  Obtained from environmental sample
  DOMAIN (2)...(218): Isocitrate/isopropylmalate dehydrogenase
  misc_feature (1)..(218): Xaa is any amino acid
MFFFEIEMGRVCGAAYDLHKHPLPKSTIKIAEAAQAILFGSVGGXKWKKLPPDXHXERGALLPLRKHFKLYCNLRPARVYKALASACPLRADIVGDGFDILCVRELTGDVYFGQPKGREGTGENEKGFDTMVYSRYEVERIARFAFEAASLRRKKLASIDKANVLTTSVFWREIVKEISKEYPQIELEHIYVDNAAMQLIKRPRDFDVMLCPNLLGDI

SEQ ID NO: 45439 - DNA, 333 bp, Unknown
  Obtained from environmental sample
  misc_feature (1)..(333): n is a, c, g, or t
atgggcacggcgcgcatagagcaatgggatgacatccgcgaattggccctcatgagcatcgggaccgacaagggcacctggtgggccgatccgggcttcggcagcgagctgtggctgctgcggaaaaacggcaaagtggacggccagactgccgggacccttaggcggatggtgctcgaaagcctccaatggattgtccagggctcccttgcaaagaaaatcgactgcgcggccgagcgcaccggcaaaaacgaaatacgctatagcgtcgctatcttccgcccggacgggaacagcgtcccacttataacggaggtatggcgtgccgtttaa

SEQ ID NO: 45440 - protein, 110 aa, Unknown
  Obtained from environmental sample
  DOMAIN (10)...(107): Phage protein GP46
  misc_feature (1)..(110): Xaa is any amino acid
MGTARIEQWDDIRELALMSIGTDKGTWWADPGFGSELWLLRKNGKVDGQTAGTLRRMVLESLQWIVQGSLAKKIDCAAERTGKNEIRYSVAIFRPDGNSVPLITEVWRAV

SEQ ID NO: 45441 - DNA, 861 bp, Unknown
  Obtained from environmental sample
  misc_feature (1)..(861): n is a, c, g, or t
atggaatacgaaatggtaataggcttggaagtccacgcccagctgctcacgaagaccaagcttttttgcggttgcaccaccccgttcggcgacccgcccaactcccacgggtgccccgtgtgtctcggcctccccggcgcccttccggcgctcaatcgggcggcggtggagatggcggtgcgtatggggttggcgctcgggtgcggtatcaataccaagtcgatcttcgcccgtaagcactacttctaccccgaccttcccaaggggtatcagatatcgcagctcgacatccctatatgcgtgtccgggacgctgcctatagtcgttgacgggcgggaatcgtccatccgcgtcaaccgcgttcacatggaggaggacgccggcaagcttgtgcacgaccaggacgtcgattcgctcttcgacgcgaaccgttgcggcagtccgctcattgagattgtctccgagccggatatgcgcagtccgcaggaggcatacgcctatctcatggggcttaagcagatactcgagtacctcggcgtctgcgattgcaacatggaggagggcagtctgcgttgcgacgccaatatttcgttacgtcccaagggggagagcaaactcggcaccaagactgaaataaagaacatgaacagcttccgcaatctcgaaaaggcgcttgaatacgaggcgaagcggcaggaggaggtgctgaggtctggcgggcacgtcgtgcagcagaccttcttgtggaacccgggcgaaaaccgttccgtcccgatgcgcaccaaggaagacgcggatgactaccgctacttccccgaccctgaccttatgccgctcgttgtggaggcggcttgggtttga

SEQ ID NO: 45442 - protein, 286 aa, Unknown
  Obtained from environmental sample
  DOMAIN (1)...(239): PET112 family, N terminal region
  misc_feature (1)..(286): Xaa is any amino acid
MEYEMVIGLEVHAQLLTKTKLFCGCTTPFGDPPNSHGCPVCLGLPGALPALNRAAVEMAVRMGLALGCGINTKSIFARKHYFYPDLPKGYQISQLDIPICVSGTLPIVVDGRESSIRVNRVHMEEDAGKLVHDQDVDSLFDANRCGSPLIEIVSEPDMRSPQEAYAYLMGLKQILEYLGVCDCNMEEGSLRCDANISLRPKGESKLGTKTEIKNMNSFRNLEKALEYEAKRQEEVLRSGGHVVQQTFLWNPGENRSVPMRTKEDADDYRYFPDPDLMPLVVEAAWV

SEQ ID NO: 45443 - DNA, 2352 bp, Unknown
  Obtained from environmental sample
  misc_feature (1)..(2352): n is a, c, g, or t
atgcaaattttcgccctatatacaataaaagaaaaaagaaaaatgaagaatgaaaaaagtgaagattcttatgtcttacttttttcttttttctctcttcttttttctctcgaatatggaggcatgatggggattcagaataaatataatagagaagccgggaagccaaaggctgcggaactggtctgcgctttgccctgggcgtactgcgtgccaatcaaagaggagatctcggataccctgacgatcgagcattgcgtcgtagtacacaaggatggctgcgtacagcaagcctacgggttccggggacatgatctggaaagtttcagcgcgacatatatcaattcggtaaccgcgtattttaatgagtcagtgaagcggctgggagacggctggatggtttcggtagaggcgcagaggtatatcacaagcgattatcctgaaagtgattttgatattgaggccgggtatttaatcgaacaggagcgaaaggagagttttaaagagtatgggaatcattttgacacgtcgtattatataaactttgtgttcaaacctgatatggaaatcaagcgcaaaatgacgaaaattttttttacggaaatccagtttgaaaaggcgcaggacgacattatcgaacaatttatgaaggaggttaaaagggtaacaagcgtgttggaatctaaattaatcatcaggccgcttggctacgtggagacggtgaattatttacattcaacggtgtcaatgaggcgctttaatatcgcagttccggatcactttttgtttctggataccttcatcagcgatatgccgctgcatatagggcagacgctcaagctggaagataattttataccgatattggcgataaatgactttcctatggagacctatccttcgatcctgcatgagctgaacaaaagttacattgaataccgctgggtgtccaggtatttccccctggaaaaaacagaggctatgaaggagctggaaaaatggcagggaaaacaccacggggcaaggaaaagcaccaagcagctcatggctgaaatggcgatggacgtgcagacccacaaggaaaatgcaggggccggcgagctggaaaacgatgtcggcgaggcaatgaaggaattgacaatggattatgtgggtttcgggtattacaactccagcataatgacatgggatactgattatgaaaaggcaatgcaaaagctggcgaacctgcggacagtaatagaaagcgccgggtttacctgcaaagaagaaagttttaacgcgtataacgcttttctgggcatgacagccggcgacattcacagaaacatacgccgtccgctgatcaattcgggcaatttcgcccacgtgctgcccttgtccgcggtttgggctgggatggcgcagaacagctttacaggcgaggtatgcggtgtggacgccccgcttgttacatgctcgaccaattacggaacgccgttttttctcaatctgaatgacggcgacgtaggtcattcattgatattcggccccacaggttcgggcaagtctaccattatagggcttttggcggcgagctttttgaagtatccggacggccaggtgtttattatcgacaagggggctagcgccctgacaatgaccctcgctgctggcggcgaatatgtggatccgtcagcgacagaacattgtttccagccattaggcgacattgataccgaaccggacaaggcctgggcctgtgatttcatcgcgacgctgctggaaatgcaaaacataactgtactgcccaaaatgctcgtgcagatccgcgtaacaatagagctaatgtccgcgatggaaaagcaccggcgcaccctgaccactttcaaacagacctgcatgtacagggatgagaataccggccaaaaccccattgacgacgccgtccagccctatacgctggaaggcccctacggccgcatctttgacggcgacgctacaaggatcaacgacagccgctggatcctcttcgagatgagcgaactgatggaactcaaggacaaggtggtggccccagcgatcatgttcctgttccattttctggagaaacgcttcatggggcaaatgacgcttctggtcgtcgatgaggcctggcgtttccttgacaacgaggtgtttcggaacaagatgcgccaatggcttaaagaactgcggaagaagcacgtattctgcgtgttttccacacaggaagtcgcggacggcgcgaacagccctatcgccagcacgctgatccagaactgcccgaccaaaatttatctcgccgaccccgaggcgtataacaatgcggaagcgtacagaaattcggactga

SEQ ID NO: 45444 - protein, 783 aa, Unknown
  Obtained from environmental sample
  DOMAIN (221)...(445): CagE, TrbE, VirB family, component of type IV transporter system
  misc_feature (1)..(783): Xaa is any amino acid
MQIFALYTIKEKRKMKNEKSEDSYVLLFSFFSLLFSLEYGGMMGIQNKYNREAGKPKAAELVCALPWAYCVPIKEEISDTLTIEHCVVVHKDGCVQQAYGFRGHDLESFSATYINSVTAYFNESVKRLGDGWMVSVEAQRYITSDYPESDFDIEAGYLIEQERKESFKEYGNHFDTSYYINFVFKPDMEIKRKMTKIFFTEIQFEKAQDDIIEQFMKEVKRVTSVLESKLIIRPLGYVETVNYLHSTVSMRRFNIAVPDHFLFLDTFISDMPLHIGQTLKLEDNFIPILAINDFPMETYPSILHELNKSYIEYRWVSRYFPLEKTEAMKELEKWQGKHHGARKSTKQLMAEMAMDVQTHKENAGAGELENDVGEAMKELTMDYVGFGYYNSSIMTWDTDYEKAMQKLANLRTVIESAGFTCKEESFNAYNAFLGMTAGDIHRNIRRPLINSGNFAHVLPLSAVWAGMAQNSFTGEVCGVDAPLVTCSTNYGTPFFLNLNDGDVGHSLIFGPTGSGKSTIIGLLAASFLKYPDGQVFIIDKGASALTMTLAAGGEYVDPSATEHCFQPLGDIDTEPDKAWACDFIATLLEMQNITVLPKMLVQIRVTIELMSAMEKHRRTLTTFKQTCMYRDENTGQNPIDDAVQPYTLEGPYGRIFDGDATRINDSRWILFEMSELMELKDKVVAPAIMFLFHFLEKRFMGQMTLLVVDEAWRFLDNEVFRNKMRQWLKELRKKHVFCVFSTQEVADGANSPIASTLIQNCPTKIYLADPEAYNNAEAYRNSD

SEQ ID NO: 45445 - DNA, 525 bp, Unknown
  Obtained from environmental sample
  misc_feature (1)..(525): n is a, c, g, or t
atgattcaaaagattattttcaaacaatttttggaacaaacctttcccgatagcgccgaggcgctttgcgggatgtttgagcggtaccacgcttggttggtatccgagaataacaagatcaacttgttctcacggcagatggatgttgacgatatatggacggtgcattttttggactcactcctgtcaaccaagtacgtagacttccgcggacgcaacttgttggattttggaacgggcggcgggctgccgggtatcccgctggccattgtctttccggacgcgagggtcactctgctcgactcaaagaagaagaagatcgctgcggttacggaggcggcggagacgttagggcttgagaattgcgcgttttcggatcaacggattgaggatatcgccgctcggagcagttttgacatcatcgtctcccgctccgtcaagatcgaaccggcctataaaccgatattacttaaactactcaaacccgaagggaagattgttctttataagagcccggatttttga

SEQ ID NO: 45446 - protein, 174 aa, Unknown
  Obtained from environmental sample
  DOMAIN (75)...(168): Methyltransferase domain
  misc_feature (1)..(174): Xaa is any amino acid
MIQKIIFKQFLEQTFPDSAEALCGMFERYHAWLVSENNKINLFSRQMDVDDIWTVHFLDSLLSTKYVDFRGRNLLDFGTGGGLPGIPLAIVFPDARVTLLDSKKKKIAAVTEAAETLGLENCAFSDQRIEDIAARSSFDIIVSRSVKIEPAYKPILLKLLKPEGKIVLYKSPDF

SEQ ID NO: 45447 - DNA, 864 bp, Unknown
  Obtained from environmental sample
  misc_feature (1)..(864): n is a, c, g, or t
ttggtttgtaatgtgctgacggacgcccattgccaccccttcgacctttccccccttttccctaaaatggaacaggaacgccgcaagctgggagtcattgcggcggcaagttcttacaacacggaagaatttacacataacgatataatagcgcataacgccgccgcagaagaaaacgccgcaccgttactgctctgcttcggcgttcatcctcagttgcccgccgtaaagaaaaaagaaggcaatccgtttacggaaacagacttaaatgacagcgttaccattttacaaaacctcgcagaggcgggcaaaatagccgcaataggcgaatgcggctttgacctttacaatgcggagtttaaggagaccgaaaaaacgcaagacgctctgtttgcggcgcatttggaaattgccgttaaatacggcttgcctgtagttcttcatgtacgccgagccatgcacaaaatttttgccgccgaaaaagaattgtcaaagtgcaaagccgttattttccattcatggtcaggtacgcttgaagaagcccgctctctattacgccacggcattaacgcctatttttcctttggaaacacaattatgctaaaccacaaacaggcaattcaatgctgttcttcacttccggtggaaagactgctgacagaaaccgacgccccctttcagccaaggagaggcgaaaaattttcaacgtgggcggacttgcctttgatactcatggcggcggcggaatttcgcgataaaggtggggagaaaattgaagtgagtgagttggaaagacagattgaggagaattttagtaatgcttttgccataaaccacaataaattaaatttaaatagtatataa

SEQ ID NO: 45448 - protein, 287 aa, Unknown
  Obtained from environmental sample
  DOMAIN (5)...(276): TatD related DNase
  misc_feature (1)..(287): Xaa is any amino acid
MVCNVLTDAHCHPFDLSPLFPKMEQERRKLGVIAAASSYNTEEFTHNDIIAHNAAAEENAAPLLLCFGVHPQLPAVKKKEGNPFTETDLNDSVTILQNLAEAGKIAAIGECGFDLYNAEFKETEKTQDALFAAHLEIAVKYGLPVVLHVRRAMHKIFAAEKELSKCKAVIFHSWSGTLEEARSLLRHGINAYFSFGNTIMLNHKQAIQCCSSLPVERLLTETDAPFQPRRGEKFSTWADLPLILMAAAEFRDKGGEKIEVSELERQIEENFSNAFAINHNKLNLNSI

SEQ ID NO: 45449 - DNA, 789 bp, Unknown
  Obtained from environmental sample
  misc_feature (1)..(789): n is a, c, g, or t
atgctctccaaaccgcaggagcgtatcggcgacattatggacaccaatcttgtttttgcgcatacgaccgacgatcaggaggccattgcggagcaatttaaaaaatactcccttttggcgatgcccgttgttgacaaggagcaaaggcttgtgggcattataacggtagacgacattgtagacgttatagtcgaggaaagcacggaagacatcgaaaagatgaacgccctcgccccttctgacgatccgtatctgaaaacgggcgttttacgcctagccagaaaccgcatcatctggcttttggttttgatgctttccgcgaccataaccggcattatcatttccgattttgaaaacggacttgcggccctgcccatccttgtggcgtttatccccatgctcatggacactgggggcaacgccggttcccaatcttcaacccttatcatccgcggtttggcgataggtgaaatcagcccaaaagatattatccgcgttatatggaaggaagtgcgcgtggccttggtatgcggactggcccttggaatagtcaattttatacgcatctatataatgaacgggcaaaaccttatgttatgcgtcaccgtcaccttgtccgtgtgctgtacgattctaatagcaaaaaccgtaggatgcgttttacccttagttgcaaagtgcctgaaaattgaccctgccgtcatggcggcccctcttatcaccaccatcgtagacgcggtatcgctaataatttactttttattcgccaaagcgattcttggtttgtaa

SEQ ID NO: 45450 - protein, 262 aa, Unknown
  Obtained from environmental sample
  DOMAIN (11)...(168): CBS domain pair
  misc_feature (1)..(262): Xaa is any amino acid
MLSKPQERIGDIMDTNLVFAHTTDDQEAIAEQFKKYSLLAMPVVDKEQRLVGIITVDDIVDVIVEESTEDIEKMNALAPSDDPYLKTGVLRLARNRIIWLLVLMLSATITGIIISDFENGLAALPILVAFIPMLMDTGGNAGSQSSTLIIRGLAIGEISPKDIIRVIWKEVRVALVCGLALGIVNFIRIYIMNGQNLMLCVTVTLSVCCTILIAKTVGCVLPLVAKCLKIDPAVMAAPLITTIVDAVSLIIYFLFAKAILGL

SEQ ID NO: 45451 - DNA, 633 bp, Unknown
  Obtained from environmental sample
  misc_feature (1)..(633): n is a, c, g, or t
gtggtagatcccccttcgatcatcgccacccatctgaccgagattatcaggcggcatgccgcggagatcctcggcctgcaggacacccagtcgattcttgacactctccgcaaggaataccccgctgtggtggacgaggttatgcggcctgagctgaaaatacccgtcgttaaaattcagagaatactccacggcctgctgaaggaaagggtttcgatccgcaatatggtgacgatactggaagcggttgccgaatacgcgccgctttcaagcaatgtccagtttcttacggaaaaagtccgccaggcgctgggcagccagatttgccatcagtatactgatgacaaccacaaactgcgggtgctcacgatcgcgccggaactggaacagaaaatcatcgaaagcaagtacgaaacatcttccggcatggtatgcgcctgggaaccgcaggtgcagaccgcgtggatcaaggctgtaacaaaatccgcccaggcggtaaggagcaggggataccagcccgttatactctgttccgagcaggcgcgtttcctggttaagaattcaacggatcgtgaattgcctgatttggcgggtcttttccgtcccggaaattgttactggaattattcctga

SEQ ID NO: 45452 - protein, 210 aa, Unknown
  Obtained from environmental sample
  DOMAIN (1)...(200): FHIPEP family
  misc_feature (1)..(210): Xaa is any amino acid
MVDPPSIIATHLTEIIRRHAAEILGLQDTQSILDTLRKEYPAVVDEVMRPELKIPVVKIQRILHGLLKERVSIRNMVTILEAVAEYAPLSSNVQFLTEKVRQALGSQICHQYTDDNHKLRVLTIAPELEQKIIESKYETSSGMVCAWEPQVQTAWIKAVTKSAQAVRSRGYQPVILCSEQARFLVKNSTDRELPDLAGLFRPGNCYWNYS

SEQ ID NO: 45453 - DNA, 858 bp, Unknown
  Obtained from environmental sample
  misc_feature (1)..(858): n is a, c, g, or t
atgatgggaacaattattaagcgtcttttagtttttttcatcggagttccggttattgtttttttggttatatatcttccgcacttacatcaacttgcgtttaacgttatcgtaatactcttctctgctctgggcgcggttgaatttgccgctatactggaaaaaaagcaaatgcgcgtttcaataattgaagctgttatctttggttcttttgctcctttggcttatacgctaattatttgttttgattttccgttatggataattcctttatatatcatgtcggccgtatgctgggtaatgctgtcattggcgttttcagggcaggcaaaaatggagaacgccataaaccgccttgccggatgtttttccgtgataatctacccgggtcttttcatgtcatggcttgtaagaatgagcgtatgggaaatttcaggcgctattctttttttcttattaattgtattcggcaacgattccgcggcatggcttgccggttctcttttcggcgcgaacaacaaaggcatatttccggcaagtccgaataaaagcgcagccggctttataggcggaataataggcgcgataataatttccgcaggcgcggcattgctgactccgtttatttttccgggaaatgataacattgccaaaataattatccttggcgtcattacagccgttttcggaaatctgggagatttggcggaatccgcaattaaaagaagcgttaatattaaagattccggcaacatgatgctggggcgcggcggaattctggattcaatcgactccgcctcgcttgcggctccggtatactttcttctttttaacatatttttttataacttccaatga

SEQ ID NO: 45454 - protein, 285 aa, Unknown
  Obtained from environmental sample
  DOMAIN (6)...(280): Cytidylyltransferase family
  misc_feature (1)..(285): Xaa is any amino acid
MMGTIIKRLLVFFIGVPVIVFLVIYLPHLHQLAFNVIVILFSALGAVEFAAILEKKQMRVSIIEAVIFGSFAPLAYTLIICFDFPLWIIPLYIMSAVCWVMLSLAFSGQAKMENAINRLAGCFSVIIYPGLFMSWLVRMSVWEISGAILFFLLIVFGNDSAAWLAGSLFGANNKGIFPASPNKSAAGFIGGIIGAIIISAGAALLTPFIFPGNDNIAKIIILGVITAVFGNLGDLAESAIKRSVNIKDSGNMMLGRGGILDSIDSASLAAPVYFLLFNIFFYNFQ

SEQ ID NO: 45455 - DNA, 570 bp, Unknown
  Obtained from environmental sample
  misc_feature (1)..(570): n is a, c, g, or t
atgggcataaaatacctgacgctttacgcgttttcaacggagaactggaaacgcgcttccgacgaggtaggatttatcatgagccttataaaacagtaccttcgcgcggaatttgacttcagcaaaaaaaataaaatccgcgtgcgccatgccggagatattacagggttgcccaaagatattcaaaaagaaattacggatacaataagggatacggcggattttgacgggctgcaggttgttcttgccataaattacggcggcagggacgaaataaaaagggcaattggaaaattgtttgcggcaggcaaagacatggcggcattgcgcgaagaagatatcagcgcgtatctggacaatcccgacattcccgatcccgatttaattatacgcagcgcgggcgaataccgcacaagcaatttcctgctttgggaaggagcttattcggaaatttatatttctaagaaattctggccggattgggaaaaagaagatttagaggccgctatagacgatttcttgggacgggaccggcgttttggcagcgtaagcgcggcaagtcaggagtaa

SEQ ID NO: 45456 - protein, 189 aa, Unknown
  Obtained from environmental sample
  DOMAIN (1)...(182): Putative undecaprenyl diphosphate synthase
  misc_feature (1)..(189): Xaa is any amino acid
MGIKYLTLYAFSTENWKRASDEVGFIMSLIKQYLRAEFDFSKKNKIRVRHAGDITGLPKDIQKEITDTIRDTADFDGLQVVLAINYGGRDEIKRAIGKLFAAGKDMAALREEDISAYLDNPDIPDPDLIIRSAGEYRTSNFLLWEGAYSEIYISKKFWPDWEKEDLEAAIDDFLGRDRRFGSVSAASQE

SEQ ID NO: 45457 - DNA, 555 bp, Unknown
  Obtained from environmental sample
  misc_feature (1)..(555): n is a, c, g, or t
atgcaaagcgtcatttcctcccacgaagaaaagatgaaaaaatcggtggcaagcctgaaagaaggatttgcctccttaagaacaggccgtgcttcagcggcgctgtttgacaggctgcgcgtggattgttacggcgaaaaatcacctttgaaccaggttgcgaatatttccgtaccggaagcccgccttatcgtcattcagccgtgggataaaagccttatcggagaaattgaaaaggcaatccgctcttcagaactttcacttaacccgtcaaacgacggtaaggtaatccgtatttccgtccctccccttacggaggagcgccgcaaagagcttgtcaaactcgcgaagaatcaagctgaacaatcaagggtttccatacgcaacatacgcagggacggcaacgacgaactgaaaaaacttcttaaagactcaaagattaccgaagacgaagaatccaaagatacggcggaactgcaaaaattaaccgattcctacatagctcaggttaatcangttttggaagaaaaagaaaaagagataatggaagtgtaa

SEQ ID NO: 45458 - protein, 184 aa, Unknown
  Obtained from environmental sample
  DOMAIN (18)...(182): Ribosome recycling factor
  misc_feature (1)..(184): Xaa is any amino acid
MQSVISSHEEKMKKSVASLKEGFASLRTGRASAALFDRLRVDCYGEKSPLNQVANISVPEARLIVIQPWDKSLIGEIEKAIRSSELSLNPSNDGKVIRISVPPLTEERRKELVKLAKNQAEQSRVSIRNIRRDGNDELKKLLKDSKITEDEESKDTAELQKLTDSYIAQVNXVLEEKEKEIMEV

SEQ ID NO: 45459 - DNA, 1077 bp, Unknown
  Obtained from environmental sample
  misc_feature (1)..(1077): n is a, c, g, or t
gtgatactcttgaccggatttttattccggtattggaacgggctgttttttcgatccgtgacaggaagctggaattgtcaaaaaataccctggatctccttgaaaaaatggacttgctttatctgctgcaggaaaacggaggcggccgcaatgcggacaaatagcggttccggcaaaggcgacgcgagtattattctgcttattgccattgttttgctttttgtagggggcattgttgtagcgatctacacattacgcagcgatcctgtcgaggagatactgtatagcgacagggtgatcaccgtgctttatgtcattgagaaagaagggaagccccttagtacctttgttcttttatactacggcaaaacccagaaagcggcgatttttgacgttcccggcgagctttgggtgctgatccggcgcataaaccgttatgaccgtattgacgccgtatatgagccgggcaaggtttccgcttatgagaccgagatcgagcgtcttttgggattggatattgctttctctgtcgtgattggcatagataatctggtcaaagctgtcgaccttattgaaggagttgaggtttttatcccctcaaaggtagcgataaatgatgagaataatatggtttttttcccttcagggatatgccgccttgatggggacaagtcaaaggtatatataagttatacagcccccaatgaagatcgcgagatggcgacattccgccgtcagagattctttcttggatttcttaaacgccaggcggagatgcataataaacttaataaccgcgccgttcttcaaacatacctgtcttttatgcaaaacaacctgaaccagcgggcaaagaaccgtttgcttgaagaatttgcgcgaatagacgtggacaggatcaatatacagacagtagggggaaatctgcgggaagtggcgggaaagatacagcttgtcccttattatgacggaaaccttgtgaaggatattgtcaggcaggttttgagcacgcttaccaatcctgccgaaggtcttcacgtgacagggttatacggggaaatctctcggccaatctga

SEQ ID NO: 45460 - protein, 358 aa, Unknown
  Obtained from environmental sample
  DOMAIN (114)...(259): Cell envelope-related transcriptional attenuator domain
  misc_feature (1)..(358): Xaa is any amino acid
MILLTGFLFRYWNGLFFRSVTGSWNCQKIPWISLKKWTCFICCRKTEAAAMRTNSGSGKGDASIILLIAIVLLFVGGIVVAIYTLRSDPVEEILYSDRVITVLYVIEKEGKPLSTFVLLYYGKTQKAAIFDVPGELWVLIRRINRYDRIDAVYEPGKVSAYETEIERLLGLDIAFSVVIGIDNLVKAVDLIEGVEVFIPSKVAINDENNMVFFPSGICRLDGDKSKVYISYTAPNEDREMATFRRQRFFLGFLKRQAEMHNKLNNRAVLQTYLSFMQNNLNQRAKNRLLEEFARIDVDRINIQTVGGNLREVAGKIQLVPYYDGNLVKDIVRQVLSTLTNPAEGLHVTGLYGEISRPI

SEQ ID NO: 45461 - DNA, 1239 bp, Unknown
  Obtained from environmental sample
  misc_feature (1)..(1239): n is a, c, g, or t
gtgagactggcaatactgggcggcagctttaacccgattcatcttgggcatctgttccttgcggatgcggttttatctgaattgcgctatgaccgcgtggtgatggttcccgcgtatatttctcctttcaagccggctgctccgggcatggaagacagcgcccaacagcgtctggaaatgatcgccgcttccattaccgcggatccccggctttccgttgacgcctgcgagatcaggcgggaaggggtttcctatactgtggacacggtcgctgacattatccgccgttacaatccggacggcaaaccgggactcatcattggcgatgatctgatcggggatttccccaaatggtataagagcgatgagattctctctatggcggatataatcatcgcgcggcgcgtacattcgggcggactggaagttccttatcccaatacccagataaccaatgatgttattggaatttcatcaggcgcggtaagggaaaaaatcgcgtcaaactcggcatggcgttatcttgtacccaatgccgcaaggatagtaatcgaagacaggaaactttacggttaccgcggctcaaccgctgatgtcccccgagtcgcaacaattaaatccctcatccagcatattgaggatgaagcgcgtgaaagcattagcctgacgcgttacctccattcccggcatactgcgctattggcctgggatctatgctgccgtttcaggaaggattacccctcccttgacccggaactgggttatttattggggattgcccacgatctgtgcaagcagttatgcgacgatgaacagatcaggctggcaaaaatatacggcggagaaatatcgcccgtggaaagagtaaagccgtcgttgctgcacggcaaggcctgcgcggttgtattaaaggagcgtttcagaattgatgatgaggaggcgctgaaagcggtagcctggcatacagaaggccacaaggatatgggtcctttggcaaaggtattgtatattgccgataaaatggaggtatcgagggtaaaagtcgatcctgccgtcagaaaacaaatattggcaggtgatactcttgaccggatttttattccggtattggaacgggctgttttttcgatccgtgacaggaagctggaattgtcaaaaaataccctggatctccttgaaaaaatggacttgctttatctgctgcaggaaaacggaggcggccgcaatgcggacaaatag

SEQ ID NO: 45462 - protein, 412 aa, Unknown
  Obtained from environmental sample
  DOMAIN (224)...(344): HD domain
  misc_feature (1)..(412): Xaa is any amino acid
MRLAILGGSFNPIHLGHLFLADAVLSELRYDRVVMVPAYISPFKPAAPGMEDSAQQRLEMIAASITADPRLSVDACEIRREGVSYTVDTVADIIRRYNPDGKPGLIIGDDLIGDFPKWYKSDEILSMADIIIARRVHSGGLEVPYPNTQITNDVIGISSGAVREKIASNSAWRYLVPNAARIVIEDRKLYGYRGSTADVPRVATIKSLIQHIEDEARESISLTRYLHSRHTALLAWDLCCRFRKDYPSLDPELGYLLGIAHDLCKQLCDDEQIRLAKIYGGEISPVERVKPSLLHGKACAVVLKERFRIDDEEALKAVAWHTEGHKDMGPLAKVLYIADKMEVSRVKVDPAVRKQILAGDTLDRIFIPVLERAVFSIRDRKLELSKNTLDLLEKMDLLYLLQENGGGRNADK

SEQ ID NO: 45463 - DNA, 642 bp, Unknown
  Obtained from environmental sample
  misc_feature (1)..(642): n is a, c, g, or t
gtggtaggtgaaatctatgtgcgccgcgacgattttgccgtaggagaactaatagacctaatgagcgaacgcggcattgtcgtaaaagtggccggcattagcgaatggatacattaccttgattatatgcgcgaatattcccttaacaagcttattaatctgcgcccgcgcggaaaaagaatgttctctgttccgtggaaaaaacttaaaacgcttcaaattgaaaagtggtggaagcaccatatcgaaaaaaagacgctggctattttacagccgactcatcttattcccgaaacgccccatgatatgcgccatataatgacatttacccaggaacactttgtaaatctggaactaaattccgagattgctgtctcttccggttcagcggccgcggcgatggacgccggttattcgggcattgtaaacataagcccgtttgcctgccttatcgggcgcgtaattgaaggcttatttactccgtgggcgcgcgagcgcaattatccgattttatcggtggaagtggacggcaaccttctgccgccgaacattgtaaacaaactaaacatatttatggttaatgttctgcgatttaaggggggaagcgatctttcttctttggtcgatgaggcttcttcatga

SEQ ID NO: 45464 - protein, 213 aa, Unknown
  Obtained from environmental sample
  misc_feature (1)..(213): Xaa is any amino acid
MVGEIYVRRDDFAVGELIDLMSERGIVVKVAGISEWIHYLDYMREYSLNKLINLRPRGKRMFSVPWKKLKTLQIEKWWKHHIEKKTLAILQPTHLIPETPHDMRHIMTFTQEHFVNLELNSEIAVSSGSAAAAMDAGYSGIVNISPFACLIGRVIEGLFTPWARERNYPILSVEVDGNLLPPNIVNKLNIFMVNVLRFKGGSDLSSLVDEASS

SEQ ID NO: 45465 - DNA, 1005 bp, Unknown
  Obtained from environmental sample
  misc_feature (1)..(1005): n is a, c, g, or t
atggttttaagcccgaaagttaagggaactgtttcatggcaggacgagtatactcttgtttttactccttccgaaagctataaacagggacagcagtacaatgttactgtaaacattggggcgattccgtcttttagttttactttttcagctgcgcttcccgttttttttgtagaacttgaacctgtacagttaggagacgatgattatgtcgttgtggctggaagagtcaatgtcgatgaagacgcggaaatttccaaaatagaacaaactgtcagttcaaaagagttgggtaaaatttcatggacgcataccgacggcgttcaccgttttgtttttgagcctgtcaaacgcggcgaggtttccagaactgttgaagttacatggaaaggaaaacccttgggaacgagcggagacggttttactaccgtaatgattcccggtttggatattttccaaatgcttgatattcaatttaataacaatataatcgaggtttctttttcaaaaaatcttaagtctaatcaggatttaagaggatttatttctcttgccaataatacggacgtacgttattcgctggaaggaaatattgttaaaattttcggaaataattccggcggcattcccgcgggcgcggaacttgtaattcaggatttggtagatgtggacggcaaacgtttaagcactccggttcagtatacgattccggattcatgggaattaccggaaatacgttttgccggaaacggcgctattctgccgacaagccagggagcgcagcttgtaatcgaaaccagaaatgttacgggcattttggtggaagcgtttcaaatttacaatcaaaatatggtttattttttgcaatccaacgaccttgcggacgattccgaacttgatcgcgtgggagagcctgtgtggtcaaaagcttttgatttccaatgggctgcctcggatcaaaaccgttggatgcgccgcgggctggatatggcggaaactcagtag

SEQ ID NO: 45466 - protein, 334 aa, Unknown
  Obtained from environmental sample
  misc_feature (1)..(334): Xaa is any amino acid
MVLSPKVKGTVSWQDEYTLVFTPSESYKQGQQYNVTVNIGAIPSFSFTFSAALPVFFVELEPVQLGDDDYVVVAGRVNVDEDAEISKIEQTVSSKELGKISWTHTDGVHRFVFEPVKRGEVSRTVEVTWKGKPLGTSGDGFTTVMIPGLDIFQMLDIQFNNNIIEVSFSKNLKSNQDLRGFISLANNTDVRYSLEGNIVKIFGNNSGGIPAGAELVIQDLVDVDGKRLSTPVQYTIPDSWELPEIRFAGNGAILPTSQGAQLVIETRNVTGILVEAFQIYNQNMVYFLQSNDLADDSELDRVGEPVWSKAFDFQWAASDQNRWMRRGLDMAETQ

SEQ ID NO: 45467 - DNA, 966 bp, Unknown
  Obtained from environmental sample
  misc_feature (1)..(966): n is a, c, g, or t
gtggacggattttattctcttgcggctgtcaccgcgtccgacgctcccaccggagactggaccgcgagagtgagagttggcggcaaaacatttaacaaaaacataaaaatagaaaccattatgccaaacagattaaaaatcgatcttgattttggcgcaaatgaatttattaaaagcggttctcaaaaaattcctttggaatcacaatggctntacggcgcgccggcttccggtttaaaagccgatgtttccgccgtttatgtggacaaagaaacaacattcaaaggatatgaggattattctttccgcgatccttccagaggtatttcgacggaacgtcagaacatttggagcggaaatcttgacagcgaaggaaaagcgatagtaacaatgaattttaatcccggacccgccgttcccggcagagtaacggcgcggtttatgacgaggatttttgagccgtcgggcgtattttcatcggaacaaatcagcaaggagtattcgccttacagccgttatgtcggaataaaactgcccaaaggcgacacaagggatatgctgcttaccgatacggatcacaaggcggatatagtaattcttgatgaagacggaaaaccgcttcgcggaaacgttgagcttgattgcgcgatttataaaataaattggcgctggtggtgggaaaaaggagaagacgagtccgcggaatttacatcggcgctttccagcactccgatttcacgtcaaactgttaccgccgcaaacggcaaggcgacttttactttcaatataaagtatcccgattggggacgctacattgtgatagccaaagacagtaaaggcggacacgcggcggctaaaacggcgtacattgattggcccggatgggcgggacgcgcgcgggatgaaggtcagggttcgcagtcaatgttgacattaactaccggaaaaccgacattaacacagtga

SEQ ID NO: 45468 - protein, 321 aa, Unknown
  Obtained from environmental sample
  misc_feature (1)..(321): Xaa is any amino acid
MDGFYSLAAVTASDAPTGDWTARVRVGGKTFNKNIKIETIMPNRLKIDLDFGANEFIKSGSQKIPLESQWLYGAPASGLKADVSAVYVDKETTFKGYEDYSFRDPSRGISTERQNIWSGNLDSEGKAIVTMNFNPGPAVPGRVTARFMTRIFEPSGVFSSEQISKEYSPYSRYVGIKLPKGDTRDMLLTDTDHKADIVILDEDGKPLRGNVELDCAIYKINWRWWWEKGEDESAEFTSALSSTPISRQTVTAANGKATFTFNIKYPDWGRYIVIAKDSKGGHAAAKTAYIDWPGWAGRARDEGQGSQSMLTLTTGKPTLTQ

SEQ ID NO: 45469 - DNA, 777 bp, Unknown
  Obtained from environmental sample
  misc_feature (1)..(777): n is a, c, g, or t
atggaaagcacctacggcgaccggcgccacgattccactgacgacgccctgaaaaaactcgcggaaatagcaaagcggactgtggaaaaaaaaggaaaaattttaatcccttcattcgcgattgagcgcacgcaggaacttgtttattatttccacattttaacggacgagggcatcattcccgaagtgccgatatacgtagattcaccgatggcaactaacgctacgacgatttttcaggttcaccctgaatgttacggcgaagaaataaaacaggcttttataaaacatcataaaaacccgtttggttttaacagtctgcactttataacaagcgtagatgaatcaaaggcgctaaatgaacaaaaggggccgcttatcattatttccgcggacggaatgtgcgaagcggggcgcatacagcaccaccttattcacaatatacaggaccctaacacgacaattatgaccgtgggctacatggcggaaaatactcttggacggcgtatccgcaaccgtgagagcgaggtgaagattcacggcgaatggttcaagttaaaagcgcaggtcgaggaaattaacgcgttcagcgcccatgccgattattatgaaatactggaatggcttaaggctcttgacacatcgcgcttaaaagggatttttttggttcacggcgaaaagaaggctcaggcttttttgcagaaataccttaaagaaaacggcttcccgaatgtggatatagtgaagtacgggaaaacttatgaattgacttcttaa

SEQ ID NO: 45470 - protein, 258 aa, Unknown
  Obtained from environmental sample
  DOMAIN (182)...(228): RNA-metabolising metallo-beta-lactamase
  misc_feature (1)..(258): Xaa is any amino acid
MESTYGDRRHDSTDDALKKLAEIAKRTVEKKGKILIPSFAIERTQELVYYFHILTDEGIIPEVPIYVDSPMATNATTIFQVHPECYGEEIKQAFIKHHKNPFGFNSLHFITSVDESKALNEQKGPLIIISADGMCEAGRIQHHLIHNIQDPNTTIMTVGYMAENTLGRRIRNRESEVKIHGEWFKLKAQVEEINAFSAHADYYEILEWLKALDTSRLKGIFLVHGEKKAQAFLQKYLKENGFPNVDIVKYGKTYELTS

SEQ ID NO: 45471 - DNA, 333 bp, Unknown
  Obtained from environmental sample
  misc_feature (1)..(333): n is a, c, g, or t
atgaaagaattttttaagtcatctgaagatgtttttatttggttgtcaaaatttataaatcttgagagggggcagacgcctaagagtttcaggattgacaggatggaattcctgacgcatcttgcgggaaatccgcataagcttatgccttccattcacatagcaggatcgaagggcaaagggtctgtaacggggatgtcggcctcaatactgaccgcggcgggttaccgcgtcgcccgctatatgtcgccgcatgtcatcgacatacgcgagaggatttgccttaatcattcatatttcagcgaagacgtatacccgcgccgcgngaaatga

SEQ ID NO: 45472 - protein, 110 aa, Unknown
  Obtained from environmental sample
  misc_feature (1)..(110): Xaa is any amino acid
MKEFFKSSEDVFIWLSKFINLERGQTPKSFRIDRMEFLTHLAGNPHKLMPSIHIAGSKGKGSVTGMSASILTAAGYRVARYMSPHVIDIRERICLNHSYFSEDVYPRRXK

SEQ ID NO: 45473 - DNA, 822 bp, Unknown
  Obtained from environmental sample
  misc_feature (1)..(822): n is a, c, g, or t
atgcgtgaaattttggcaagtaatatagcccgctacaggaaagaacagggattaacacaggaagcgctgggtgaaaaattgggtgtttcgttccaggcggtaagtaaatgggaaacaaatcaaactgttccggatacggcattattgcctgaacttgcgcgggcgctcaatataagtattgataaattgctgggatattccgcttttagcagtgatacttcttattatgaagatgattaccgtaaaaaagattattattggggagtagtaccgtctacaatgtgccttaaagtattggaattactgcctcctgaaaaccatgtaaaaattcttgacataggctgcggtgagggaaaagacgcagtattttttgcccgttgcggatatgatgtaagcgcttttgatatttccgaagcgggtctggaaaaaacttttcgcctggcggacaaagcaaatgtaaatgtgcggatttttcgcgcgagtttatgggattatcgtttagatgaaaaatacgatattctttattccagcggggtattgcattatataaaacctgaattacgtgatgaaataatgtcaaactataaagcgaatgtgaacaataaaggcattgtcgctttacacgtatttgtgaaaaaaccatttatcacagctcctccggaaaaggaaaacaacagtcatttatggaagtccggacaactgtttacgtatttccatgattggtattttgaagactgtacagaatacgtttttgactgtaattcagcaggcataccgcaccgtcatgcggcaaatcgtttgtttgccagaaatataagctga

SEQ ID NO: 45474 - protein, 273 aa, Unknown
  Obtained from environmental sample
  DOMAIN (81)...(267): Tellurite resistance protein TehB
  misc_feature (1)..(273): Xaa is any amino acid
MREILASNIARYRKEQGLTQEALGEKLGVSFQAVSKWETNQTVPDTALLPELARALNISIDKLLGYSAFSSDTSYYEDDYRKKDYYWGVVPSTMCLKVLELLPPENHVKILDIGCGEGKDAVFFARCGYDVSAFDISEAGLEKTFRLADKANVNVRIFRASLWDYRLDEKYDILYSSGVLHYIKPELRDEIMSNYKANVNNKGIVALHVFVKKPFITAPPEKENNSHLWKSGQLFTYFHDWYFEDCTEYVFDCNSAGIPHRHAANRLFARNIS

SEQ ID NO: 45475 - DNA, 519 bp, Unknown
  Obtained from environmental sample
  misc_feature (1)..(519): n is a, c, g, or t
atgtattatttattttcgttaataaccggtattttaatttctgttatgatcgcttttaacggcgtacttacagaacactacggcgtatactcggcaacagtcattatacacattgcgggtttggtattgatcacaataatgacaataagtaaacgggaaaatccattttccgggagacaagcatggtatttatatcttggaggcgctattggagtaatgacgacagtctttaataattttgcctttagccgtataagtgtaacttctatattggccttaggcctgtttgggcagagtataacagggttaatagttgaccagtatggattactgaacatgccaaaacacacttttcaaaatcgtaaaatattcggattgctccttattttgattggaataatatccatgattgataattttgatttattggcagtaattttatcctttgttgcgggagtcaacctggttgtatcccgcacattgaacgcgaaacttgctgaaaaacaagcgtccgtatag

SEQ ID NO: 45476 - protein, 172 aa, Unknown
  Obtained from environmental sample
  SIGNAL (1)...(20)
  DOMAIN (1)...(135): Protein of unknown function, DUF606
  misc_feature (1)..(172): Xaa is any amino acid
MYYLFSLITGILISVMIAFNGVLTEHYGVYSATVIIHIAGLVLITIMTISKRENPFSGRQAWYLYLGGAIGVMTTVFNNFAFSRISVTSILALGLFGQSITGLIVDQYGLLNMPKHTFQNRKIFGLLLILIGIISMIDNFDLLAVILSFVAGVNLVVSRTLNAKLAEKQASV

SEQ ID NO: 45477 - DNA, 363 bp, Unknown
  Obtained from environmental sample
  misc_feature (1)..(363): n is a, c, g, or t
ttgatcagattggccgagtcccagctttccggcggaatgcggaaccgcgttttgatggcaaaaaatttgcaaaatgcgggcaatttgcttttgctggacgaaccaaccaacgatttggatatagaaaccttgcaggctctggagcaggctatcctgaattttgccggctgtgccgttgtaatatctcacgataggtggtttttagaccgcattgcaacgcatatcttggcatttgagggcgattccaaagcggtgtggtttgagggcaattggacagattacgaagccgattatcataaacgtattggtatagatgcggataacccaaagccgattaagtataagacgctcaagcggcaataa

SEQ ID NO: 45478 - protein, 120 aa, Unknown
  Obtained from environmental sample
  DOMAIN (2)...(81): ABC transporter
  misc_feature (1)..(120): Xaa is any amino acid
MIRLAESQLSGGMRNRVLMAKNLQNAGNLLLLDEPTNDLDIETLQALEQAILNFAGCAVVISHDRWFLDRIATHILAFEGDSKAVWFEGNWTDYEADYHKRIGIDADNPKPIKYKTLKRQ

SEQ ID NO: 45479 - DNA, 1440 bp, Unknown
  Obtained from environmental sample
  misc_feature (1)..(1440): n is a, c, g, or t
ttgatggatttctttactaaacaagcctacgccatcggcagactttgcctgctcatcgctatcctgtccgccgccctcaattatatcctcaccggtactggccttaaagaaaatgttatcaaaattcttaaagctacactcttcttcttaatcgttaccgccgcttatccaaagattatcggctggatcacttcttacacttttaacctggctaaaggtagcgtctacaaatctgttgatgagcattttaaagaagttacttcggaaattgttacggaatatactcgcttatactctacaggccaaactgatactaacatgatgtactcaaatcaatataaacagccaatgaaaacgttttctgttacctccataactcaaataactaaagataataaaaagctcttttctgaccttacagaagaccgtgaccatacaaacccgaatatgaaatataccgtcgtcgcgccggccgcggttgttaaaattattctttttctcgcaggtgaatgtatcggctttgcggataattcagatgccggatcgtttctaaagaatatccctgatttcagccgcatcattaaagggcttggctgcgccattctccttatctttacaggcgctttcgctctgctcgaatatgtcgtctgtttcttggaatttatgctcgtcgcttccgtcggtataatcctcttccctctttctatttgggaagcaagcaaatttatggcggaaaaatttatcggcgctattgtcggtttctttatgaaacttctcttttgtaatatcgctatcttcctccttatttacgggtttatttctctcttctatattatctcggcaggaaacgacggcggacaacctgttggatttaccggcaatactgaaccaattatctttatcgtttttaccagcatgctttactactttatctgtaagtccgcgccgggcgtcgctcagtctctccttactggttccccaagcctcaatgccgcaggcgctatcggcgccgccgcaggcatggttagcgctgccacggccgcggccggctttgtccaaaataaggtcaactccgcaaagtctaccgcaggctctgtcgtcggcggcatcgctaaaatggggcacggtttagctgaagcaaattccgccgcaaaagctgccggtgaagacggcggcagccgcgcgaatcaggcgggcgctttcatgaaatctctcggtaaacaggcctcgcaaagccttgcccgcagcatatacggagataagagcgaaggcaaaacaatgggcggaattaaagcggacagacaacatgatggcacagataccggtaaagaccacatgaccggcataaaagacaaaatgaataaagcaagacagaaaaagattcctgaaaaaccaacggttcagccgctgccgtctgtcgcgcgtaattcgaacgtataa

SEQ ID NO: 45480 - protein, 479 aa, Unknown
  Obtained from environmental sample
  SIGNAL (1)...(27)
  misc_feature (1)..(479): Xaa is any amino acid
MMDFFTKQAYAIGRLCLLIAILSAALNYILTGTGLKENVIKILKATLFFLIVTAAYPKIIGWITSYTFNLAKGSVYKSVDEHFKEVTSEIVTEYTRLYSTGQTDTNMMYSNQYKQPMKTFSVTSITQITKDNKKLFSDLTEDRDHTNPNMKYTVVAPAAVVKIILFLAGECIGFADNSDAGSFLKNIPDFSRIIKGLGCAILLIFTGAFALLEYVVCFLEFMLVASVGIILFPLSIWEASKFMAEKFIGAIVGFFMKLLFCNIAIFLLIYGFISLFYIISAGNDGGQPVGFTGNTEPIIFIVFTSMLYYFICKSAPGVAQSLLTGSPSLNAAGAIGAAAGMVSAATAAAGFVQNKVNSAKSTAGSVVGGIAKMGHGLAEANSAAKAAGEDGGSRANQAGAFMKSLGKQASQSLARSIYGDKSEGKTMGGIKADRQHDGTDTGKDHMTGIKDKMNKARQKKIPEKPTVQPLPSVARNSNV

SEQ ID NO: 45481 - DNA, 945 bp, Unknown
  Obtained from environmental sample
  misc_feature (1)..(945): n is a, c, g, or t
ttgagttgtctccaagcgcgcgaactcgcggacaagttgaaaacagaagtcagcgccgcgatgttcggcgacaaggtaagcggagaagtttcgcgtctcgcatcaatgggcgcggatcgcgtgtacataatggaagacccacggcttaaattttacacgcccgtaccctacagcaaattgatgattcaaacaatcgaagagttcaaaccgcaaatcgtcctgttcggggcgaccaccgaaggccgtgacctcgccccgcgtgtcgcatcacacttgaaagtcggacttaccgcggattgcaccgatttgcagataggcgaccacactcaaaaagaaaccgagtacaaggacatactttatcagatacgccccgcgttcggcggcaacatcatcgccacgattgtaagccccgagaaaaaaccgcagatggcgacagtccgcgaaggcgttatgcgcatggctcagcccgacaaatcaagaaaagccgaaaccgtcaaaataaaagcaacactcaataccgatgattttgttacggaaataattgagcgcgtaatggaagaaaaaaccgtaaacctgaaaggcgcgcagataatagtttcaggcggcatgggcgtagggagcaaagacaacttcgccctaatccgcgagcttgcccaaaccctcggcgcggaagtaggcgcgtcacgcgccgccgtggatcagggctttatcggcaaggaacatcaggtggggcagacggggacaacggtgcgcccgaaactgtacatcgcctgcggcatttccggggcgatacagcaccgcgccggcatggacggctccgcgagaattatcgccattaacaccgatcccgaagcgccgattttcagcgtcgcgcattacggcatagtgggagacttaaacgatgttatcccaagaatgatcaaagcatacaaggctagagtttaa

SEQ ID NO: 45482 - protein, 314 aa, Unknown
  Obtained from environmental sample
  DOMAIN (2)...(179): Electron transfer flavoprotein domain
  misc_feature (1)..(314): Xaa is any amino acid
MSCLQARELADKLKTEVSAAMFGDKVSGEVSRLASMGADRVYIMEDPRLKFYTPVPYSKLMIQTIEEFKPQIVLFGATTEGRDLAPRVASHLKVGLTADCTDLQIGDHTQKETEYKDILYQIRPAFGGNIIATIVSPEKKPQMATVREGVMRMAQPDKSRKAETVKIKATLNTDDFVTEIIERVMEEKTVNLKGAQIIVSGGMGVGSKDNFALIRELAQTLGAEVGASRAAVDQGFIGKEHQVGQTGTTVRPKLYIACGISGAIQHRAGMDGSARIIAINTDPEAPIFSVAHYGIVGDLNDVIPRMIKAYKARV

SEQ ID NO: 45483 - DNA, 609 bp, Unknown
  Obtained from environmental sample
  misc_feature (1)..(609): n is a, c, g, or t
atggaaaattttttactggataacgatgatattttatttcatttggatcacatcgatcttgatcgcgtaattcaattaaaagaagacaactttgagcaggcgaagcaatacgcccacgctcccagagacattgaggacgcaaaagactcctaccgcagaatcctgtcgatcatcggcgaaatcgccggagagtacatggctcctaacgcccccgccgtcgatgaaagcggcccgacgctcgcgaacaatcaggtaacgctgaaccccgcgacaaaaaaagccctcgacatgatggcgaaagccgacatgatgggctttgttatcccccgcagatacggcggcatcaacatgcctaacacaattttaactataggcgcggacatcttgtcgagggcggacggctcttttctcaacttcggtcttcagcaggacaacgccggaacgatcaacaaattcgcgtcggaagagcagaagcaggcctatctgcccaaactctgcntcggcgagtgggactcctcgatggttttaacggaaacccgacgcggggcagcgatttgcaatcggtcaaccctgaagcgacgcaggaccgcgacggaaaatggcgcttaa

SEQ ID NO: 45484 - protein, 202 aa, Unknown
  Obtained from environmental sample
  misc_feature (1)..(202): Xaa is any amino acid
MENFLLDNDDILFHLDHIDLDRVIQLKEDNFEQAKQYAHAPRDIEDAKDSYRRILSIIGEIAGEYMAPNAPAVDESGPTLANNQVTLNPATKKALDMMAKADMMGFVIPRRYGGINMPNTILTIGADILSRADGSFLNFGLQQDNAGTINKFASEEQKQAYLPKLCXGEWDSSMVLTETRRGAAICNRSTLKRRRTATENGA

SEQ ID NO: 45485 - DNA, 789 bp, Unknown
  Obtained from environmental sample
  misc_feature (1)..(789): n is a, c, g, or t
ttgggggccggggcaaacgtagtgataagcgatcggggcatccggggcattgtgctggataccacctcttaccgcggcataggaaaacgcgaagaccgcgaagcaaaagacgatgcagattttaacgaattaaaggccatgcgggagcagtctcttttttccgtgtccgttcttgccggaacctcggtggacggtcttaccttccgtcttgcggaacgcggattgtccggcatggaattcctcgccggtatgcccggatcggtaggcggcgcggtgtggatgaacgccaggtgttacgataaatccgtgtcagacgtgcttttggaaacggaaatattaaacgaaacttttgaaagggagaaagttccctttcgcgccgaagattttacttataaaaaaagcccctttcagcaaagggaagttctgattctttccgccaggtttgccgtggaattcggagaatcaaaatacatacgcaaggaaatggaaggccaccgccaggatcgcggcgcaaagggtcattaccgttttccctcggccggctcggccttcaagaacaaccgggactttatggagcctactggccgcatcatcgatcagcttggtttgcgcggactcagcataggcggcgctcaggttgccccctggcacggcaacatcatcatcaacaccggaaacgccacggcagacgacattaaaatcctaatgaatgaagtcgcaaagcgggtaaaagaagaacgcggttttgagctggaaagcgaggtgctttttgtgggggattggggataa

SEQ ID NO: 45486 - protein, 262 aa, Unknown
  Obtained from environmental sample
  DOMAIN (155)...(259): UDP-N-acetylenolpyruvoylglucosamine reductase, C-terminal domain
  misc_feature (1)..(262): Xaa is any amino acid
MGAGANVVISDRGIRGIVLDTTSYRGIGKREDREAKDDADFNELKAMREQSLFSVSVLAGTSVDGLTFRLAERGLSGMEFLAGMPGSVGGAVWMNARCYDKSVSDVLLETEILNETFEREKVPFRAEDFTYKKSPFQQREVLILSARFAVEFGESKYIRKEMEGHRQDRGAKGHYRFPSAGSAFKNNRDFMEPTGRIIDQLGLRGLSIGGAQVAPWHGNIIINTGNATADDIKILMNEVAKRVKEERGFELESEVLFVGDWG

SEQ ID NO: 45487 - DNA, 342 bp, Unknown
  Obtained from environmental sample
  misc_feature (1)..(342): n is a, c, g, or t
atgcttaatatcaacaataacgcctcccgtctgaaacgggaaatactggttcgtatagcaaggcttcagcttgaaggaaaactggctgaaggggttcatgacatacccaggcagcttgcccccaccggaagcaaccctatccgttgctgcatattccatgaccgtgaaatcttaaggcacagggttattgcccggctgggatgcagcctggaagattatgacgaggaaaagcatctttcccaatatgtggaagaagctctgaaccgggagaaaccaactggcccatgcttactgttcttgatttggcatgtaacgcctgtgtgcgttcgcactttatggtaa

SEQ ID NO: 45488 - protein, 113 aa, Unknown
  Obtained from environmental sample
  misc_feature (1)..(113): Xaa is any amino acid
MLNINNNASRLKREILVRIARLQLEGKLAEGVHDIPRQLAPTGSNPIRCCIFHDREILRHRVIARLGCSLEDYDEEKHLSQYVEEALNREKPTGPCLLFLIWHVTPVCVRTLW

SEQ ID NO: 45489 - DNA, 972 bp, Unknown
  Obtained from environmental sample
  misc_feature (1)..(972): n is a, c, g, or t
atgcttactgttcttgatttggcatgtaacgcctgtgtgcgttcgcactttatggtaaccaacgcctgccaagcatgcgtcgcccgtccatgtcttgtgaactgcggcaagaaagcgattgaaattaaagacggcagagcgtgtatcaacagcgaaaaatgcgttagctgcggattgtgccttcaaaattgcccctatcacgctattataaaaattcctgttccctgcgaggaagcttgtcctgtgggagcgatttctaaaaacgaagacggcagagagtgtattgattatcacaaatgtatcttctgcggtaaatgtatgcgcgaatgtcccttcggcgcaatgatggacaagggacagttgattgacgtaattaaacatattatgaataagaagaacgtggtcgccctgtatgcgcccgctgtggcggcgcagttcagagttgagccgggcagacttgagggagcgctgcttgcggctggtttttcaaatgtggtagaagtcgctatcggcgcggatattacgtcggacaaagaaaccgcggaatttgccgagcgtatggaaaaaggcgaaaagatgatgaccacttcctgctgtcccgcgtatgtgcgagctgttaatcgccatgtacctgaacttgtgaattgcatttcaagcacccgcacccccatgcactataccgcggagatcgccaaaaaagattatcccggttgtatcacggtttttatcggtccttgtcttgccaagaggcgggaaggtatggacgatgatcttgtggattatgttatttctattgaggaactgggagcgttttttgttgcgaaggagatcgatgtcgctaaagcagacccgaagccggggagcaaattgcctacctgtacgggaagaaatttcgcccaatcangcggcgttgccgcgtcggtaaaagcgagactgaaagatccttcgatactcaaagaggcggtcatttga

SEQ ID NO: 45490 - protein, 323 aa, Unknown
  Obtained from environmental sample
  DOMAIN (122)...(319): Iron only hydrogenase large subunit, C-terminal domain
  misc_feature (1)..(323): Xaa is any amino acid
MLTVLDLACNACVRSHFMVTNACQACVARPCLVNCGKKAIEIKDGRACINSEKCVSCGLCLQNCPYHAIIKIPVPCEEACPVGAISKNEDGRECIDYHKCIFCGKCMRECPFGAMMDKGQLIDVIKHIMNKKNVVALYAPAVAAQFRVEPGRLEGALLAAGFSNVVEVAIGADITSDKETAEFAERMEKGEKMMTTSCCPAYVRAVNRHVPELVNCISSTRTPMHYTAEIAKKDYPGCITVFIGPCLAKRREGMDDDLVDYVISIEELGAFFVAKEIDVAKADPKPGSKLPTCTGRNFAQSXGVAASVKARLKDPSILKEAVI

SEQ ID NO: 45491 - DNA, 843 bp, Unknown
  Obtained from environmental sample
  misc_feature (1)..(843): n is a, c, g, or t
gtgtccaatgcttacactgcggacaccaacagcgcgaaagtgaagagcaaagactcgaccgccactgtggccacgctgggcgcgttaaccgtgaagtacgccggcgcgacgactgtgcctgttaacgcgggacagtacgcgcttacggtagacgttgcgggcggttctaacttcaacgccgctccgggtcttgttctgggcaattacacgatcacgaaagcagtgattgacaccacgtggttggcgtacacgatcccgaccaatcacaaggagggtcagagcgctcctttcggtatcggcgcggtaactatgaagaaaggcacgggtgtggacgcgtcggcgatcaccgtgaagtacaacggtctctccaccgtcccgagcgtcaccggcacgtacaacgtaacggtcgatatcctcggaggcgacaacttcttcagcgtcgccaatctcgcgctcggtacgtacgtaatcggtggtataggcgttgccgagggcaacaccacgatcccgaccgcgaagaaagacgctgttgtgaccgttgcgccgatcaaggtagcggccgccagcttcaccgccggtcccagccccgtagcgaagaacggcgtgatcaagttcttctccgcgaagcaggtgaagagcggttcgctctacatcttcgacgcgaacggcaacgcgataacgaagctgtccgcgaagtcgggtagcggcgaaatcgccagctggaacctgaaggacaagaagggcgtaaccgtagccgagggcacatacgttgtgaaaggcgccctggccggcaaagatggaacgcgcgagaaggtatccttcgtgttcagcgtagtgaagtaa

SEQ ID NO: 45492 - protein, 280 aa, Unknown
  Obtained from environmental sample
  misc_feature (1)..(280): Xaa is any amino acid
MSNAYTADTNSAKVKSKDSTATVATLGALTVKYAGATTVPVNAGQYALTVDVAGGSNFNAAPGLVLGNYTITKAVIDTTWLAYTIPTNHKEGQSAPFGIGAVTMKKGTGVDASAITVKYNGLSTVPSVTGTYNVTVDILGGDNFFSVANLALGTYVIGGIGVAEGNTTIPTAKKDAVVTVAPIKVAAASFTAGPSPVAKNGVIKFFSAKQVKSGSLYIFDANGNAITKLSAKSGSGEIASWNLKDKKGVTVAEGTYVVKGALAGKDGTREKVSFVFSVVK

SEQ ID NO: 45493 - DNA, 345 bp, Unknown
  Obtained from environmental sample
  misc_feature (1)..(345): n is a, c, g, or t
atgcgggaagggccggggattttgaactggcttgtcgaaggggcaaggcggtggcgaaatgaggggttaaaaacgccgtcaatcattgtcagtgcaacggatgaataccgagcggagatggacgttatcgggaacttcctaaaggagcgttgtacccagggagaggaaggctgtatcaaggcaagggaactttttaagtgctatcaggaatggtgcgatgaccacaacgaacacgctgtaagcgagcgttttttcggattgcggttaaaggaaatggggcttgagcaaaaacgtatgaacgatgggcgatactggcatggtattcagattagggcgcaagggtag

SEQ ID NO: 45494 - protein, 114 aa, Unknown
  Obtained from environmental sample
  misc_feature (1)..(114): Xaa is any amino acid
MREGPGILNWLVEGARRWRNEGLKTPSIIVSATDEYRAEMDVIGNFLKERCTQGEEGCIKARELFKCYQEWCDDHNEHAVSERFFGLRLKEMGLEQKRMNDGRYWHGIQIRAQG

SEQ ID NO: 45495 - DNA, 876 bp, Unknown
  Obtained from environmental sample
  misc_feature (1)..(876): n is a, c, g, or t
atggcgtaccaattcatgaaagcgaatcaaaacgagtacgccgttaaggagatggccaagctttttggggtaagccgtagcgcctattaccgatgggccaagaacggggcctcgcagcggcgtaaagcagacgatgcggagctggtgcgccttattcttgaaatagtggcgaaccatcaccgccggtatggcagccctcgggtacgccgggaacttcgcgatacctacggaaaacgggttagccttaagaaagtagcccgcctgatgcgggaaaacggccttaacgcccgaaaaagcaggaagcgtatcccgacaactgactccaaccatgcccttgcagtctttgagaacgtactgtcccgggagttttatgccgaatcaggcggcgtaaagtgggtttcagacattacctatctgcgtacgataaatggctggatatacctgaccatagtgcttgacctgtttgaccggaaaatcattggctgggcgcttagccttggcatggagacttccgagacagtcatcgccgcttttgaaatggcagtcaaaaacaggagccctcaaggcggcctgatattccattcggacaggggcgtccagtattgcgcccaatccttcaaggatgttttgagggaaagatctcctacagttaggcagagcatgagcaggaagggcaattgctgggacaacgcatgtgccgaatcgtttttcaaaacactgaagagggaactggaaacattggacggtaagcattccgaggctgaggtcaggcaatcagtgtttttctacatcgaggcatattacaatcgcattcgcatgcattcggcacttgactatgtagcgcctaacgtgtttagcttaggtaaccccgcttaa

SEQ ID NO: 45496 - protein, 291 aa, Unknown
  Obtained from environmental sample
  DOMAIN (124)...(287): Integrase core domain
  misc_feature (1)..(291): Xaa is any amino acid
MAYQFMKANQNEYAVKEMAKLFGVSRSAYYRWAKNGASQRRKADDAELVRLILEIVANHHRRYGSPRVRRELRDTYGKRVSLKKVARLMRENGLNARKSRKRIPTTDSNHALAVFENVLSREFYAESGGVKWVSDITYLRTINGWIYLTIVLDLFDRKIIGWALSLGMETSETVIAAFEMAVKNRSPQGGLIFHSDRGVQYCAQSFKDVLRERSPTVRQSMSRKGNCWDNACAESFFKTLKRELETLDGKHSEAEVRQSVFFYIEAYYNRIRMHSALDYVAPNVFSLGNPA

SEQ ID NO: 45497 - DNA, 546 bp, Unknown
  Obtained from environmental sample
  misc_feature (1)..(546): n is a, c, g, or t
atgttcatcctctacggaaccggggcgaacgggaaaagcacgttcctcaacgtgatcatgcgcattttgggggactatgccattaccacctaccctgaaacctttatgaagcggagtggcgattcgcttaccaacgacatcgccagattgcgggggacgcggtttgttgccacggcggagacggagcaggggaagcggctttcggagcacctgatcaagcaggctacgagcaacgaccagatgaccgcgaggttcctatacggggagcactttaacttcgtgccgactttcaagatattcatggctagtaaccacaagcctgtcatcaaggggacagaccacggcatctggaggcggatcaagctgataccgttcactaccacgatagccgaggagaagatggacaggcaccttgaacagaagctgcttgaggaaaaatccggcatactgaactggctgatagaaggtgcgctgcgctggcagaaggaaggcttgaacactggactttaccccaataggcgcacacagttaagcggggttacctaa

SEQ ID NO: 45498 - protein, 181 aa, Unknown
  Obtained from environmental sample
  DOMAIN (1)...(181): Poxvirus D5 protein-like
  misc_feature (1)..(181): Xaa is any amino acid
MFILYGTGANGKSTFLNVIMRILGDYAITTYPETFMKRSGDSLTNDIARLRGTRFVATAETEQGKRLSEHLIKQATSNDQMTARFLYGEHFNFVPTFKIFMASNHKPVIKGTDHGIWRRIKLIPFTTTIAEEKMDRHLEQKLLEEKSGILNWLIEGALRWQKEGLNTGLYPNRRTQLSGVT

SEQ ID NO: 45499 - DNA, 609 bp, Unknown
  Obtained from environmental sample
  misc_feature (1)..(609): n is a, c, g, or t
atgaatgacaacacttttattcttggtgtagatttagacggtgttgttggcgatttttatggcgcgatacggaagatcgccgccgaatggctggacaggcctctggaaactctaactaccgaagtgacatacggtcttgatgaatggaacatcattgaattcggcggatatgatcgtctccaccgttttgccgttacccagagaaatattttccgtgacatggaacctcttaaggacgctccggcgactcttagaaaactttcgcatttaggcatccgcattcggattattacccatcggctgtttctaaaatactcccaccgtacatcaattacccaaacagtagaatggctggacaaatacgacattccctattgggatctctgcttcatgaatgacaaaggcgcagttggtgcccatgtctatattgatgattcccctgaaaacataatcagcttgcgaaagctgggctgtaaaaccgttgttttcagcaattccactaaccgcagtttgcccggtcctcgtgccgacaattggcctgaagtggaacggctagtactggaagccagggaggagtggaagacagggacaatggggctgttcgggtaa

SEQ ID NO: 45500 - protein, 202 aa, Unknown
  Obtained from environmental sample
  misc_feature (1)..(202): Xaa is any amino acid
MNDNTFILGVDLDGVVGDFYGAIRKIAAEWLDRPLETLTTEVTYGLDEWNIIEFGGYDRLHRFAVTQRNIFRDMEPLKDAPATLRKLSHLGIRIRIITHRLFLKYSHRTSITQTVEWLDKYDIPYWDLCFMNDKGAVGAHVYIDDSPENIISLRKLGCKTVVFSNSTNRSLPGPRADNWPEVERLVLEAREEWKTGTMGLFG

SEQ ID NO: 45501 - DNA, 1353 bp, Unknown
  Obtained from environmental sample
  misc_feature (1)..(1353): n is a, c, g, or t
atggtaagagaattgcacaaagcgggaatagaggtaattttagacattgtgtttaaccatacagccgaaggcaatgagtggggccctactttttcttttcgggggctggataatccaatctactatatcttgaatgacaataaacgcttttatcagaattactccggctgcggtaatacggtaaactgcaataacccaattgtccggacttttatcatggaatgcctccaatactgggtcgtggaaatgcatgttgacggttttcgttttgaccttggctcgattttggggcgtgatcaacatggcaaactgatggaatctccgcccacactggaaagaattgccgaggacgcggttttaagctccactaaaataattgctgaggcatgggacgccggaggcgcttatcaggttggctggttccccggcggccgttgggccgaatggaacgaccgcttccgtgacgaagtacgcaaatactggcggtcggatcctgaggaaaccagacaccttgcgacccggctttcaggcagctctgacctttacctccgcgacggacgcaagcctttccattcaatcaacttcttaaccagccacgacgggtttacgcttaatgatctggtttcctacaatgacaaacacaacgaggataatggcgaggagaatcgcgatgggggcgatcacaactacagctataattacggcagcgaaggcttgacgctggatccgatactggaacaagtccgggaacagcagataaaaaatttttttacaacactgctggtttcactgggaacgcccatgatactgggcggcgatgagataggccgcacccaaaatggcaacaataacgcgtattgccaggataatgaaatttcgtggtatgactggtctctgctggaaaaaaacaaagggctgttccgttttgtaaaagaaatgatagcattccgtctgcgtcacccctgctttatgagacccgagttctacaccggacgccagggcagctacaatgccatacccgacataagctggtacgatgaaaaaggcggaaaccctgactgggaaaaactgacctatccccttgccctgctgataaacggccgccgcgccgaggtaacaagggacagggacaacaacgatttttatatcatgttcaacgcgagtcttgatcctgtggttttttcaataccggcggccaatgaccgcagaaagtggttcagagctgtggacacaacgctgatttctcccaacgatattttgccggaaggcagcgaagagccgcttgccgtttcaaataaatacaaagtaaaatcccgcagcgttgttatacttatctcaaaaagcgcaagttaa

SEQ ID NO: 45502 - protein, 450 aa, Unknown
  Obtained from environmental sample
  DOMAIN (1)...(317): Alpha amylase, catalytic domain
  misc_feature (1)..(450): Xaa is any amino acid
MVRELHKAGIEVILDIVFNHTAEGNEWGPTFSFRGLDNPIYYILNDNKRFYQNYSGCGNTVNCNNPIVRTFIMECLQYWVVEMHVDGFRFDLGSILGRDQHGKLMESPPTLERIAEDAVLSSTKIIAEAWDAGGAYQVGWFPGGRWAEWNDRFRDEVRKYWRSDPEETRHLATRLSGSSDLYLRDGRKPFHSINFLTSHDGFTLNDLVSYNDKHNEDNGEENRDGGDHNYSYNYGSEGLTLDPILEQVREQQIKNFFTTLLVSLGTPMILGGDEIGRTQNGNNNAYCQDNEISWYDWSLLEKNKGLFRFVKEMIAFRLRHPCFMRPEFYTGRQGSYNAIPDISWYDEKGGNPDWEKLTYPLALLINGRRAEVTRDRDNNDFYIMFNASLDPVVFSIPAANDRRKWFRAVDTTLISPNDILPEGSEEPLAVSNKYKVKSRSVVILISKSAS

SEQ ID NO: 45503 - DNA, 423 bp, Unknown
  Obtained from environmental sample
  misc_feature (1)..(423): n is a, c, g, or t
gtggcaaaaaagattactggttacataaaattgcaaatcaaagctggcgctgcaaatccagccccgccaattggacctgcactaggttcaaaaaaggtaaacattgctgagttctgcaagcaatacaatgctcgcactcagtctatgggtgggcaaataatccctgtgattatcacggtatatgcagacaacagctttaccttcataacaaaaacaccgcctgtgccgtctatgataaaggctgccgcaaaaattgaaaccgcttctggcgagcctaatcgcaaaaaagtcggcaaaattactccagcacaggtaacagaaattgccaaaaccaaaatgccggatttgaacaccataagtttggaatccgcagagtcaatggttcgtggcacagctcgctcaatgggcattgaggtaggataa

SEQ ID NO: 45504 - protein, 140 aa, Unknown
  Obtained from environmental sample
  DOMAIN (8)...(66): Ribosomal protein L11, N-terminal domain
  misc_feature (1)..(140): Xaa is any amino acid
MAKKITGYIKLQIKAGAANPAPPIGPALGSKKVNIAEFCKQYNARTQSMGGQIIPVIITVYADNSFTFITKTPPVPSMIKAAAKIETASGEPNRKKVGKITPAQVTEIAKTKMPDLNTISLESAESMVRGTARSMGIEVG

SEQ ID NO: 45505 - DNA, 690 bp, Unknown
  Obtained from environmental sample
  misc_feature (1)..(690): n is a, c, g, or t
atgattagaagaggaaaaaaatatcgtgcactagcagcatcttacgatgtaaaggcttcttacggtttaagcgaagctgttggcattctaaaaaaagcacaagccaagttcgaccaaaccgttgaattgcattttaacctaggcgttgatccaaagcactccgaccaaatggttcgcggcacagttgcgcttccacacggaacgggtcgcaaagttcgcattttggcgttctgcaaagagaacgtggttcaaacagctttggatgctggtgcagattttgctggaggcacggatttggttgaaaaaatttccggtggctggctggattttgatgcagtggttgccaccccggatatgatggcagtccttggcaaggtagcaaaggttttaggtccccgcggtcttatgccaagcccaaaagccggaactgtttcgcctaatttggctcaaatcataaaggaactcaaagctggtaaaattcagtacagggttgacaaaggtgcaaacgtgcacgctcctgttggcaaactctctttcacgggcgaacaactatgcgagaatattctctcagttatagattctgtgaaaaagaataaaccgcaaacatcaaaaggtatttacataaaaagtttaaccttagccgcaaccatgactccatcggttcgcttggatatggctttaacaaggtaa

SEQ ID NO: 45506 - protein, 229 aa, Unknown
  Obtained from environmental sample
  DOMAIN (17)...(220): Ribosomal protein L1p/L10e family
  misc_feature (1)..(229): Xaa is any amino acid
MIRRGKKYRALAASYDVKASYGLSEAVGILKKAQAKFDQTVELHFNLGVDPKHSDQMVRGTVALPHGTGRKVRILAFCKENVVQTALDAGADFAGGTDLVEKISGGWLDFDAVVATPDMMAVLGKVAKVLGPRGLMPSPKAGTVSPNLAQIIKELKAGKIQYRVDKGANVHAPVGKLSFTGEQLCENILSVIDSVKKNKPQTSKGIYIKSLTLAATMTPSVRLDMALTR

SEQ ID NO: 45507 - DNA, 1032 bp, Unknown
  Obtained from environmental sample
  misc_feature (1)..(1032): n is a, c, g, or t
atggacggacggcgggtttctattgcattctttactaattcggctgcacttcctactaattcgtacctttcatacgtgctacttgtcactttcattcgtaatttctatactcatcttatgaaccagtaccaaccgcaaatcctgtgggagattacccgcgccgcggtgagcattgccgcgtggtgggtgctgttttaccgcttccatcggcccgaatcgttgcggcggcgcattgcccttcttatcgccatgccggcggcctacgctttctggatactcatgccgatgagcattgtcgccaacgctgtttcatgggcggtcattaccgtagtctttgccttcatctgcggggatttgcgccgttccctctttaccgcctttttctacatcggcatggaggcatccatcgacaacacccgctccgctctgattgccctgctgtttaaccggtttttcccttcccactcacccggccaatatttacagtacaatatgcaatacctcgtcgtgttcggcttatgctgttgttattatataataatgaggcggtattcgggcaaactgccgctcgccagttggatactgattattatcccgcctttgattctgtgggcggttctgacttattttgcccatgtcgcggatccgcttctgatggaacagggcatcaacatttacggtcccggcttctgtttcgggctgttttctatattactgaaccttggattactctacctatatatccgccaattggttattaccgatgcccaacgctttacaatagcggtttccgacacagagccgatatggactgcggagaacggcctgtcggataattttagcnaacactaccaactgactgatagggaaaaagacatagttgaaagtatgatgcacggcaagagcaacaaggaaatcgccgatactttgcacatttcaatcaggacagtgggggcttatctccaaaatgtctacaagaaaaccggcgcgcccaaccgcttcgccctttactcgctgataaagggtgaataa

SEQ ID NO: 45508 - protein, 343 aa, Unknown
  Obtained from environmental sample
  DOMAIN (283)...(340): Bacterial regulatory proteins, luxR family
  misc_feature (1)..(343): Xaa is any amino acid
MDGRRVSIAFFTNSAALPTNSYLSYVLLVTFIRNFYTHLMNQYQPQILWEITRAAVSIAAWWVLFYRFHRPESLRRRIALLIAMPAAYAFWILMPMSIVANAVSWAVITVVFAFICGDLRRSLFTAFFYIGMEASIDNTRSALIALLFNRFFPSHSPGQYLQYNMQYLVVFGLCCCYYIIMRRYSGKLPLASWILIIIPPLILWAVLTYFAHVADPLLMEQGINIYGPGFCFGLFSILLNLGLLYLYIRQLVITDAQRFTIAVSDTEPIWTAENGLSDNFSXHYQLTDREKDIVESMMHGKSNKEIADTLHISIRTVGAYLQNVYKKTGAPNRFALYSLIKGE

SEQ ID NO: 45509 - DNA, 1080 bp, Unknown
  Obtained from environmental sample
  misc_feature (1)..(1080): n is a, c, g, or t
gtgcatgatccggcgattacgttgaggtttaaagttaaagggaacaaggaagggttcggggttcagggttcagggttcaggggggaagtctatttcctggcttggactaccacaccctggacgcttccgtccaaccttgctcttgtactcggcccggacatcgattacgtactaatcgaagctcttaccgaaccccgaaccccgaaccccgaaccccaatattacatccttgccaaggagcggctgcaagcctatttcaaagaaacctctgaatataaaatcatctggagcaaaaaaggcggcgagctgttaagcctagaatatgagccgcttttcccgtactttaaagaagccgcggcccaaaacgcgttccccacttatccgggcgatttagtttcaaccggggacgccacgggcatcgtccataccgctccgcgcttcggcgaaaacaacacgagggtgctgaacaacaccggcattcccgtcatctgccctatagacgcggaatgtaaattcaccgaagaagtgaaagattttgccgggcagttcgtcaaagacgccgataaagctataatggaaaagctgaaggcggaaggcaaactcttcaaacgcgagcagatactacacgcctacccccactgctggagatgcggccacccgctcatctacagggctgtcggctcgtggtttgtcaatatcgaaaaaatcaagaaagacatgctgaaggcgaacagtgaaatcctctgggtacccgaacatataagggatggcagattcggaaaatggctggaaggggcgcgggactgggccatcagcagaaaccgctactggggcaaccccctgccgatatggcgctgtgaggactgcggaaagatcgtctgcgtcggcagcagaaaggaattgcaggaactctccggcacataccccgaagacctccataaacattttgtagacgagatcacttttccatgcgcgtgcaaaggcgttatgcgaagggttcccgaagttttggactgctggtttgagtcgggggcaatgccttacgcgcaaagccactatcccttgactcggccaatctga

SEQ ID NO: 45510 - protein, 359 aa, Unknown
  Obtained from environmental sample
  DOMAIN (1)...(359): tRNA synthetases class I (I, L, M and V)
  misc_feature (1)..(359): Xaa is any amino acid
MHDPAITLRFKVKGNKEGFGVQGSGFRGEVYFLAWTTTPWTLPSNLALVLGPDIDYVLIEALTEPRTPNPEPQYYILAKERLQAYFKETSEYKIIWSKKGGELLSLEYEPLFPYFKEAAAQNAFPTYPGDLVSTGDATGIVHTAPRFGENNTRVLNNTGIPVICPIDAECKFTEEVKDFAGQFVKDADKAIMEKLKAEGKLFKREQILHAYPHCWRCGHPLIYRAVGSWFVNIEKIKKDMLKANSEILWVPEHIRDGRFGKWLEGARDWAISRNRYWGNPLPIWRCEDCGKIVCVGSRKELQELSGTYPEDLHKHFVDEITFPCACKGVMRRVPEVLDCWFESGAMPYAQSHYPLTRPI

SEQ ID NO: 45511 - DNA, 1005 bp, Unknown
  Obtained from environmental sample
  misc_feature (1)..(1005): n is a, c, g, or t
gtgtgggacgaagccgctttgcacaaagaccagcggcaaatgtggtcgggcgcgagtccggcggcggtcgtttggggctaccctatccgcatactgtccacgcacaaggggaaatccacgctcttctacaaattctgcgacagcgcgcgcaagctgaaaaacgattggagcctccacaaagtcaccatagccgacgccgtggagcagggtctttacgataaagtcgcgggacggcccacggacgccgaggaacgcgccgaatacatagaccgcatccgcgcctcgtgccaggacgaagacatcttccgcgaagactacatggccgaaccggtagacggaaccacggcgtacatcacctacgacatgatagacgcggtggtaagcgacggagtgcctaaaacgcttgcggagctgtcgcttacggacaacgccctctacgccggatgggacataggccgcgagcgcgacctctccgtgatcgtcgtgctcgaagaagtccacgacttcctctgcgcgcggatcgtcaaggtgttcgacagggtgaagttcagcgtccaaaaggcgtggctcgacgacgcgatgcgcctgccgacgctgcgccgcctgtgcatagacaaaaccggaatgggcatcccgctgacggaagaggcgcaggagaagtacggccgctacagggtcgagggcgtcaccttcacgagcggctccaaagaggttttggcggtggacgcgcggaacaagatcgaagaccgccggcttatactgcccgacgacgacggcctcaaaaagtcgctgcattcgattaaacgcgtggtcaccgccgccgggaatttcaggttcgacgcggagcggactgacgagaccggccacgcggatcacttctgggcgctcgcgctcgcgatccacgcaaaaacgggcggcccgtcggggccggcttgggcggtttcgtcagggagcgtcggcgattacggcaaattcgcggatcctataccgatgggggtctattga

SEQ ID NO: 45512 - protein, 334 aa, Unknown
  Obtained from environmental sample
  DOMAIN (1)...(303): Terminase-like family
  misc_feature (1)..(334): Xaa is any amino acid
MWDEAALHKDQRQMWSGASPAAVVWGYPIRILSTHKGKSTLFYKFCDSARKLKNDWSLHKVTIADAVEQGLYDKVAGRPTDAEERAEYIDRIRASCQDEDIFREDYMAEPVDGTTAYITYDMIDAVVSDGVPKTLAELSLTDNALYAGWDIGRERDLSVIVVLEEVHDFLCARIVKVFDRVKFSVQKAWLDDAMRLPTLRRLCIDKTGMGIPLTEEAQEKYGRYRVEGVTFTSGSKEVLAVDARNKIEDRRLILPDDDGLKKSLHSIKRVVTAAGNFRFDAERTDETGHADHFWALALAIHAKTGGPSGPAWAVSSGSVGDYGKFADPIPMGVY

SEQ ID NO: 45513 - DNA, 540 bp, Unknown
  Obtained from environmental sample
  misc_feature (1)..(540): n is a, c, g, or t
atggatcgcagcatgaattacaggatgggaatgaggcccggtcttttcggcctttatcccaccatctggatcgctcttgtcattttggctgtcagctggtttatgctgtacaagcgcccgtggggcttaaggcttcgcgccgccggcgaacatccgcaagcgctggcttccgccggtgtaaatgtagttaaactccggtatgccgccgttattatttccggccttctcgcggggcttgccggcggctgtattgttcttacgcaggacattcagtttaccgtaagcacgattaacggaaaaggttttatcgcccttgccgccgtttctttcggccgctggctgccgttaggcatactcggctcaagttttttattcggcgtatcctcaagtatggcggttaacattgttaacatcaaaaaacttcagtttctgccttcggaaatgttcagcatgatgccgtttttaattactttgataacacttgttttattcagcgggaaagagacggcgcctaaagcgctggggcagaaggatttttaa

SEQ ID NO: 45514 - protein, 179 aa, Unknown
  Obtained from environmental sample
  misc_feature (1)..(179): Xaa is any amino acid
MDRSMNYRMGMRPGLFGLYPTIWIALVILAVSWFMLYKRPWGLRLRAAGEHPQALASAGVNVVKLRYAAVIISGLLAGLAGGCIVLTQDIQFTVSTINGKGFIALAAVSFGRWLPLGILGSSFLFGVSSSMAVNIVNIKKLQFLPSEMFSMMPFLITLITLVLFSGKETAPKALGQKDF

SEQ ID NO: 45515 - DNA, 411 bp, Unknown
  Obtained from environmental sample
  misc_feature (1)..(411): n is a, c, g, or t
atgtacagcgtaggcatagcttatcttctgtggctggtttctggctttggggcgttaggttttcacaggttttatcttgggaaaatctttaccggattactgtggatgttcacaggcggccttggaatgattggcgcaatttatgattttattactctgcctgcgcaagtaatggaagcgaacagaaaccgcgcgttttatagtaatgccaatgctaatgtaaaaaacaataacaataattatacccaacccacatggcgcaatgtagacgacggcgaggctcatattattcacgaccaagacaacgattggagaaaaagaattaagaattttaccacgaaccacacgaatcgtaccgaaggtacgccgtaccttcggtacgcacacgaactttttactcgcatttcttag

SEQ ID NO: 45516 - protein, 136 aa, Unknown
  Obtained from environmental sample
  DOMAIN (1)...(51): TM2 domain
  misc_feature (1)..(136): Xaa is any amino acid
MYSVGIAYLLWLVSGFGALGFHRFYLGKIFTGLLWMFTGGLGMIGAIYDFITLPAQVMEANRNRAFYSNANANVKNNNNNYTQPTWRNVDDGEAHIIHDQDNDWRKRIKNFTTNHTNRTEGTPYLRYAHELFTRIS

SEQ ID NO: 45517 - DNA, 798 bp, Unknown
  Obtained from environmental sample
  misc_feature (1)..(798): n is a, c, g, or t
atgaccgaacacgcaaaacagattttagattctttagtggaagaaatttccactgcaaaagcagctgcttttatacgagagaggctttttggtgacggcattgatataccctgtaaacactggtcttgccttaaccagtttgtgacttttctaaacggaacgggcgacgcccgcggatacaaccaatggaaagaagccggaaggaccgttaaaaaaggagcaaaggccatctatattcttgttccaatgatttacaaagttaaagaaaaagagaaagaagtacaggaagaagaaattctaaaaggctttaaggcaatgccggtttttcgggttgaggataccgaagggaaagagcttgactacacaataaaactccgtgaatttgatcctgactcacttcctttaatcgacgtggcacgttctttgggcatttccgttttcgcgggcttgaccggcagcgccgaggggtggtatcgccctatggacaaatccatcactatggggtgcaataacggccaaacatttttgcacgagctttcccatgcaattgaccatgccttgccaggcgaaaacaaagatcgttctttcagcgaggttgtagcagagctttcttccgcttttctttgcaatctttacggctacagttatagccatgacaatgccgctgcctatatcaagaattgggctggaaaagaccgcgccgcgtttgcctgcatagccgccatggagcgcgtcgaggcgatttaccgctacatcgaggatgcaagggcgcagtgccgggcaggcaaaaccgcgtaa

SEQ ID NO: 45518 - protein, 265 aa, Unknown
  Obtained from environmental sample
  misc_feature (1)..(265): Xaa is any amino acid
MTEHAKQILDSLVEEISTAKAAAFIRERLFGDGIDIPCKHWSCLNQFVTFLNGTGDARGYNQWKEAGRTVKKGAKAIYILVPMIYKVKEKEKEVQEEEILKGFKAMPVFRVEDTEGKELDYTIKLREFDPDSLPLIDVARSLGISVFAGLTGSAEGWYRPMDKSITMGCNNGQTFLHELSHAIDHALPGENKDRSFSEVVAELSSAFLCNLYGYSYSHDNAAAYIKNWAGKDRAAFACIAAMERVEAIYRYIEDARAQCRAGKTA

SEQ ID NO: 45519 - DNA, 684 bp, Unknown
  Obtained from environmental sample
  misc_feature (1)..(684): n is a, c, g, or t
atgaccagagacctttctacggaaatattggatgcgataatttccagtaacggcgccacctatgtggacaaagaccccaagacaggcaaatttgtcaatgccacaggcaggccggaatttctggaagccctacagtttgccatcaggttgaataacgaaggcgttctgaaaccgagaccggagaacagcaactgggattggtataagtccgagtttattgacgggaaggtggctatgcggattgatgaatcatatatagccaacagtgataccgttgaattaaaaagaatgaaagatgactggggcatggtactgtttcccaagggaccgaaatcctctacctatcgtgtgtatacccgtgataatctaatggtcattcccgcaacttacaagcctgcggaagtggaaaaaattctatgggcagttgcgttatggaatacgccggttgatgacgactggaaatccggacagtatgactatttccgcgattcccgcgctgttgacgagactttggcgcttgttcgcgatccaaaaatcagtatggtaaaatatttttcctatatcaacggtctggaacgcggtgatatcgcatggaatatgtggtatcttgacggagaaccggcccaattaattgaatctgtttcccaggactggaacgcaaaaatagccgaagccaataaataa

SEQ ID NO: 45520 - protein, 227 aa, Unknown
  Obtained from environmental sample
  misc_feature (1)..(227): Xaa is any amino acid
MTRDLSTEILDAIISSNGATYVDKDPKTGKFVNATGRPEFLEALQFAIRLNNEGVLKPRPENSNWDWYKSEFIDGKVAMRIDESYIANSDTVELKRMKDDWGMVLFPKGPKSSTYRVYTRDNLMVIPATYKPAEVEKILWAVALWNTPVDDDWKSGQYDYFRDSRAVDETLALVRDPKISMVKYFSYINGLERGDIAWNMWYLDGEPAQLIESVSQDWNAKIAEANK

SEQ ID NO: 45521 - DNA, 987 bp, Unknown
  Obtained from environmental sample
  misc_feature (1)..(987): n is a, c, g, or t
atgaatatcatcgtaaacggaaatagtctgccgaatattccgtgngaagataggccgtctgatagcaatccaaaaaggactgatgtggcggtttccaaaaacccgattattccaagagatttaaacttacggtccaacagcatttttaacagcgccgttgtgccgtttaagggagaatttgccggcgtattccgctgcgatgatacctcgcgtcacatggatattcacgcgggaaggagcaaggacggcattaactgggttatcgaagacgaaccgataaagtttgccaaagataacccggatgtgcctgattccgattacaagtacgatccccgcgtaatttttatagaagacaggtattacattatttggtgtaacggttatcacggcccaaaccttggtatcggctatacttatgattttgaaaaattttatcagatggaaaacgcgcttatgccatacaaccgcaacggcgcgctcttcccgcgcaagataggaaaaaattacgccatgttcagccgtcccagcgattcggggcatactccattcggcgatattttttactccgaaagcccggatttaatttattggggaaagcaccgccatgttatgtctccttacggcggctggcaaagcaccaaagtcggcgcgggtccgtgcccgattgaaactacggaaggctggctgttattctaccacggggtactcacaagctgtaacggttttgtttattctttcagcgcatgtctgcttgatattgacaaaccctggaaagtaatcgcgcgtccgcgtccttacattattaacccgcgtgaaatttacgaattggccggagacgttccgaacgtcacgttccctgtcgcctctcttatcgacaaagacacaggcaaagtcgcgatttactacggctgcgccgattccgtaacaggccttgtgttcggcaagattgatgaaattgtcgattgggtaaaaaagaataaattctaa

SEQ ID NO: 45522 - protein, 328 aa, Unknown
  Obtained from environmental sample
  DOMAIN (10)...(325): Domain of unknown function (DUF377)
  misc_feature (1)..(328): Xaa is any amino acid
MNIIVNGNSLPNIPXEDRPSDSNPKRTDVAVSKNPIIPRDLNLRSNSIFNSAVVPFKGEFAGVFRCDDTSRHMDIHAGRSKDGINWVIEDEPIKFAKDNPDVPDSDYKYDPRVIFIEDRYYIIWCNGYHGPNLGIGYTYDFEKFYQMENALMPYNRNGALFPRKIGKNYAMFSRPSDSGHTPFGDIFYSESPDLIYWGKHRHVMSPYGGWQSTKVGAGPCPIETTEGWLLFYHGVLTSCNGFVYSFSACLLDIDKPWKVIARPRPYIINPREIYELAGDVPNVTFPVASLIDKDTGKVAIYYGCADSVTGLVFGKIDEIVDWVKKNKF

SEQ ID NO: 45523 - DNA, 600 bp, Unknown
  Obtained from environmental sample
  misc_feature (1)..(600): n is a, c, g, or t
atgcctaaaataacttttttaccagataatatcacggtggaagcggaaaaaggcgagccgcttttatccgccgcgcgtcttgccggagtttttattgagactcagtgcggcggcaagggaacctgccaaaaatgccgcgtaagaataaccgcgtcggaaggcggcggtgaaagcgttaaagacgcgctgatttgccaaaccgccgttcctgacgaatcaattacggtggagcttccaaaatcagcttacggaaaattctccgccgcgaaaggtcaatttgaaaattttaccgatccgtccgaatatttacctgaaagcggagaaatttttttaagaaaagtaaatcttaaaataccgaagcccgcgccgctggacgggttatctgacatcgacagattttccagagaatttacaaaaaaaacggaatgtagagcggtagaaataccgcttaatgtgttagctgttttacctgaaaagttacggaatcctgatttttcgacgggtgtgaaagatggcgcgtctgtggatagcgattctttttctgaaggcgaagtacgggttttttattttgtggaaaacgatatntgccaagataattaa

SEQ ID NO: 45524 - protein, 199 aa, Unknown
  Obtained from environmental sample
  DOMAIN (4)...(71): 2Fe-2S iron-sulfur cluster binding domain
  misc_feature (1)..(199): Xaa is any amino acid
MPKITFLPDNITVEAEKGEPLLSAARLAGVFIETQCGGKGTCQKCRVRITASEGGGESVKDALICQTAVPDESITVELPKSAYGKFSAAKGQFENFTDPSEYLPESGEIFLRKVNLKIPKPAPLDGLSDIDRFSREFTKKTECRAVEIPLNVLAVLPEKLRNPDFSTGVKDGASVDSDSFSEGEVRVFYFVENDXCQDN

SEQ ID NO: 45525 - DNA, 1335 bp, Unknown
  Obtained from environmental sample
  misc_feature (1)..(1335): n is a, c, g, or t
atggcattgagcggattacaaatacagaaactccttcccggtaccaactgcaaggagtgcggctcaagcacctgcatggcctttgccatgaagatggctgccaagaaggcaatgctttccgaatgtccttacgcctccgaagaggccaaaaaggttttaggcatggcaagcgagccgccggtaaagggcgtcaaaatcggcacggaaaccgtcagtccccttggggaagagacggtcatgtaccggcacgaaaagacctttgtcaataaacctctaatcgccgtgaacctggacgaaggttccgatttggcgctagcagcaaagatcaagaaataccggcctgtccgcgtaggcgaagagctttttgttgccgcaatcgccgttacccaaaaaggggagtgcgtgtcctttgccgaatactgcgcaaaggtctacgaaacaaccagactgccgctgatccttcgcgcactggatctcacttcccttgacagggcttcccaggcggtagccggatcgaggagtatcctttccggcgtgacggcggaaacagctgaagaagcggtcaaaatcgccaggcgggataatcaggtactcgcggtaacagctccggacgtagacggtattttcgctttaaccacaaaactaaaggaaggcggttttaatgatctcctcattgaatttcaaacacattctcttgcggaaactttccagactaattccatagcccgaaaggcggcgcttaaaaacaacataaaggcccttggctacgctttgctgcgctttatcgacaccggcaacggaatggacgacactgtagcggctgtaacggaaatcgacaagtttggcgggattgttgtgcttcccggtttcgacccggcacagcttataacccttcttaccctgcgtcagaatatctataccgacccgcaaaagccaatccaggtggaacccaagctttacgctataggcgagcccgacaggaaatcgcctgtctttgtgacgacaaacttttcactgacttactttctggtttccggggaaattgagaacagcggcatttccgcgtggctggtaattccagaatgtgaaggcttcagcgtactaaccgcctgggctgccggtaaattttccggggcttccatcgccaaattcattaaagagataaacattgaaaatcaaatagatacaaaacaaattgttatccccggttatgtggcgcaaatatcgggagaacttgaggaaaatatgcctggttttaaggttcttgtaggtccctgcgaagcgggggatattgagagttttattaaaagcgtattgttaaaaaagaatgcctaa

SEQ ID NO: 45526 - protein, 444 aa, Unknown
  Obtained from environmental sample
  DOMAIN (11)...(45): Putative Fe-S cluster
  misc_feature (1)..(444): Xaa is any amino acid
MALSGLQIQKLLPGTNCKECGSSTCMAFAMKMAAKKAMLSECPYASEEAKKVLGMASEPPVKGVKIGTETVSPLGEETVMYRHEKTFVNKPLIAVNLDEGSDLALAAKIKKYRPVRVGEELFVAAIAVTQKGECVSFAEYCAKVYETTRLPLILRALDLTSLDRASQAVAGSRSILSGVTAETAEEAVKIARRDNQVLAVTAPDVDGIFALTTKLKEGGFNDLLIEFQTHSLAETFQTNSIARKAALKNNIKALGYALLRFIDTGNGMDDTVAAVTEIDKFGGIVVLPGFDPAQLITLLTLRQNIYTDPQKPIQVEPKLYAIGEPDRKSPVFVTTNFSLTYFLVSGEIENSGISAWLVIPECEGFSVLTAWAAGKFSGASIAKFIKEINIENQIDTKQIVIPGYVAQISGELEENMPGFKVLVGPCEAGDIESFIKSVLLKKNA

SEQ ID NO: 45527 - DNA, 591 bp, Unknown
  Obtained from environmental sample
  misc_feature (1)..(591): n is a, c, g, or t
gtggacgtaccactgatcatcaccggcataaaccattacgaaaaaaacaaacgaagtgatgaaggccatgncccaggctgcgagggtgagaacctgcttctcaactgggtggaacaggacaattacagaactatcgccggtgcagcgatggcatacggccacacgctggtagcccaggccccaatagatgtgaacatcagcaagcagctcaacatcctgcttggcaacatgggccttgctccggacaggattatcatcgacccaatgaccagcacgattggttacggtgtggaatacacctattcggtgatggagcgcatacggctcaccggtctcggcggggacaacatgctcctgagtccgatgatcgtttccgttggtcaggaatgcgccaagataaaagagttcaaggcgcctgaatccggctttcccgattggggcgacctttcaaggcgcgccgcttattgggaaagtgccactgccacgacgctgctgtacgccggcgcggacatactgatcctctataacccggaagcggttaagacagtaaagaaaaccattgataacctgatggatggggagggcaaataa

SEQ ID NO: 45528 - protein, 196 aa, Unknown
  Obtained from environmental sample
  DOMAIN (1)...(194): CO dehydrogenase/acetyl-CoA synthase delta subunit
  misc_feature (1)..(196): Xaa is any amino acid
MDVPLIITGINHYEKNKRSDEGHXPGCEGENLLLNWVEQDNYRTIAGAAMAYGHTLVAQAPIDVNISKQLNILLGNMGLAPDRIIIDPMTSTIGYGVEYTYSVMERIRLTGLGGDNMLLSPMIVSVGQECAKIKEFKAPESGFPDWGDLSRRAAYWESATATTLLYAGADILILYNPEAVKTVKKTIDNLMDGEGK

SEQ ID NO: 45529 - DNA, 681 bp, Unknown
  Obtained from environmental sample
  misc_feature (1)..(681): n is a, c, g, or t
atgtttattcgccgcatgttgctgtctttactgggaaactttgtgcttgcctttggtgttgccgtggcggtgaaggccgatctgggaataacccctgtcaattccatcgcctttgtcctgagcaagatttttcctattgatcacggcctcttgacaggcgtcatatacgccagctatgtactgattcaactggcaatactgagaagggaatttcggctctataacctgttacaggccggagttggtctgttgttcggcgggtttgtttttatctgtaaccatatccttgcgttcccaactccggaattctatccggtgcggcttttattcttgctggctggcgtaattataatcggcctgggcataatgctttacctcagggccgatctcctgccccagccggcggaagggcttatactggcgattcagaaaaagactggctggaaactgcacaatatcaaggtcgttttcgattgttcggttgttgttattgcggcggcgatttctttaatcattataaaaaggatcatcggtatcagggaaggaacgctaatcgcaatgttcggaataggcaagtgcatgggtttttttaccaaacactttggcggaaagatcgacgcgcttttcaggctttccaggaacttatcccaggatacttcactcgacaaggtaggtgtttga

SEQ ID NO: 45530 - protein, 226 aa, Unknown
  Obtained from environmental sample
  SIGNAL (1)...(23)
  DOMAIN (107)...(194): Uncharacterized BCR, YitT family COG1284
  misc_feature (1)..(226): Xaa is any amino acid
MFIRRMLLSLLGNFVLAFGVAVAVKADLGITPVNSIAFVLSKIFPIDHGLLTGVIYASYVLIQLAILRREFRLYNLLQAGVGLLFGGFVFICNHILAFPTPEFYPVRLLFLLAGVIIIGLGIMLYLRADLLPQPAEGLILAIQKKTGWKLHNIKVVFDCSVVVIAAAISLIIIKRIIGIREGTLIAMFGIGKCMGFFTKHFGGKIDALFRLSRNLSQDTSLDKVGV

SEQ ID NO: 45531 - DNA, 1317 bp, Unknown
  Obtained from environmental sample
  misc_feature (1)..(1317): n is a, c, g, or t
atgcgcgggctgccggccggacactcaagagctcttctggagttgcggggtgatgttgatttgtcggccaataccctgggcgatttcacctgcccgccgaagaacatacttgaaaagagggcggtcgagatagcggcccggcttaaagcggcccgaaggccggtccttatgggcggcacgggggtgcgtttggcgggggtaagggacaaatttcttgaaatagccgaacaatgttccctccctaccgtcggcggctggaacgcctatgacttgattcccaccaaccacccttgttatgccggccggccgggtaccgtgggcgaccgggccgggaatttcacggtccaaaacgctgattttctcttggtcctgggctgccggctgaatatacgccaaataagttatggcgattatgccttggcccccaaggcctggaaagcccaggtggatattgacccttcggaattgcataagccgagcttggccatggaaatgccggttcaggctgacttgaaggtgttcctgcccctgcttcaggaggcgttgaaaaactggcggccttcgccggcccaccaggaatggttgaactggtgccgggaaagggtggcgcgttacccggttttaccggccaaggaatatggggccgaggggctcatcaacccatatttttttatggatagattgttcgcccgccttggccctggtgacgtggtggtcgcggccaacgccaccgccgcggtaaccagtatgcaagccggccagatcgccgagggccttcgcctttattccaattccggcgccgcttccatgggctatgatttgccggcggccatcggcgccgcggccggcggggccgggcgaaacggccggctcatttgcctggccggcgacggcagtgtgatgatgaatttgcaggaactccaaaccattgttcactatcggctgccggtaatagtctatgttctgaacaacaacggctatcactccatccggcagacccaagaggcctatttcccggataacctcttgggcctggacccggcctcggggctgactttcccggattatttggaagtggcggccgctttcggtctccccggccggcgtatttcgagccacgcggaagtcgaggattttctggcttggtccctggctggccccaagccggcctaccatgaaataaggctggacccggggcagaattttgaacccaaacttagttcccgccaaaaggccgatggcagcatggaatcggcccggctggaagatatggcccccttcctgagcccggaagagctgaaagggaacctcatttaa

SEQ ID NO: 45532 - protein, 438 aa, Unknown
  Obtained from environmental sample
  DOMAIN (41)...(189): Thiamine pyrophosphate enzyme, central domain
  misc_feature (1)..(438): Xaa is any amino acid
MRGLPAGHSRALLELRGDVDLSANTLGDFTCPPKNILEKRAVEIAARLKAARRPVLMGGTGVRLAGVRDKFLEIAEQCSLPTVGGWNAYDLIPTNHPCYAGRPGTVGDRAGNFTVQNADFLLVLGCRLNIRQISYGDYALAPKAWKAQVDIDPSELHKPSLAMEMPVQADLKVFLPLLQEALKNWRPSPAHQEWLNWCRERVARYPVLPAKEYGAEGLINPYFFMDRLFARLGPGDVVVAANATAAVTSMQAGQIAEGLRLYSNSGAASMGYDLPAAIGAAAGGAGRNGRLICLAGDGSVMMNLQELQTIVHYRLPVIVYVLNNNGYHSIRQTQEAYFPDNLLGLDPASGLTFPDYLEVAAAFGLPGRRISSHAEVEDFLAWSLAGPKPAYHEIRLDPGQNFEPKLSSRQKADGSMESARLEDMAPFLSPEELKGNLI

SEQ ID NO: 45533 - DNA, 1191 bp, Unknown
  Obtained from environmental sample
  misc_feature (1)..(1191): n is a, c, g, or t
gtgttggcggatcaatggctggaattctttgtatgcgaaagccttgacgcggacgtattggccgctaaagggcagaaaaaaaccagcaagaggagcagtaacacaaagggagaagataacatcatctcaaacggctccggtattgtggtgaataagggacaggtggcgcttattgtcgataacggcaaaatagcggaactttgcgcggaagagggaaagtacacctacgaccagtcttcggaaccgagcgtattctacggcggactgggaaaaggcattctggacgcctttaaaaatattggggaacgttttaagtacggcggccagccgggaaaagatcaaaggatatattactttaacaccaaagagataatggggaataaatacggaacaccggcgcctattccttaccttatcgtcgatcccaatatcaacctgcgccttacaatcagtttacgcgccaatggcgaatattcctatcatattatgaatcctctggctttctacgcaaatgttaccgggaacgtggaagatgtatacacacgcgataaaatcgacagccagttaaaaagtgaaatagttactgttctgggtccttcattggcaaagttgggaacgggactggaataccatgaaatttcttttcaaaccgaaaagctggcgagtctccttaacgaagcgctctccgacaagtggagggaaggcaggggcatagaaattgtcaacttcggaatcacctgcaccgctacggaggaagacgaaacacggctcaagcagcttcagacggcggcggtaatgcgcgaccccacaatggctgccgcgtcgctggtgaacgcgcagagcgacgctatgcgtactgccgccgggaacaccagcggcgcgatggcgggcttcatgggcatgggcatggcaaacatggccggcggcatgaactcccagaacctgtttgcgatgggagcggcgcagcaggcaagcgcgcagcaggctgcggcgcagcaaactgcggccgcggctcctgccggagccggcagctgggcctgttcctgcggacacgcgggaaacgccggcaagttctgtgaggagtgcggaaagcccgcgcctgttgcggccgccagcggctggacctgttcctgcggacatgcgggaaacgccggcaagttctgcgaagagtgcggaaagcccaggccttaa

SEQ ID NO: 45534 - protein, 396 aa, Unknown
  Obtained from environmental sample
  misc_feature (1)..(396): Xaa is any amino acid
MLADQWLEFFVCESLDADVLAAKGQKKTSKRSSNTKGEDNIISNGSGIVVNKGQVALIVDNGKIAELCAEEGKYTYDQSSEPSVFYGGLGKGILDAFKNIGERFKYGGQPGKDQRIYYFNTKEIMGNKYGTPAPIPYLIVDPNINLRLTISLRANGEYSYHIMNPLAFYANVTGNVEDVYTRDKIDSQLKSEIVTVLGPSLAKLGTGLEYHEISFQTEKLASLLNEALSDKWREGRGIEIVNFGITCTATEEDETRLKQLQTAAVMRDPTMAAASLVNAQSDAMRTAAGNTSGAMAGFMGMGMANMAGGMNSQNLFAMGAAQQASAQQAAAQQTAAAAPAGAGSWACSCGHAGNAGKFCEECGKPAPVAAASGWTCSCGHAGNAGKFCEECGKPRP

SEQ ID NO: 45535 - DNA, 609 bp, Unknown
  Obtained from environmental sample
  misc_feature (1)..(609): n is a, c, g, or t
atggaaataaaagaatataaatgtcccaactgcggcggggcggttaagttcgacagcggaatccaaaaaatgaaatgcccctactgcggcgccgaattcgagatcgcggcgcttgaggaatatcaaaaacaactgcaggttcccgaggaaagcataaactgggacggaaaagacaccgcctgggatgaaaacgaacttgaagaactgtcaacaggttcctgcccctcgtgcggggcggagctgttaggcgataaaaataccgcgtccatggtctgccccaactgcggcaattcgcagattgtgttaaaacggctcaccggattattaaaacccgaatacataatccctttcaaattggacaagaaggccgcggtagaagcccttaaaaatttctacaagggcaagcggctgcttcccgattgcttcaaggaagaaaaccgcgtcaacagcatacagggggtttacctgcccttctggctttttgacgccaatgcccggggatatgtccgttacagggccacaaggatactgggctggagagatgcggatttcctttacacgannaccgacttttattccgttgtgcgcgacggcagcatgcagttttga

SEQ ID NO: 45536 - protein, 202 aa, Unknown
  Obtained from environmental sample
  DOMAIN (74)...(97): Domain of unknown function (DUF1610)
  misc_feature (1)..(202): Xaa is any amino acid
MEIKEYKCPNCGGAVKFDSGIQKMKCPYCGAEFEIAALEEYQKQLQVPEESINWDGKDTAWDENELEELSTGSCPSCGAELLGDKNTASMVCPNCGNSQIVLKRLTGLLKPEYIIPFKLDKKAAVEALKNFYKGKRLLPDCFKEENRVNSIQGVYLPFWLFDANARGYVRYRATRILGWRDADFLYTXTDFYSVVRDGSMQF

SEQ ID NO: 45537 - DNA, 927 bp, Unknown
  Obtained from environmental sample
  misc_feature (1)..(927): n is a, c, g, or t
atgaaattttttcactgcccttcacagttgttagaggaacgcgaaaatagcgaattaactttagaaaccctaacttttgaattgcttgatctcatagaaatgaacatgcatcttctattctgtaaaaaaataatgagctataattttccggaagaagacatagtattgcttgcatgtttctgtcatctatccggtaacagaagtgatgatgacatcagattatttaattttgaatttctttacgataacaaaagtgaatttagaagaatagtaagacagctgtctaatggaagccatttattaatcataaagcagctaatcgagcaaaataacgacgatggtattcgtagttcagattcgtggaaattatcagacaagggaaaacaggaattgcttgaagaattggatattaaggccaaaaattacaagaaagaccttattctttttgaaaacatcaaaacgaaaaaaatgttttataaccagcgggaaaccattgctatcaatacccttacgtctctcttacaggaagaaaactaccggaaaattcttggcaggcttgaaggcaaaggcatgagaaatggattcgcctgtctgttctccggtgggccgggaacgggaaagacagaaactgtctatcaaattgccagagaaacaaaacgcaacatcatggcagtggatatttccgaaacaagaagctgttggtttggtgacagcgaaaagaaaattaaggaaatattcagaacatactggaaggcagtagaaaattccaaaattgctcccattttgctgtttaacgaagcggacgcggtaatcaacaaacgaaaatccggtgaatatacagtcagtcaaacagaaaacaggattcaaaatatcattttacaggagatggaaaatctttccggcatcctgatcgctaccaccatttaa

SEQ ID NO: 45538 - protein, 308 aa, Unknown
  Obtained from environmental sample
  misc_feature (1)..(308): Xaa is any amino acid
MKFFHCPSQLLEERENSELTLETLTFELLDLIEMNMHLLFCKKIMSYNFPEEDIVLLACFCHLSGNRSDDDIRLFNFEFLYDNKSEFRRIVRQLSNGSHLLIIKQLIEQNNDDGIRSSDSWKLSDKGKQELLEELDIKAKNYKKDLILFENIKTKKMFYNQRETIAINTLTSLLQEENYRKILGRLEGKGMRNGFACLFSGGPGTGKTETVYQIARETKRNIMAVDISETRSCWFGDSEKKIKEIFRTYWKAVENSKIAPILLFNEADAVINKRKSGEYTVSQTENRIQNIILQEMENLSGILIATTI

SEQ ID NO: 45539 - DNA, 714 bp, Unknown
  Obtained from environmental sample
  misc_feature (1)..(714): n is a, c, g, or t
atggcatatctatatgaaacgcatttacacacaaaagaaagcagtagttgcggtgtttcagggggaagggaatatgtccggaggtaccttgacctgggctatacgggcatcattatcacagatcatttttataacggaaactgcagagcggatcgaaatcttccctggaagaaatgggtgcaggaatatatccggggttacgaaattaccagagaagaagggttccgccgggggtttgatgtattttttggctgggaggaatccctagatggagatgactacctaatctacggccttgataaagaatggctcctggcgcatcctgaagccgctcattggactccgaaagaacagtatgatgaagtcacgcgttttggaggctgtgtcgttctggcgcatcctttcaggtttgcacataacataaatcgcgcttccgtgcgtaaagtatatgccagtgctatagaagtcgccaattctggaaacagccaaatatctgacacgctggcttgggcatatgcagaaaagataaattttcccgctactgccggttccgatattcactgtgctgctgatatacggcaggatacggtctttggcgtttatcttgataaaaaaatggaaaccataaccgattatgtaaacgcgattttgaataataccatagcaaagctaaaagtgccgaaagggcgctttgatttttcagagaacatttag

SEQ ID NO: 45540 - protein, 237 aa, Unknown
  Obtained from environmental sample
  DOMAIN (5)...(190): PHP domain
  misc_feature (1)..(237): Xaa is any amino acid
MAYLYETHLHTKESSSCGVSGGREYVRRYLDLGYTGIIITDHFYNGNCRADRNLPWKKWVQEYIRGYEITREEGFRRGFDVFFGWEESLDGDDYLIYGLDKEWLLAHPEAAHWTPKEQYDEVTRFGGCVVLAHPFRFAHNINRASVRKVYASAIEVANSGNSQISDTLAWAYAEKINFPATAGSDIHCAADIRQDTVFGVYLDKKMETITDYVNAILNNTIAKLKVPKGRFDFSENI

SEQ ID NO: 45541 - DNA, 390 bp, Unknown
  Obtained from environmental sample
  misc_feature (1)..(390): n is a, c, g, or t
atgtcaatttacgcacctatgtctattgacattagatacataaaagtattacattattgtatggatgaacgccggatcatttgggatgaggccaagaatactgagaataagcaaaagcataaaatcggttttgaggtagctcagtatgtattcaccgatccgttgcggatatggcggcttgataggagtgaaaataacacatccggtgaggaacgttggcaaactattggtaaggttgggaaaactttctttgtggtctatacagagcaagaagaaagaacagagaatgtaacccgcctgatctctgcacgggaagccaaaaaacatgagaggagaagctacaatgggtattaccagatcgacggtaagggttggtcaaaagccacctaa

SEQ ID NO: 45542 - protein, 129 aa, Unknown
  Obtained from environmental sample
  DOMAIN (28)...(117): Protein of unknown function (DUF497)
  misc_feature (1)..(129): Xaa is any amino acid
MSIYAPMSIDIRYIKVLHYCMDERRIIWDEAKNTENKQKHKIGFEVAQYVFTDPLRIWRLDRSENNTSGEERWQTIGKVGKTFFVVYTEQEERTENVTRLISAREAKKHERRSYNGYYQIDGKGWSKAT

SEQ ID NO: 45543 - DNA, 390 bp, Unknown
  Obtained from environmental sample
  misc_feature (1)..(390): n is a, c, g, or t
atgagaggagaagctacaatgggtattaccagatcgacggtaagggttggtcaaaagccacctaaagaagttattaagcgggtaagaaaagcagtcagggaagcgcggaaagcgcctccagtttatgatcccgattgcccgccttccacgccggaagcgttaaaagaattcgcgcacctggccgcagaacgcaacaggcgcaagaaaaagaagtcgataacgatccgcattgccccggatgttttggaaagctacaaaacaatgggggacggctataccggcattatggccgatgtccttaaatacgtcgtcaataaccccggcatcctggccctaaacttgccccacagaattatgacatccattccttgtatgcaagcaaggtgttaa

SEQ ID NO: 45544 - protein, 129 aa, Unknown
  Obtained from environmental sample
  misc_feature (1)..(129): Xaa is any amino acid
MRGEATMGITRSTVRVGQKPPKEVIKRVRKAVREARKAPPVYDPDCPPSTPEALKEFAHLAAERNRRKKKKSITIRIAPDVLESYKTMGDGYTGIMADVLKYVVNNPGILALNLPHRIMTSIPCMQARC

SEQ ID NO: 45545 - DNA, 402 bp, Unknown
  Obtained from environmental sample
  misc_feature (1)..(402): n is a, c, g, or t
ttgcaggggtggaagatagagcagttccactatgtgctgaaatccggctgtacggttgagaagctgcaagaacgaagcatggaaaaaacaacgatgctagtccttatgtattccataatagcttcggcaattatgaacataacttatgttgcacgaatacacccactgcttccctgtacgatattttttgaggaagacgaatggaaggtattgtattgcaccgcaaataagacaaaaaaaatacctaaaaagccgtatacgattgctgaagcggtaacttacttaagctggctgggagggcccaaacgggctcccagcgacggccctcctggcgtcaaaacaatttggattgggcttgataaatttaacaccttgcttgcatacaaggaatggatgtcataa

SEQ ID NO: 45546 - protein, 133 aa, Unknown
  Obtained from environmental sample
  misc_feature (1)..(133): Xaa is any amino acid
MQGWKIEQFHYVLKSGCTVEKLQERSMEKTTMLVLMYSIIASAIMNITYVARIHPLLPCTIFFEEDEWKVLYCTANKTKKIPKKPYTIAEAVTYLSWLGGPKRAPSDGPPGVKTIWIGLDKFNTLLAYKEWMS

SEQ ID NO: 45547 - DNA, 1605 bp, Unknown
  Obtained from environmental sample
  misc_feature (1)..(1605): n is a, c, g, or t
gtggcgacaaacacagcaacccaacgatttttgcccgtaggcatccaagacttccgaaagattcgggagaagggctatatctatgtggacaagacgccgcagatctacccgttgatcaccggcattgagggggcgttcttcctctctcgtccgagacgcttcgggaagtcgttgctctgttcgacgcttggggcgatcttcgaggggcggcgtgagcttttcggggagatcgcggggagaccggcgttggccatcgacggcctcgactgggagtggaaaaagcatccggtgatttatcttgacctatacgcgggggactacagcgagggaaagccggtcctaaatacggtattgcaaaataaacttgagaatagtgcccgacgctacaaagtggccccacgcggacaaaccgcgccggtgcagtttgagaacctcatcgtggatttacacgagcataccggcgaaaagatcgtggtcatcatagacgaatacgactgtccgctgacaagcaccattctcgaaccggccatacatattcaactgcgggacgccctcaaagcgttctacggtgtcttgaaatcatgcgacgccgacttgcgcttccttttcttaaccggagtgagcaagttctcccaagtaagcgtcttttcagccctgaaccaactttcagacctgacgcttgacccgcgctacgcggatatctgcgggctgacccaagaggagctggaggcgaatttcgggccggagattgacggtgttgtggaaagtaccggacgtaatcgcgaggaatacattgaccaactgcgccgcttctacaacggctaccgcttctccaagaacccgctcaccgtctacaacccctttgggatactcaatcatttcgatcaaaacggcgatttcaggccgtattggtacagaagcggtacgccaaccctcctgacagacctgattaacagccagaatattgacctcacaaacttaaacaatatgcaggtcgggtacgacgatttcgatgctttcgacatagaggagatggaaccggcgccgcttttatatcaaaccggctacctgactataacagattacgacgaaaaccgagggcgttgtttcacactcgactacccgaatttggaggtacgcaacgcctttgcaaaatcgcttgcgacacggtgtcttaagaccaactcattagagtcaaccgcgttatgcgacaaactgacgacggcactaatcaacggcaacgtagacgccgctatggaggcggtgaagctatttatgaccaaaatcccgtacgacttgtttcaaaaacgggaaaacttctttncatcggtggtatacgtgatgttcgcaatgctcggtctcgactgtcgtaccgaggaaagaattgccaccgggcgggtcgacatggttgtggagacgcggggctttgtttactgcttcgagttcaaattggacggtaccgcggaagcggcgttagcgcagattgacagcaaggagtacgctgttccttggataggcggcgggaagaaggttttcaaggtgggtgtgagctttgattttgagaagaggaatgttggggagtgggtgtttgtggctgcggtttaa

SEQ ID NO: 45548 - protein, 534 aa, Unknown
  Obtained from environmental sample
  DOMAIN (1)...(528): Protein of unknown function (DUF1703)
  misc_feature (1)..(534): Xaa is any amino acid
MATNTATQRFLPVGIQDFRKIREKGYIYVDKTPQIYPLITGIEGAFFLSRPRRFGKSLLCSTLGAIFEGRRELFGEIAGRPALAIDGLDWEWKKHPVIYLDLYAGDYSEGKPVLNTVLQNKLENSARRYKVAPRGQTAPVQFENLIVDLHEHTGEKIVVIIDEYDCPLTSTILEPAIHIQLRDALKAFYGVLKSCDADLRFLFLTGVSKFSQVSVFSALNQLSDLTLDPRYADICGLTQEELEANFGPEIDGVVESTGRNREEYIDQLRRFYNGYRFSKNPLTVYNPFGILNHFDQNGDFRPYWYRSGTPTLLTDLINSQNIDLTNLNNMQVGYDDFDAFDIEEMEPAPLLYQTGYLTITDYDENRGRCFTLDYPNLEVRNAFAKSLATRCLKTNSLESTALCDKLTTALINGNVDAAMEAVKLFMTKIPYDLFQKRENFFXSVVYVMFAMLGLDCRTEERIATGRVDMVVETRGFVYCFEFKLDGTAEAALAQIDSKEYAVPWIGGGKKVFKVGVSFDFEKRNVGEWVFVAAV

SEQ ID NO: 45549 - DNA, 1647 bp, Unknown
  Obtained from environmental sample
  misc_feature (1)..(1647): n is a, c, g, or t
gtggtcagactgatggttcccattgttaataaaagccatgaagtagtcggagttgtaggctgtcaattaaatattgatgttatacagccccgaatagaggccactatcaaagacttcgacgaagttgatgcgatatctgtttactccagcaacgggtttattatggcgagctacagagatgagcggataggtaaaatgatggttgaggcggaagtacaattcggcgacagaattaacgatgccttcgaggctgttaaaaacggaaaagaattttcatgcttcagttacgcgcctacgatgcaaacaaacctgcaaatctccgttgtccctattcctcttgggcaagcggaaaatacctgggcgatcatgctcggtacaaaagaagcgtacataatgaaggatgtttacgcgatgatcatatttgctattattatcgcggtgatagcgataatagcgtcggcgggaattttattcattgttctggatagaacaaccaagccaatcattacagtagccgagaccttaaaaattgtagccgaaggcgatctgacgaagcaagtaaacgtcaatacgaacgacgaaataggcgggttagccaaagactttaattatacgatgaagaaaataaaagaccttatgcttctcattaaaaagcaggcgagcatattgaaagatataggcaacgatctttccagcaatatgaccgaaaccgccgcggcgataaaccaaatcaccgccaatatccagagcatcaagggcagagttataaatcagagcgccggcgtaaccgaaaccaacgcgaccatggaacaggttatcgccaacatcaacaaactcaacggccatgtggaaaaccagagcagaaatgtttcccaagcctcgtccgccattgaagaaatggtagccaatatcaattccgtcaccaacacgctggtcaataacgccgccaatgtaaaaacattaaaggacgcctccgaagtaggaaagacaggattgcaggaagtagcaatggacattcaggaaatagcccgtgaatccgaaggcttgctggaaatcaatacggtaatggaaaatatcgcaagccagacaaacttgctttcaatgaacgcggcgatagaagcggcgcacgcgggagaattgggaaagggcttcgccgtagtcgccgatgaaatccgcaaacttgctgaaagttccggcgagcaatccaaaaccatcggcacggtactgaaaaaaatagcggagtcaatcaaaaaaattacagtctctaccgaaaatgtactgaaaaggttcgacgcgattgattctggcgtcaagacagtgtcggatcaggaagaaaatatacgtaacgcaatggaggaacagggcgaaggaagcaagcaaatactgcaaagcgcgggcagtttaaacgagttaacccggcaggtacaaagcggttcagaggaaatgcttaacggcagccaggaagtaatcaaggaaagccagaaccttgaaaaggtaacgcanganataacaggcggcatgaacgaaatggccgatggggcggatcagataaacatagcggtaaacaatgtcaacgatatgactaccaaaaaccgcgaagccataaacagtttgatagcggaagttgcgcggtttaaggtggagtaa

SEQ ID NO: 45550 - protein, 548 aa, Unknown
  Obtained from environmental sample
  DOMAIN (291)...(504): Methyl-accepting chemotaxis protein (MCP) signaling domain
  misc_feature (1)..(548): Xaa is any amino acid
MVRLMVPIVNKSHEVVGVVGCQLNIDVIQPRIEATIKDFDEVDAISVYSSNGFIMASYRDERIGKMMVEAEVQFGDRINDAFEAVKNGKEFSCFSYAPTMQTNLQISVVPIPLGQAENTWAIMLGTKEAYIMKDVYAMIIFAIIIAVIAIIASAGILFIVLDRTTKPIITVAETLKIVAEGDLTKQVNVNTNDEIGGLAKDFNYTMKKIKDLMLLIKKQASILKDIGNDLSSNMTETAAAINQITANIQSIKGRVINQSAGVTETNATMEQVIANINKLNGHVENQSRNVSQASSAIEEMVANINSVTNTLVNNAANVKTLKDASEVGKTGLQEVAMDIQEIARESEGLLEINTVMENIASQTNLLSMNAAIEAAHAGELGKGFAVVADEIRKLAESSGEQSKTIGTVLKKIAESIKKITVSTENVLKRFDAIDSGVKTVSDQEENIRNAMEEQGEGSKQILQSAGSLNELTRQVQSGSEEMLNGSQEVIKESQNLEKVTXXITGGMNEMADGADQINIAVNNVNDMTTKNREAINSLIAEVARFKVE

SEQ ID NO: 45551 - DNA, 849 bp, Unknown
  Obtained from environmental sample
  misc_feature (1)..(849): n is a, c, g, or t
atggcggagactctgcagcagttcaagatgagcagcgcatcccaaatagaaaaagagcaaatcacctatgatccaatgccttacgggagcgtactggtagtggatgacgtggaaaccaatttatacgttgccaaaggtctcttggcgccttatgagctttcaatagaaactgccaatagcgggtttgaggcgattgacaaattcaaaggcggcggcgtntacgacataatcttcatggatcacatgatgccgaaaatggacggcattgaagcgacaaagatactgcgcgaaatgggatacaatggaaacatcatagcgctgacagccaacgccattgtcgggcaggctgaaatgtttatgaaaaacggcttcgatggttttatttccaaacccatagacatacgccagcttaacgccgcgcttaacaaaatgatacgtgacaaacagccgtttgaagttattgacgcggcgcgcaagcaaaaagcaacaaggaaggtagatcaaaaaacacctcaaccgcagttgcagccgcagccgcagtctgccgtctcacaggcaaaagaaaattttgcccgaaatacggaaatggcggttgcaaggctggaaacaatcttcaaaaatgaaactccaaaaccggaacaatcggggcaggatcgagatatcgacatgatattagccgaacttcccaagtttatcgaagcgctgcggataggcagcgaaaaattaaaagctgccgtaaaaggcagtgatccggaaaacgaagatatcgggttactgtatgcaaaactgcaaattatgcataaagcatacgaggagcgcgacaaacagtccggaaaagcagaacaataa

SEQ ID NO: 45552 - protein, 282 aa, Unknown
  Obtained from environmental sample
  DOMAIN (29)...(142): Response regulator receiver domain
  misc_feature (1)..(282): Xaa is any amino acid
MAETLQQFKMSSASQIEKEQITYDPMPYGSVLVVDDVETNLYVAKGLLAPYELSIETANSGFEAIDKFKGGGVYDIIFMDHMMPKMDGIEATKILREMGYNGNIIALTANAIVGQAEMFMKNGFDGFISKPIDIRQLNAALNKMIRDKQPFEVIDAARKQKATRKVDQKTPQPQLQPQPQSAVSQAKENFARNTEMAVARLETIFKNETPKPEQSGQDRDIDMILAELPKFIEALRIGSEKLKAAVKGSDPENEDIGLLYAKLQIMHKAYEERDKQSGKAEQ

SEQ ID NO: 45553 - DNA, 543 bp, Unknown
  Obtained from environmental sample
  misc_feature (1)..(543): n is a, c, g, or t
atgaacaaacaagaaaccctgagcattttggaaaaagtgaaaagcgggagcatttcgcccgaagatgctttgctgaaattatgtacagagccttttgaaaatttgggctacgcaaaagttgaccatcaccgcgaattgaggcaaggcgttcccgaagtgatatacggagccggaaaaacagcggagcagataattggcattgcaaccgccatgttggataaagggcagcaattgattttgataaccagattaacaccagacatagccgaacacgtaggggcaggnctncntgcctgccccttacattacacatgccaacccatcgcagtcaccaatgcaataccaccaaaccgcaaaaataggcgtaataggcgaaatgccaaagccaaacggcattggaaaaattgtaatagcaacaggcggcacaagcgatataccagtcgcggaagaagccgcgataaccgcagaggcactcggcaacgaagttgtccgtttatacgacgttggcgtttccggttttcacaggctgctttcccagtttga

SEQ ID NO: 45554 - protein, 180 aa, Unknown
  Obtained from environmental sample
  misc_feature (1)..(180): Xaa is any amino acid
MNKQETLSILEKVKSGSISPEDALLKLCTEPFENLGYAKVDHHRELRQGVPEVIYGAGKTAEQIIGIATAMLDKGQQLILITRLTPDIAEHVGAGLXACPLHYTCQPIAVTNAIPPNRKNRRNRRNAKAKRHWKNCNSNRRHKRYTSRGRSRDNRRGTRQRSCPFIRRWRFRFSQAAFPV

SEQ ID NO: 45555 - DNA, 462 bp, Unknown
  Obtained from environmental sample
  misc_feature (1)..(462): n is a, c, g, or t
atgcaataccaccaaaccgcaaaaataggcgtaataggcgaaatgccaaagccaaacggcattggaaaaattgtaatagcaacaggcggcacaagcgatataccagtcgcggaagaagccgcgataaccgcagaggcactcggcaacgaagttgtccgtttatacgacgttggcgtttccggttttcacaggctgctttcccagtttgataccattatgaatgcccaagttatcatttcaattgccggtatggaaggagcgttgaccagcgtcataggcggcttaaccgactgtcccgtcataggtgtcccgaccagcgtgggctacggtgcatcattcggtggcatagcggctttgctctccatgctcaactcgtgtgcaagcggcgtgagcgttgtgaatatagacaatgggtttggagcgggttatttggcgagcattataaatcataaaaaattatga

SEQ ID NO: 45556 - protein, 153 aa, Unknown
  Obtained from environmental sample
  DOMAIN (22)...(153): AIR carboxylase
  misc_feature (1)..(153): Xaa is any amino acid
MQYHQTAKIGVIGEMPKPNGIGKIVIATGGTSDIPVAEEAAITAEALGNEVVRLYDVGVSGFHRLLSQFDTIMNAQVIISIAGMEGALTSVIGGLTDCPVIGVPTSVGYGASFGGIAALLSMLNSCASGVSVVNIDNGFGAGYLASIINHKKL

SEQ ID NO: 45557 - DNA, 1260 bp, Unknown
  Obtained from environmental sample
  misc_feature (1)..(1260): n is a, c, g, or t
atgaaaacgctttattttgaatgtaacatgggcgcggcgggcgatatgctgacagcggctttactggaattacacgacaatcctcaagaatttttgaagaaactaaacggcattggcatccccaatgtattgataaaagcggaaccgtctgtaaaatgcggcataaccggaacgcatatcaccgtaacgatcaacggacaggaagaagatgatcacatacacgatgaccatgatcatgaaaatagcgaacatgaacaccaccatcacgaacatacacacgatcatacccatgatgaacatacgaacagtgaacatcaccacagccacaacagctaccacgatattgaacatctaatcagtcatttgacagtttccgataccgtaaaaaagaacaccctcgaagtctacaaactaatagccgaagctgaaagccgcgcacacggcgttccggtagacaaaatacactttcacgaagtaggaaatatggatgcactagccgacattacaggcgtttgtatgctgatagaagaacttgcgccctatgtaattctggcttctccaatcaatacaggaagcggacacgtccgctgcactcacggcattttacctgtacctactcccgcaaccgccaatattttacagaatattcccatgtatagcgaccaaacacagggagaactctgtacaccaacaggcgcggctttacttaaacactttgtaaaagaatttcgcgcaatgcctatgctaagtgttgataaaatcggatacggtatgggcaaaaaagattttgaaaaagcgaactgcctgcgtgcttatatgggaaacacctgcgataaaagcgaagaaattatagagcttgcctgcaacctagacgatatgacaccggaagccgttgcctacgcgcagcaacttttgtttaaggaaggtgcgcttgatgtttacattacgccaacgattatgaaaaaggggcgccccggtttgctcttcacctgtatatgcaacgcggagtcaaaagacaaaatgctatctctcattttcaagcacacgagcacgcttggcgttagggaacatatttgccaccggcacactttgcaaagagagcaaaaagaagtccaaacaaaattcggtcccgtaaggataaaaacctccagcggttatggcacaacaaaatccaaacccgaatacgaagacatcgcaaaaatcgcgcaggaaaaaggcatctccattcgggaggtgttggaaggattggaggagttgtaa

SEQ ID NO: 45558 - protein, 419 aa, Unknown
  Obtained from environmental sample
  DOMAIN (4)...(419): Protein of unknown function DUF111
  misc_feature (1)..(419): Xaa is any amino acid
MKTLYFECNMGAAGDMLTAALLELHDNPQEFLKKLNGIGIPNVLIKAEPSVKCGITGTHITVTINGQEEDDHIHDDHDHENSEHEHHHHEHTHDHTHDEHTNSEHHHSHNSYHDIEHLISHLTVSDTVKKNTLEVYKLIAEAESRAHGVPVDKIHFHEVGNMDALADITGVCMLIEELAPYVILASPINTGSGHVRCTHGILPVPTPATANILQNIPMYSDQTQGELCTPTGAALLKHFVKEFRAMPMLSVDKIGYGMGKKDFEKANCLRAYMGNTCDKSEEIIELACNLDDMTPEAVAYAQQLLFKEGALDVYITPTIMKKGRPGLLFTCICNAESKDKMLSLIFKHTSTLGVREHICHRHTLQREQKEVQTKFGPVRIKTSSGYGTTKSKPEYEDIAKIAQEKGISIREVLEGLEEL

SEQ ID NO: 45559 - DNA, 309 bp, Unknown
  Obtained from environmental sample
  misc_feature (1)..(309): n is a, c, g, or t
gtgattaaagttcttatcccttacgcgctcagggcgtttaccgagcgcaacgcggaggtggaagtaaaaggcggcacggcgggagaagcggttaacgcgctcgcaagcgcctatcctgccctgaaaaatcacctgttcacggaggacggtcagcttcgcgacttcatcaatctgttcgtaggcggcgcgaatatcaacagcctgcaggggctcaacaccccggtcgcggataacggcgaagtaatgatagtccccgctatcgccggaggcgccattgctggaggcttgcggcttcagctgcggcagtag

SEQ ID NO: 45560 - protein, 102 aa, Unknown
  Obtained from environmental sample
  DOMAIN (4)...(90): ThiS family
  misc_feature (1)..(102): Xaa is any amino acid
MIKVLIPYALRAFTERNAEVEVKGGTAGEAVNALASAYPALKNHLFTEDGQLRDFINLFVGGANINSLQGLNTPVADNGEVMIVPAIAGGAIAGGLRLQLRQ

SEQ ID NO: 45561 - DNA, 456 bp, Unknown
  Obtained from environmental sample
  misc_feature (1)..(456): n is a, c, g, or t
atggagggacctcgcgtaatgatgcggctttcttccgaattggaacgcaatatcagaagggacggcgaaaacgcctatcccaatgaatgttgcggcgttttaatcggcggggttgataacgcgggagttaaaagcgtcaaacgtacgctgactattgataacgcgagggaagacggcgagcaataccaccgctttctcataacgccggaagatatgcttcgcgctgagcaaacagcgagatcgatgaaacttgacgttatcggcttttaccactcgcaccccgaccatccttcggcgccctcaggttatgacaaggatcacgctctgccgttttattcctatgtgattgtgtcggtagataagggcaaggcgcagattcttacaagctgggagcttacagacgacagaactgattttatgcaggaagaaattataatggaggaggacgcaaagtga

SEQ ID NO: 45562 - protein, 151 aa, Unknown
  Obtained from environmental sample
  misc_feature (1)..(151): Xaa is any amino acid
MEGPRVMMRLSSELERNIRRDGENAYPNECCGVLIGGVDNAGVKSVKRTLTIDNAREDGEQYHRFLITPEDMLRAEQTARSMKLDVIGFYHSHPDHPSAPSGYDKDHALPFYSYVIVSVDKGKAQILTSWELTDDRTDFMQEEIIMEEDAK

SEQ ID NO: 45563 - DNA, 411 bp, Unknown
  Obtained from environmental sample
  misc_feature (1)..(411): n is a, c, g, or t
atgatggcgagcgagcattttgtcgcgggaaccggcacttcgggaacttttatgggcgtttccagacggcttaaagagattgattcttccatacaagttacgctgatgcagccggattcgccgtttcacgggcttgagggaatgaagcacatggaatcaaccataacgccgaaaatatttgacaaaagcattgccgatttacacataacggttaaaacggaagacgcttacaaaacggcgcggcggcttgccgcggaagaaggggtgtttgtcgggataagctcgggggcaaacgtgtacgccgcgatggaagtggcaaaaacgctgccacatgggtcgcgagtggctactattctgtgcgataacggcaaccgttatctgtcacagccgttatggagggacctcgcgtaa

SEQ ID NO: 45564 - protein, 136 aa, Unknown
  Obtained from environmental sample
  misc_feature (1)..(136): Xaa is any amino acid
MMASEHFVAGTGTSGTFMGVSRRLKEIDSSIQVTLMQPDSPFHGLEGMKHMESTITPKIFDKSIADLHITVKTEDAYKTARRLAAEEGVFVGISSGANVYAAMEVAKTLPHGSRVATILCDNGNRYLSQPLWRDLA

SEQ ID NO: 45565 - DNA, 1377 bp, Unknown
  Obtained from environmental sample
  misc_feature (1)..(1377): n is a, c, g, or t
atgacggaaatattgaaggggcaaaaaaagtttttcttaccacgaaatattcggacgggctttccagagtcggcgatcattataaatcgcaaaataaacctcttgaggcgctgcaaatgtactggattgcgcctgatcgtacaaaatccgagcctttgcttgaacaacttgcggcggtattgcgcggacttattcctgaagatgaagaatacggcgtctttcaggaaggacaggaacagcatgattgatgaaattcccgcgatggaacctcataaaatatctgaaatttccaaagtcgggtatcaattcctaaaagaaaataaaattgacgaagccatcgactgttttacaaaaattcttttaatggacgaaaataacaattacgcgcttgtcggacttggagacgctacgcgcaaacagggttcaattcacgaagccgtaaaattttatcaaagatgcctttctaaccatccgggaaataactacgctcttttcggcctggcggattgttacaaggcaatgaaccagtacaaaaaagcaattgaaatatgggaacagtatctgcttcatgacgataaaaatattacagtcctgacaagaatagcggacgcttacaggaaggtgcgtgattatgccaattccagaaatatctacatgaaggttttggaaatggaagaaaacaacccgtacgccataatcggcatggggcatcttcattatgattttaaggaatacaaagaggctcttttttattgggaaaggatgctgaanaacagcagcgagaacgtggatatccgcgttcttacttccataagcaactgccacagaaaattaaaaacattcaataaaggcataccctattttgaatccgtactaaaaagagagccggataatttttacgctcttttcggacttgccgactgttaccgaggtatgaatcaggtggaaaattccctttcttactggctgcgtatacttgaacaagacccaagaaacaaaatgattcttacccgcgcgggagatgcgtaccgcaacttaaaagattttgataacgcaaaaacattttatgaaaaagcgttaaatattgaatttgacacctacgccgttatgggacttgcccttgttacgaaagaacagggtaagtatgacgaagctatcatatcgtttaagcggctaattcaacaggacagcaagaattaccgtctttattatgaacttgcggactgttatgtcaaaacaggcgataagcgaagcgccgtagaaacattggaaactttccaaagacttggaataaaaaatcaaaaaattacggaaatgcttgaatcgctcaatgagccgcataagggcgaaaaatccaatacggcaaatacgcaatga

SEQ ID NO: 45566 - protein, 458 aa, Unknown
  Obtained from environmental sample
  DOMAIN (161)...(194): Tetratricopeptide repeat
  misc_feature (1)..(458): Xaa is any amino acid
MTEILKGQKKFFLPRNIRTGFPESAIIINRKINLLRRCKCTGLRLIVQNPSLCLNNLRRYCADLFLKMKNTASFRKDRNSMIDEIPAMEPHKISEISKVGYQFLKENKIDEAIDCFTKILLMDENNNYALVGLGDATRKQGSIHEAVKFYQRCLSNHPGNNYALFGLADCYKAMNQYKKAIEIWEQYLLHDDKNITVLTRIADAYRKVRDYANSRNIYMKVLEMEENNPYAIIGMGHLHYDFKEYKEALFYWERMLXNSSENVDIRVLTSISNCHRKLKTFNKGIPYFESVLKREPDNFYALFGLADCYRGMNQVENSLSYWLRILEQDPRNKMILTRAGDAYRNLKDFDNAKTFYEKALNIEFDTYAVMGLALVTKEQGKYDEAIISFKRLIQQDSKNYRLYYELADCYVKTGDKRSAVETLETFQRLGIKNQKITEMLESLNEPHKGEKSNTANTQ

SEQ ID NO: 45567 - DNA, 972 bp, Unknown
  Obtained from environmental sample
  misc_feature (1)..(972): n is a, c, g, or t
atggaaactgaatgtctttccatagaaaacctctcctgcgatttcctgactgttgaagggatcgtgtatgctctgggcggcgtgaatctgcaattaaaacacggggaaattcacggccttgtcggggaatccggctgcggaaaaagcgtaacagcccgcgcaattctgggtcttgttgacagaaggcatacccgcattggaggagttgtccgctttgacggtaaaaatcttttgtctctgccggaaaaggaaatgcgctccatccggggagaacgtatttccatgattttccaggacccgctcaattccctttcgccgctggaaactgtcggcagccagatcagggaagccatgaccaatcatctggatttaagccgggatgaactgcgccgccgtaccgaggagcttttggtgaaagtaggccttcacccggatacggcaaaacattatccttttgaactttccggcggaatgcagcagcgggttatgatcgcccaggcaataagctgcaatccggaactgcttatcgccgatgaaccgactaccgcccttgacctcaccatccaggcccaggtgctgagcctgcttaaagggctgcaaaaagaactgtccattacggtattattcattacgcataacttcgccctggttacagaaaactgcgacagggtttcggtaatgtactcaggacgcattgtggaaacagccccctccagggccattatcgggtccgccgcccatccttacacgcgcgcccttataaactgcataccccggccgcaaacaggcgggaaccgcaggaaaaaacttccggtgatttcaggttctcctcccaggctctacgcccccctggaaggctgtccctttgtaaagcgctgtcctaaggcggataaggcctgcgttgatatgcccccgattacggacataggcggcgaaagatcggtatgctgccacaactggagcgacgtatga

SEQ ID NO: 45568 - protein, 323 aa, Unknown
  Obtained from environmental sample
  DOMAIN (233)...(300): Oligopeptide/dipeptide transporter, C-terminal region
  misc_feature (1)..(323): Xaa is any amino acid
METECLSIENLSCDFLTVEGIVYALGGVNLQLKHGEIHGLVGESGCGKSVTARAILGLVDRRHTRIGGVVRFDGKNLLSLPEKEMRSIRGERISMIFQDPLNSLSPLETVGSQIREAMTNHLDLSRDELRRRTEELLVKVGLHPDTAKHYPFELSGGMQQRVMIAQAISCNPELLIADEPTTALDLTIQAQVLSLLKGLQKELSITVLFITHNFALVTENCDRVSVMYSGRIVETAPSRAIIGSAAHPYTRALINCIPRPQTGGNRRKKLPVISGSPPRLYAPLEGCPFVKRCPKADKACVDMPPITDIGGERSVCCHNWSDV

SEQ ID NO: 45569 - DNA, 567 bp, Unknown
  Obtained from environmental sample
  misc_feature (1)..(567): n is a, c, g, or t
gtgtgccgttgctgcgacgtgctcctttcttttccctcgcttctgttggcgttcctctttgtaaccgcgctgggacggggtattaccggcgcggtgacggcgttgggaatcgtttatgtgccaatgattacccgcctgatcagatcgctcaccttgatcgaaaaaaataaaacctatgtggaagccgccgagtcggtgggcttttcccgtccgtatattctgttccggcatattctgcccaactgcgtctataccgtactggtacagcttacgctggatttagcctacgcgattcttgacctggccgcgttaagttttattggtttgggggtaagcccgcccacggctgactggggagccatgctgcaggaaggcagaaattttctgcttcagagtccgcttcttgccctcgcgccgggagccgccattgttgtgacggtgataagccttaatattttcagcgactgcgtaacccaatacctcgatccccagggcagagtccttccttcttttgagaagattgaaaaacgcaggggtataatcaggagtcaggttaatggaaactga

SEQ ID NO: 45570 - protein, 188 aa, Unknown
  Obtained from environmental sample
  SIGNAL (1)...(25)
  DOMAIN (1)...(167): Binding-protein-dependent transport system inner membrane component
  misc_feature (1)..(188): Xaa is any amino acid
MCRCCDVLLSFPSLLLAFLFVTALGRGITGAVTALGIVYVPMITRLIRSLTLIEKNKTYVEAAESVGFSRPYILFRHILPNCVYTVLVQLTLDLAYAILDLAALSFIGLGVSPPTADWGAMLQEGRNFLLQSPLLALAPGAAIVVTVISLNIFSDCVTQYLDPQGRVLPSFEKIEKRRGIIRSQVNGN

SEQ ID NO: 45571 - DNA, 753 bp, Unknown
  Obtained from environmental sample
  misc_feature (1)..(753): n is a, c, g, or t
atgcgcggcgaaataaaaccagggggcttgcccaaacatgccacgatttttttctccgatatccggggctttacggaaaaatcagaaatttttacaaaagaatacggtaagggcgcttctgacaaaattattttctggcttaacgaatattttacgcaaatggtcaactgcgtggaaaagacaaacggcgttgtggataaatttataggcgacgcggttatggcgcattgggggacggcgtacaccgccggaagtcccgcaaaggacgcttttaacggcgttaaggcggctcttatgatgcgtaaagcgctggttatgctgaataaaaaacgcataccggatgatcccggagatccgccaattaaaatcggttgcggtattaattcgggtattgttacggcaggacagcttggatcggatcttcgcatggagtatacggtaataggcgatcctgtaaatctcgcgtccagaattgaagcgttaaataaacccctggggacggacatattaatttctgagagtacatggaaccttattaaatatttttttattacggaagaaatgccctctgtaatggtaaagggaaaggaaaaacccgtgcgtatattcgccgttgtaaaccatgtttcggttacttcaggccccagaacattggctgaagtaagggaattgctcggtataaagcctcctgatatttcnaaggttgataccaatgccgaagaaaagaaatataaaattggcgctaacgcgtaa

SEQ ID NO: 45572 - protein, 250 aa, Unknown
  Obtained from environmental sample
  DOMAIN (5)...(207): Adenylate and Guanylate cyclase catalytic domain
  misc_feature (1)..(250): Xaa is any amino acid
MRGEIKPGGLPKHATIFFSDIRGFTEKSEIFTKEYGKGASDKIIFWLNEYFTQMVNCVEKTNGVVDKFIGDAVMAHWGTAYTAGSPAKDAFNGVKAALMMRKALVMLNKKRIPDDPGDPPIKIGCGINSGIVTAGQLGSDLRMEYTVIGDPVNLASRIEALNKPLGTDILISESTWNLIKYFFITEEMPSVMVKGKEKPVRIFAVVNHVSVTSGPRTLAEVRELLGIKPPDISKVDTNAEEKKYKIGANA

SEQ ID NO: 45573 - DNA, 798 bp, Unknown
  Obtained from environmental sample
  misc_feature (1)..(798): n is a, c, g, or t
ttgcagaaggcaccccggaaaaaattgcaaaaaatcccaaatcgcaaacagggaaatttctatattctcattgtgccatttttactagaaacaaaagaagtatcaaaagcctatagagaaacgggtggaaatcttgaaatattgaaaaatgtcaatttcacgttgagcgaaggcaatattgctgtgctaacaggacctagcggttctggcaaatccacttttttaaacatagtgggggctttagacaggccaaccggaggcttggttttctttaacggcagggaaatgtcaaaattttcccgtaaggaaacaaacagttttcaccgcaaaaatttgggttttatgtttcagtttcatcacctgctcgcagaattcaccgcatatgaaaatgtgcttatgccagctagaatagctcatcaaaattataacgaaagccgtgaaagagcattggaacttttgagcattgttgggctttctgagcgaattggccacttgcctcgcgagctttctggcggtgaacgccaaagggttgcactagcacgtgcccttatgaacaggccaagtttgattatagcagacgaacccagcggaaacttagacgaaaaaaacgcagaggtgctaaaatctcttattttggaactcaataaaaaatatgggcaaacatttttaatcgcaactcacgatatggatttggcagggatagccacagataggtggcttgttgcgcacggaacaatcatggtgaatacaattgcctacgaaaggcgcaaatctgttcgaacatctatgggcacgtag

SEQ ID NO: 45574 - protein, 265 aa, Unknown
  Obtained from environmental sample
  DOMAIN (58)...(244): ABC transporter
  misc_feature (1)..(265): Xaa is any amino acid
MQKAPRKKLQKIPNRKQGNFYILIVPFLLETKEVSKAYRETGGNLEILKNVNFTLSEGNIAVLTGPSGSGKSTFLNIVGALDRPTGGLVFFNGREMSKFSRKETNSFHRKNLGFMFQFHHLLAEFTAYENVLMPARIAHQNYNESRERALELLSIVGLSERIGHLPRELSGGERQRVALARALMNRPSLIIADEPSGNLDEKNAEVLKSLILELNKKYGQTFLIATHDMDLAGIATDRWLVAHGTIMVNTIAYERRKSVRTSMGT

SEQ ID NO: 45575 - DNA, 378 bp, Unknown
  Obtained from environmental sample
  misc_feature (1)..(378): n is a, c, g, or t
atgaatattattgacacttctttatggatagagttttttgccggaatgccattggataaatcaatcataaacgccttgtcgaataacgatgaactgtatgtccctaccatttgtttatatgaagtaaagaagaaatttttatatgacaatgatgctgtcaaagctgttactgccattgatattatgaaaaaaggtatggtaataaatattgattctgaagttgcgctgttggcttctgatataagcaaacaatataaacttcctatggcagacagtatcatttatgctaccgctgtactgtggaatgctgaactatacacgcaggacaagcattttaaaaatctggagcatgtccattatttttcaaaatcatcctga

SEQ ID NO: 45576 - protein, 125 aa, Unknown
  Obtained from environmental sample
  DOMAIN (2)...(120): PIN domain
  misc_feature (1)..(125): Xaa is any amino acid
MNIIDTSLWIEFFAGMPLDKSIINALSNNDELYVPTICLYEVKKKFLYDNDAVKAVTAIDIMKKGMVINIDSEVALLASDISKQYKLPMADSIIYATAVLWNAELYTQDKHFKNLEHVHYFSKSS

SEQ ID NO: 45577 - DNA, 879 bp, Unknown
  Obtained from environmental sample
  misc_feature (1)..(879): n is a, c, g, or t
atgtcagatgaacttacccctcgtgaacgggaaatttttaacttattgcttgaaggcgtcccgccgaaagaaattgcgtataaactcaatattagttatagcaccgtagattttcaccgcaataatttgtacaacaaacttgatattcatagtgttcaggaacttttcgccaaatactcaaccaccggcaaaacggctccntacgaacctgaaaacgcgctcnttattcccgggacaaaaaagcagaagagattcaagttattgcttcctgccgggatagcggctcttgctttatcagtgttgttgatattgatatttaccataaatacgtatgtttttttcaagccaaaaggggaaataatgccggtttataatctggggttcttcccttatgctgactcaaatcgtcaaaaagggaactccacatgtgaaatttttattacatcggaagaaattgacggagtggaggttaacagcgttctgaatataaaaacaaatctggtaaaaagagaagacagcgacattatttatgcgagtgtgaatacaaaaaaagaggatataattcaacggttaaggcaggcaaacggaatacgatttaaggcgcggggagacggaaaatcgtggtctgtagatttttttacaaaagaatcaactcaggaaaataatcatgcccgttatgcgtattcatttggaactgtccgtgatcaggttatggttgttgatgttccgtattcaaaattaactatgcctgtagggtatgaacaatactcgtttaattttaacaaagagacaataaaagaaatgttttttttcgcaaatccttatattcaagggttcggttcgtcttcattacaaatatttgactttgagatttattga

SEQ ID NO: 45578 - protein, 292 aa, Unknown
  Obtained from environmental sample
  DOMAIN (2)...(59): Bacterial regulatory proteins, luxR family
  misc_feature (1)..(292): Xaa is any amino acid
MSDELTPREREIFNLLLEGVPPKEIAYKLNISYSTVDFHRNNLYNKLDIHSVQELFAKYSTTGKTAPYEPENALXIPGTKKQKRFKLLLPAGIAALALSVLLILIFTINTYVFFKPKGEIMPVYNLGFFPYADSNRQKGNSTCEIFITSEEIDGVEVNSVLNIKTNLVKREDSDIIYASVNTKKEDIIQRLRQANGIRFKARGDGKSWSVDFFTKESTQENNHARYAYSFGTVRDQVMVVDVPYSKLTMPVGYEQYSFNFNKETIKEMFFFANPYIQGFGSSSLQIFDFEIY

SEQ ID NO: 45579 - DNA, 321 bp, Unknown
  Obtained from environmental sample
  misc_feature (1)..(321): n is a, c, g, or t
ttgcgcgccgaaaacggcgtccgttatctgtcagaatgtgcaaacggcgtgatttccgcggaagtgaaagaatccattgattgcggcacccatactctgtttatcgccgaggtgaatcaggcgttttcgctgtcgcgcgatccaagcgttacctatcaatattattttgataatattaagccaaagccccagccgcctaagggaaacaaaaagggattcgtctgcaaaatatgcggatatgtgcatgaaggcgacactttgccggatgattttatttgtccgctatgcaagcacggcgccgcggattttgagcgtatttga

SEQ ID NO: 45580 - protein, 106 aa, Unknown
  Obtained from environmental sample
  DOMAIN (70)...(103): Rubredoxin
  misc_feature (1)..(106): Xaa is any amino acid
MRAENGVRYLSECANGVISAEVKESIDCGTHTLFIAEVNQAFSLSRDPSVTYQYYFDNIKPKPQPPKGNKKGFVCKICGYVHEGDTLPDDFICPLCKHGAADFERI

SEQ ID NO: 45581 - DNA, 423 bp, Unknown
  Obtained from environmental sample
  misc_feature (1)..(423): n is a, c, g, or t
gtgaacctcaccgtttcccagggcggcaagatcatcctgggcggcaagcgcaatggcgcattctatgaacccacggtaattgttgatgtgcccaggtcagcggacgttgccaaagacatggagatcttcggcccggtggtgccgatcacgggctttgacaccctggaagaagcggtggagatcgccaactcctccaaattcggactctgcggctgtatctttacctcggacatgaagaccgcctggaaaaccgccgccgagcttgaatgcggcggcgtgatcatcaacggcgcgagtttcttccgcagtttcgagatgccctttggcggctacaagtactcaggcataggaacagagggcgtcatgtcaacttttaacgaggtaacgctgaccaagactatagttttaaaaaatatcgtgtaa

SEQ ID NO: 45582 - protein, 140 aa, Unknown
  Obtained from environmental sample
  misc_feature (1)..(140): Xaa is any amino acid
MNLTVSQGGKIILGGKRNGAFYEPTVIVDVPRSADVAKDMEIFGPVVPITGFDTLEEAVEIANSSKFGLCGCIFTSDMKTAWKTAAELECGGVIINGASFFRSFEMPFGGYKYSGIGTEGVMSTFNEVTLTKTIVLKNIV

SEQ ID NO: 45583 - DNA, 852 bp, Unknown
  Obtained from environmental sample
  misc_feature (1)..(852): n is a, c, g, or t
gtggcgtttgcttactccagcgtcgcttatgatcagggagaactgcttaaaggcgtggctgagggattgccgagggttccggttctgggaaatacttcttttaccggcatcattacccccgagggattcatttccggggataagggttttgtagggcttttgacccttggcggaaaagatctgactgtgggtgtcgcgggaaaagctaaaaacggcgatgccagggcaaccggcagggatgttgccaaagaggccatgaagaacgccggaaaaagcggagcgccggcttacttctacatggcagcttctccgggcgaagaggaattctatcttaagggtatcagcgatgtaatcggaagagtcccgtatttcgggggaagcgccgcggacaacagcatcgcgggcgagtggaaactgttcgccaacaaccatgttttcgtggacggcgtagtgaccgccttcttttacacggacaaaccagtgacaaatctttttaccggcgcttaccgtgaaaccgcagatgcggggatcatcaccaaggtaaaaaacaacaggacgcttgtggagattgacggggtaccggcgcttaaaaaatatgcgcaatgggcgggggttgatcctgagactctcaaaggcggcaatctgctggtccatacgattacgtctcctttgggcgtaaaggacaggcttggcgaccttaccgctatccggcatcccatgaacggcaacgacgattattcaatggccatcggggcaaacctcgccgaaaaaacggctgtaatccgaatggagggatcggcggacgaactgatttcatccgcttcgcatacccttgactctttgaaagaataa

SEQ ID NO: 45584 - protein, 283 aa, Unknown
  Obtained from environmental sample
  DOMAIN (30)...(257): Domain of unknown function (DUF1745)
  misc_feature (1)..(283): Xaa is any amino acid
MAFAYSSVAYDQGELLKGVAEGLPRVPVLGNTSFTGIITPEGFISGDKGFVGLLTLGGKDLTVGVAGKAKNGDARATGRDVAKEAMKNAGKSGAPAYFYMAASPGEEEFYLKGISDVIGRVPYFGGSAADNSIAGEWKLFANNHVFVDGVVTAFFYTDKPVTNLFTGAYRETADAGIITKVKNNRTLVEIDGVPALKKYAQWAGVDPETLKGGNLLVHTITSPLGVKDRLGDLTAIRHPMNGNDDYSMAIGANLAEKTAVIRMEGSADELISSASHTLDSLKE

SEQ ID NO: 45585 - DNA, 711 bp, Unknown
  Obtained from environmental sample
  misc_feature (1)..(711): n is a, c, g, or t
gtgggaatagccgaggaaaaatccaagcaagaggtgcaggaagaggctaagctcacaaaaacaaaagaaatggcggtattcgaggtcgcgaccgtccgcaaggccgagattgagaagaaggcggtggtcgtaaatacggaagcgcaaaaagagaccgcgataataaaagccgagggagaccggcagagcgttatagtgagatcggaaggtgagcggcagagcgttatagtgaagtcggaaggcgagaaagtatcagccgagaatatttcgacggcgataaaggccaaggggttcgccgaagcggacgtaatacagaaaacaaagatggcggaagcggaaggtatcaaagcgaccaccttggcgcaagcggagggcgagaaggcgatgcagttggcctccgttaccgcccagaaagagttggcggcggccatcggcgagaatcagggctatcagcagtacctgatcacaatcaggcaggtggaggcgcagcaggcgataggggtcgagcaggcgaagaatatcggccacgccgatataaagataatatccaacgctggaaccattgaggagggcataagcggggcgacaaaattattcggttccaagcttgggcaaaacattgcggcgacgcttgaggggttggcgcagacggatacggggcgcgcggtgctggataagattttggcgggtaggggagagaaaaagagttga

SEQ ID NO: 45586 - protein, 236 aa, Unknown
  Obtained from environmental sample
  misc_feature (1)..(236): Xaa is any amino acid
MGIAEEKSKQEVQEEAKLTKTKEMAVFEVATVRKAEIEKKAVVVNTEAQKETAIIKAEGDRQSVIVRSEGERQSVIVKSEGEKVSAENISTAIKAKGFAEADVIQKTKMAEAEGIKATTLAQAEGEKAMQLASVTAQKELAAAIGENQGYQQYLITIRQVEAQQAIGVEQAKNIGHADIKIISNAGTIEEGISGATKLFGSKLGQNIAATLEGLAQTDTGRAVLDKILAGRGEKKS

SEQ ID NO: 45587 - DNA, 642 bp, Unknown
  Obtained from environmental sample
  misc_feature (1)..(642): n is a, c, g, or t
ttgtcaacggatatgctgaataacgcgacccccgaccaagcggtatcaatgaaagcgtacatgcgcgatcaattcgaatacctcggcctccccaaacccaaacgcagcgaaatttgcaaaccgtacctcaaaacggccaaacgcgagacgcaaatcgactggaagttcatagaccgctgctggaaagaaccgtaccgcgaatatcaatacgtcgcaatggactacttgtcgcaagtaaataaactgcttaccgccgccgatgtgccgaaaatcaaaaaactgatagtcaaaaaatcatggtgggacaccgtagacggattagacgaaatcataggtggcatcgccacgcggttccccgacgtcaaacaaacattgcttgaatggagcacagacaaaaacttctggctgcgccgcgccgccattgaccatcaactgcagtacaaggataaaaccgacacaaaacttttcgagaaaatcctagtcaacaattttggacaaaccgaattcttcatcaacaaagcaataggttggagtctgcgcgagtacagcaagaccgatcccgattgggtgagaactttcattaaaaagcataaaaactcgctcgcgccgttgagtattcgggaggcgagcaagtatatttag

SEQ ID NO: 45588 - protein, 213 aa, Unknown
  Obtained from environmental sample
  misc_feature (1)..(213): Xaa is any amino acid
MSTDMLNNATPDQAVSMKAYMRDQFEYLGLPKPKRSEICKPYLKTAKRETQIDWKFIDRCWKEPYREYQYVAMDYLSQVNKLLTAADVPKIKKLIVKKSWWDTVDGLDEIIGGIATRFPDVKQTLLEWSTDKNFWLRRAAIDHQLQYKDKTDTKLFEKILVNNFGQTEFFINKAIGWSLREYSKTDPDWVRTFIKKHKNSLAPLSIREASKYI

SEQ ID NO: 45589 - DNA, 405 bp, Unknown
  Obtained from environmental sample
  misc_feature (1)..(405): n is a, c, g, or t
atgagatctaccagggaatttcacactaaacaaactttagcttcgctgctccttgaaaaaactgtctttgggaatatggaactagtgaatcagggaaaagtagcggtacagctcctgcgaaaagaattcctggaaagctgcaaaggcacattggacgatacccatggttttatcaatactcccctgaagtgcaaagaagtccaggtttcggtttttgtaaaggaaaacagggaaggcaatgtaaaatgttccctcagatccaagggaaatattaacgtttcaaagatagcgcagagcatgggcggaggcggtcacgtttcggcggcaggttttaaaagctccgtgagcctggatgaaactttgcggatagttttggaaaaaatatcacaggaaatgaagcagtga

SEQ ID NO: 45590 - protein, 134 aa, Unknown
  Obtained from environmental sample
  DOMAIN (67)...(126): DHHA1 domain
  misc_feature (1)..(134): Xaa is any amino acid
MRSTREFHTKQTLASLLLEKTVFGNMELVNQGKVAVQLLRKEFLESCKGTLDDTHGFINTPLKCKEVQVSVFVKENREGNVKCSLRSKGNINVSKIAQSMGGGGHVSAAGFKSSVSLDETLRIVLEKISQEMKQ

SEQ ID NO: 45591 - DNA, 678 bp, Unknown
  Obtained from environmental sample
  misc_feature (1)..(678): n is a, c, g, or t
gtgattgaggaaggaaatattgttcagaatgtgattcatcccgatccgtcaaagattgaaagaacgcttgtaattataaagcctgataactggacgcataattcatcgcggccgggggcgattatagacatgttttcacgcaccggccttcgtattatcggcatgaaaatccatcatttttcattgtcggaagcccttgatttttacggacctgtggaaaatgtacttaaagaaaaactggctgatacattcggattaagggcaaaagaacttttggaaaaagaattcgccataaaaataagcaaagaaacaacaaatatattaattaatgattttggagcccaatgcgcgcaaaaacaattttatgacattatcgaatttatgtcaggcaggcgtccgggagcttatcacgacgaggacatgaaaaaacccgggcaggttaaatgcatgattcttgtttatgaaggcgagaacgccgttcaaaaaatacgcgatgttttaggctcgaccgatccgacaaaagccacaaacggcaccgtccgcagagaattcggaagcaatgtaatggttaacacggcgcatgcttcggattcaaaagaaagctatgagcgggagcagaagattgttaggattaatcataattctgtggcagctataataaaagagaatattggatag

SEQ ID NO: 45592 - protein, 225 aa, Unknown
  Obtained from environmental sample
  DOMAIN (20)...(208): Nucleoside diphosphate kinase
  misc_feature (1)..(225): Xaa is any amino acid
MIEEGNIVQNVIHPDPSKIERTLVIIKPDNWTHNSSRPGAIIDMFSRTGLRIIGMKIHHFSLSEALDFYGPVENVLKEKLADTFGLRAKELLEKEFAIKISKETTNILINDFGAQCAQKQFYDIIEFMSGRRPGAYHDEDMKKPGQVKCMILVYEGENAVQKIRDVLGSTDPTKATNGTVRREFGSNVMVNTAHASDSKESYEREQKIVRINHNSVAAIIKENIG

SEQ ID NO: 45593 - DNA, 726 bp, Unknown
  Obtained from environmental sample
  misc_feature (1)..(726): n is a, c, g, or t
ttgaatcattttaataaggaaataaacgaaatatgtgcaacggcgacatgcaccgtaaaggagataaatatggaaaaacgtattaataagcatgtttatacatgggtcggaacgtttctttttggctggcttggcgtggacagatttatgagaggtcaaatagtacttggtatcataaaacttcttacttctggtggtttatatgtgtggtttttaattgactttattattgcgcttactaaacttggtaaatatgatatagaatttgtttttgaaaaaggaaaatggtcagaaagatttactgtttttgaagattttaaaaataccagagtatatgaagttgcgctgaaagttaaagaagaactggaaaagcatggttgtgaaaattttggagaaccggaaattaaaaaagattacgctatttacggtgaatttagtggtagatctagtaatggattaatcgtaatatcatttagtgagtatcgggatggacttgattctacaagatttacttttaaaagttcaaaaatttcagaaatacaattaggatatcgttattatggaattgaaaatgaaaataaaacttttttggtttattcgtgtgaagatattaataaagcctctcaagatgttccggagccaattaaaattgctgccgaagtaattaaaaacaacggttatggtcaatgtaaagaaataacagatgaaatagatgatatagattaa

SEQ ID NO: 45594 - protein, 241 aa, Unknown
  Obtained from environmental sample
  DOMAIN (27)...(76): TM2 domain
  misc_feature (1)..(241): Xaa is any amino acid
MNHFNKEINEICATATCTVKEINMEKRINKHVYTWVGTFLFGWLGVDRFMRGQIVLGIIKLLTSGGLYVWFLIDFIIALTKLGKYDIEFVFEKGKWSERFTVFEDFKNTRVYEVALKVKEELEKHGCENFGEPEIKKDYAIYGEFSGRSSNGLIVISFSEYRDGLDSTRFTFKSSKISEIQLGYRYYGIENENKTFLVYSCEDINKASQDVPEPIKIAAEVIKNNGYGQCKEITDEIDDID

SEQ ID NO: 45595 - DNA, 1209 bp, Unknown
  Obtained from environmental sample
  misc_feature (1)..(1209): n is a, c, g, or t
atgatagattggccgagtctgtcgtactccgtagaacgcgtggaagtcagcatcgacggcaacgcggaatcaattgacgcagggaaaacgttacagttcaatttcctggttacggcttcgggcaaagacacctcaggggcacagagggtaagatggtccgtcagctcgacaagcgacggtaaggggcctgttatgccagggactaccgtcagccccagcgggacgcttatggtgtcggctgacgagatttaccctattctctacgtcagggcggcgcacgactctttcgcctacagcggcaaatacgattttaagcagatacaggttaaaggccccaaggtaggctccgtaatcctcagcgtcaccggcaacgcgacatcggcggtggcgggcgggaccctcaagttcagcgcctttgtcgcgggccaggcgcccaatcagggcttgacctattcggtcggcccgaaggacgacggaaccggcgcggtcgtggcgggaaccaaaattgaccccgacggaacgctgacggtggccgccgccgaaaccgcctcttcactgtatgtgagggcggtatctaattccgatgggacaaaatttgacaccaaagaagtaaaaatcatcaccgtaaccagcgtgacggtcagcgcagagggcgggacggccagggtgctgcgggggggcaggctcaagttcagcgccgttgtcgcaggcaacaacagccccggccagaacgtaacatggaaagtaagttctaacgccgcgggcgacggagccgttacctcgggaacagccatagcctccgacgggacgctcagtgtggcgaccacggaagccgcggcgaccttatacgtcatcgcaacctccgcggtaaacacggcaaaatccggctccatcacggttgtcatccccaccgtaaccagcgtggccgtcagccccgtaaacccgcagataaagaggggcgacggagtgacctttacggccagggtacagggcacgggcaatccgggccagggtgtgacgtggaaacttgacggcgtgngcggcgttacgaccgcgacgacgataaccagcaacggcatgctcatagtcagtaaagaagaaacgttatcaggactcatcngtacagccacctctgttgacgatcccacgaaattcggcacgacaatggtaacgataccggcagtgccggcggcgatcgtttctccgtaa

SEQ ID NO: 45596 - protein, 402 aa, Unknown
  Obtained from environmental sample
  misc_feature (1)..(402): Xaa is any amino acid
MIDWPSLSYSVERVEVSIDGNAESIDAGKTLQFNFLVTASGKDTSGAQRVRWSVSSTSDGKGPVMPGTTVSPSGTLMVSADEIYPILYVRAAHDSFAYSGKYDFKQIQVKGPKVGSVILSVTGNATSAVAGGTLKFSAFVAGQAPNQGLTYSVGPKDDGTGAVVAGTKIDPDGTLTVAAAETASSLYVRAVSNSDGTKFDTKEVKIITVTSVTVSAEGGTARVLRGGRLKFSAVVAGNNSPGQNVTWKVSSNAAGDGAVTSGTAIASDGTLSVATTEAAATLYVIATSAVNTAKSGSITVVIPTVTSVAVSPVNPQIKRGDGVTFTARVQGTGNPGQGVTWKLDGVXGVTTATTITSNGMLIVSKEETLSGLIXTATSVDDPTKFGTTMVTIPAVPAAIVSP

SEQ ID NO: 45597 - DNA, 483 bp, Unknown
  Obtained from environmental sample
  misc_feature (1)..(483): n is a, c, g, or t
atgctaaagggacgatccctgattgagccgggtaacttcacccttgaggagatggacagcctttttgtcctggcggaaaagatcgaaacagaagagcggtatttgcgggatagttgcaggggaaagctgctggcgacgctcttttttgagccaagcaccagaacccgcctgagtttcgaggccgcgatgctcaggctgggggggagctgcctgggttttgccgatcccggctcaagctcggcggcaaagggagaaagccttgccgacacggtaagaatggcggcgagttacgccgacgcaattgttatgcgaaacccgaaggaaggcgccgcgctgctcgcgtcgcgttattcgccggttccggtgatcaacgccggcgacggaggccatcaccatcctacccagacgcttaccgatctngcttacataaggcggctgcggggggaaataaaagaatttaccatcgcttctgcggcgacctga

SEQ ID NO: 45598 - protein, 160 aa, Unknown
  Obtained from environmental sample
  DOMAIN (5)...(146): Aspartate/ornithine carbamoyltransferase, carbamoyl-P binding domain
  misc_feature (1)..(160): Xaa is any amino acid
MLKGRSLIEPGNFTLEEMDSLFVLAEKIETEERYLRDSCRGKLLATLFFEPSTRTRLSFEAAMLRLGGSCLGFADPGSSSAAKGESLADTVRMAASYADAIVMRNPKEGAALLASRYSPVPVINAGDGGHHHPTQTLTDLAYIRRLRGEIKEFTIASAAT

SEQ ID NO: 45599 - DNA, 912 bp, Unknown
  Obtained from environmental sample
  misc_feature (1)..(912): n is a, c, g, or t
gtggcgctcaccgtaacgggcaagcagacagacgaaaataccatcgtcatcataatcgaagtcgccgacagcggcagggggatagcgcaggaggatatgggtatactctttgacgacttcgtgcagctggacgtcgccaagaacaagggtatagagggaacgggtttgggccttgccatcacccataggttggtgaaggcgatgaacggcgatataaccgtccaatccgagtacggtaaaggcagcgtcttcacggtgacgctgccgcaagggataagcgtgcgggaggattttgtggctgaggcggcggccaaggccttcatagcgcccacggctcgggttctgatcgttgatgatgtacggacaaacatacaagtggcgcagggattgctctcattttacgaaatggcgattgacatttgtatgagcggccaagaagccatagaggccgtaaaggtgcataactacgacctggttttcatggatcacatgatgccggagatggacggcgtggaggcgacgaggcacatacgggagcttcccgccggacgagacttgcccataatcgcgctaaccgccaacgccgtttcgggtatgcgcgagatgtttcttcaaaacggcttcgacgacttcctctccaaacccatagataccgccaagctgaactccatattggagaagtggctaccccaggagaagcaggtcgaggccgcgcttgaggacgacggcggggagtccgcgccggacatcaggcacgaccgcgcaaccttttctttgcgcggcgtagacacggacatgggcatatcaaggacgggcggctcgcaagaaaactacctgctgaccctatcgatattccgcgacgacgcgatggcaaaagccggcgagatgagggaggcacctcggccaatctga

SEQ ID NO: 45600 - protein, 303 aa, Unknown
  Obtained from environmental sample
  DOMAIN (10)...(91): Histidine kinase-, DNA gyrase B-, and HSP90-like ATPase
  misc_feature (1)..(303): Xaa is any amino acid
MALTVTGKQTDENTIVIIIEVADSGRGIAQEDMGILFDDFVQLDVAKNKGIEGTGLGLAITHRLVKAMNGDITVQSEYGKGSVFTVTLPQGISVREDFVAEAAAKAFIAPTARVLIVDDVRTNIQVAQGLLSFYEMAIDICMSGQEAIEAVKVHNYDLVFMDHMMPEMDGVEATRHIRELPAGRDLPIIALTANAVSGMREMFLQNGFDDFLSKPIDTAKLNSILEKWLPQEKQVEAALEDDGGESAPDIRHDRATFSLRGVDTDMGISRTGGSQENYLLTLSIFRDDAMAKAGEMREAPRPI

SEQ ID NO: 45601 - DNA, 825 bp, Unknown
  Obtained from environmental sample
  misc_feature (1)..(825): n is a, c, g, or t
atgttcttcctctcatccgtcgcgtggctgacctacataccgctcgactataaacttcacgtccactgccttacattggttcttgcgcttcggctgggcctcaccgcgttgagcgttgcgagcatcgcgctgacgtttacgaagttcttcagggcacggcccattattctgctcatggcgctcgtcgcttatctaaacttcgggacggccatcgtcacagccacggccgacagcagcgtcgtcacgccgtacatgggcgggttcatattcgtgatgatgataccggtgttcgccccgttccctcttataagcaagttcgtcatcacgttcttccccgtggcgctcctcttcgtattgggaagcgttaggggcatacctttttttaagccccctatctcctacgccacaaacgacacgctctgcactttcgtcatgtctatgatcctctcctacgcgcagaacacgttgcgtttcaacgcgtggcggcagcaggtaacgctgaagttcttggtgcagcaagatcaagaacgcattgcgaccatatcagatctggcaagcaaagcggaggcggcctccaaatccaaaagcgattttttggcaaggatgagccacgaaatccgtacgcctatgaacgccgtcatcggcatctcggaactcgcgatgcgcgaaaaggaggtgccgcagagcacctacaacctcttggtgaccatcagacaggcggggctcaacctgctctccattataaacgacatcctcgacttctcgaagatcgagagcggcatgatgaagatcgtcccgccaactaccacttcccgtcgctcataa

SEQ ID NO: 45602 - protein, 274 aa, Unknown
  Obtained from environmental sample
  DOMAIN (194)...(260): His Kinase A (phosphoacceptor) domain
  misc_feature (1)..(274): Xaa is any amino acid
MFFLSSVAWLTYIPLDYKLHVHCLTLVLALRLGLTALSVASIALTFTKFFRARPIILLMALVAYLNFGTAIVTATADSSVVTPYMGGFIFVMMIPVFAPFPLISKFVITFFPVALLFVLGSVRGIPFFKPPISYATNDTLCTFVMSMILSYAQNTLRFNAWRQQVTLKFLVQQDQERIATISDLASKAEAASKSKSDFLARMSHEIRTPMNAVIGISELAMREKEVPQSTYNLLVTIRQAGLNLLSIINDILDFSKIESGMMKIVPPTTTSRRS

SEQ ID NO: 45603 - DNA, 645 bp, Unknown
  Obtained from environmental sample
  misc_feature (1)..(645): n is a, c, g, or t
atggagagcgggacaaaccctgttcatatattcaaacattttgaaggcagcgccgcccctgtcgatgagctgatgtggaacggcagaggaaacaacggcgacctggtacagtccgctgttgattatccctatgtttacaccgcaacggacgccctgggcaataccagcaggataacgggcgcattcggcattgacgtactggtgattcgtgaaccccaaccgagcccgaagggcgaaggttcccctcttgcaggagaccaattcagaatacaaataccctcaatcatgttccccgccgacagcgcggtctttaacggtttgagccagagcacattggataacaacaaccgtgttattaagcgtgtcgcgcagatactcaacaagttcaagggctataaggtaaaggtcgagggccacgcgaatccgactacggcctcgggccctgaccgggaacaggaagagccgtcactgaaggatctcagtgaaaagcgcgcgggatttgttcttgaacagcttgtccgcaacagcgtcgccagaaaccggctttcatacaccggcgccggcggctccatgcccgtggttccttttgaggatcattccggctggtggaaaaaccggcgcgtggactttattctgataagatag

SEQ ID NO: 45604 - protein, 214 aa, Unknown
  Obtained from environmental sample
  DOMAIN (96)...(206): OmpA family
  misc_feature (1)..(214): Xaa is any amino acid
MESGTNPVHIFKHFEGSAAPVDELMWNGRGNNGDLVQSAVDYPYVYTATDALGNTSRITGAFGIDVLVIREPQPSPKGEGSPLAGDQFRIQIPSIMFPADSAVFNGLSQSTLDNNNRVIKRVAQILNKFKGYKVKVEGHANPTTASGPDREQEEPSLKDLSEKRAGFVLEQLVRNSVARNRLSYTGAGGSMPVVPFEDHSGWWKNRRVDFILIR

SEQ ID NO: 45605 - DNA, 414 bp, Unknown
  Obtained from environmental sample
  misc_feature (1)..(414): n is a, c, g, or t
atgtgggctgtttatgcgcttttctctgcacttttcgcggcgatgacttcaattctgggaaagattggcgtggaaaacgtcaactcaaacctggctacggctattcgtaccgtggtagtgctggttttggcttgggtaattgtgtttgccacccgagcgcatggcgctatcacagaaatcagccgtcgaagactcatctttttggttctttcgggcattgccacggggctttcctggatctgctattaccgggcgcttcaaatggggccagcctcgcgggtaattcccatagacaagtcgagcgtggttttcggtatgatccttgcgtttgttgttttaagagagactcttacggttaaggcggtaattggcggttcgctcattgcgatagggacttttgtgttgatattttag

SEQ ID NO: 45606 - protein, 137 aa, Unknown
  Obtained from environmental sample
  SIGNAL (1)...(20)
  DOMAIN (11)...(137): Integral membrane protein DUF6
  misc_feature (1)..(137): Xaa is any amino acid
MWAVYALFSALFAAMTSILGKIGVENVNSNLATAIRTVVVLVLAWVIVFATRAHGAITEISRRRLIFLVLSGIATGLSWICYYRALQMGPASRVIPIDKSSVVFGMILAFVVLRETLTVKAVIGGSLIAIGTFVLIF

SEQ ID NO: 45607 - DNA, 528 bp, Unknown
  Obtained from environmental sample
  misc_feature (1)..(528): n is a, c, g, or t
atggactccatcgagccctggcttaagtgggcggacaaaaaaggcaagggcgctttcgtactcatgcgtaccagcaacaagggcaggcgcgattttgaatgtctgattattgaaggggggctcccccctctccggctttttgatgcggtagggaacaagctttcagagctggccacttcccgcatcggcgctcacggttacggcgcgtttggcgcggttgtgggtgcggatccccaatccgaagaagagcgcaaagaagcggcggctatccgcgctggacggcccaatctttttttcctcattcccggctacggggcacagggtggcgcagcctccgacgccgccctgctattgcgagaaggcaacggcggtgtggtaaacgcctcgcgctcgatacttaaagcctggcaaaactcgcacgatggcaaggaagcggataactctatcgcggcccaggcggccagagcggcggtaattgaaatgagggatagtattaggaaagcggcgggaattaatacaagaaaataa

SEQ ID NO: 45608 - protein, 175 aa, Unknown
  Obtained from environmental sample
  misc_feature (1)..(175): Xaa is any amino acid
MDSIEPWLKWADKKGKGAFVLMRTSNKGRRDFECLIIEGGLPPLRLFDAVGNKLSELATSRIGAHGYGAFGAVVGADPQSEEERKEAAAIRAGRPNLFFLIPGYGAQGGAASDAALLLREGNGGVVNASRSILKAWQNSHDGKEADNSIAAQAARAAVIEMRDSIRKAAGINTRK

SEQ ID NO: 45609 - DNA, 678 bp, Unknown
  Obtained from environmental sample
  misc_feature (1)..(678): n is a, c, g, or t
gtgcgggacagaacgaaagctataaaccggctgcattcgttgtttgtaaagcaggggcataccgaggtagcaaggaaaaaccttgcgactgctaacaggcggcttgatgcggttgctatattgaccgggcaggagagggaagaggctgaatatatattacagcaccttgatttatatgaaaagcgcataaaggaaataaagggaaagataaagaaagaagcgaaagctgatgagggcatgaagcggctgcagggcatagccggagtagggcctgtggtagcgtatgctttcgcagcccatgtaggggacgggagccgatttagcaagggatctcaggtaagcaattaccttgggtttgttccccggctggattattccgggactatacagaggcaggggcatatttcaaaaaggggcaatgggtatttgagaggattattggtacaagcggcatggtcaacagttcgttcccgtaatggaggttcattaaaagaacgattccagtatttaacgatgtttcaaggcaagagcaagaaaaagacaatagtttcggtgggacgaagattggcagagcttatgtattcggtattgcgaaacaagggcgagtatgaagtacggccttggaaggtgccgacaaacggcggggatgctttatccgaacaagcaaggagcgcgtaa

SEQ ID NO: 45610 - protein, 225 aa, Unknown
  Obtained from environmental sample
  DOMAIN (56)...(167): Transposase IS116/IS110/IS902 family
  misc_feature (1)..(225): Xaa is any amino acid
MRDRTKAINRLHSLFVKQGHTEVARKNLATANRRLDAVAILTGQEREEAEYILQHLDLYEKRIKEIKGKIKKEAKADEGMKRLQGIAGVGPVVAYAFAAHVGDGSRFSKGSQVSNYLGFVPRLDYSGTIQRQGHISKRGNGYLRGLLVQAAWSTVRSRNGGSLKERFQYLTMFQGKSKKKTIVSVGRRLAELMYSVLRNKGEYEVRPWKVPTNGGDALSEQARSA

SEQ ID NO: 45611 - DNA, 1392 bp, Unknown
  Obtained from environmental sample
  misc_feature (1)..(1392): n is a, c, g, or t
atggaaaatcagttaggcgatgaaagcgtctatcttcggattatggaactggagaacggtctgctccagcataccgatacaactaacgcctacaggatgttggtagaacacggcaaggatattagatacaatgacgcatggaaaaaatggattgtctggaacggcaaatactgngaaatggacggcgggtatttaatccatgataagggattacagataattagggggatatacagagagttactgaaaaccgcccattatcgggaccgcattgaaattgaaaaacacggtatgcagagcgaaagcgcaaggcggaggaaggctttgattgaggttgcaagctggataccggaactgaatataaaaactgacgacctagacagagacccctggctgttcaatgttaaaaacggaacgatagatttaagaacgggagaaatgagggagcacaggcaagaagatttaattaccagaattgcaaatgtagagtatgacttgaacgccgattgccctgtctggaaaaagtttgtaatggagataatgaattacaatgcagacttaattcattttatccaaaatgcggcgggatgggcaataacaggggacacgtccgagcaaacaatgttcatactgtttggaaccggggcgaacggaaaaagcacctttcttaataccattatgaatttattgggagattacgccatcgctacgcctactgaaacctttatgaaaaaatcgggagaccagataaccaatgacatagccaggctgaggggaacacgctttgtaaccactacggaagcggaatatgggaaacgattgtccgagcctttgataaagcagataacagggaatgaccgaatgacggcaaggtttttgtatggggagtttttcaattttgtaccgactttcaaaatttggatggctactaaccacaagcctgtaatcaaaggaaccgatcacggcatttggcggcggataaagcttatacccttccttacccgcatagaggaagaaaaccaggacaaacaccttgaacagaagctaatgcgggaagggccggggattttgaactggcttgtcgaaggggcaaggcggtggcgaaatgagggattaaaaacgccgtcaattattgtcagtgcaacggatgaataccgggcggagatggacgttatcgggaacttcctaaaggagcgttgtacccagggagaggaaggctgtatcaaggcaagggaactttttaagtgctatcaggaatggtgcgatgaccacaacgaacacgccgtaagcgagcgttttttcggtttgcggttaaaggaattgggccttgagcaaaaacgtatgaacgatgggcggtactggcatggtattcagattagggcgcaagggtag

SEQ ID NO: 45612 - protein, 463 aa, Unknown
  Obtained from environmental sample
  DOMAIN (133)...(444): Poxvirus D5 protein-like
  misc_feature (1)..(463): Xaa is any amino acid
MENQLGDESVYLRIMELENGLLQHTDTTNAYRMLVEHGKDIRYNDAWKKWIVWNGKYXEMDGGYLIHDKGLQIIRGIYRELLKTAHYRDRIEIEKHGMQSESARRRKALIEVASWIPELNIKTDDLDRDPWLFNVKNGTIDLRTGEMREHRQEDLITRIANVEYDLNADCPVWKKFVMEIMNYNADLIHFIQNAAGWAITGDTSEQTMFILFGTGANGKSTFLNTIMNLLGDYAIATPTETFMKKSGDQITNDIARLRGTRFVTTTEAEYGKRLSEPLIKQITGNDRMTARFLYGEFFNFVPTFKIWMATNHKPVIKGTDHGIWRRIKLIPFLTRIEEENQDKHLEQKLMREGPGILNWLVEGARRWRNEGLKTPSIIVSATDEYRAEMDVIGNFLKERCTQGEEGCIKARELFKCYQEWCDDHNEHAVSERFFGLRLKELGLEQKRMNDGRYWHGIQIRAQG

SEQ ID NO: 45613 - DNA, 429 bp, Unknown
  Obtained from environmental sample
  misc_feature (1)..(429): n is a, c, g, or t
atgatttcaagagagattttaaaagcggacaagggatttacgtttatagaaacgataatcaccatcacaattattctcatactttcggcagcggtcggcttttccgcaattaagtatgtcgaaagggcgagagtagccgcgtgccgaaaccaaatagaaacattcaggcttgccctgcaatcgtactttttggattgcggccaataccccacggaagcccaaagcctggaaggactttgggaaaagccgatcttatcccctgttccggcaagctggaacggaccttacgtagaaaggcaaattcccaaagatccttggggaaacgattatgtttacaaaaaccctggtgaaaagaatttagcgtttagcattacatcacacggtgcaggcggaggagaaacaattaatgagattcattcgtgggactga

SEQ ID NO: 45614 - protein, 142 aa, Unknown
  Obtained from environmental sample
  DOMAIN (35)...(141): Bacterial type II secretion system protein G
  misc_feature (1)..(142): Xaa is any amino acid
MISREILKADKGFTFIETIITITIILILSAAVGFSAIKYVERARVAACRNQIETFRLALQSYFLDCGQYPTEAQSLEGLWEKPILSPVPASWNGPYVERQIPKDPWGNDYVYKNPGEKNLAFSITSHGAGGGETINEIHSWD

SEQ ID NO: 45615 - DNA, 957 bp, Unknown
  Obtained from environmental sample
  misc_feature (1)..(957): n is a, c, g, or t
gtgaaaaggggaacagccgcgctgcgtttttccgagctgctgcttgcgctactcaaagggaaaaccggccttcttgacgcactaagcatacttgcccgcgaaggcatagaaaagccggtaagagaaaacgccttttccctgcttaagataatgaaaaaaggaaaaggattatccgaaagcctgcaaattatcggcgaggaaaaagcattttttgaacctatgtacatcacgctgattgccgccgcggaattaaccggaagcatagaagccgtgcttggaagaattgcctcagatttgcagagaaagcagcgggccaaagataatttaatgaatatattgatttacccgataactattgtatttctggcaattgcggggactatagggatcatcctgaagggcatgccgctatttatttctgccgggcttctttcggcagcaattgtggaagacgcgaaagccggcataggacttgcggctcttgtcttgctgcttggcggcggcgcgctcttctttgtttattttagaatttttaacgatgactcgcctgaatcaagaatattttatctccttgatttcttgatgaaaagcaatatttcgctgactgacgcgctatctcaatgcgtcatgagtcttgggcatacgaaattcggcggcgcccttgtaaaaataaaaaaagatatagtatcgggggtttcattttcggaagcctttgccagaactaaacgtttttccccttatgtattgggctggctctctatcgctgacataaacggcaatttaaatgagatcagcgggaacataagggatcactatttgcagaaagagagcaaaatacgcgagatcgcggcaaagctcattgaaccggctgtaatcgtattggtcggtatttatgttctgataatcatggcaacggttattttgccaatattaagttattcaggaggcatcttatga

SEQ ID NO: 45616 - protein, 318 aa, Unknown
  Obtained from environmental sample
  DOMAIN (187)...(309): Bacterial type II secretion system protein F domain
  misc_feature (1)..(318): Xaa is any amino acid
MKRGTAALRFSELLLALLKGKTGLLDALSILAREGIEKPVRENAFSLLKIMKKGKGLSESLQIIGEEKAFFEPMYITLIAAAELTGSIEAVLGRIASDLQRKQRAKDNLMNILIYPITIVFLAIAGTIGIILKGMPLFISAGLLSAAIVEDAKAGIGLAALVLLLGGGALFFVYFRIFNDDSPESRIFYLLDFLMKSNISLTDALSQCVMSLGHTKFGGALVKIKKDIVSGVSFSEAFARTKRFSPYVLGWLSIADINGNLNEISGNIRDHYLQKESKIREIAAKLIEPAVIVLVGIYVLIIMATVILPILSYSGGIL

SEQ ID NO: 45617 - DNA, 441 bp, Unknown
  Obtained from environmental sample
  misc_feature (1)..(441): n is a, c, g, or t
atgagtgaatttatacacaaatcgcacaatgtatcagtgttattataccatatagtatgtccagcaaaatatagaaggctagtaataaatgattcagtggataaaacgatacatgaaacgtgcgaggaaataagcaagagatatgaaataagatttcttgaaatagggacagaaggagatcattttcttatccagtcgatacccacatatagtccatcaaagatagtaacaacgataaagggaatactgtctaggaaaatatttgagatacatcctgaagtaaagaaacaactatggggaggagaattctggagtgacggatattttgtgagtacggagagcaaatatgggaatgaagaagtaatatcaaattatgtaaaattgcagggtatcgagaaaggatataaacaaattcatcgcagacagttggaattattctaa

SEQ ID NO: 45618 - protein, 146 aa, Unknown
  Obtained from environmental sample
  DOMAIN (18)...(122): Transposase IS200 like
  misc_feature (1)..(146): Xaa is any amino acid
MSEFIHKSHNVSVLLYHIVCPAKYRRLVINDSVDKTIHETCEEISKRYEIRFLEIGTEGDHFLIQSIPTYSPSKIVTTIKGILSRKIFEIHPEVKKQLWGGEFWSDGYFVSTESKYGNEEVISNYVKLQGIEKGYKQIHRRQLELF

SEQ ID NO: 45619 - DNA, 369 bp, Unknown
  Obtained from environmental sample
  misc_feature (1)..(369): n is a, c, g, or t
atgatcagatcggccgaggcactgccctgcatgacgatagcggcggctttcgcggagggcaagtcggtcttcagagacttggaacctatgcgcctcttcgatcccgacggattggaacaattagagcaatgcctgaggccgctcggcatacgccacggcgaaatgccggacggcatggtgatagagggcgcgaaggagtttgacggtttcgacatatcggaagctctaccggcgcacatagcagtcgctttttgcgtggcgggggtcaagtgtgtaggtaaaacgtctatagcggatgattttgtggttgcgcgttggcctgattttgaaaaaatgataaatgaaatttttgaatttcgcggtaaataa

SEQ ID NO: 45620 - protein, 122 aa, Unknown
  Obtained from environmental sample
  SIGNAL (1)...(18)
  misc_feature (1)..(122): Xaa is any amino acid
MIRSAEALPCMTIAAAFAEGKSVFRDLEPMRLFDPDGLEQLEQCLRPLGIRHGEMPDGMVIEGAKEFDGFDISEALPAHIAVAFCVAGVKCVGKTSIADDFVVARWPDFEKMINEIFEFRGK

SEQ ID NO: 45621 - DNA, 600 bp, Unknown
  Obtained from environmental sample
  misc_feature (1)..(600): n is a, c, g, or t
ttgatgcaacagaaaagtataaatatcttcggtatcgtctcattcaaaaaaacgccggctgtcgccgacgtattggagcgtatcagggtatgggcttcgggcaacggcgcggagattatatatcaccccatcctcgcaagccaacttccgcaaaacgaacatcccgaaacatcagaggcgatttttcttgacagatgcgacgccattgtctcggtcggcggcgacggaacatttctctccgtggcgcggatgagcggattctccgagaagcctatcgtgggaatgaatttgggcggacttggatttttgaccgacataggccctgaggatttggaggaacatctcgggaagatcaggcgcggcgactataccacaatcagccgtatggtaatagaggcccgcgtcctgcgcggcggcactgagtttcaccgattcaaagcgttgaacgacatctacataaaccgcgtcaacgtacccaaattggcctcaatctccgcttggtgcggcgactcgttcatcaccgacttcttcgccgacggaatcatcgtcgccacaccgagcggctcaacggcatactccctctcagccgcggccctatag

SEQ ID NO: 45622 - protein, 199 aa, Unknown
  Obtained from environmental sample
  DOMAIN (9)...(199): ATP-NAD kinase
  misc_feature (1)..(199): Xaa is any amino acid
MMQQKSINIFGIVSFKKTPAVADVLERIRVWASGNGAEIIYHPILASQLPQNEHPETSEAIFLDRCDAIVSVGGDGTFLSVARMSGFSEKPIVGMNLGGLGFLTDIGPEDLEEHLGKIRRGDYTTISRMVIEARVLRGGTEFHRFKALNDIYINRVNVPKLASISAWCGDSFITDFFADGIIVATPSGSTAYSLSAAAL

SEQ ID NO: 45623 - DNA, 366 bp, Unknown
  Obtained from environmental sample
  misc_feature (1)..(366): n is a, c, g, or t
ttgaaagtcaggatgccggaggtgcacggcgattttgtcttcgcttcctatgttgaggaatccggtttcctgggcgtgttgttttatattttccttataggatttttcgcgtgtataggctatagggcggcgtggcgcggcggcgaccgttacacacagcttctcgcgttcggactggttacttccattgtcattcagactttgctgaatatagccgtggtcgggaaaattgttccgacaaccggcataccgctgccttttgtttcgtcgggggggtcttcgcttttggcgacccttatcagctgcgcgcttttggtaaatactgccagacgttatgcgcttatgggggataaatatgctcggtga

SEQ ID NO: 45624 - protein, 121 aa, Unknown
  Obtained from environmental sample
  misc_feature (1)..(121): Xaa is any amino acid
MKVRMPEVHGDFVFASYVEESGFLGVLFYIFLIGFFACIGYRAAWRGGDRYTQLLAFGLVTSIVIQTLLNIAVVGKIVPTTGIPLPFVSSGGSSLLATLISCALLVNTARRYALMGDKYAR

SEQ ID NO: 45625 - DNA, 900 bp, Unknown
  Obtained from environmental sample
  misc_feature (1)..(900): n is a, c, g, or t
atgcgcttatgggggataaatatgctcggtgattttatctattcgggagaagtagaggacgcctcgtatcaatatgatacgccgtatcagtatgatacggcggacaatgacaaggctcaaaaaatcgagaaggccgttaagcggtttttgggacttgccgccgtgtttatcagcataggccttgtgtggatttttggcgtcagccccgcgatggtgcccgtaaaaaccgaagtaaaaagttttcagggttttagtaaatcggatgtgctgaattttgccggtataagaagcggcgcgacctatatttcagttaacgcgcgggaagcggaaatgcttctttccaactccccgtggtggaatcggcaaaggttgtcaaacgtttccctgacaggctttcgatttttcttgagccgcgccatgcagtcgccgcgcttatcgcccgggttaacggcagactccagcccgtgtacgtcgacaagtacggcgtcgtattcaggggtgggcaacgccgccggagaggcgcccccgtcctggctgcccgtggtttcaggagttttggacgagcgccagcctctgggtttggggatgcagatttccccggtttaccagcctttgttttcccggatagcctcaatcagcgagggagactcaatgttatggcaggcggtttcggaaataggaatagcgaagaaaagcaatgatctgtatgacctcgtgctgtatccggtcaacagccagataaagataaggatggggagcgacatcggcaaagacaatatttactacgctctgcttatggcggacgtatgcaggcagcttgatggaaagctccccgacgagattgacgcgcgttccggcgtgggtgtattcaagactgaggagggcggttttggcgaatga

SEQ ID NO: 45626 - protein, 299 aa, Unknown
  Obtained from environmental sample
  misc_feature (1)..(299): Xaa is any amino acid
MRLWGINMLGDFIYSGEVEDASYQYDTPYQYDTADNDKAQKIEKAVKRFLGLAAVFISIGLVWIFGVSPAMVPVKTEVKSFQGFSKSDVLNFAGIRSGATYISVNAREAEMLLSNSPWWNRQRLSNVSLTGFRFFLSRAMQSPRLSPGLTADSSPCTSTSTASYSGVGNAAGEAPPSWLPVVSGVLDERQPLGLGMQISPVYQPLFSRIASISEGDSMLWQAVSEIGIAKKSNDLYDLVLYPVNSQIKIRMGSDIGKDNIYYALLMADVCRQLDGKLPDEIDARSGVGVFKTEEGGFGE

SEQ ID NO: 45627 - DNA, 975 bp, Unknown
  Obtained from environmental sample
  misc_feature (1)..(975): n is a, c, g, or t
ttgatggaaagctccccgacgagattgacgcgcgttccggcgtgggtgtattcaagactgaggagggcggttttggcgaatgacgatttagttgtcggccttgattttggcacgacaaaagtttgcgtggttatcggcgaacgtaatgataaaggggttctcgaaattaccggggtcggcgtggctccctccgcggggatgaggaaaggacttccggtaaattttgaagccgccatcaaatcaataaccgaagcagttgaaaaagcggaatttatgtcaggcagggaagtacacgcctgctggacggggatcggcggcagccatattgagggaataaattcacggggtgtcgtggcgataagcagccagaagagggtaacccgtgaaatagaagaagaggatatgtaccgcgttattgaagcggcgcgcgccgtggtaatacctctggaccggcagatcattcagacaataccgcagtcgtatatcgtagacgatcacaagggaattaaagacccccttggcatgataggcgtgcgccttgaggcggaagtgcatatcattacaagctcggcgacaagcaccgagaaccttttaagatgcgtaaaccgcgccggttttaaggcgaacaaatccggccttctgcttcaggtgcttgccgccggaagggcggtactcacgcccgaagagcaggaactcggcatagccctgatcgatcttggcggcgggacgaccgacgtgctcgtttattatgacggcgccccgtattccactttcacaatcccggtcggaggagttgaagtcacgcgtgacatcagcacgataaaaaatatttcaattgaggcggccgagcagataaagcaggaatccgcctgctgctggaagccgcttttggaaaatgacgaagacatacttgttccccgcatgggcgggcagccgccgatgaaaataccccgttcccatatttacgccatgtaa

SEQ ID NO: 45628 - protein, 324 aa, Unknown
  Obtained from environmental sample
  DOMAIN (31)...(224): Cell division protein FtsA
  misc_feature (1)..(324): Xaa is any amino acid
MMESSPTRLTRVPAWVYSRLRRAVLANDDLVVGLDFGTTKVCVVIGERNDKGVLEITGVGVAPSAGMRKGLPVNFEAAIKSITEAVEKAEFMSGREVHACWTGIGGSHIEGINSRGVVAISSQKRVTREIEEEDMYRVIEAARAVVIPLDRQIIQTIPQSYIVDDHKGIKDPLGMIGVRLEAEVHIITSSATSTENLLRCVNRAGFKANKSGLLLQVLAAGRAVLTPEEQELGIALIDLGGGTTDVLVYYDGAPYSTFTIPVGGVEVTRDISTIKNISIEAAEQIKQESACCWKPLLENDEDILVPRMGGQPPMKIPRSHIYAM

SEQ ID NO: 45629 - DNA, 543 bp, Unknown
  Obtained from environmental sample
  misc_feature (1)..(543): n is a, c, g, or t
atgtttttaagcttaaaagcgctggaatgggcggtattattatcaagaactacaataaattcaaataatataaaagacgattcgttactggaaacaaataattgttacttgaaaagaatagaagaaagcgcgaattttcaggaagtaaaagatattctttacagttttacggaacaaatggcggaaaggattttctccttccagggagtgcgtcatttttcggcaattaaaaaagcggaacgctatatatgggaaaattatacaaaaaagattggtcttagagaaatagcggacgccgccggactttccgcttcatatttcagttcaatctttaaggatgaaatgggagaaaatctttccaattatcttaaccgtttacgcgttgaaaaggcggccgccatgctgacttcaaccaatattcccataagcaagattgcggcggcctgcggttttgaggaccaaagctggttttcaaaaatctttaaaaacaataccggttttactcccggcaagtaccgcgagcagggtaatatattaagttaa

SEQ ID NO: 45630 - protein, 180 aa, Unknown
  Obtained from environmental sample
  DOMAIN (78)...(124): Bacterial regulatory helix-turn-helix proteins, AraC family
  misc_feature (1)..(180): Xaa is any amino acid
MFLSLKALEWAVLLSRTTINSNNIKDDSLLETNNCYLKRIEESANFQEVKDILYSFTEQMAERIFSFQGVRHFSAIKKAERYIWENYTKKIGLREIADAAGLSASYFSSIFKDEMGENLSNYLNRLRVEKAAAMLTSTNIPISKIAAACGFEDQSWFSKIFKNNTGFTPGKYREQGNILS

SEQ ID NO: 45631 - DNA, 918 bp, Unknown
  Obtained from environmental sample
  misc_feature (1)..(918): n is a, c, g, or t
gtgaaaaagggaaccaacaaggtaatggctgtcggagccgacgcgaaaaggatgcttttcaggacccccggatcaatcactgccatcaggccgatgcggggcggagttatcgcggatctggaatcgacagaaaaaatgatccgctatttcatcggaaaggctttgccgcgttaccggtttatcaaaccaagaatggtcatagggattccttccagcattacggaggtagaacgcagggcggttgaagaatgcgcatataaggcaggggccagagaagtggtgattatccccgaaagtcttgccgccgccataggtgctgaaattcctatccacgagccagcgggacacatgatcgttgacattggcggcggtacttcggaaatttccgtaataagccttggagacatggttgtaaccaacgcgatacgcacggcgggagacgattttgacgaagccattatcaagtatgtcagaagcgagctcaacctgattattggaggacaaaacgcggaaaagcttaaaattgaaatcggcaacgccttcccggataaagaaattgaaaaaatggagatcaagggtaccgatgcgggtacgggattgcccaggcggctggaaattgattccgaacaaataagggaagctctgaaagtaccggtaaatataattttggatgaaatcaaatccatcctgggaaagactccgccggaattggcggcggatattgtggagcggggaatagttatgaccggaggcggttcgcttttaaaaggattgccaaaacttatttccaaagagacaggagtatcggtaatccttgcccaaagccctctggattgcgttgctctgggcgccggtaaatattttgaaaagaccaggggcagtgaaagccgcaatctgtacgacagcttaaacaaatag

SEQ ID NO: 45632 - protein, 305 aa, Unknown
  Obtained from environmental sample
  DOMAIN (116)...(284): Cell division protein FtsA
  misc_feature (1)..(305): Xaa is any amino acid
MKKGTNKVMAVGADAKRMLFRTPGSITAIRPMRGGVIADLESTEKMIRYFIGKALPRYRFIKPRMVIGIPSSITEVERRAVEECAYKAGAREVVIIPESLAAAIGAEIPIHEPAGHMIVDIGGGTSEISVISLGDMVVTNAIRTAGDDFDEAIIKYVRSELNLIIGGQNAEKLKIEIGNAFPDKEIEKMEIKGTDAGTGLPRRLEIDSEQIREALKVPVNIILDEIKSILGKTPPELAADIVERGIVMTGGGSLLKGLPKLISKETGVSVILAQSPLDCVALGAGKYFEKTRGSESRNLYDSLNK

SEQ ID NO: 45633 - DNA, 744 bp, Unknown
  Obtained from environmental sample
  misc_feature (1)..(744): n is a, c, g, or t
ttgtttaagctgtcgtacagattgcggctttcactgcccctggtcttttcaaaatatttaccggcgcccagagcaacgcaatccagagggctttgggcaaggattaccgatactcctgtctctttggaaataagttttggcaatccttttaaaagcgaaccgcctccggtcataactattccccgctccacaatatccgccgccaattccggcggagtctttcccaggatggatttgatttcatccaaaattatatttaccggtactttcagagcttcccttatttgttcggaatcaatttccagccgcctgggcaatcccgtacccgcatcggtacccttgatctccattttttcaatttctttatccgggaaggcgttgccgatttcaattttaagcttttccgcgttttgtcctccaataatcaggttgagctcgcttctgacatacttgataatggcttcgtcaaaatcgtctcccgccgtgcgtatcgcgttggttacaaccatgtctccaaggcttattacggaaatttccgaagtaccgccgccaatgtcaacgatcatgtgtcccgctggctcgtggataggaatttcagcacctatggcggcggcaagactttcggggataatcaccacttctctggcccctgccttatatgcgcattcttcaaccgccctgcgttctacctccgtaatgctggaaggaatccctatgaccattcttggtttgataaaccggtaa

SEQ ID NO: 45634 - protein, 247 aa, Unknown
  Obtained from environmental sample
  misc_feature (1)..(247): Xaa is any amino acid
MFKLSYRLRLSLPLVFSKYLPAPRATQSRGLWARITDTPVSLEISFGNPFKSEPPPVITIPRSTISAANSGGVFPRMDLISSKIIFTGTFRASLICSESISSRLGNPVPASVPLISIFSISLSGKALPISILSFSAFCPPIIRLSSLLTYLIMASSKSSPAVRIALVTTMSPRLITEISEVPPPMSTIMCPAGSWIGISAPMAAARLSGIITTSLAPALYAHSSTALRSTSVMLEGIPMTILGLINR

SEQ ID NO: 45635 - DNA, 648 bp, Unknown
  Obtained from environmental sample
  misc_feature (1)..(648): n is a, c, g, or t
atgaagacagggagagagaagcggcaaaaaagacttggggctgacttttatgtttttgttgtccttatccttgtttctttttccgctctttttttctcttctctcaatatgcccggaagtgtactgggaaacgcgaagaatctgggcttgacggttttttcggggttaaggggcggcatacatgaagcgtcctccgcggtatcgcgcacggtttcatctattcgggagctggcctccctaagacgggagtacgccgaactaacagagcgaatcgcaaggtatgagcagcttgagagatcctccgccgagataaggcaggagaataaccgcttaagggagcaattgggtttttcccaggatctgagataccagcatattcccgcggttcttatcggaagggatccggctaatttattttccgcttttgttatcaacaaggggtttcttgcgggagtttcggtcaatatgcctgtcatagcctatcataacgggacgcagggacttgtaggcaaagttataaatgccggggcttttgaaagccttgtgatgccgctttatgacgagaggtgttatgtgtcttccaggctctccgaatcccgctatgaaggaattgttgaaagccgtggaattcccgacgctcccctttaa

SEQ ID NO: 45636 - protein, 215 aa, Unknown
  Obtained from environmental sample
  misc_feature (1)..(215): Xaa is any amino acid
MKTGREKRQKRLGADFYVFVVLILVSFSALFFSSLNMPGSVLGNAKNLGLTVFSGLRGGIHEASSAVSRTVSSIRELASLRREYAELTERIARYEQLERSSAEIRQENNRLREQLGFSQDLRYQHIPAVLIGRDPANLFSAFVINKGFLAGVSVNMPVIAYHNGTQGLVGKVINAGAFESLVMPLYDERCYVSSRLSESRYEGIVESRGIPDAPL

SEQ ID NO: 45637 - DNA, 696 bp, Unknown
  Obtained from environmental sample
  misc_feature (1)..(696): n is a, c, g, or t
ttgcttgcaccggtcattcgggggaaaaaaggagaacatcaaaaaataatcgaagatgcgcgaaaagcgggatttgccagggcaagaatagacggagttcccgtaaatcttgatgaaagcatcaaattggacaaacaaaaaaaacactctatcgaaattatcgttgacaggcttgtgattggaaaagacatccgttcacggttggcggagtccgtggaaaccgccttgcaaacggctgaaggtttattaattgtattgattaacgaggacggaaaaaattcagaacagattttctcgcagaaaaattcatgtcccgattgcggagtgtcaattcctgaattacaaccgaggcttttttcgtttaacaacccctttggcgcgtgtccgggatgttccgggcttggggcaaaactggagtttgatcccgatcttgtaatacccgaccgctcgctctcctttaacgaaggcggcgttctcccatacaatcctgacagcgcgtggaacagaagccgttttcaaagtcttgccaaacattacggattcagtcttgatacgccttttaataaattgtcaaaaaaagtggtaaacgccattctttacggcagtgatgacgatattaaagtacgttacgtgaaccgcgagggaaccggacattttgaataccagtcaaaattcccaggtattctggaagagtaa

SEQ ID NO: 45638 - protein, 231 aa, Unknown
  Obtained from environmental sample
  misc_feature (1)..(231): Xaa is any amino acid
MLAPVIRGKKGEHQKIIEDARKAGFARARIDGVPVNLDESIKLDKQKKHSIEIIVDRLVIGKDIRSRLAESVETALQTAEGLLIVLINEDGKNSEQIFSQKNSCPDCGVSIPELQPRLFSFNNPFGACPGCSGLGAKLEFDPDLVIPDRSLSFNEGGVLPYNPDSAWNRSRFQSLAKHYGFSLDTPFNKLSKKVVNAILYGSDDDIKVRYVNREGTGHFEYQSKFPGILEE

SEQ ID NO: 45639 - DNA, 495 bp, Unknown
  Obtained from environmental sample
  misc_feature (1)..(495): n is a, c, g, or t
atggacaaattaatcatcaagggggcacgtgaacataatttaaaaaatattgatctggaattacctcgcgacaaattaatcgttatttctgggctctcaggttcgggtaaaagctctcttgcgtttgacacgattttcgccgaggggcaacgccgctatgtggaaagtttgtccgcttatgcaaggcagtttttggggcgtatggacaagcccgatctggactatattgaagggctctcccccgcaatttccattgaacaaaaaactacccaccgtaatccgcgttcaaccgtaggcaccgttaccgaaatttatgactattaccgtcttctttacgccagaatcggcatcccgcactgccccgtctgcggcaaagaaatccgtgaacagcctgtggattccataatcgaaacgattttacaattaaagaaggaacgaagattcaattgcttgcaccggtcattcgggggaaaaaaggagaacatcaaaaaataa

SEQ ID NO: 45640 - protein, 164 aa, Unknown
  Obtained from environmental sample
  misc_feature (1)..(164): Xaa is any amino acid
MDKLIIKGAREHNLKNIDLELPRDKLIVISGLSGSGKSSLAFDTIFAEGQRRYVESLSAYARQFLGRMDKPDLDYIEGLSPAISIEQKTTHRNPRSTVGTVTEIYDYYRLLYARIGIPHCPVCGKEIREQPVDSIIETILQLKKERRFNCLHRSFGGKKENIKK

SEQ ID NO: 45641 - DNA, 564 bp, Unknown
  Obtained from environmental sample
  misc_feature (1)..(564): n is a, c, g, or t
ttgcttttggcaggccgctgttataagggaatcggcgattatgacgaggcgcttaattaccttgagcaggccgtcagaataaaaagggatgatgccgaggttcttgccgaagtggccgatattaacgctttattggcccagacaaaaactgccaaagcattgttcagggaagcttttttcatagacccgtcaaagattgacatgaggtttatggaatcagcttttattttaaaacttcgtgacagtgtttcacagcttggttacaagggcgaagaattaagcgaatggatacctgtttacggatatttatggggggtattttccgtaaaacgtgaattaaaacaaaccgaggcgggaaggcttaaacagtcgattttttcgctggaagccgaatatgaatcaaaccccgcaaggcggccaattttaaagcctcggcttttaaaccattatttttggctaattgattattatgaaaacagccatgaggatccttcatttattgaagagaccttattaaaaataaaagtaaccgatccggatatttacggtatgtatgcccggtag

SEQ ID NO: 45642 - protein, 187 aa, Unknown
  Obtained from environmental sample
  misc_feature (1)..(187): Xaa is any amino acid
MLLAGRCYKGIGDYDEALNYLEQAVRIKRDDAEVLAEVADINALLAQTKTAKALFREAFFIDPSKIDMRFMESAFILKLRDSVSQLGYKGEELSEWIPVYGYLWGVFSVKRELKQTEAGRLKQSIFSLEAEYESNPARRPILKPRLLNHYFWLIDYYENSHEDPSFIEETLLKIKVTDPDIYGMYAR

SEQ ID NO: 45643 - DNA, 534 bp, Unknown
  Obtained from environmental sample
  misc_feature (1)..(534): n is a, c, g, or t
atgaagctggacaaggaaaaagcggaaaaaaatctaaaagttattcttgagaagataattaccgacgccgatcccgggctcttaagcgaataccgcaaactttttcaaaaagaagtaagccttttcaggcgttcatgggcggccgcgtggctattaatgtattacgacaagaaagaatttccgaatttaaaaaatcttacggaaaaaaaaccggctaaaaaagaaaatacggaacaagtttcaaccgacaatgaacctaacctttccgaagaagaatcaaaaaatctttttttcagcataggaaaaaaccgccaccttttcccgcgggaagtaataatgtttatctgttccaaaacatcggtgccgcgggaagacataggttccatccgcattctggacaattattcatttgtgcaggtaagggacacaagggcggatgaaatcatagaagccttaaacggcctgaaattcagaggcaggacgcttaccgtaaattacgctaaacctaaaaacgccgatacaggcagcacatag

SEQ ID NO: 45644 - protein, 177 aa, Unknown
  Obtained from environmental sample
  DOMAIN (82)...(168): DbpA RNA binding domain
  misc_feature (1)..(177): Xaa is any amino acid
MKLDKEKAEKNLKVILEKIITDADPGLLSEYRKLFQKEVSLFRRSWAAAWLLMYYDKKEFPNLKNLTEKKPAKKENTEQVSTDNEPNLSEEESKNLFFSIGKNRHLFPREVIMFICSKTSVPREDIGSIRILDNYSFVQVRDTRADEIIEALNGLKFRGRTLTVNYAKPKNADTGST

SEQ ID NO: 45645 - DNA, 777 bp, Unknown
  Obtained from environmental sample
  misc_feature (1)..(777): n is a, c, g, or t
ttgctattaaaaaacaaatacttttttaaaccttatggatttaatgtttttcaaggagccactgtttcttccggagtattgctttttccacaaaaatcaaaacatgaaaaaaaagataacctttttccttccaaaaataactttgtattacaagatgttgcgatatttaaagaaggggagcatattccccgatctgaactatcagaaaatgccgcattaatacccgtaaccgacagtaaaaacatggcgaggtattatattggtccgagtgtgaaatattataagcgaaaatcaaattttagcattactgtaggatgtagaattgttatcagaaaaacaggttatgaaattgtcgcttctttggtttccggtgagtcttatgtaatccagaatctttatcagtctattgcagtaaaaaaatattctgaaaagtttttacttgcattgcttaattctaaatatctaacatcgtattatagaaaagtgttagctccaaacactggcggcacttttgcacaattccgccttggtgaactcaataagctcccaatcccaataattgatcttaacatcaaagccgataaagttaaacataataaccttgtttcactcgtagacaaaatgctggaacttaaacaaaaagaatctgtcgaaaataaccagcagttaanaacgatgatttccagactaattgaaggtgtagataangcgattgattcggctgtgtatgagttgtataatttgacagaagatgagattaanngtggtggcaaatga

SEQ ID NO: 45646 - protein, 258 aa, Unknown
  Obtained from environmental sample
  misc_feature (1)..(258): Xaa is any amino acid
MLLKNKYFFKPYGFNVFQGATVSSGVLLFPQKSKHEKKDNLFPSKNNFVLQDVAIFKEGEHIPRSELSENAALIPVTDSKNMARYYIGPSVKYYKRKSNFSITVGCRIVIRKTGYEIVASLVSGESYVIQNLYQSIAVKKYSEKFLLALLNSKYLTSYYRKVLAPNTGGTFAQFRLGELNKLPIPIIDLNIKADKVKHNNLVSLVDKMLELKQKESVENNQQLXTMISRLIEGVDXAIDSAVYELYNLTEDEIXXGGK

SEQ ID NO: 45647 - DNA, 996 bp, Unknown
  Obtained from environmental sample
  misc_feature (1)..(996): n is a, c, g, or t
atgttcggcgaccctgcctacaaggattgcgcccaacacgcgcacaattttctaacagcgaattttctggataaaacgcgcggcggattgtactggcttgcggatcacaccggatacgcgctggatacaaaaaaacatttttataacattgcttttggcatatacgcattaagcgaacattatgccgctgtaaaaaacaaaacgtcgctggatttggcaatggctctttttgaaatgacagaaaaatacggtcttgatccgtccgccggaggttatattgaggcgtgcgactgtgattggcgcaatgttgaagatttccgtctaagcgaaaaagaccttaactgcccaaagtcaatgaacaccaacctgcacgtactggaagcttatacaaatctgactcgcgtcagcgaagacaaacatgtgcgcaaagctcttgaaaaattattacgcattatgcttgataaaattgttaatcaggattggcattttaacttatttttcgacatggactggaacccgttaatcaaagaaatttcctacggtcacgatattgagggaagctggctgttatacgaggcggcgctggcggcaggcgatgaagatcttatctccacagtaaagcaaaccgcattagcgattgcggaagttatctataccgccgccattgaccgcgcaaacggcggattgatcagcggctgtgacgaagcgggacatatccacgccaaaaaagaatggtggccgcaagcggaagcggtcataggtttttacaacgcgtatgagttatccggcgaacaaaaatatttcgatgcggctgatagtatatggggttacattcaagaccattttgttgatcgcgcccacggtgaatggcataatgaattgaattccggcaatacgccggatattaatttgcccaaagctggattttggaaatgcccgtatcataacgcgcgcgcttgtttggaggtggggaggagggctggggatcgcagatga

SEQ ID NO: 45648 - protein, 331 aa, Unknown
  Obtained from environmental sample
  DOMAIN (1)...(319): N-acylglucosamine 2-epimerase (GlcNAc 2-epimerase)
  misc_feature (1)..(331): Xaa is any amino acid
MFGDPAYKDCAQHAHNFLTANFLDKTRGGLYWLADHTGYALDTKKHFYNIAFGIYALSEHYAAVKNKTSLDLAMALFEMTEKYGLDPSAGGYIEACDCDWRNVEDFRLSEKDLNCPKSMNTNLHVLEAYTNLTRVSEDKHVRKALEKLLRIMLDKIVNQDWHFNLFFDMDWNPLIKEISYGHDIEGSWLLYEAALAAGDEDLISTVKQTALAIAEVIYTAAIDRANGGLISGCDEAGHIHAKKEWWPQAEAVIGFYNAYELSGEQKYFDAADSIWGYIQDHFVDRAHGEWHNELNSGNTPDINLPKAGFWKCPYHNARACLEVGRRAGDRR

SEQ ID NO: 45649 - DNA, 1500 bp, Unknown
  Obtained from environmental sample
  misc_feature (1)..(1500): n is a, c, g, or t
atgattatcttttttcccttgctgtggaggccgattccaaaacaagggcttgcctcttttactgaatcaatgcgcgaacaaagagattcaggaaaaaaatttactgatatagatattccgcttgaaaggccaagcgcggttcatttaacaacagttcataaaagcaagggattggaatttcctgttgtttttctctgttgctgcgggaaaaacagcaggtctgaaagaagcgatgatgtgttttattcagaaaaatcaggcgttgttctaagccctcccctgccaaatgatttcatattaataaacaaaaaacaaaaaacaaaaatacgcaaaaattttctttgggaaaaatctattgacgaaaaaaaaatgaaattaaacgcggaattgcgccggcttctttatgtaggaatgacaagagcggaaaaagaactgtatcttaccggaagtcttgaaataaataacgacatggaagcggaagaattatccgagacgataaaaaattttatcggggacaagaaagaaaaaaaagagaactcaattcccggcgattcaattattaataacgatacttttttcggacttttcctgccttcaatcgcgccccgtatatcagagggatttttcaaccttgaggaaatcccggcttacacggaagaagacataaaaaaacaggaaacaaatcccaaacatttaccggggaatcatttgccgaacaacagggaaggattatgcgaatatatcaggaaagccgaacctttatataataaagcaaagaaaattaaaacgcccgaagtacggaataaccacataacgcccgtctcgctaaaagaaagggaagaaaacacaacgcaagcggattctgtgggcaggggattaattataagcagggaattttcaggcgaaaaagcggatgatgtttttcaaaaagtggactcgctgcttgccaaattttccaaaacggaagacgagtcatacgggaaattcaattcgggcagtttcggaacaatcgcgcatatttgcgtggacgccctcttaagcgggaaagatcccgtatttccgccccagctttccggctcaataagccccgtagaatttgactcgctttttgccgcaggcaaagaattggcaagccgctttgtccgctccccgctggggaaaatcgcggaaaactcgaaatttcgcgaaaacgaattttcattcagaagctttttaataaacagcgagggaaaggaagtctttatcaacggcactatcgacttgttttttgaagactcggtgttttttcatgtggtagattttaagaccgacaacaaggaaacgcctgttgaacatacggcgcaaatggcctgttatttccaggccgtatccgcccttttcgcggttccggcaaagaaagaatgccgcgcgtggctttactatcttagaaccggccacgccgtggaaatgacggataaagtaaaacagtttaatcttgaaaacaaggcgattattcagtaa

SEQ ID NO: 45650 - protein, 499 aa, Unknown
  Obtained from environmental sample
  misc_feature (1)..(499): Xaa is any amino acid
MIIFFPLLWRPIPKQGLASFTESMREQRDSGKKFTDIDIPLERPSAVHLTTVHKSKGLEFPVVFLCCCGKNSRSERSDDVFYSEKSGVVLSPPLPNDFILINKKQKTKIRKNFLWEKSIDEKKMKLNAELRRLLYVGMTRAEKELYLTGSLEINNDMEAEELSETIKNFIGDKKEKKENSIPGDSIINNDTFFGLFLPSIAPRISEGFFNLEEIPAYTEEDIKKQETNPKHLPGNHLPNNREGLCEYIRKAEPLYNKAKKIKTPEVRNNHITPVSLKEREENTTQADSVGRGLIISREFSGEKADDVFQKVDSLLAKFSKTEDESYGKFNSGSFGTIAHICVDALLSGKDPVFPPQLSGSISPVEFDSLFAAGKELASRFVRSPLGKIAENSKFRENEFSFRSFLINSEGKEVFINGTIDLFFEDSVFFHVVDFKTDNKETPVEHTAQMACYFQAVSALFAVPAKKECRAWLYYLRTGHAVEMTDKVKQFNLENKAIIQ

SEQ ID NO: 45651 - DNA, 351 bp, Unknown
  Obtained from environmental sample
  misc_feature (1)..(351): n is a, c, g, or t
atgaactgcgccgagatggctaccgtcagcaacaataaaatcccgttgttaatcattgtctttaacaacggggtactcggcatggtaaggcagtggcagagtttcttttacgaaggccgctactcggaaacaactctgggagcagttcccgactttatcaaactgtgcgacgcttacggtattacgggcttccgcgcgaataacagagaatcattcaagaaggcgctccattccgcacgggaagaactgtccgccggaagggccgcgctcatcgaagcggacatagaccgcgatgaaaatgtccttcccatggttccttcgggcaagcccatagacgagcagattttgtga

SEQ ID NO: 45652 - protein, 116 aa, Unknown
  Obtained from environmental sample
  DOMAIN (1)...(93): Thiamine pyrophosphate enzyme, C-terminal TPP binding domain
  misc_feature (1)..(116): Xaa is any amino acid
MNCAEMATVSNNKIPLLIIVFNNGVLGMVRQWQSFFYEGRYSETTLGAVPDFIKLCDAYGITGFRANNRESFKKALHSAREELSAGRAALIEADIDRDENVLPMVPSGKPIDEQIL

SEQ ID NO: 45653 - DNA, 999 bp, Unknown
  Obtained from environmental sample
  misc_feature (1)..(999): n is a, c, g, or t
atgcccgccgaattcggcgagcgcgtccgctatataaaagaacataccccgcgcatggaaaaagcggctctgtccgtgcattgccacaacgatctggggcttgcggtggcaaacagtatcgccgccatcgcaaacggcgcggatcaggttgagtgtacggttaacggaattggcgaacgcgcgggaaacgcgtctttggaggaagtagtcatgggcctgcgcgtccgcagcgacttcttttccgccgacacaaaaatcgacagcagtcagatatacgcggcaagccgccttgtgtcccaggtgaccggcgtgaaggttcagccgaacaaggcgattgtcggcgacaacgcgtttgcgcacgaagcgggaatacaccagcacggggtattggcgaaaagggaaacctacgagatcatgaccccgcagtcaatcggtattccgcaaaaccgcatggtgcttggcaaacattcaggccgccacgcttttgaagagcgtcttaaagacctgggtcttagcattgatccggctgcattggaaaaagtatttgccgactttaaggatcttgcagacaagaagaaagtagtcagcgaccgggacattgaagcccttgttatggacagggcagtctctgttcccgaaacatggaaactggatcattgggcggtgaacacgggatccgctttgggcgcggcgggcgttatacgtttacagcacaaagacggcgaacataaaaaactggtctgcctgggcgacggccctatcgattcgattttcaaagcgatcaacgagattacaggccgggagccggaactggagctttatgaaatcggcgccgttacgggcggctcgtcatcccagggtgaagcgatggtaaaaatcgtgatggacggacggcgctggaacgggcgcggcgtttccaccgatgtaattgaagcttcgataatggcttacctttcggcgattaacgcgatggaatgggacctggcgcaaggagattag

SEQ ID NO: 45654 - protein, 332 aa, Unknown
  Obtained from environmental sample
  DOMAIN (1)...(104): HMGL-like
  misc_feature (1)..(332): Xaa is any amino acid
MPAEFGERVRYIKEHTPRMEKAALSVHCHNDLGLAVANSIAAIANGADQVECTVNGIGERAGNASLEEVVMGLRVRSDFFSADTKIDSSQIYAASRLVSQVTGVKVQPNKAIVGDNAFAHEAGIHQHGVLAKRETYEIMTPQSIGIPQNRMVLGKHSGRHAFEERLKDLGLSIDPAALEKVFADFKDLADKKKVVSDRDIEALVMDRAVSVPETWKLDHWAVNTGSALGAAGVIRLQHKDGEHKKLVCLGDGPIDSIFKAINEITGREPELELYEIGAVTGGSSSQGEAMVKIVMDGRRWNGRGVSTDVIEASIMAYLSAINAMEWDLAQGD

SEQ ID NO: 45655 - DNA, 987 bp, Unknown
  Obtained from environmental sample
  misc_feature (1)..(987): n is a, c, g, or t
atgcgtcatgcgctgaaaaacgttcttacctccgtgggaagcagggacgttatcgaagataactaccaaagcatcgttgacgcgtatattaaactatttaccgtacatgatctgcatctgcgcgttaaccagcaatgcactatcgaagatgacgcggtatttaatgaatttatcaaacgcggctggatcacaagatcttcaatgggccatccttatttgacaatgggagcgtcaaaacttttcgcggacggttctcttggggcccgcaccgcgtatatgcgcaaaccgtatctggacgagccgtctacgcgcggttttcaaacacatacgcaggaagaaatggacgctctggtactcaaaaaccataaaaacggctttcaggtaatcgtacacgccattggagacgcggctattgaggaaacgcttaacgcttttgaaaaagcgaccggagggcatacaaacaaactgcgccatggcttagtgcattgccaaatcaccgatctgccgctcctgcggcgcatggcaggtaacggcatcctcgcgttcatgcagccaatctttcttactcacgatctttatatgcttgaaaaccgcgtaggcagggaacttgcgtctacttcctacgctcacgcgaccatgaacaggctgggtgttaaagcggcttacggaacggacagccccgttgaatccatgagtccgcttgaatgtatcgactgcgcggtaaaccgccatgacgtaacaaacggttatcccgaagaaggtttttatccgggtgaatgtgtcgacgtgtacaccgcggtagacgcctacaccacaggcggcgcatacgccgaattcgccgaaaattacaaaggcagaatcaagccagggtatcttgccgatttgacgctactggatcgtgatatttttaccattgcgaaaaaagaaatccgctcggcgcgggtactgtggactatggtaggcggcgttatggcgtacctgaaatga

SEQ ID NO: 45656 - protein, 328 aa, Unknown
  Obtained from environmental sample
  DOMAIN (3)...(297): Amidohydrolase family
  misc_feature (1)..(328): Xaa is any amino acid
MRHALKNVLTSVGSRDVIEDNYQSIVDAYIKLFTVHDLHLRVNQQCTIEDDAVFNEFIKRGWITRSSMGHPYLTMGASKLFADGSLGARTAYMRKPYLDEPSTRGFQTHTQEEMDALVLKNHKNGFQVIVHAIGDAAIEETLNAFEKATGGHTNKLRHGLVHCQITDLPLLRRMAGNGILAFMQPIFLTHDLYMLENRVGRELASTSYAHATMNRLGVKAAYGTDSPVESMSPLECIDCAVNRHDVTNGYPEEGFYPGECVDVYTAVDAYTTGGAYAEFAENYKGRIKPGYLADLTLLDRDIFTIAKKEIRSARVLWTMVGGVMAYLK

SEQ ID NO: 45657 - DNA, 429 bp, Unknown
  Obtained from environmental sample
  misc_feature (1)..(429): n is a, c, g, or t
ttgcatggtgcggcaaagcggcgagttcgccacagccgaccgcatccgcaagggcaactatcaggcgctcgtcatcccctacgcctcgcttgtcacaaggagcctcctggtatttttagagaagctggccacaaaaggcaccacgcttgtgtttgtagacgaggcccccaagggaacctacgaagacggcgcctctcccaacgtggtgtcgcgtattcaaaaattggtcgcgccaagacgcgaaaacgtgcacgtaatccccgtcgccgacctagaccgcgcgcttggcaacgtgaagcccgaggcgctcatcatgcgcgaaagcggcgagagcgccgacatcggcgttcaagtctaccacgacgagggcggcagactctacgtattccacaataccctaagcgacgccgaccagaccgtgatcattga

SEQ ID NO: 45658 - protein, 142 aa, Unknown
  Obtained from environmental sample
  misc_feature (1)..(142): Xaa is any amino acid
MHGAAKRRVRHSRPHPQGQLSGARHPLRLACHKEPPGIFREAGHKRHHACVCRRGPQGNLRRRRLSQRGVAYSKIGRAKTRKRARNPRRRPRPRAWQREARGAHHARKRRERRHRRSSLPRRGRQTLRIPQYPKRRRPDRDH

SEQ ID NO: 45659 - DNA, 615 bp, Unknown
  Obtained from environmental sample
  misc_feature (1)..(615): n is a, c, g, or t
ttgttcaggagtagtaattttttcaaccaggggatgttccggcgaaagcaccatatacgttgcgccgaacagggtgtcaggccgcgtagtatagatttcaagggcttcaccatggccatcaatggtaaaagttacgttagccccctcactgcggccaatccagttgcgctgcataagtttcaccggttcaggccaatccaggctgtcaaggtcggcgagcagccgctcggcataggcggtaattttaagtatccactggcggattcgtttgcgcgtaactttcgtgccgcagcggtcgcaaagtccgtcttttacttcttcgttggcaagcccggttttacacttagggcaccagttaatgggactttccgcttcgtaagcaagccctttttcaaaaagtttgaggaatatccactgggtccagcggtaataatcttcggcggaagtatcaacctcgcggtcccagtcgtaggagaaaccgagtttttttatctgcgtgcggaaactattgacattcttggcggtagtatcagccgggtgcgtcccggttttaagagcgtaattttccgcgggaagcccgaaggcgtcgaaacccatcgggtgcagcacatgtaa

SEQ ID NO: 45660 - protein, 204 aa, Unknown
  Obtained from environmental sample
  misc_feature (1)..(204): Xaa is any amino acid
MFRSSNFFNQGMFRRKHHIRCAEQGVRPRSIDFKGFTMAINGKSYVSPLTAANPVALHKFHRFRPIQAVKVGEQPLGIGGNFKYPLADSFARNFRAAAVAKSVFYFFVGKPGFTLRAPVNGTFRFVSKPFFKKFEEYPLGPAVIIFGGSINLAVPVVGETEFFYLRAETIDILGGSISRVRPGFKSVIFRGKPEGVETHRVQHM

SEQ ID NO: 45661 - DNA, 1209 bp, Unknown
  Obtained from environmental sample
  misc_feature (1)..(1209): n is a, c, g, or t
gtgctgcacccgatgggtttcgacgccttcgggcttcccgcggaaaattacgctcttaaaaccgggacgcacccggctgatactaccgccaagaatgtcaatagtttccgcacgcagataaaaaaactcggtttctcctacgactgggaccgcgaggttgatacttccgccgaagattattaccgctggacccagtggatattcctcaaactttttgaaaaagggcttgcttacgaagcggaaagtcccattaactggtgccctaagtgtaaaaccgggcttgccaacgaagaagtaaaagacggactttgcgaccgctgcggcacgaaagttacgcgcaaacgaatccgccagtggatacttaaaattaccgcctatgccgagcggctgctcgccgaccttgacagcctggattggcctgaaccggtgaaacttatgcagcgcaactggattggccgcagtgagggggctaacgtaacttttaccattgatggccatggtgaagcccttgaaatctatactacgcggcctgacaccctgttcggcgcaacgtatatggtgctttcgccggaacatcccctggttgaaaaaattactactcctgaacaaaaacaggcggtaaacgcgtatcttgaagcggcggcccgtaagagcgaccttgagcgcaccgaccttgccaaagaaaaaaccggcgtgttctcaggcgcgtatgcgatcaatccggtcaacgaccataagattcccatctggatagccgactatgtcttgatttcctacggtacgggggcaatcatggcggttcccgcccacgatgagcgtgactgggattttgccaaggcgtttaatctgccgattgtgcaggtagtcgcggaagaaaagggactagggctcggggatcagggatcggggatagaagttagagaacaaagcgatttaccaatatgctcagataacatacaacaaccccagtcccttttcatagccgacggttattccgttaattccggtcattttaacggtttacctaccgcggaaacaaaaaagcgcgtaacggactggctggaagaaaaaggcatcggcaagcgggcggtcaattataaactgcgggactggattttcagccgccagcgctactggggtgagccgattccggtggtgcattgtccccaatgcggtatagtgccgttaactgaaaagatctgccgctga

SEQ ID NO: 45662 - protein, 402 aa, Unknown
  Obtained from environmental sample
  DOMAIN (3)...(402): tRNA synthetases class I (I, L, M and V)
  misc_feature (1)..(402): Xaa is any amino acid
MLHPMGFDAFGLPAENYALKTGTHPADTTAKNVNSFRTQIKKLGFSYDWDREVDTSAEDYYRWTQWIFLKLFEKGLAYEAESPINWCPKCKTGLANEEVKDGLCDRCGTKVTRKRIRQWILKITAYAERLLADLDSLDWPEPVKLMQRNWIGRSEGANVTFTIDGHGEALEIYTTRPDTLFGATYMVLSPEHPLVEKITTPEQKQAVNAYLEAAARKSDLERTDLAKEKTGVFSGAYAINPVNDHKIPIWIADYVLISYGTGAIMAVPAHDERDWDFAKAFNLPIVQVVAEEKGLGLGDQGSGIEVREQSDLPICSDNIQQPQSLFIADGYSVNSGHFNGLPTAETKKRVTDWLEEKGIGKRAVNYKLRDWIFSRQRYWGEPIPVVHCPQCGIVPLTEKICR

SEQ ID NO: 45663 - DNA, 768 bp, Unknown
  Obtained from environmental sample
  misc_feature (1)..(768): n is a, c, g, or t
atgatcagatcggccgagaactctgaccctcttgacccaatccgcgacggcgcgatctccccggaagacgccctgcttcggctgcgtaccgcgccgtttgaggacttggggtacgccaagcccgaccaccacagggggttgcggcggggcgtcccggaagtgatatacggggcgggcaagacccccgaccagatcgtcggcatcgcatcggctatgcgcgacggcgggcaggggacggtcgtcatcacgcggctctccaaggaagccgccgaaacggtcaacaagagcttccccataacctaccgcgccgacgcgcggatagggatagtcggcgagatgccctcgcccgacgggatcggcaaggtcgttgtcgccaccggcgggacgagcgatatgccggtggccgaggaagcggcggtcaccgccgaggcgctgggcaacgaggtggtcagagtgtacgacgtaggcgtggcaggactgcataggctgatagcgcgtctcggagacatcatggacgctcaggtaatcatatcgatcgcggggatggaaggggcgctgaccagcgtgatcggcgggctggcggactgcccggtcatcggcgttccgacgagcgtcggctacggggcctcgttcggcggggtctccgcgttgctctcaatgctcaactcctgcgcgtcgggcgtgagcgtggtgaacatcgacaacgggttcggggcggggtacttggcgagtttgataaaccatcggcggctggagaggaaaccgtag

SEQ ID NO: 45664 - protein, 255 aa, Unknown
  Obtained from environmental sample
  DOMAIN (120)...(255): AIR carboxylase
  misc_feature (1)..(255): Xaa is any amino acid
MIRSAENSDPLDPIRDGAISPEDALLRLRTAPFEDLGYAKPDHHRGLRRGVPEVIYGAGKTPDQIVGIASAMRDGGQGTVVITRLSKEAAETVNKSFPITYRADARIGIVGEMPSPDGIGKVVVATGGTSDMPVAEEAAVTAEALGNEVVRVYDVGVAGLHRLIARLGDIMDAQVIISIAGMEGALTSVIGGLADCPVIGVPTSVGYGASFGGVSALLSMLNSCASGVSVVNIDNGFGAGYLASLINHRRLERKP

SEQ ID NO: 45665 - DNA, 645 bp, Unknown
  Obtained from environmental sample
  misc_feature (1)..(645): n is a, c, g, or t
gtgggaacgaaaacgttatactttgagtgcggcatgggtgcggctggcgacatgatgacggcaggactgttggaactgcttgatgataatgcccgcgttgattttttgaaacggttgaacaacgctggaataccgggggttgaagttcgtgtcgagtcggctgtgaaatgcgggattgcggggacgcgggtgattgttagtgttgatgggcatatcgaaggcgatgatcatcaccatattgacgaacatcatcaccgcaatgatcatctccatgataacaatcatcaccatgacggtcatcacagcggcaatcatcatcacgataatgatcatcataatactaatgacaatcatcaccgccataacgacgatcatcataataaccgcgccgctcatcaccacaacgactacagcaacattgaacgcctgataagcagcctcagcatcagcgataacgcgaagaaaaacgctctatgcgtctacaaattgatagccgacgccgagagttacgttcacgggaaaccggttgacaagatacacttccacgaagtaggcgacatggacgccgtggccgacatcgtgggcgtatgtatgctgatcgaccaactctcacccgaccaatcctcgcctcccctgtggacgtag

SEQ ID NO: 45666 - protein, 214 aa, Unknown
  Obtained from environmental sample
  misc_feature (1)..(214): Xaa is any amino acid
MGTKTLYFECGMGAAGDMMTAGLLELLDDNARVDFLKRLNNAGIPGVEVRVESAVKCGIAGTRVIVSVDGHIEGDDHHHIDEHHHRNDHLHDNNHHHDGHHSGNHHHDNDHHNTNDNHHRHNDDHHNNRAAHHHNDYSNIERLISSLSISDNAKKNALCVYKLIADAESYVHGKPVDKIHFHEVGDMDAVADIVGVCMLIDQLSPDQSSPPLWT

SEQ ID NO: 45667 - DNA, 303 bp, Unknown
  Obtained from environmental sample
  misc_feature (1)..(303): n is a, c, g, or t
gtgaagcgggttgtcgcacatgtaaaaactttcggcgaacctgattatattgacgatgaaatcttttttgatgaagaagaggaagaagccgagccgtctctttttgccggcgccgatgatcccctgtacgaaaaagccctggaaatcgtcatgcagcagggaaaggccagcgccagttacatacagcgccgcctgaaaatcggctacaaccgcgcagcccgccttgtagaagaaatggaacacaggggtgttgtcggtccggcacaggggtcaaaaccgcgggaactattgcgcggggtttaa

SEQ ID NO: 45668 - protein, 100 aa, Unknown
  Obtained from environmental sample
  misc_feature (1)..(100): Xaa is any amino acid
MKRVVAHVKTFGEPDYIDDEIFFDEEEEEAEPSLFAGADDPLYEKALEIVMQQGKASASYIQRRLKIGYNRAARLVEEMEHRGVVGPAQGSKPRELLRGV

SEQ ID NO: 45669 - DNA, 606 bp, Unknown
  Obtained from environmental sample
  misc_feature (1)..(606): n is a, c, g, or t
atggcgaaaataaagctcactaaaaacgagctaaaaaatcaaaaagattcccttaagatgttccagcgttaccttcccacgctgatgctgaaaaaacagcagcttcagggggagatacggctgactgaattacggatcaaggaacttcacgcccaaaaagaacgtctggacgaatcctttaaatcatggataggcgtttttggcgagcgtggggtattcaccaaagacatacttaaaataacaaaacttaaaacaggcatggggaacatagccggcgtcccaattcctatttttgagggcgccgagttcgaaaccgccccatacgatcttttcggaacgcccctctggctcgacatggcggttgagaaaatggcgcaggccctccttctggatcttgaggccgagattgtcgaagagcagcgcaagcggctggatcatgaattacgcgtaacaacacagcgtgttaacctttttgagaaagtgaagatcccggaaacaaaggtcagcataaaaaaaatacaggtttaccttggcgaccagcagaccgccgccgtggtacgcggaaagatcgccaaaagcgggcttgtaaaggcggcaaagcaatga

SEQ ID NO: 45670 - protein, 201 aa, Unknown
  Obtained from environmental sample
  DOMAIN (2)...(196): ATP synthase subunit D
  misc_feature (1)..(201): Xaa is any amino acid
MAKIKLTKNELKNQKDSLKMFQRYLPTLMLKKQQLQGEIRLTELRIKELHAQKERLDESFKSWIGVFGERGVFTKDILKITKLKTGMGNIAGVPIPIFEGAEFETAPYDLFGTPLWLDMAVEKMAQALLLDLEAEIVEEQRKRLDHELRVTTQRVNLFEKVKIPETKVSIKKIQVYLGDQQTAAVVRGKIAKSGLVKAAKQ

SEQ ID NO: 45671 - DNA, 447 bp, Unknown
  Obtained from environmental sample
  misc_feature (1)..(447): n is a, c, g, or t
ttgaattacaatgcaaaaggaagtttttgctacgacaataaacccgaaaattgcgaacaatacgggcgtctttacgactgggatttagctcaaacagtatgcccatccccttggcgtttgcccaacatggaggattggaataaattgatagagagcacaggcgaaggcaacgttgctggcgaaaagctcaaatcggaacagctctggaatggaacggataatttcggtttttccgcgttgcctggcggtttcaccaaagctcaaggctttacggaaaaaggagtgaggggatattggtggacaaacgagtcttctggttcttacggcaaatacaagtttatgaccacagacagggatagcgtggctcagtctcaatattctaagtctatgggtctttcggttcgctgcgtgatggactgcggattgtttaattgtgttatggagtga

SEQ ID NO: 45672 - protein, 148 aa, Unknown
  Obtained from environmental sample
  misc_feature (1)..(148): Xaa is any amino acid
MNYNAKGSFCYDNKPENCEQYGRLYDWDLAQTVCPSPWRLPNMEDWNKLIESTGEGNVAGEKLKSEQLWNGTDNFGFSALPGGFTKAQGFTEKGVRGYWWTNESSGSYGKYKFMTTDRDSVAQSQYSKSMGLSVRCVMDCGLFNCVME

SEQ ID NO: 45673 - DNA, 501 bp, Unknown
  Obtained from environmental sample
  misc_feature (1)..(501): n is a, c, g, or t
ttgcgagttggtcgggattcatttcgccaagacctttgtagcgttgcaaatccgcttttttgccgctctcctttatggcacggagcatctcgtctttgtcttcgtctgagaagtggtaggtttcctgttgccaacctttatgcggtaaagcggtggggttgccaagtaaacatagcgcccatccacaagcgggcgcatatagcggaaaaagaatgtcaagagcaaggtttgaatatgcgaaccatccacatcggcatcggtcattattattattttgtgatagcggagtttttcaagtttaaaatcttcccttatccccgtgcctatagactgaatcattgttttaatttcgtcattgctgaaaatctgaacatcgttggctttttcaacattcaaaatttttcctttgagtgcgagtatcgcctggtattcccttgtgcgcccctgctttgcggaaccgcctgcggaatcaccctcaaccaaaaagagttcgcattttga

SEQ ID NO: 45674 - protein, 166 aa, Unknown
  Obtained from environmental sample
  misc_feature (1)..(166): Xaa is any amino acid
MRVGRDSFRQDLCSVANPLFCRSPLWHGASRLCLRLRSGRFPVANLYAVKRWGCQVNIAPIHKRAHIAEKECQEQGLNMRTIHIGIGHYYYFVIAEFFKFKIFPYPRAYRLNHCFNFVIAENLNIVGFFNIQNFSFECEYRLVFPCAPLLCGTACGITLNQKEFAF

SEQ ID NO: 45675 - DNA, 867 bp, Unknown
  Obtained from environmental sample
  misc_feature (1)..(867): n is a, c, g, or t
gtgaataacgtgaacacctacgatggcggaacccacgtgactggctttaaaacgggtttcacaagagttgtggtgaaacacgccgctggcaaaatttcaaaacctaaaaaagatgtggaaattaccggagcggatgttttagagggcttgaccgccgttatagctattaaaattccacagcctcaatttgaagggcaaaccaaaagaaaactcggaaattccgaagccaaaggcggagtggaaactgccgtattcaaagcacttgacgcattttttgcggaaaatcctgccataacaaaaatcatagccgaaaagagctacaacaccgcagagggcagggtagcagcacacaaggcaaaagcagcggttagcagaaagggcattttagagggcggtggattgcccggcaaactctcggattgttccagcagagacccttcaaaatgcgaactctttttggttgagggtgattccgcaggcggttccgcaaagcaggggcgcacaagggaataccaggcgatactcgcactcaaaggaaaaattttgaatgttgaaaaagccaacgatgttcagattttcagcaatgacgaaattaaaacaatgattcagtctataggcacggggataagggaagattttaaacttgaaaaactccgctatcacaaaataataataatgaccgatgccgatgtggatggttcgcatattcaaaccttgctcttgacattctttttccgctatatgcgcccgcttgtggatgggcgctatgtttacttggcaaccccaccgctttaccgcataaaggttggcaacaggaaacctaccacttctcagacgaagacaaagacgagatgctccgtgccataa

SEQ ID NO: 45676 - protein, 288 aa, Unknown
  Obtained from environmental sample
  DOMAIN (179)...(260): Toprim domain
  misc_feature (1)..(288): Xaa is any amino acid
MNNVNTYDGGTHVTGFKTGFTRVVVKHAAGKISKPKKDVEITGADVLEGLTAVIAIKIPQPQFEGQTKRKLGNSEAKGGVETAVFKALDAFFAENPAITKIIAEKSYNTAEGRVAAHKAKAAVSRKGILEGGGLPGKLSDCSSRDPSKCELFLVEGDSAGGSAKQGRTREYQAILALKGKILNVEKANDVQIFSNDEIKTMIQSIGTGIREDFKLEKLRYHKIIIMTDADVDGSHIQTLLLTFFFRYMRPLVDGRYVYLATPPLYRIKVGNRKPTTSQTKTKTRCSVP

SEQ ID NO: 45677 - DNA, 450 bp, Unknown
  Obtained from environmental sample
  misc_feature (1)..(450): n is a, c, g, or t
atgcaagacaagttaaccgcaagtcaagcctggcaaagtttgataacgcacaatgttcttattgtctgggacccatcgtacaatttagggataccgattgttgatgagcagcaccatggaattgtttcaaccattaattccctatgctacgcgatacagaacaggcatggcaacgagatgctccgtcctgtaatcggcatggttgcagaatatacacgcattcatttcgagatagaagaggatttccttaaaaaatgcggctaccccgatttggaaaagcaccatattcttcacaaagaattaacacaggccctgtccgaaaaaggcaaggacagcctttggaataaagacccgcagaaatttcttgaattcttaaaacaatggtggattaaccatatctgtaaagaagacagggtgtttacacagtatttgaataataaacataagtaa

SEQ ID NO: 45678 - protein, 149 aa, Unknown
  Obtained from environmental sample
  misc_feature (1)..(149): Xaa is any amino acid
MQDKLTASQAWQSLITHNVLIVWDPSYNLGIPIVDEQHHGIVSTINSLCYAIQNRHGNEMLRPVIGMVAEYTRIHFEIEEDFLKKCGYPDLEKHHILHKELTQALSEKGKDSLWNKDPQKFLEFLKQWWINHICKEDRVFTQYLNNKHK

SEQ ID NO: 45679 - DNA, 855 bp, Unknown
  Obtained from environmental sample
  misc_feature (1)..(855): n is a, c, g, or t
atgaattttcagaactgctatatcaacggcctgttggacagggcgcgcaaggaactgcccctggaaacgcttgatgattttaccgcggttcagaatcaggcgcttgtctggattggggaaagcataaaaatctacaatatgccgcagagggatgaagactctccgggcttcggcgattataacgcccctgccggcaggataatggtgcttgtcggccccaccggcgtaggcaagaccaccaccatcgccaagctggccgtggtttacggcatcggcagcgcggacaggccgccgctttccgtccgggtatacaccattgacacgtttaaaattggcggaaccgaacagcttgagaaatactgcgaaataatggaagtgccctttggcattatcaacaatcagacggaactcagaaaagagattgacatgtaccgcgaagagaccgatctgattctgattgataccataggaagcagcccgaacgatcctaaaaaattgggcgagataaaagcgcttcttgacgcctgcggctcaaaagccgacatataccttgtgctttccgccagcaccaagaccaacgatatagaacatatactaaggcagtttgaaccgtttaactatcaggcggttctgcttaccaagatggatgaaaccaggaccgtgggcaatataatttccgcgtttgcggaaaaggggaaatcgatatcatttattaccaacgggcagcagattcacaaggatataaaaaaagcgaacgtagtcgggtttctcattaacctggatgggctcaccgccgttgacagggacgggttggagaaacgttttcccgccgcgcaggcggataaatttttttga

SEQ ID NO: 45680 - protein, 284 aa, Unknown
  Obtained from environmental sample
  DOMAIN (64)...(262): SRP54-type protein, GTPase domain
  misc_feature (1)..(284): Xaa is any amino acid
MNFQNCYINGLLDRARKELPLETLDDFTAVQNQALVWIGESIKIYNMPQRDEDSPGFGDYNAPAGRIMVLVGPTGVGKTTTIAKLAVVYGIGSADRPPLSVRVYTIDTFKIGGTEQLEKYCEIMEVPFGIINNQTELRKEIDMYREETDLILIDTIGSSPNDPKKLGEIKALLDACGSKADIYLVLSASTKTNDIEHILRQFEPFNYQAVLLTKMDETRTVGNIISAFAEKGKSISFITNGQQIHKDIKKANVVGFLINLDGLTAVDRDGLEKRFPAAQADKFF

SEQ ID NO: 45681 - DNA, 1278 bp, Unknown
  Obtained from environmental sample
  misc_feature (1)..(1278): n is a, c, g, or t
atggaatcgcgtctaaatccggaaacaattgaaaaagcttatgagctggcaaaacctgtttacgccgcttttgacattgacgcagacaaggcgataagcgctgcgatggatattcccatatccatacattgctggcagggagacgatgttactggctttgagggagcggacgggctatcagggggcggtattcttgccaccggcaattatccgggcagggcgaggaacggtgatgaactgagggcagacgccgaattcgcttttacccttattccgggaacaaagcgttttaacctccacaccttttacgcggaaatcggcgggaaaaaggtatcaagggatgagcttgaacctgaacactttcaaaaatggatggactggtcaaagaaaaataaaattcccctggattttaacccgagctttttctcgcatcccatggccgattccggctttaccctttcaagcgccgacgcgaagatcagggatttctggataaggcactgcaaagcttcgcgcaaaatcgcggctgctttaggaagcaatcagggctccgcttcggttaataacatctggatacccgacggctcaaaagatctgcccgccgaccgccagaccccgcgaaaaaggctgcaggatgcgctggatgatgttctttcgataaaatatgacgcgaatacaataaccgatgcggtggaatccaaactcttcgggatcggaagtgaatcatacgtggtaggttcacatgagttttatctggcttatgccgctttaaaaaagatcaggctatgcctggatacgggacatttccatcccaccgaaaccatcgccgacaaaatttcagccattatactttttgtgccgggccttttaattcatttcagcaggggagtccgctgggattcggatcacgtcgcgattttttccgatgagcttcgggaagtttgccgtgaaataactaggcataaataccttgaccgggtaaacatcgcacttgattattttgacgcatcgatcaaccgtatcgcggcgtggactatcgggagccgcagcttgcggaagggacttttggaagcgcttcttgagccggtggaattactgaagaaagctgaattgccgggcaggtaccatgagcgcctgcgtgaatgggaggagctaaagaccctgccgtttccggcagtctgggataagttgtgccttaacgccgnggttccagccggcatagactggcttgaaaaagtgaatcagtacgagaaaacagttttggaaaagcggcgatga

SEQ ID NO: 45682 - protein, 425 aa, Unknown
  Obtained from environmental sample
  DOMAIN (8)...(424): L-rhamnose isomerase (RhaA)
  misc_feature (1)..(425): Xaa is any amino acid
MESRLNPETIEKAYELAKPVYAAFDIDADKAISAAMDIPISIHCWQGDDVTGFEGADGLSGGGILATGNYPGRARNGDELRADAEFAFTLIPGTKRFNLHTFYAEIGGKKVSRDELEPEHFQKWMDWSKKNKIPLDFNPSFFSHPMADSGFTLSSADAKIRDFWIRHCKASRKIAAALGSNQGSASVNNIWIPDGSKDLPADRQTPRKRLQDALDDVLSIKYDANTITDAVESKLFGIGSESYVVGSHEFYLAYAALKKIRLCLDTGHFHPTETIADKISAIILFVPGLLIHFSRGVRWDSDHVAIFSDELREVCREITRHKYLDRVNIALDYFDASINRIAAWTIGSRSLRKGLLEALLEPVELLKKAELPGRYHERLREWEELKTLPFPAVWDKLCLNAXVPAGIDWLEKVNQYEKTVLEKRR

SEQ ID NO: 45683 - DNA, 1869 bp, Unknown
  Obtained from environmental sample
  misc_feature (1)..(1869): n is a, c, g, or t
atgaatatagacaaatttacaataaaagctcaggaagctctgaacgaagcgaccgctatcgcgcagagaaatgaccactctcaggtcgaagccgagcatattctgcttgcgatactgcggcaggaaaacggaactgccgctcccataatcgagaagatagggggcgatgccgcaaggcttgcgtccggcgttgaggcgcttgttaacgctacgccgaaaatctacggagatgcggctcaggttttcttttcttcgtcagcgtcaaaggttctcgcaaaagcggaagttgaggcttcggcgttaaaggacgagtatgtctccaccgaacatattttactcgccatcgcctcgggggacggcaaagcctccgacttcttaaaaaaagcgggcgttacgaaaaacgcgatcctcggagcgctcaagcaggttaggggaaacgcccgcgttaccgatcaaaatcccgaagaaaaataccaggtgctggaacgctattgccgcgacttaaccgcgcttgcgcgtcaggaaaaactcgacccggtgataggccgcgacgaggaaatacgcagatgtatgcaggtgctgtcgcggcgcaccaagaacaaccccgtgcttatcggcgagccgggcgtgggcaagaccgccatcgttgaggggcttgcgcgacgaatagtcgaaggcgacgtaccggaaggcttaaaagggaaaaaactgctcgcgcttgatttaggagcgcttgtcgccggcgcgaaatttcgcggcgagtttgaggagcgcctgaaagccgtcattcacgaagtgcaggcaaccgacgggaaaattattttatttattgacgaacttcatacgcttgtgggagccggagccgcggaaggcgcgacggacgcgtccaatttgctncagcccgcgcttgcgaggggcgagcttcgttgtatcggcgcaactactttggacgagtacagaaaacatatcgagaaggacgcggcgcttgaacggcgttttcagcaggtgtatacggcggaaccgtccgttgaagatacaattgcgattttgcgcgggcttaaagaacggtacgaagtccaccacggggtgcggattaaagacgaggcgcttgtagcggcggcaacattgtccagccggtacattacaagccgattcctgcccgacaaggcgattgaccttgttgatgaagcggcaagcagacttaaaatggaattggacagcaggccaacggagcttgataaactggagcgtaaacttttacaactttcaatagaaaagcaggctctttcgcgtgaagacgacactgcttccaaagaccgcctgacaaaactggaaaaagaaattgccgaccttacaaccgagcgaaacgcgatgaacacccgctgggaaaacgaaaaaattgacattcaaaagatccgtaaaattaaacagcggatagaagagctaaaaattgacgagacacggtatgaacgagaaggcaatctttcaaaggcggcggaagtaaaacacggaaaaattcccgaagcgcaaaaacaacttgccgcacttacggatcagatggagaaaaagagggagagcgcaaaaggaggcggagcttccgcgcttttacgcgaagaagtcagcgaagaggacattgctggtgtagtgtcaatgtggacgggtattccagtatcanagatgctctccggcgaattgcaaaaatatctagaccttgaaaaagctcttgaaaagcgcgttgtcggtcaggatgaagcccttgccgcagtcgccgacgcgatacggcgaaaacagtcagggctttccgactcggcgcgcccgttggggtctttcctctttttangaccgaccggcgttggaaaactgaactag

SEQ ID NO: 45684 - protein, 622 aa, Unknown
  Obtained from environmental sample
  DOMAIN (201)...(341): ATPase family associated with various cellular activities (AAA)
  misc_feature (1)..(622): Xaa is any amino acid
MNIDKFTIKAQEALNEATAIAQRNDHSQVEAEHILLAILRQENGTAAPIIEKIGGDAARLASGVEALVNATPKIYGDAAQVFFSSSASKVLAKAEVEASALKDEYVSTEHILLAIASGDGKASDFLKKAGVTKNAILGALKQVRGNARVTDQNPEEKYQVLERYCRDLTALARQEKLDPVIGRDEEIRRCMQVLSRRTKNNPVLIGEPGVGKTAIVEGLARRIVEGDVPEGLKGKKLLALDLGALVAGAKFRGEFEERLKAVIHEVQATDGKIILFIDELHTLVGAGAAEGATDASNLLQPALARGELRCIGATTLDEYRKHIEKDAALERRFQQVYTAEPSVEDTIAILRGLKERYEVHHGVRIKDEALVAAATLSSRYITSRFLPDKAIDLVDEAASRLKMELDSRPTELDKLERKLLQLSIEKQALSREDDTASKDRLTKLEKEIADLTTERNAMNTRWENEKIDIQKIRKIKQRIEELKIDETRYEREGNLSKAAEVKHGKIPEAQKQLAALTDQMEKKRESAKGGGASALLREEVSEEDIAGVVSMWTGIPVSXMLSGELQKYLDLEKALEKRVVGQDEALAAVADAIRRKQSGLSDSARPLGSFLFLXPTGVGKLN

SEQ ID NO: 45685 - DNA, 1623 bp, Unknown
  Obtained from environmental sample
  misc_feature (1)..(1623): n is a, c, g, or t
atggctcgtcagggcaaactagaccccattataggcaggcaaaaagaggtggatagattaattcaaatcctctctcgcaaaaagaagaacaaccctatactggtaggtgaacccggcgttgggaagacagccgtcatagaaggcttagcgcaaaagattgccgcaaaagaggtgccagaaaatttagaggacaaaagacttgtatcactagatatgacaagccttgttgcaggcacaaagtacagaggtcagtttgaagagagaattatctcgctcttatccgagctgcgcaaaaacaaaaatataatcatgttcatggacgagctgcacaccataataggagctggcggcggcgaaggcgggctggacgcatctaacgttatgaaacccgcgctttcaagaggtgaaattcagtgcataggcgcaaccacctacaaagagttccgcagatacgtggaaagagacgccgctttggaacgccgttttcagagcatgtccatagaaccaccatcactgagtgacaccgttgaaattctgcggggattagccccaaaatacgaagctcaccacaaagttatttatgatgaaaattctttaaaagccgctacttatctctctgagcgttatttgagcgagcggcatttgcccgataaagccatagacataatggacgaagccggagcgcaaacccgcattgcaaacctaactccaccgccagaactttatgaaaaggaacgtgaattaaaagcggtatctgcggaaaagaaaaaagctgtggaagaacaagattatgttcaagccggggttctcagggataaagaaaaagttatcctggaagagctggaaaaaatcaaaaatgtttggacagccgctaaaaagcaagagcctatagtggtggatagcgacagggtgcgagaggttatcagcaaaatcacaggcattccagttagccgcatagacgaaaacgagagcagaaagcttttgaatttggaaattgaattaaaagagagaattgtaggtcaagacgaagcggttgttgctctttcaaaagcaattcgcagaacacgtgccgggctgagaagtgtaaaacgcccgtcatcatttttgttcttgggtccaacgggcgtgggaaaaaccgagcttgcaaaggcattgagcgttcagctttttggtacggaagaggctcttttaagggttgatatgagcgaatatatggaaaaatattccgttagccgttttgtaggttcgcccccaggttatgttggttatgaggacggcgggcaactggtggagaaaatccgccgcaagcctcattgcgttttgcttttagacgaaattgaaaaagcacaccccgatgttctaaatattcttttgcaaattttagatgatggcagattaacagactctgctgggcgcactgtgaatttcagggattgcattatagttatgacttccaatgcaggcacaagggaaatcacacacaaaggcggaatgggttttgcgctcaaagcagaagcagccgatgacgaacatatttcatcttctgtaaaagatgcttccaaacgagttttcacaccggaatttttgaaccgcatagacgagcaaatatgttccgttgcctaa

SEQ ID NO: 45686 - protein, 540 aa, Unknown
  Obtained from environmental sample
  DOMAIN (245)...(280): UvrB/uvrC motif
  misc_feature (1)..(540): Xaa is any amino acid
MARQGKLDPIIGRQKEVDRLIQILSRKKKNNPILVGEPGVGKTAVIEGLAQKIAAKEVPENLEDKRLVSLDMTSLVAGTKYRGQFEERIISLLSELRKNKNIIMFMDELHTIIGAGGGEGGLDASNVMKPALSRGEIQCIGATTYKEFRRYVERDAALERRFQSMSIEPPSLSDTVEILRGLAPKYEAHHKVIYDENSLKAATYLSERYLSERHLPDKAIDIMDEAGAQTRIANLTPPPELYEKERELKAVSAEKKKAVEEQDYVQAGVLRDKEKVILEELEKIKNVWTAAKKQEPIVVDSDRVREVISKITGIPVSRIDENESRKLLNLEIELKERIVGQDEAVVALSKAIRRTRAGLRSVKRPSSFLFLGPTGVGKTELAKALSVQLFGTEEALLRVDMSEYMEKYSVSRFVGSPPGYVGYEDGGQLVEKIRRKPHCVLLLDEIEKAHPDVLNILLQILDDGRLTDSAGRTVNFRDCIIVMTSNAGTREITHKGGMGFALKAEAADDEHISSSVKDASKRVFTPEFLNRIDEQICSVA

SEQ ID NO: 45687 - DNA, 714 bp, Unknown
  Obtained from environmental sample
  misc_feature (1)..(714): n is a, c, g, or t
ttgaagaaggagaaaattatgggagaagtgctatcacaagatgaaataaacgaaatgttaaaacaagtagatgaggcgaacgccggagaaaagacggaagaaacaggcgcggaaaaccgacaggaaaaatttacacgcgaacacttgcggggaatatcaataatatttgaaaagttcgcgcggacggcaaaaaaaagcctctgtcaaaaactgggcgttaccgtcgatatatttgtcgcttcaataacccaactgacagtggaagaattttacggaagcatacccgtacccacgacactggcgcagataaacatggaaccgctgaaaggctcggcgttatttgaaatagaccccgcaatcacattcgccataatcgacataaccggcggcgganaagcgggaacgacaaacccctgccgtgaattaaccgatgacgaggaaaaagtcataaaagacatatacgccctcttngtggaaaacctgcgtcaagcatggtcagaagtatcggacatatcgtccgtggacgttccgtccgtggacttgtgcccccgtttggaaaaaatcgagcccgatccaaaattcatcaaactcgccccgccttcggaaatgacagccctgataacattcgaggtaaaaattgcggatgcacaagggatgatgaattactgtatcccctttcccgttattgaaccagttttggaaaaggttaaatga

SEQ ID NO: 45688 - protein, 237 aa, Unknown
  Obtained from environmental sample
  DOMAIN (37)...(236): Flagellar motor switch protein FliM
  misc_feature (1)..(237): Xaa is any amino acid
MKKEKIMGEVLSQDEINEMLKQVDEANAGEKTEETGAENRQEKFTREHLRGISIIFEKFARTAKKSLCQKLGVTVDIFVASITQLTVEEFYGSIPVPTTLAQINMEPLKGSALFEIDPAITFAIIDITGGGXAGTTNPCRELTDDEEKVIKDIYALXVENLRQAWSEVSDISSVDVPSVDLCPRLEKIEPDPKFIKLAPPSEMTALITFEVKIADAQGMMNYCIPFPVIEPVLEKVK

SEQ ID NO: 45689 - DNA, 849 bp, Unknown
  Obtained from environmental sample
  misc_feature (1)..(849): n is a, c, g, or t
atggaacagggatttatcgacattctgaaaaaggttgtgcaagaacacggcaaggaaatttttcttgaatttaaaaaatgcaaggctattgtgtcggactacaccaaaagcgactacaggaatgaaaagagcttgctgttacgtgcagttgaagcgatggtgtcaaatgcgattttctctgcggaaaaagcagaccttgacagttgcatgaaggcgcaacagcgcaaactgcatgaagaacagtttatggataacgacatagcgtggaatgtggtatatgtcatcgccagtattttgcgtgatgtaatgataaaagaaattaagacggaaagcaaagctgtcaatactgaacttgacgaagcaatgcggctttactatgacgaccaattcgaaaaggcggcaccgggtcttgaaaagcttgctaaacagggacacgcaggggcgcaatgtggtcttgcttggtgttattggttaggagaaggcgtaccgcagaacagcgccaaatgcgcagaatggcttcacaaggcggaaagtcaaggctatgccgaagctcaatatcttcttgggttttgctattcccgaggcgatacctttggcgattactttgaggaagacaccaccaaagccgccgaatggtttcgcaaggcggcggatcagggacacgccgtagctcagtgtgaacttgcctttttatataaaacaggcgacggtgtacagagggatttcgtcaaagccgttgaattgtatcaaaaatcagcggatcaaggatatgctgatgctcaagtgagtcttggcgttctttattatgaaggcattgccgtaccgaaggatgtagccaaagcagtttga

SEQ ID NO: 45690 - protein, 282 aa, Unknown
  Obtained from environmental sample
  DOMAIN (146)...(181): Sel1 repeat
  misc_feature (1)..(282): Xaa is any amino acid
MEQGFIDILKKVVQEHGKEIFLEFKKCKAIVSDYTKSDYRNEKSLLLRAVEAMVSNAIFSAEKADLDSCMKAQQRKLHEEQFMDNDIAWNVVYVIASILRDVMIKEIKTESKAVNTELDEAMRLYYDDQFEKAAPGLEKLAKQGHAGAQCGLAWCYWLGEGVPQNSAKCAEWLHKAESQGYAEAQYLLGFCYSRGDTFGDYFEEDTTKAAEWFRKAADQGHAVAQCELAFLYKTGDGVQRDFVKAVELYQKSADQGYADAQVSLGVLYYEGIAVPKDVAKAV

SEQ ID NO: 45691 - DNA, 486 bp, Unknown
  Obtained from environmental sample
  misc_feature (1)..(486): n is a, c, g, or t
gtggaaaaaggcatcgcggaaggaatggcgcacggcaccatggcccagtacccggttgtggatgttgaagtagccatcgtggacggcaaataccacccggtagattcttcagagctttccttcaaacttgcatccagaaacgcgttccgcgaagccatgcgccaggcaaacccgaccctgctagaacccatcatgagccttactgtctttgtggaagacaaataccttggcgacgtgatgagcgacctttcaagcaagcgcggcaaaattctggggcaggattcatcaggcggcatagcggagattcgcgccgaagtaccgcaggcggaactattgagctactccattggtttgcgcgcaataacttcgggcacaggctccttcggcgtatccctggatcactatgcgcctatcgcaggccgcattgccgaagacgtgattaaagcggcggaagccttcaagatccaggaagaagaagacgcctga

SEQ ID NO: 45692 - protein, 161 aa, Unknown
  Obtained from environmental sample
  DOMAIN (1)...(57): Elongation factor G, domain IV
  misc_feature (1)..(161): Xaa is any amino acid
MEKGIAEGMAHGTMAQYPVVDVEVAIVDGKYHPVDSSELSFKLASRNAFREAMRQANPTLLEPIMSLTVFVEDKYLGDVMSDLSSKRGKILGQDSSGGIAEIRAEVPQAELLSYSIGLRAITSGTGSFGVSLDHYAPIAGRIAEDVIKAAEAFKIQEEEDA

SEQ ID NO: 45693 - DNA, 687 bp, Unknown
  Obtained from environmental sample
  misc_feature (1)..(687): n is a, c, g, or t
ttgttaaccctgattttcccgctcatgcgccttgctttacatcccaaagaacgctttaaaaaatacggaagacgttttatttcatcttccatgaggttttatcttggcgtcattcgtgttatcggaattgtagaagttaaagccaatgatcgcgaaaaattcaggggtttaagatcgaaaatcattgctgccaaccatccgtctcttcttgatataattgttcttctttcattaattccaaacgccgactgcattgtaaacgccagtcttgcgcgtaacatagtaggaggcgttatccgccagctttatatttataattcccttgactttgaggatctgcttaaagcctgtgccgaatcccttaagcagggcaactgccttatcatctttccggagggaacaagaactcccagacagggaaaaattatctttaaaaagggagccgcccgcattgccctttattcaggctgtaacattttgccattacgcatcggaggcaatgataaatacggccttggcaagaaagatccctggccaaccgccaacaccacagagcgttatatttaccaaatcaggatggcggaggaaataccccctgaaaaatttaagccattgccaaatcctatagccgtcaaaaccatgacaggagtactctttgattccattttgccgaaaaacaacgcttaa

SEQ ID NO: 45694 - protein, 228 aa, Unknown
  Obtained from environmental sample
  DOMAIN (37)...(165): Acyltransferase
  misc_feature (1)..(228): Xaa is any amino acid
MLTLIFPLMRLALHPKERFKKYGRRFISSSMRFYLGVIRVIGIVEVKANDREKFRGLRSKIIAANHPSLLDIIVLLSLIPNADCIVNASLARNIVGGVIRQLYIYNSLDFEDLLKACAESLKQGNCLIIFPEGTRTPRQGKIIFKKGAARIALYSGCNILPLRIGGNDKYGLGKKDPWPTANTTERYIYQIRMAEEIPPEKFKPLPNPIAVKTMTGVLFDSILPKNNA

SEQ ID NO: 45695 - DNA, 921 bp, Unknown
  Obtained from environmental sample
  misc_feature (1)..(921): n is a, c, g, or t
gtggccatcgacgactgtgagatcaggcggggaggggtttcctacaccgtggatacaattgaggacattaccgcccgctatctgcctgacggaaagccggctctcattatcggggacgatcttgccgccgattttccaaagtggcgcgacagtataaaaattctggaattggcggatatagttatcgtacgcaggaaaaatcccgtctcaggtaattcgcaagccgtatacccgtttgcgcatacccttcttgataacgaaataatggatatttcctcacaaatgatacgggataagataaaaaccgatcaggactggcgttctcttgtacctgccggggcaagggcaataatcgaagacaggcggctttacggctataaaggcagcggattgtactcgaatataaaattctcgaacataaagttcggagacgaaaaagattgtacccgggaagttattatacgcatagaggaagaggcgcgcagagttcttactatcgagcgttttcttcattccagaaacacggcccttttagcgcatgatctttgcctccgcttcggcatagacccaaaggcgggctatcttgcgggaattgcccatgatttggcaaaacagacggagcccaaacttctaataaaaatggtgaaggacgacggcctgccggttacggacattgaaaagggaaaaccaaaccttcttcacggaagggcggcggcggtattgctaaaggagcgcttctgtattcataataaagatgtgcttgaggcggtggcatttcatacgtccggaaaagaaaatatgagtccgctggctaaggtggtctatattgccgacaaagttgaagtgtcaaggaatattgatcctgtcttaagaaaaatgtgtgtaaatgaagatttagacagtattctttatgctgtttga

SEQ ID NO: 45696 - protein, 306 aa, Unknown
  Obtained from environmental sample
  DOMAIN (168)...(283): HD domain
  misc_feature (1)..(306): Xaa is any amino acid
MAIDDCEIRRGGVSYTVDTIEDITARYLPDGKPALIIGDDLAADFPKWRDSIKILELADIVIVRRKNPVSGNSQAVYPFAHTLLDNEIMDISSQMIRDKIKTDQDWRSLVPAGARAIIEDRRLYGYKGSGLYSNIKFSNIKFGDEKDCTREVIIRIEEEARRVLTIERFLHSRNTALLAHDLCLRFGIDPKAGYLAGIAHDLAKQTEPKLLIKMVKDDGLPVTDIEKGKPNLLHGRAAAVLLKERFCIHNKDVLEAVAFHTSGKENMSPLAKVVYIADKVEVSRNIDPVLRKMCVNEDLDSILYAV

SEQ ID NO: 45697 - DNA, 888 bp, Unknown
  Obtained from environmental sample
  misc_feature (1)..(888): n is a, c, g, or t
ttgcagagagaagtaacaagagagtggaataaactaagcagtttagctgatggtttcaccgatgcagcaaaaaatctttctattggtggcacaccggcagatgaaaccacgggaggctacctaacgattctagatgccatcaaagctcttaatactattgctacagcagatccagctatcactcaaacaattagagaaaaacctactggaacacctgctgctcctatttataatcctccctatcctgctcctggtaactatgattcagacagcttgatgggagaactacaaaagagaattaatgccatcgatattaatgacactaattttcccgccgaaaaagacagggcacttgccgaggctcttaaagaacggttgaatataatagtcaataacaatgctcaacccagtacagatagcttgttattcctatatagcaatatgttggaaaacgacatgacacaagctgcctcttataccctgcatataggtcctaattattcttttggcatgggtggcaaatgggcaaacgagatgacggtcacatacatatctcttaaccctggctcgcttggtctttctaccaaaaacatcagaacgcaaaataactcaacagaggttattgaccatctggacatggttattaaaagcgttagcggtgttcgtgcgaaaataggtacttatatcaataggttggaatacacaattaacaatatttccagcttggaattcaacactcaagatgccgaaagccgcattagggacacagattttgcgcaagcaacaactgagttcactagaaaccagatacttgtacaaagtgcgacgagtatgttggcgcaagccaataccctgccgcaaacagctctaactctcatcggtggataa

SEQ ID NO: 45698 - protein, 295 aa, Unknown
  Obtained from environmental sample
  DOMAIN (201)...(272): Bacterial flagellin C-terminus
  misc_feature (1)..(295): Xaa is any amino acid
MQREVTREWNKLSSLADGFTDAAKNLSIGGTPADETTGGYLTILDAIKALNTIATADPAITQTIREKPTGTPAAPIYNPPYPAPGNYDSDSLMGELQKRINAIDINDTNFPAEKDRALAEALKERLNIIVNNNAQPSTDSLLFLYSNMLENDMTQAASYTLHIGPNYSFGMGGKWANEMTVTYISLNPGSLGLSTKNIRTQNNSTEVIDHLDMVIKSVSGVRAKIGTYINRLEYTINNISSLEFNTQDAESRIRDTDFAQATTEFTRNQILVQSATSMLAQANTLPQTALTLIGG

SEQ ID NO: 45699 - DNA, 534 bp, Unknown
  Obtained from environmental sample
  misc_feature (1)..(534): n is a, c, g, or t
gtggctggaattgtctcttttattgtcgccgccatgatccaaacatttttcgccccgtacagagcagaggcattttggccggtaattttcaacatttttatcagaatagccatgttagaagaagttagccgcatcattgttcttcttccattgttgaaagcaggcaaaaaccgttggaataacatggcccttgccaccgccattggcttaataaccggcctgggcttcgcggcgattgaaaatgcttactatgggatggcaaacataaacatcaccctgcttcgccttttcacagccgcaccccttcacgcgacctgcggcatcagagccggttcagcggtttttactgccccccaacacccggctaaggctctttttctttttatttcatcggtttttattcacggggcctacaacctgacgatagtcaaccccgctatcccttcattcctggccatccttatcgcattagtcgctcttttcgcttcattttcttatttatctgatacgaatgatgacagtgagccattataa

SEQ ID NO: 45700 - protein, 177 aa, Unknown
  Obtained from environmental sample
  misc_feature (1)..(177): Xaa is any amino acid
MAGIVSFIVAAMIQTFFAPYRAEAFWPVIFNIFIRIAMLEEVSRIIVLLPLLKAGKNRWNNMALATAIGLITGLGFAAIENAYYGMANINITLLRLFTAAPLHATCGIRAGSAVFTAPQHPAKALFLFISSVFIHGAYNLTIVNPAIPSFLAILIALVALFASFSYLSDTNDDSEPL

SEQ ID NO: 45701 - DNA, 1272 bp, Unknown
  Obtained from environmental sample
  misc_feature (1)..(1272): n is a, c, g, or t
gtggaacaaatggggctggatatgcatagcagacaggaaatccttaaagcaaattttaaggactatcaaaaggcatctaagaaagggcgcaaggaattattggacaggcttgtgcctgtaacaggcttgaaccttagctatcttgcgacggcacttggcaactatggcaataaggagggcatggagaagccgcctgcaaaaggcaagaggaaaccgcgccctgccgggaaacgcgggggacgccctgtcaaatacggggaagagtttgtaaaggttcttgccgcgatttgggacgagtacggcaaaccttgcgggaagctcttggtcccgatggttcgcggcatgatggattttcttcagggttctaaggatccggactacgggataacaggggaaaccaggaaactgcttttggaagtgagcgcggcggaagcggacatactgttgaagcctgcacggaaggcgcttgaaatcaagggcgcaagcacgacgcgggccgttcaaacgcctttgagaagccaaattcccgtgcgcacgcactttgaccgggacacggttaagcctggaaagttcgcatttgacacggttgcgcattgcgggggctcctcaagcgggcagttttgtaaaaccttgacgggaacggacgtatattccgggtggtatgaaggacgcgccctgctgaacgcggctaactgctgggttaaggccgccatttctgacatagatgccgcccttcctttcccgatgacaggcgcacattacgacaacggcatggaattcataaacgaacccctgctttcttggtgcattggccggcacattgaggccactcggaccaggccgtaccacaaaaacgacaattgctacgcggagcagaaaaactacgatgcggtcaggaaaacagtcgggtacttccggttcgacaccgctgaagagtgcgcagccctgactgaagtgtaccgctggctttgccctttgtataattactggatgccttcgtttcgcctaacggacaaggagaaacaggaggacggccgctataagaaggtctacgaaaaagagcctaaaacgccgtacgagcggctgatgaaatcgcctgacgtatcgtcggagtgcaaaacggaactggaacgcaggagggccgggcaaaacccggttgaactgaaccgaagtttgaatgaggctgtcaggctgctcttgaaaataaaccgcgaaaaattgtatggtgaaaaaacctcctgtcagggggatggtcaggcacccgctgcctga

SEQ ID NO: 45702 - protein, 423 aa, Unknown
  Obtained from environmental sample
  DOMAIN (183)...(363): Integrase core domain
  misc_feature (1)..(423): Xaa is any amino acid
MEQMGLDMHSRQEILKANFKDYQKASKKGRKELLDRLVPVTGLNLSYLATALGNYGNKEGMEKPPAKGKRKPRPAGKRGGRPVKYGEEFVKVLAAIWDEYGKPCGKLLVPMVRGMMDFLQGSKDPDYGITGETRKLLLEVSAAEADILLKPARKALEIKGASTTRAVQTPLRSQIPVRTHFDRDTVKPGKFAFDTVAHCGGSSSGQFCKTLTGTDVYSGWYEGRALLNAANCWVKAAISDIDAALPFPMTGAHYDNGMEFINEPLLSWCIGRHIEATRTRPYHKNDNCYAEQKNYDAVRKTVGYFRFDTAEECAALTEVYRWLCPLYNYWMPSFRLTDKEKQEDGRYKKVYEKEPKTPYERLMKSPDVSSECKTELERRRAGQNPVELNRSLNEAVRLLLKINREKLYGEKTSCQGDGQAPAA

SEQ ID NO: 45703 - DNA, 327 bp, Unknown
  Obtained from environmental sample
  misc_feature (1)..(327): n is a, c, g, or t
atgcaccgcgataacgtctggtccgtacatatcgaatatgttcttcaccgacgtgttgaggttgctcttgccgccgaacaccgacgcgccctctgtaaacgacgacgacgacgcgatcgccggttccttaaagtggcgcgacaacaccgttctatgatacgagcagcaaccctgcgaaccgtggctgtgcggcatgcacttagccacgcccagcgcggcatacatcgcgccgacgggctggcaagttttacacggattcacgcgcaacgcttcgcgcacctttacatcctttgtcgtcatatcaagcattttttccctcctccgtga

SEQ ID NO: 45704 - protein, 108 aa, Unknown
  Obtained from environmental sample
  misc_feature (1)..(108): Xaa is any amino acid
MHRDNVWSVHIEYVLHRRVEVALAAEHRRALCKRRRRRDRRFLKVARQHRSMIRAATLRTVAVRHALSHAQRGIHRADGLASFTRIHAQRFAHLYILCRHIKHFFPPP

SEQ ID NO: 45705 - DNA, 1254 bp, Unknown
  Obtained from environmental sample
  misc_feature (1)..(1254): n is a, c, g, or t
ttggagaaagccattgccgaagcgatggaactcttcaaccccaagtgcataatgatatgctccacctgccccgtcggcctaatcggcgacgacgtgcaggccgtggcgcggcgcaccgaggagaagtacggcataaaggcgataggctactcgtgcgaaggctacaagggcgtgtcgcagtcgggcggccaccacatagccaataacgggctcatgcgctacgtgataggcacgggcgacaagaagcccaagaccaaattcgcggtcaacattttgggcgagtacaatatcggcggcgacggctgggaagaggtccgcatcctcaaacgctgcggcatagaggtgctcaacctgttcaccggcgacgcgtcggtcgagtcgctcaagagcgcccacttggcccacctgaatctggtgatgtgccaccgctccatcaactacatcgccgagatgatgaagacgaagtacggcttggactggctcaaggtgaacttcataggcgtcgaggctacgtgcaagacgcttagggaaatcgccaagtacttcaacgatcccgaactgacgaaaaaggtggaagaggttatcgcggacgagacggcggccatcaaagacgagatggatcactaccgcgccaagctgacgggcaaaaccgccggcatattctccggcggctcgcgttcgcaccactatcaggccctgcttaaggacttggggatgaggaccgtaatcgccggatacgaattcgcccaccgcgacgactacgaggggcgcgacgtcatccctaatataaaggaagacgccgacaacaagaacatcgagaacattaccgtaaagcccgatgagaaactctaccacgagaagtacaccgcgcagcagatagccgacctcaagtccggcgacggcggcatagaactagacacgtacgacggcatgattccggagatgtgcgccggagacgtggtggtggacgactacaaccacttcgagacggacgcgcttatcaagaccgtgaagcccgacattttcctgtctggcatcaaggacaagcactccatacagaaggcgggcgtgtcgtcgcggcagatacactcctacgattattccggcccctattcgggttttcacggcgccgtgaatttcggcagggacgtggcgatggccatatacacaaacgcgtggcagctggtcacgccgccatggaagcatgagcccatgcttaccggcacaatcacggaggagggaaaaaatgcttga

SEQ ID NO: 45706 - protein, 417 aa, Unknown
  Obtained from environmental sample
  DOMAIN (1)...(390): Nitrogenase component 1 type Oxidoreductase
  misc_feature (1)..(417): Xaa is any amino acid
MEKAIAEAMELFNPKCIMICSTCPVGLIGDDVQAVARRTEEKYGIKAIGYSCEGYKGVSQSGGHHIANNGLMRYVIGTGDKKPKTKFAVNILGEYNIGGDGWEEVRILKRCGIEVLNLFTGDASVESLKSAHLAHLNLVMCHRSINYIAEMMKTKYGLDWLKVNFIGVEATCKTLREIAKYFNDPELTKKVEEVIADETAAIKDEMDHYRAKLTGKTAGIFSGGSRSHHYQALLKDLGMRTVIAGYEFAHRDDYEGRDVIPNIKEDADNKNIENITVKPDEKLYHEKYTAQQIADLKSGDGGIELDTYDGMIPEMCAGDVVVDDYNHFETDALIKTVKPDIFLSGIKDKHSIQKAGVSSRQIHSYDYSGPYSGFHGAVNFGRDVAMAIYTNAWQLVTPPWKHEPMLTGTITEEGKNA

SEQ ID NO: 45707 - DNA, 945 bp, Unknown
  Obtained from environmental sample
  misc_feature (1)..(945): n is a, c, g, or t
atggaaataaacaaagaaaatccccctcaaaatgagtggggcccctacgacttcgggaacgggcagcgtatctttgacatccgatatgacccggtgttcaaagccgtattcaccagggacacagaggaatcaaggaaatccctgtcacacctcgtctccgcgcttatcgggcgcgttgtcacggtcaagaccgtcatcgccaacgagccggcggcggactatttaggcggcaaaaagatcaggttcgatattgcctgtaaaagcaaagacggggagccgatcgatgtcgaaatgtccttctacccgattaccgacgaactgaacaggcttgagtacttttcgtcccggctgttcgtagggcaggacatagcgggcgttgaaaaatcctattgcgatttaaaggaagcctaccagatttcgatactcgcccggagaaattttttccctgacaagaagctgacgcacatgtttttattttacgaccctgaagcccgcgtttcgctggaagggaaggtgcggataataacgctggaacttgagaaggcggcgatgtgcgttgacaagcctgtgagcgagatgagcaaggccgaggcgtgggcggtgtttttccaatatttgacagatgaggagaanagggataaaataaaagagatcatagcccgggaggagggaatagcgatggcaataaacgcgatgtgccagataacgagcaattttgaagaatacatgcgcctcaccaccgagctaaagaaccaactcgactggcaggccggcatggtaggggcaaaacgcgagggccgggcggaaggcatggcaaaaggcatggcaaaaggcatggcaaaagaaaaactcgaaattgcccggaagatgaaaacaatgggcgaggccgttgaaaaaatacaaatgataaccggcctcccgtcggcaactattgaacagatgtaa

SEQ ID NO: 45708 - protein, 314 aa, Unknown
  Obtained from environmental sample
  misc_feature (1)..(314): Xaa is any amino acid
MEINKENPPQNEWGPYDFGNGQRIFDIRYDPVFKAVFTRDTEESRKSLSHLVSALIGRVVTVKTVIANEPAADYLGGKKIRFDIACKSKDGEPIDVEMSFYPITDELNRLEYFSSRLFVGQDIAGVEKSYCDLKEAYQISILARRNFFPDKKLTHMFLFYDPEARVSLEGKVRIITLELEKAAMCVDKPVSEMSKAEAWAVFFQYLTDEEXRDKIKEIIAREEGIAMAINAMCQITSNFEEYMRLTTELKNQLDWQAGMVGAKREGRAEGMAKGMAKGMAKEKLEIARKMKTMGEAVEKIQMITGLPSATIEQM

SEQ ID NO: 45709 - DNA, 321 bp, Unknown
  Obtained from environmental sample
  misc_feature (1)..(321): n is a, c, g, or t
ttgaaaaacagccgcatctttttatatactgcaagtatggactgcgaaatactgcccccgacaaacgactttgtcttcaaactcctctttggcgacaaccgccgtaaaaacatacttatagccatgctcaagagctttgtgaatctgccgaacgaagagtatgagcttgtgtttctggacacctaccttaaaccggaacatgaagaagacaagatgggcattctggatataaaagtcagtaccaaaaccgggaaaataatagattggggactagggtctagggatcggggactagggtcttgttacaaaagcgttgcgtaa

SEQ ID NO: 45710 - protein, 106 aa, Unknown
  Obtained from environmental sample
  misc_feature (1)..(106): Xaa is any amino acid
MKNSRIFLYTASMDCEILPPTNDFVFKLLFGDNRRKNILIAMLKSFVNLPNEEYELVFLDTYLKPEHEEDKMGILDIKVSTKTGKIIDWGLGSRDRGLGSCYKSVA

SEQ ID NO: 45711 - DNA, 942 bp, Unknown
  Obtained from environmental sample
  misc_feature (1)..(942): n is a, c, g, or t
atggacaatatgccggccacatcagtatccgtggataccataatatccgaggctggtttccccatatacctgcgcggcttcagcgcaatcgattcatacctgggccgtaattcctccgacgcggtttatgtctcatgccgcgccgatcttgccgatctcgcgcggttgtttgagaatttgaggtatcccggagcggaattagccgatgccgcggcagataccgcagcagataccggcggaaagacatggtatttccgatgcgatgattcgctggatataccgggccggctgcccggccgtttcagttcattcagttttttggaattttatcaggattgcaaaacccgccgtttttatgatccctatggcatttacccttatttgcgttatgtgagggacggcgttatatatggcgatgacgcgtccgtacttgacgtggctcaatggattggaacaataaatgtaaacgcccctccataccgcgttctttttgacggcgcgataatgcttgccaggtattttccgcaaaccggcgttagggggataaaagcgcttgcggaccggtttatgggtatggaaaaaattgcgccgccgggaacagaggaacagcgcttgttgctgacggaacttttaaacgcggcgaatccggcgcccggctttgaactgctgaaacgctgcggatttatcgcttcatgctggcctgaactggctgcgttggacgacgtggatcactccaaggaattccaccccgaaggcaatgtctggaagcatacaatggaagcgcttcgctaccgtaaaccctccggctccggctttgatctgctgttgtcgctgggtttgctcctgcacgacgtgagcaagccgctttcgtattccgccggccggcgccgttttgacggccatgcggaactgggcacaagccaggcgcgccggtttctttaa

SEQ ID NO: 45712 - protein, 313 aa, Unknown
  Obtained from environmental sample
  misc_feature (1)..(313): Xaa is any amino acid
MDNMPATSVSVDTIISEAGFPIYLRGFSAIDSYLGRNSSDAVYVSCRADLADLARLFENLRYPGAELADAAADTAADTGGKTWYFRCDDSLDIPGRLPGRFSSFSFLEFYQDCKTRRFYDPYGIYPYLRYVRDGVIYGDDASVLDVAQWIGTINVNAPPYRVLFDGAIMLARYFPQTGVRGIKALADRFMGMEKIAPPGTEEQRLLLTELLNAANPAPGFELLKRCGFIASCWPELAALDDVDHSKEFHPEGNVWKHTMEALRYRKPSGSGFDLLLSLGLLLHDVSKPLSYSAGRRRFDGHAELGTSQARRFL

SEQ ID NO: 45713 - DNA, 348 bp, Unknown
  Obtained from environmental sample
  misc_feature (1)..(348): n is a, c, g, or t
atgaatcaagatacgctaaagctgataacggccaaaatagagaaaactttagaacaggctcgcgttttaaagtctgaaaaggttaatttggaaactatgatagcggatttgcgtgagaatataagtgaaaaggacaagacgataaatgagctaaagaacaccaatgagcagcatttggcagaaatacgctcgcttcaagaggctctgaacgaaagggactcaaaattagaagaatccgaaaaggcccttttaagggctatagaaactttggacgaagtgcttgacaaagaaaatgcaaccaataacacccttccagggctgttcagtatcaatgagggcaatacttga

SEQ ID NO: 45714 - protein, 115 aa, Unknown
  Obtained from environmental sample
  misc_feature (1)..(115): Xaa is any amino acid
MNQDTLKLITAKIEKTLEQARVLKSEKVNLETMIADLRENISEKDKTINELKNTNEQHLAEIRSLQEALNERDSKLEESEKALLRAIETLDEVLDKENATNNTLPGLFSINEGNT

SEQ ID NO: 45715 - DNA, 828 bp, Unknown
  Obtained from environmental sample
  misc_feature (1)..(828): n is a, c, g, or t
atgggtgcacaaattaaatggttgaataaggatgcggcttttgaccgcttggttttggctggcgatataggcggaaccaataccaatttggctttggttgggcaaaaaaatggaaaactcacaataattgtcgaagccattttcccgtcccgcgaaattacaggcttaaccgagcctataaaagaacttttgcaaacgacaaaaagcgagcgagcggatttagttgtaaaacaaggctgcatttgtgccgcaggccccgttgagaacaactgctgcaagctgaccaacctgaactgggatattgacggcaatgagctttcaaaggaactcggcttggaaatccgcgtgataaatgattttttgggcataagctatggcattcccactttggacgtaaataatcccgaacagatttttgcctttaagcacacggacggctccattccagaaccccgcttggcagccaaggcggtaattggcccagggacaggccttggcgcaggatttttaatttggaatggcaaggattatatgcctaattcctccgagggtgggcacttgacattcgctccctttgacgaggatagccaatcttttagagattatatgagaaagcagttaaacgccaatcccgatgttgaagtgctggtttccggcactggtattcaaaacctttaccagtggtggcgagacacaaaaggggtgcccaaaaacgaagcctgggcggaaatagaaaaagcgaaatcaacagatagaaccttcgcttgctttccaaactctccgattctgaaccccgtggctgctttcatgcttcgccctgttcgttaa

SEQ ID NO: 45716 - protein, 275 aa, Unknown
  Obtained from environmental sample
  DOMAIN (19)...(273): Glucokinase
  misc_feature (1)..(275): Xaa is any amino acid
MGAQIKWLNKDAAFDRLVLAGDIGGTNTNLALVGQKNGKLTIIVEAIFPSREITGLTEPIKELLQTTKSERADLVVKQGCICAAGPVENNCCKLTNLNWDIDGNELSKELGLEIRVINDFLGISYGIPTLDVNNPEQIFAFKHTDGSIPEPRLAAKAVIGPGTGLGAGFLIWNGKDYMPNSSEGGHLTFAPFDEDSQSFRDYMRKQLNANPDVEVLVSGTGIQNLYQWWRDTKGVPKNEAWAEIEKAKSTDRTFACFPNSPILNPVAAFMLRPVR

SEQ ID NO: 45717 - DNA, 681 bp, Unknown
  Obtained from environmental sample
  misc_feature (1)..(681): n is a, c, g, or t
ttgagcgtgttcccacaatggacaaaaaaacttccgcgccccggggattggatgctcgtattaaaacaatttttgggcttcccgcttttgctcacagtggcgtggctgttctggattttttacaggcaaaccggacctgaatctgcgctacggcttggcttactcttatgcacagcgggcttttttgcgtggctctccggcatactcgcaaaaccggggaaaccgtggctgcgttttgttcttctgtggcttgtttttattttgatatatgtgttttcgtggaagttatggattgacccgcaaatccgcgatatgagttctgaagaaattgctcttgaaaatcctgaatggattttattttctcaaaaaaagctggatagcttgcagagcgaaggcgttgccgtttgggtgaacgggtcggcggagtggtgcataacttgcaagatgaatgagaaagttgtatttgaaaacgaggaagtgaaagaattatttgaaaaaaagaaaatagtcaaaatgagagcggactacaccaattcaaattgcgatgctctgatgttctttgaaaaatacgggcgcgagggcgttccatttgatttattcataaacacaaacggaaaatccattttgctgccagaacttttgacggtggacggcgttgttgaggctttggctttggaataa

SEQ ID NO: 45718 - protein, 226 aa, Unknown
  Obtained from environmental sample
  misc_feature (1)..(226): Xaa is any amino acid
MSVFPQWTKKLPRPGDWMLVLKQFLGFPLLLTVAWLFWIFYRQTGPESALRLGLLLCTAGFFAWLSGILAKPGKPWLRFVLLWLVFILIYVFSWKLWIDPQIRDMSSEEIALENPEWILFSQKKLDSLQSEGVAVWVNGSAEWCITCKMNEKVVFENEEVKELFEKKKIVKMRADYTNSNCDALMFFEKYGREGVPFDLFINTNGKSILLPELLTVDGVVEALALE

SEQ ID NO: 45719 - DNA, 702 bp, Unknown
  Obtained from environmental sample
  misc_feature (1)..(702): n is a, c, g, or t
ttgaatgttgttcttgaaaaatggataccaaaagagaaaaaagaggcggcattgatacacaacggaaacggggcaataaaagagcggaatggcagcgcgggcattgtgattgagggtatagacattgagaaaggcatttcgcgctttagcgggaatacggacgagtattttgaaaccctcgccttattctgttctgacggacttgagaagatccaggagttaaagtcgtgcctggaaaaagatgatttatcactttacacaatttacgtacacgccttgaaaagcgccgccgcaaacataggggccgataaattatccgaaaccgcaaagtttttggaggatgccggaaaacaggagaaccttgagataattgaagcccataacggcagattcctgggggatcttgaagcgtgtatagacagaatacatagcgcggtgtcagcgtacaataaaatcacccataaggaaaacgtgtctttcgataaggaatctcttaaacacgaactcgcggagctagacgcggctatcaatactttagacgccggcgttatgaacagaacgattgaccgcatgagaaaatatacccaggttgagggaatcggcagcatcatcagcgccgtatcagagaaaatactgatggctgactatgacgaagctgccgcgctcataaagaccttagttcaggaatttgaaagcgcctga

SEQ ID NO: 45720 - protein, 233 aa, Unknown
  Obtained from environmental sample
  DOMAIN (58)...(145): Hpt domain
  misc_feature (1)..(233): Xaa is any amino acid
MNVVLEKWIPKEKKEAALIHNGNGAIKERNGSAGIVIEGIDIEKGISRFSGNTDEYFETLALFCSDGLEKIQELKSCLEKDDLSLYTIYVHALKSAAANIGADKLSETAKFLEDAGKQENLEIIEAHNGRFLGDLEACIDRIHSAVSAYNKITHKENVSFDKESLKHELAELDAAINTLDAGVMNRTIDRMRKYTQVEGIGSIISAVSEKILMADYDEAAALIKTLVQEFESA

SEQ ID NO: 45721 - DNA, 372 bp, Unknown
  Obtained from environmental sample
  misc_feature (1)..(372): n is a, c, g, or t
atgaaaaacggcgagacgcttttgcagaatatgtatgacacccattttgagggctatgatgaagtggtggccatgcttgaacagtggatgggcctaaaagattcgcttgaggcagaggtttatcaatcggtactttcccgttttgaacgccagcttgtcaacgcccccgagtggcgtgatcagatcaacacatacttttggcgcaagactggcatagcgtataagcggcgagcgaaagatttacgaccgaaatataatgtaaaggagacaaaaataagacgcagtattaaaaccggaagaaaaatctggaaagcttggaggccgtctggcgtcttgaggacaccggcgaagttccctttgttgttgacatag

SEQ ID NO: 45722 - protein, 123 aa, Unknown
  Obtained from environmental sample
  DOMAIN (1)...(79): Glycosyl hydrolase family 67 C-terminus
  misc_feature (1)..(123): Xaa is any amino acid
MKNGETLLQNMYDTHFEGYDEVVAMLEQWMGLKDSLEAEVYQSVLSRFERQLVNAPEWRDQINTYFWRKTGIAYKRRAKDLRPKYNVKETKIRRSIKTGRKIWKAWRPSGVLRTPAKFPLLLT

SEQ ID NO: 45723 - DNA, 441 bp, Unknown
  Obtained from environmental sample
  misc_feature (1)..(441): n is a, c, g, or t
gtggtaagggatcgcaactggacaggcctcacgctggtgcaggagaacctatatggtagcggtcgaattatctggaacccatcaatttccgcgcaggaaattgcgcgcgagtggagcgtcctttcttttggcgcaggccgcgtcgcagaaacattaacggaagtgctattaatgtcctatcccgcataccaaaagtacaacgccccatttggcgtgtgttttatggtaacgcccggcatgcactacggctcgaacatggaaggctacgagttcagccgatggggaacgtatctccgtgctgacgcccatgcaatcggcattgaccgtacgtccgccggaacagagtacaccacacagtacgcggcaaaaaacgcatacatgttttccgacccggcaacatgccctgtaaaccttatcctgtttttccaccgcgttacttag

SEQ ID NO: 45724 - protein, 146 aa, Unknown
  Obtained from environmental sample
  DOMAIN (8)...(145): Glycosyl hydrolase family 67 C-terminus
  misc_feature (1)..(146): Xaa is any amino acid
MVRDRNWTGLTLVQENLYGSGRIIWNPSISAQEIAREWSVLSFGAGRVAETLTEVLLMSYPAYQKYNAPFGVCFMVTPGMHYGSNMEGYEFSRWGTYLRADAHAIGIDRTSAGTEYTTQYAAKNAYMFSDPATCPVNLILFFHRVT

SEQ ID NO: 45725 - DNA, 438 bp, Unknown
  Obtained from environmental sample
  misc_feature (1)..(438): n is a, c, g, or t
atgctgcgattggatgagttttttgccggggatcataatcagggaaagacggccgctcaaggagcggcacaccgcctgattcgcgccgatgccgttacatttctgcatcaggcggcggcagcccggcagcgctgggattcaattatcattgaccccccggtattctccaattcgaccatggcccgcgccgactttgacttaaaccgggattgcggggagttgttggccggctgcctcgccctgatgagtcccggcggcaaagtctggttcagcgccaacgcccgttctttcaaaacgaatgccgcggatatggaaatggcgctggtgaatcattttccgggcattaaggtttctgactacaccgataaattgatagatgaagactttaagggcaaaaaaataccgaaggcttttatgctggaaacaattaacaggtaa

SEQ ID NO: 45726 - protein, 145 aa, Unknown
  Obtained from environmental sample
  misc_feature (1)..(145): Xaa is any amino acid
MLRLDEFFAGDHNQGKTAAQGAAHRLIRADAVTFLHQAAAARQRWDSIIIDPPVFSNSTMARADFDLNRDCGELLAGCLALMSPGGKVWFSANARSFKTNAADMEMALVNHFPGIKVSDYTDKLIDEDFKGKKIPKAFMLETINR

SEQ ID NO: 45727 - DNA, 369 bp, Unknown
  Obtained from environmental sample
  misc_feature (1)..(369): n is a, c, g, or t
gtgcccgccgacatggacgcgcttcttgccctgcccggcgtcggcagaaaaaccgccaatctggtgttaatcgaagcctttgatcttcccggcatctgcgttgacgtccatgtccaccgcatatccaaccgctgcggctggctgcgtaccgaaaatcggtacggtacaaaaacaccggaagaaaccgaaatgacgctgcgcgaaattctgccaaaaaaatactggaaagggataaacgcccttttggttctctacggccaaaacctctgccgccccatcagcccctggtgctcccgctgtgtaatcaaagcccattgcaaacaaacaggcgtggagaaaagcagatatnagatagnagaggtatattaa

SEQ ID NO: 45728 - protein, 122 aa, Unknown
  Obtained from environmental sample
  misc_feature (1)..(122): Xaa is any amino acid
MPADMDALLALPGVGRKTANLVLIEAFDLPGICVDVHVHRISNRCGWLRTENRYGTKTPEETEMTLREILPKKYWKGINALLVLYGQNLCRPISPWCSRCVIKAHCKQTGVEKSRYXIXEVY

SEQ ID NO: 45729 - DNA, 897 bp, Unknown
  Obtained from environmental sample
  misc_feature (1)..(897): n is a, c, g, or t
atgttcttagacgaaaaaaaaattgaggttgtctctggcaggggtggagggggaatttgcagttttcgcagggaaaagcacgttccgcttggaggcccggacggaggtgatggcggaaagggtggtagcgtttatttgcgggcaaatgagcaatacacaacccttttggatatgggaaatgcatatagatacgtagcggaagccggcgcatcaggagaaacagcgaacagaaccggacggggtggcaaagatgtttacgttgatgttcccagaggaacggtggtcagagacggcgaagggcgcattttaaccgatttaacggaagcaggctcagtgtggctggcggcgcagggtggtgctggaggtttggggaatactcgctttgcaaccgctgcaaatcgtgctcccaagcagcgcacaagtggcaagcccggtgaaaaacgcattttgagtctggagctaaagctcatggcggatgttggtttggtaggcttcccgaatgctggcaaatcctcgcttgtccgcaaaatttctagcgcaaaacccaaagttgcggactaccctttcacaacattggaaccagtgcttggcattgtgcagagcaaaaacaggagttttgttgttgcggatattccggggcttatagaaggtgcgagcgaaggcagaggcttggggcataggttcttaaaacacattgagagaacccgtgcgttgctctttgtgatagacggctttgaagaaaaggcttggaaaagctattgtaccttaaaaaaagagcttgaggcgttccatcccaaactgctagagaagaaatttgtggttgcgcttaataaaagcgatcttgggaattttaaaggcgaaaaaggaatttgcaaagcacaaacaggaaattattga

SEQ ID NO: 45730 - protein, 298 aa, Unknown
  Obtained from environmental sample
  DOMAIN (158)...(280): GTPase of unknown function
  misc_feature (1)..(298): Xaa is any amino acid
MFLDEKKIEVVSGRGGGGICSFRREKHVPLGGPDGGDGGKGGSVYLRANEQYTTLLDMGNAYRYVAEAGASGETANRTGRGGKDVYVDVPRGTVVRDGEGRILTDLTEAGSVWLAAQGGAGGLGNTRFATAANRAPKQRTSGKPGEKRILSLELKLMADVGLVGFPNAGKSSLVRKISSAKPKVADYPFTTLEPVLGIVQSKNRSFVVADIPGLIEGASEGRGLGHRFLKHIERTRALLFVIDGFEEKAWKSYCTLKKELEAFHPKLLEKKFVVALNKSDLGNFKGEKGICKAQTGNY

SEQ ID NO: 45731 - DNA, 495 bp, Unknown
  Obtained from environmental sample
  misc_feature (1)..(495): n is a, c, g, or t
atgctctttcctgcaatttttatgcccagctcaaacccagcggatgcaggattaatgactgctcaagttgcttttaacaaagtgagagttggcaatttgcttggcacttcgggatggtatggcagagattttttggttaatgcaaaaaaacaagcagaaggttctgtttttagcatagctttttattcagacggcaatgagcaaaaattctttaccgaaaaattcaaaagcaaatggcaaagagacccagacgagaataaggttgccggactcagctacgatgcaattcgcattgtaaatcaggctttgcaaagccttgcgcaaagcgaaaatccgcaatctttgcccgtagaaattttgcaaaaaagagaatataagggagtttatggaaaaataattttagcagacaacggagcaaacaaaaacacagggctaatatcggtggagcaaggaaagctggtggaaaaatccccatggtgcgaagttagtcattga

SEQ ID NO: 45732 - protein, 164 aa, Unknown
  Obtained from environmental sample
  misc_feature (1)..(164): Xaa is any amino acid
MLFPAIFMPSSNPADAGLMTAQVAFNKVRVGNLLGTSGWYGRDFLVNAKKQAEGSVFSIAFYSDGNEQKFFTEKFKSKWQRDPDENKVAGLSYDAIRIVNQALQSLAQSENPQSLPVEILQKREYKGVYGKIILADNGANKNTGLISVEQGKLVEKSPWCEVSH

SEQ ID NO: 45733 - DNA, 381 bp, Unknown
  Obtained from environmental sample
  misc_feature (1)..(381): n is a, c, g, or t
atgagcagaagggaaacgccggaaggcattgtattggacggctgccttcagtatttggaaatccggggcattttccactggcggaacaataccggcgcggtacaggtacgccctggacagtttatgcgtttcggtaaaattggcagcagcgatattttaggcatacttcccgggggccgtatgctatgcgtggaatgcaaagccaaaagcggaaggctttctccagagcagaaacaattccttgacgatgcccgggaactgggagccctggcattggtagtccgggactggcaggaactggatgaatccctgcggaaagaagggtatgctatgaaggacatgccgttgtttagcggaaccaacagacaggaggggcaatga

SEQ ID NO: 45734 - protein, 126 aa, Unknown
  Obtained from environmental sample
  DOMAIN (25)...(106): Protein of unknown function (DUF994)
  misc_feature (1)..(126): Xaa is any amino acid
MSRRETPEGIVLDGCLQYLEIRGIFHWRNNTGAVQVRPGQFMRFGKIGSSDILGILPGGRMLCVECKAKSGRLSPEQKQFLDDARELGALALVVRDWQELDESLRKEGYAMKDMPLFSGTNRQEGQ

SEQ ID NO: 45735 - DNA, 1026 bp, Unknown
  Obtained from environmental sample
  misc_feature (1)..(1026): n is a, c, g, or t
ttgattgcgagtctcttcgtctcagatctggcgcacttagtgcttccctaccacaaagcgctcgacgcggccgctgagttcgggcgcggcgcgctgaaaatcggcaccacggggcgcggcataggcccggcctacaccgacaaggtctcgcgcgccggcatccacgtcggcgacctccgcgactggaacgtcttcttaaagaagttcatacgcaacaacgacgccgccatagagcgcctcaaaacgccggacggcgaaccgctcgccgatatgtccaacctcgacgaagacaaggtcatcacccattaccataaaatacgcgagcggctgcttcctttcataaaggacaccgcctgctacctcttcaacgcggaacgcgacggcaggcggctgctcttcgagggggcgcagggaacgttcttggacgtcgaccacggcacctacccgttcgtcacctcctccaacacgaccataggcggcgcctgctccggcgccggagtgggcccgaagagcataggccacagcgtcggcatagtcaaaacctacaccacgcgcgtgggcaacggccccttcccgaccgaactgaccgacgacataggcttccacctccgcgccaccggcaatgagttcggcagcaccaccggacgccccaggcgctgcggctggttcgacagcgtcatggtcagaaaggccgcccaactgaacggtttcacgaggctcgccctgactaaactcgacgtcctgaacgacttagacgagataaaaatctgcgtagcctacgagatagaggggaagaaaaccgaccagtaccccacaaacgcgcgggatttcgagtacgcgaagcccgtctacgagagcatgcccggctggaagcaagacatcagcaagtgcaaaaaactctcggaactgccggacgcggcgacgaactacatcggcaaaatccaaaaactgtgctacgacatcccgatactgttagtctccgtgggccccgacaggtcggataccatcgaggtggcgggcctgtaa

SEQ ID NO: 45736 - protein, 341 aa, Unknown
  Obtained from environmental sample
  DOMAIN (1)...(337): Adenylosuccinate synthetase
  misc_feature (1)..(341): Xaa is any amino acid
MIASLFVSDLAHLVLPYHKALDAAAEFGRGALKIGTTGRGIGPAYTDKVSRAGIHVGDLRDWNVFLKKFIRNNDAAIERLKTPDGEPLADMSNLDEDKVITHYHKIRERLLPFIKDTACYLFNAERDGRRLLFEGAQGTFLDVDHGTYPFVTSSNTTIGGACSGAGVGPKSIGHSVGIVKTYTTRVGNGPFPTELTDDIGFHLRATGNEFGSTTGRPRRCGWFDSVMVRKAAQLNGFTRLALTKLDVLNDLDEIKICVAYEIEGKKTDQYPTNARDFEYAKPVYESMPGWKQDISKCKKLSELPDAATNYIGKIQKLCYDIPILLVSVGPDRSDTIEVAGL

SEQ ID NO: 45737 - DNA, 468 bp, Unknown
  Obtained from environmental sample
  misc_feature (1)..(468): n is a, c, g, or t
gtgcctctggcaacgggcgaggacatctaccttaaggagaatttcctgcccctgctggagtccggcagccttgcggtgatccacccggatattctgaccgccgggggtatctacgagacaaagaagatcggcgacctggcccaggattacggagccgcaatggcgatccacatggcggaaaccccaatcgcagctttggctgccgcccatgtcgcggcggcaacggaaaatttccttgcccttgaattccattccgtggacgtgccatggtgggacgatatggtagagaccccttccagacccataatccgcaacgggtacatcgagctaaccgaagcgccgggcattggaattgagggcctgaacgacgaggtgatccgcgcccacatggattcaacccaaaaggatatctggctttcaacggacgagtggaataacgaatattcccacgaccgtacctggagttaa

SEQ ID NO: 45738 - protein, 155 aa, Unknown
  Obtained from environmental sample
  misc_feature (1)..(155): Xaa is any amino acid
MPLATGEDIYLKENFLPLLESGSLAVIHPDILTAGGIYETKKIGDLAQDYGAAMAIHMAETPIAALAAAHVAAATENFLALEFHSVDVPWWDDMVETPSRPIIRNGYIELTEAPGIGIEGLNDEVIRAHMDSTQKDIWLSTDEWNNEYSHDRTWS

SEQ ID NO: 45739 - DNA, 321 bp, Unknown
  Obtained from environmental sample
  misc_feature (1)..(321): n is a, c, g, or t
atgagaaacaagtatgaatttagcgtagctgcttacctgccagcttatatgtttaatgggggaatcgaaaatatgtcgctggacgacatcagggctgggatagatttttttgagaagtattgccccctggacaaggtgtatatcgagccgcaccgggacaatacagacataagcgatgaaaagatccgcgcggtaaaggccctttttgaagaacgcggcattgaaaccgcgggcggaataacgacgaccatacagatgccggggtacgagaaaaaaagcttgttaaattctttttgttatacggaaaaccgcctgccgtga

SEQ ID NO: 45740 - protein, 106 aa, Unknown
  Obtained from environmental sample
  misc_feature (1)..(106): Xaa is any amino acid
MRNKYEFSVAAYLPAYMFNGGIENMSLDDIRAGIDFFEKYCPLDKVYIEPHRDNTDISDEKIRAVKALFEERGIETAGGITTTIQMPGYEKKSLLNSFCYTENRLP

SEQ ID NO: 45741 - DNA, 615 bp, Unknown
  Obtained from environmental sample
  misc_feature (1)..(615): n is a, c, g, or t
ttgacagttggttttattgacgaacggagcgagtgtcgtggccgtgcttgcacggacatgaccgagcgagtgaggaaccgaagggctttagccctttatcaggacgggacatcttgcaggatcggcgaactggtaaaattgtttccaagattgaacatcgccgttgtttccattcatgacttccccgcaagccgcgcccagtggtttatttgggatggggcgaagtcatacctcaatttgtgggaaaggtctgaggaatttcaaaagggcttgcgggttgtgcgtgaaggcgggcagtatatttcgccgaaggttcaacgcctgattgaccattatgaggaatggccggacacaaacagcgaaatgaccaaacggcagaaggaatgccttgtcatgctgtgctgtgggtgtaccattgactacatctgcgaaatgttgaatatatccaaaaaaacggtttacaaccacttgaacagtttatacggcatcttccatgtgggtagttgtaaagagatgactgcacttgcatttgagatgggattggtgacccacaagatattcatttatacaacaggaaaaaagaattcttgccgtttcctgaatgggcggaggtga

SEQ ID NO: 45742 - protein, 204 aa, Unknown
  Obtained from environmental sample
  DOMAIN (119)...(176): Bacterial regulatory proteins, luxR family
  misc_feature (1)..(204): Xaa is any amino acid
MTVGFIDERSECRGRACTDMTERVRNRRALALYQDGTSCRIGELVKLFPRLNIAVVSIHDFPASRAQWFIWDGAKSYLNLWERSEEFQKGLRVVREGGQYISPKVQRLIDHYEEWPDTNSEMTKRQKECLVMLCCGCTIDYICEMLNISKKTVYNHLNSLYGIFHVGSCKEMTALAFEMGLVTHKIFIYTTGKKNSCRFLNGRR

SEQ ID NO: 45743 - DNA, 948 bp, Unknown
  Obtained from environmental sample
  misc_feature (1)..(948): n is a, c, g, or t
ttgatcggcgagtggtttaaggttatttttacaggtacgcaaaaacggaatcccatacatgaaatactaatcgttcttattgtggaattggcggtgttattaggcgcaatactgatgattttcttttccgtaacagcccgcaaaatttatgaatttttcgatcttttttccaacacgacttttttctccaatatacagtccctcattaatatcagtattgttccttttttcctgatgatcataattttttatattgcctgccgtttcattatcgtcaacggtcccagccgtatttccgccttttggggcagtttatgcttcgcgttttcctatactgttttttcccgtattatgaccgtcttccttaaccagacccaatataattttctttacggagcgttgggcagccttatctttttactggtaaatgtatttttcttttttacgtttttcttctttttcgcccagcttacaaaagtacttgactcttttgacgcgcttctttttctgcagttccgtcaggccaaaatgctcacgggccgtcccggttttgagcatttattatttctttcagaaaaaggaaaattgcaaaaatattcccatacgtatcctaaaggcacggttatttttttaaaaggcgacgaggaaaatgatattttttatttgcttgaaggtgaagtaaatttatttatatctgatgaaaatccaaatgaagaacccatcaccctgcaaccgggaactttttttggagaaatgggacacctcctctgtgaaaaccgcaccgcgaccgccaaagcaaaaaccgccgttacggcgcttgttctaccgccccctctgtttgatgaaatgttaaaatacgatacctccatggacagaacgatcatggagctcatatcccagaggctaaaaacaaggaacgaacaatttgacgctcaggttaaacaataa

SEQ ID NO: 45744 - protein, 315 aa, Unknown
  Obtained from environmental sample
  DOMAIN (200)...(289): Cyclic nucleotide-binding domain
  misc_feature (1)..(315): Xaa is any amino acid
MIGEWFKVIFTGTQKRNPIHEILIVLIVELAVLLGAILMIFFSVTARKIYEFFDLFSNTTFFSNIQSLINISIVPFFLMIIIFYIACRFIIVNGPSRISAFWGSLCFAFSYTVFSRIMTVFLNQTQYNFLYGALGSLIFLLVNVFFFFTFFFFFAQLTKVLDSFDALLFLQFRQAKMLTGRPGFEHLLFLSEKGKLQKYSHTYPKGTVIFLKGDEENDIFYLLEGEVNLFISDENPNEEPITLQPGTFFGEMGHLLCENRTATAKAKTAVTALVLPPPLFDEMLKYDTSMDRTIMELISQRLKTRNEQFDAQVKQ

SEQ ID NO: 45745 - DNA, 528 bp, Unknown
  Obtained from environmental sample
  misc_feature (1)..(528): n is a, c, g, or t
atggtttctaaaaaagaacttttgcgcttgaaactggaaaacgcccttgtggaagaaaagggctttgatcttatcgcgatgggaaggccggaaggggagggttgttactgttacgcgaataatgttcttaaagagattatagcggagatttcatctggatacccatatatagtgttggataacgaagctggtcttgaaaatctttcacggcgtattgttcaaaaagttgaccttatgattttagtttcagacgcttcaaattcaggattgcagactttgctccgtctttttgaacttgcaggcgaaatgaaaatggcttacggtaaacttgcgctcgtagtgaacaaattgcgaagcgataaacttcccgacagaatgaaagagattagcgaaaaaaccaaggcggatattgtcatcggtcttcccgatgatgatgaagtttcactttttgcgcaggagaacaggaattttttacagatttctgattcaaatcctgtttataaaaaagttatggaaatagaaatataa

SEQ ID NO: 45746 - protein, 175 aa, Unknown
  Obtained from environmental sample
  DOMAIN (7)...(149): CobQ/CobB/MinD/ParA nucleotide binding domain
  misc_feature (1)..(175): Xaa is any amino acid
MVSKKELLRLKLENALVEEKGFDLIAMGRPEGEGCYCYANNVLKEIIAEISSGYPYIVLDNEAGLENLSRRIVQKVDLMILVSDASNSGLQTLLRLFELAGEMKMAYGKLALVVNKLRSDKLPDRMKEISEKTKADIVIGLPDDDEVSLFAQENRNFLQISDSNPVYKKVMEIEI

SEQ ID NO: 45747 - DNA, 390 bp, Unknown
  Obtained from environmental sample
  misc_feature (1)..(390): n is a, c, g, or t
atgagcaagcttgccatgttgaaaccgaccgtgggcgctccggcggtggccgacttcatcgtggaatcggtcatcgcggcggggggcaacccgtgtccgccaatagttgtgggcgttggcatcgggggcaacttcgaggtagcgccgctgctggcgaaaaaagcgctgctgcgacaccttggcgatccgcacccagacccgcagtacgcagagtttgaaaaaatgctgttgggcagaataaatgccagcggcatcgggccgcagggccttggcggccgcacgatggccatagccgtccacatcgagcaccacccgtgccacatggcaagcctgccggtggccgtgaacatcaactgccatgcgtccagacacgccagcttggagatttga

SEQ ID NO: 45748 - protein, 129 aa, Unknown
  Obtained from environmental sample
  DOMAIN (1)...(129): Fumarate hydratase (Fumerase)
  misc_feature (1)..(129): Xaa is any amino acid
MSKLAMLKPTVGAPAVADFIVESVIAAGGNPCPPIVVGVGIGGNFEVAPLLAKKALLRHLGDPHPDPQYAEFEKMLLGRINASGIGPQGLGGRTMAIAVHIEHHPCHMASLPVAVNINCHASRHASLEI

SEQ ID NO: 45749 - DNA, 423 bp, Unknown
  Obtained from environmental sample
  misc_feature (1)..(423): n is a, c, g, or t
gtggcaaaaaagattacaggttacataaaattgcagattaaagctggcgctgcgaatccggcaccgccaataggtccggcattgggttcaaaaaaggtaaatattgctgaattctgcaagcaatataacgctcgcacgcagtctatgggaggctcaatagttcctgtaataataactgtgtatgcagataacagtttcacttttgttactaaaaccccgccggttccgtctttgataaaacaagctgcaaagatagaaaccgcttctggcgaacctaatcgcaaaaaagtaggtaaaataactatggcacaggtaaaagaaatagctaaactgaaaatgccggatttaaataccgtaactttggaatccgcggaaaaaatggtaataggcacggcccgctcaatgggcgttgaggtaggataa

SEQ ID NO: 45750 - protein, 140 aa, Unknown
  Obtained from environmental sample
  DOMAIN (8)...(66): Ribosomal protein L11, N-terminal domain
  misc_feature (1)..(140): Xaa is any amino acid
MAKKITGYIKLQIKAGAANPAPPIGPALGSKKVNIAEFCKQYNARTQSMGGSIVPVIITVYADNSFTFVTKTPPVPSLIKQAAKIETASGEPNRKKVGKITMAQVKEIAKLKMPDLNTVTLESAEKMVIGTARSMGVEVG

SEQ ID NO: 45751 - DNA, 546 bp, Unknown
  Obtained from environmental sample
  misc_feature (1)..(546): n is a, c, g, or t
atggatttagcttggtattcggtgacaactttttctggacaggagcttaaggtaaagcaactcctcgaagccatgattgaacgtgaacaagctcaagaattatttgggcgcatagaaatacctcacgtgaacgaagaacatatttcaacaaaaaaaggcaagagggttgtaaaaattgaaagacgtaatctaataccttcttacgtgtttatacagatggttttaaacgaccgcacaaggcatttagttcagagcattcaaggcgtgacaaaatttgtcaccataggcaataagattaaaaaaatctcagacgaagaaatgatgacggtgttgcctcgcgataatggagaaattggggaactgccgatgctggaagttcccattaaagaaggcgattcaattcgcattaaagaaggccctttcaaagattatacgggcattgtagaggaaattttaaaagagcgtagcaagttgaaagctatggtagttatatttggtcgttccattcctgttgagcttaacttttctgaagttgaggttctttag

SEQ ID NO: 45752 - protein, 181 aa, Unknown; identical to SEQ ID NO: 7272
  Obtained from environmental sample
  DOMAIN (128)...(165): KOW motif
  misc_feature (1)..(181): Xaa is any amino acid

SEQ ID NO: 45753 - DNA, 468 bp, Unknown
  Obtained from environmental sample
  misc_feature (1)..(468): n is a, c, g, or t
gtgagcgaaggcattaaaataatcgcggtcaaccgcaaagcccggcacgactactcaatcgacgaaacctacgaatgtggcatagaacttctggggacggaagtaaaatctttcagggacggaaagatttcctttcccgacgcatgggctgaggtgataaaaagggaagtctggcttaattccctcagaatcgcggagaacccattctcgtcaatttttaaccatgaccccgacaggaaaaaaaagctccttttaaaccgcgacgaaataaagcgcataacgcggaaaaccgaagaaaaaggttacacattgattcctctctcgttttattttaaaaaaggaagggtcaaagtggagcttgggctttgcaaaggtaaaaagcagtacgacaaaagagcggacataaaagaaaacgatattaagcgcgatatggaaagggaattccgcggcaagaatatgaaactgtga

SEQ ID NO: 45754 - protein, 155 aa, Unknown
  Obtained from environmental sample
  DOMAIN (6)...(73): SmpB protein
  misc_feature (1)..(155): Xaa is any amino acid
MSEGIKIIAVNRKARHDYSIDETYECGIELLGTEVKSFRDGKISFPDAWAEVIKREVWLNSLRIAENPFSSIFNHDPDRKKKLLLNRDEIKRITRKTEEKGYTLIPLSFYFKKGRVKVELGLCKGKKQYDKRADIKENDIKRDMEREFRGKNMKL

SEQ ID NO: 45755 - DNA, 522 bp, Unknown
  Obtained from environmental sample
  misc_feature (1)..(522): n is a, c, g, or t
atgttatttaatgaagaactctatcgggatgacaaaaaccagcttgattttaataacagtaaaataataacgcgaaacgcggttagggcgattatattaaaagaaaataaaattttaatggtacttttagagaaaaccaatgaatataaatttcccggcggcggagtcgagaaaaatgaagcatttgaggacgctttaaaaagagaagtattggaagaaaccggatgcaatgtaataaaaattgttaaaaaagttggaacaataactgaatatgcaattgcaaaggaaggtaaagataagatatttaaaatgacttccgagtactatgccgtagacattgatgataagcagtttgaacaaaaacttgataattatgaaaaagaattgttatttaaaccctgttggactaagattaaagaagcgtataaagtaaataaaaaaataattgatgatcaacgcacttcaacgccttggattaagagagagactagggtgttggagatattaagcgaaaatatttag

SEQ ID NO: 45756 - protein, 173 aa, Unknown
  Obtained from environmental sample
  DOMAIN (24)...(162): NUDIX domain
  misc_feature (1)..(173): Xaa is any amino acid
MLFNEELYRDDKNQLDFNNSKIITRNAVRAIILKENKILMVLLEKTNEYKFPGGGVEKNEAFEDALKREVLEETGCNVIKIVKKVGTITEYAIAKEGKDKIFKMTSEYYAVDIDDKQFEQKLDNYEKELLFKPCWTKIKEAYKVNKKIIDDQRTSTPWIKRETRVLEILSENI

SEQ ID NO: 45757 - DNA, 963 bp, Unknown
  Obtained from environmental sample
  misc_feature (1)..(963): n is a, c, g, or t
ttggcgacggatgtaacaggcgacgtaacagtaaccaccgttactctgcccaacgatgaaatgaaggggcggatcatcggcagggaaggccgcaacatccgtactttggaaactcttacaggtgcggacattatcattgacgatactcccgaagctgtcgttatctcgtgctttgatcctgtacggcgggaaatcgcgaagattgcgcttgaaaaacttattctggacgggcggattcatccggccaggatcgaagaaatcgttgttaaggttagcaaggaaatttctcagaagatttttgaagagggcgaaaaagttctctttgacatgggcattcacaatatcaagcaggatgccgtccgcgcgttggggcgattgtacttccgcacaagttacggacagaatgtgcttcaacattcaaaagaagtggctattatcgctggcatgcttgccgccgaagtcggcgccaaccgcgaacttgcaaaacgcgccgctcttctgcacgacattggcaagggaaacgagtcagactccgatcttaaccacgccgagatcggcatggacatggcgcgcaagatgggagaagatccgcgcattatcaatgcgataggcagccatcacaatgacattgagccgacttgtattgaagcggtaattgtacaaattgcggacgcaatttccgccgcgcgtcccggagcgcgaaaagaaactttagacaactacatgaagcgtcttgaaaatctggaaaacatcaccaccggttttacaggtgtagataaagctttcgccattcaggccgggcgcgaactgcgtatcatggtaaacaacgaagctgtaaacgacgaccagacaaaagagttggcaaaagaaattgccaagaaaattgagacagatcttcgctatccgggacggattaagataaccatgataagggagacgcggattacagagtatgcaagatag

SEQ ID NO: 45758 - protein, 320 aa, Unknown
  Obtained from environmental sample
  DOMAIN (11)...(70): KH domain
  misc_feature (1)..(320): Xaa is any amino acid
MATDVTGDVTVTTVTLPNDEMKGRIIGREGRNIRTLETLTGADIIIDDTPEAVVISCFDPVRREIAKIALEKLILDGRIHPARIEEIVVKVSKEISQKIFEEGEKVLFDMGIHNIKQDAVRALGRLYFRTSYGQNVLQHSKEVAIIAGMLAAEVGANRELAKRAALLHDIGKGNESDSDLNHAEIGMDMARKMGEDPRIINAIGSHHNDIEPTCIEAVIVQIADAISAARPGARKETLDNYMKRLENLENITTGFTGVDKAFAIQAGRELRIMVNNEAVNDDQTKELAKEIAKKIETDLRYPGRIKITMIRETRITEYAR

SEQ ID NO: 45759 - DNA, 378 bp, Unknown
  Obtained from environmental sample
  misc_feature (1)..(378): n is a, c, g, or t
ttgcttctgcttcagtcaaaagggcttatcacccttaaggacggaattcttggcctgactgccactccccgcgacattaccagcaatccgaaaaatttccgctttcaggaacttgaggccgcacagcttccccgctccctattggacgtggacgccgctaccatcaacggcaactatgcccttgaagccggctttaatccagtgagagactccctcatcattgaaggcgcggattctccctatgtaaacatcgtggttgtgcagaagggcaaagaaaacgatccccgtatcgttgccctgaaaaacgcgctacgcagccagaaggtaaaggatttcatcgccagccattacaacggcggcgttgtagcgattttttaa

SEQ ID NO: 45760 - protein, 125 aa, Unknown
  Obtained from environmental sample
  DOMAIN (1)...(125): NLPA lipoprotein
  misc_feature (1)..(125): Xaa is any amino acid
MLLLQSKGLITLKDGILGLTATPRDITSNPKNFRFQELEAAQLPRSLLDVDAATINGNYALEAGFNPVRDSLIIEGADSPYVNIVVVQKGKENDPRIVALKNALRSQKVKDFIASHYNGGVVAIF

SEQ ID NO: 45761 - DNA, 348 bp, Unknown
  Obtained from environmental sample
  misc_feature (1)..(348): n is a, c, g, or t
atgggtactatcgtatcgacaataaaggttggacaaaaaccgactaaagatgaacgcaagcggatgaaagccgaaatcaaggcggcaaaaaaaatgcctccggtatatgaccctgattgccccccttcttcacctgaagccctggccgaatttgcggctatggcgagagagcgcagaaagaaccggcggaatccactgccggttgtagcactccgtatccagccggaagtactggaaaaatacaaagccttggggcgtggttactccggcataatggcggatgtccttaaacttgccgcggataaccctgaaatactttcaaaagcctccggaacagcggctacctga

SEQ ID NO: 45762 - protein, 115 aa, Unknown
  Obtained from environmental sample
  misc_feature (1)..(115): Xaa is any amino acid
MGTIVSTIKVGQKPTKDERKRMKAEIKAAKKMPPVYDPDCPPSSPEALAEFAAMARERRKNRRNPLPVVALRIQPEVLEKYKALGRGYSGIMADVLKLAADNPEILSKASGTAAT

SEQ ID NO: 45763 - DNA, 813 bp, Unknown
  Obtained from environmental sample
  misc_feature (1)..(813): n is a, c, g, or t
atgcaggcaaaacgtataattccatgccttgatgttgacgatggcagagtagtgaagggcgttaaattcaaaggtatacaagacgcaggagacccaagagaacttgcccgccgttacaacgacgacggcgcagacgaacttacgttccttgacatcggcgcatcatacaaaagcagagcgacattactggatgttgtgcgcaaagtagccgccgaagtatttatccccctgtgcgtcggcggcggcatacgggtaattgacgatatgcgagacgcaatgaacgccggagcggataaagtttcagtctgcacttccgccttaagccgccccgaattgttaagcgaaatggcaaacgcctacggcagtcagtgtgtcgtgctttcgatagacgcaaaacgcgtcgagggcggaaacggcttgcgctggcacgcctattcccacggcggcagaaccgacacaggaattgacgccattgaatgggctattaaggcggtagaactcggcgcaggcgagatacttctcaactcaattgacgctgacggaacaggcggcggctacgatttggaactgaaccgccgaatactgaacgccgttcccgtacctgtaatcgcctcaggcggcgcgggaacgctggatcagatagcggaagttttgctcagtacagcatcggcggaaatgccgcagggactctctcccgatgaagcgccgggagcggacgccgcgctgatagcgtcccttttgcactttgggaagacgacaattcaggagattaagaagagggcggaggagaagggggtntgcgtcaggtggtaa

SEQ ID NO: 45764 - protein, 270 aa, Unknown
  Obtained from environmental sample
  DOMAIN (5)...(253): Histidine biosynthesis protein
  misc_feature (1)..(270): Xaa is any amino acid
MQAKRIIPCLDVDDGRVVKGVKFKGIQDAGDPRELARRYNDDGADELTFLDIGASYKSRATLLDVVRKVAAEVFIPLCVGGGIRVIDDMRDAMNAGADKVSVCTSALSRPELLSEMANAYGSQCVVLSIDAKRVEGGNGLRWHAYSHGGRTDTGIDAIEWAIKAVELGAGEILLNSIDADGTGGGYDLELNRRILNAVPVPVIASGGAGTLDQIAEVLLSTASAEMPQGLSPDEAPGADAALIASLLHFGKTTIQEIKKRAEEKGVCVRW

SEQ ID NO: 45765 - DNA, 399 bp, Unknown
  Obtained from environmental sample
  misc_feature (1)..(399): n is a, c, g, or t
atgtggcaccctaaaattattgaatttgacaaccgcatgaagaaactttttgatgaagttgataactttattgaagacctttacggagaaagatactctttgcatcccacgcgtcccgcgcgcggcgaaacttccaatccggaagcggacggcctttttaacataggcgccaactttacccccggctacatttctgaactgggtcgcggctacattattgatgtgtcaatatcaactcttgataaggttgacgacaacgcgcggcatgaaatttacgaagcaacagcggaaaaagtcaaagaactcttacctcttcactttcctgaacgtgaactaatcgtccggcgcgatggaaatcattttaaaattcagggagacttcagccttggggaaatttga

SEQ ID NO: 45766 - protein, 132 aa, Unknown
  Obtained from environmental sample
  misc_feature (1)..(132): Xaa is any amino acid
MWHPKIIEFDNRMKKLFDEVDNFIEDLYGERYSLHPTRPARGETSNPEADGLFNIGANFTPGYISELGRGYIIDVSISTLDKVDDNARHEIYEATAEKVKELLPLHFPERELIVRRDGNHFKIQGDFSLGEI

SEQ ID NO: 45767 - DNA, 531 bp, Unknown
  Obtained from environmental sample
  misc_feature (1)..(531): n is a, c, g, or t
atgtccacttttaacctagacgattacatcagaaaagttcctgatttccccaagaagggcattcttttttatgacataacaagcattcttgccgctccaaaagctttcaagtactgtattgacaaaatgactgatatctacaaaggtcaagccattgacgcgatagccgcgatagaagccagaggttttttattcgccgccgccttcggttatcacaacagcattcccgtaataccaatccgcaaaaaaggaaaacttcccggcgttaccctctccaaaaaatacgatcttgagtacgcccaggccgagattgaagttcatgtaaccgacgttccaaagggaaagcgcgttctaattaccgatgacttaatagcgacaggcggcacattaaacgccgcccgctccctgttaatcgaaggcggagcgatagtaccggaattttttggcattgtcggacttcccttccttaattacgaaaaaatactggctcccacgcctgttaccactttgataaattataacgctgagtaa

SEQ ID NO: 45768 - protein, 176 aa, Unknown
  Obtained from environmental sample
  DOMAIN (25)...(161): Phosphoribosyl transferase domain
  misc_feature (1)..(176): Xaa is any amino acid
MSTFNLDDYIRKVPDFPKKGILFYDITSILAAPKAFKYCIDKMTDIYKGQAIDAIAAIEARGFLFAAAFGYHNSIPVIPIRKKGKLPGVTLSKKYDLEYAQAEIEVHVTDVPKGKRVLITDDLIATGGTLNAARSLLIEGGAIVPEFFGIVGLPFLNYEKILAPTPVTTLINYNAE

SEQ ID NO: 45769 - DNA, 387 bp, Unknown
  Obtained from environmental sample
  misc_feature (1)..(387): n is a, c, g, or t
atgaacctgctccttgacacgcacacggctctttggctgaccaatgagcatgagaagttgtccctaaaagcgaagtccatgctgggcaacgaagaaaatgccctgtatctcagcattgtctcggcatgggagatagccatcaaaacaagcgtcgggagattcggcggctacactggcggcgttgatgcttttctggcgaaaatggaagaaatcccactttccattctcccgatagccccgcgccacctcaagattgtggagaccctgcccttcatccaccgcgacccgtttgaccgactgctggtggccaccgccaaggctgacggcatgaccatactgacggcggacgaggacatacagaaatacgacattccctcgatttggtga

SEQ ID NO: 45770 - protein, 128 aa, Unknown
  Obtained from environmental sample
  DOMAIN (3)...(124): PIN domain
  misc_feature (1)..(128): Xaa is any amino acid
MNLLLDTHTALWLTNEHEKLSLKAKSMLGNEENALYLSIVSAWEIAIKTSVGRFGGYTGGVDAFLAKMEEIPLSILPIAPRHLKIVETLPFIHRDPFDRLLVATAKADGMTILTADEDIQKYDIPSIW

SEQ ID NO: 45771 - DNA, 1062 bp, Unknown
  Obtained from environmental sample
  misc_feature (1)..(1062): n is a, c, g, or t
ttggcttttttaagctcgttacatcttgtggttcaggcactgatttcctgctccaattcagatgggacgcttcccgctcctccgcctatgccattgagttcaagcattggccaaggcaacggtggagatggcagcagtagcagcaatagcgagaatagcaacgatagcagtgatagcggcaatagtagcagcaatggcggtagcagtagcagcagtgacattagcagtagcagttttagcagcagcagcgcattgccactcccaacaatagaacttccaaaaagcggctattaccaaagcggcgtacccactatcacaatacccatgcaaacggaacaggggcttgtttactgcgattccaccggagtagctccaagagaaaacggccctatagggccgggttcaacatttaccttctcaacaacgaaaaaaaatgcaattttgcaatgcgcttcttttaaagatggaatagctacaagcaaaacaattatgcgaacctatttaatagaacgcttgccggatttgcccattgtttccatagcagtggatccggtggagatgtttaccgctccgcgagcactttacaaaagttcgtttgagcctggcgcggattgcggaggagcatcttcgccattccgcagagacgactcacttctcgtgcacgtggatttttttgaaaaagattttaatagaaaaggagaagacgttgcttggagctacccagcggctataaaaattcacggcggctgttcaaggcagtgggacaaaaaatctgtgataatcagctttagagagatatatgggcaaaaaaatcttaagtatcccctgttcccagagttcccggatttaataaaattcaagcattttatgctgcggaacaacggcaacaattacccgtatgattatatacgcgatttgcttatgaaccagctaacagaagggttaaacatagactaccaaaaaggtcgcgctgtggttgtgttttacaatggggaatattatggcatacacaatttgcgggaacgcaccaacagcgattactttgaaaccaattcaatatag

SEQ ID NO: 45772 - protein, 353 aa, Unknown
  Obtained from environmental sample
  misc_feature (1)..(353): Xaa is any amino acid
MAFLSSLHLVVQALISCSNSDGTLPAPPPMPLSSSIGQGNGGDGSSSSNSENSNDSSDSGNSSSNGGSSSSSDISSSSFSSSSALPLPTIELPKSGYYQSGVPTITIPMQTEQGLVYCDSTGVAPRENGPIGPGSTFTFSTTKKNAILQCASFKDGIATSKTIMRTYLIERLPDLPIVSIAVDPVEMFTAPRALYKSSFEPGADCGGASSPFRRDDSLLVHVDFFEKDFNRKGEDVAWSYPAAIKIHGGCSRQWDKKSVIISFREIYGQKNLKYPLFPEFPDLIKFKHFMLRNNGNNYPYDYIRDLLMNQLTEGLNIDYQKGRAVVVFYNGEYYGIHNLRERTNSDYFETNSI

SEQ ID NO: 45773 - DNA, 1371 bp, Unknown
  Obtained from environmental sample
  misc_feature (1)..(1371): n is a, c, g, or t
atggatggttcagtagacaagttacagataaatcataacatctgtattggatgcgggaactgcattaacgcctgtacccacaaggcaagaaccctcattgacaacaccgaccatttctttgatgacctgaaacagggaaaaaaaatgattgccgtagccgccccggctgtcgcgtcgttttttcccaatcaatttctcaacttaaacggatggctgcactcactgggcattgaagccttttttgacgtgagccttggcgcggaacttacggtcataacctatcttgactatatcaaagaaaaagctccccggacggtgatttcgcagccatgcccggcgcttgtaacttatatagaaattcaccaccccaaattgataccctatcttgccccggcggacagtcctatactgcataccataaaaatgatcagggagtattatcctcaatacaataatcacaaaatagcggtaatttccccctgcattgccaaacgccgggaatatgacgaaaccggcctgggggactataacgttacgatgattgctttaaaaaactttatggacgacaagagaataaatctttcatcttttccgaaagtggaatataccggagtcagcgcggagcgcgcggcggggtttcccattcccgggggactgctggataccgccgagcgttttatgccgggtatcaggcggaacaccctcaaaattgaaggcgtgcattcgatttatccctatttgaaagaaatagagaacctgctgcacaccactaccgaactgccgcttttgatagactgccttaattgcgaaaaaggctgcattggcggacccggcacgggaaacgcccaccaaccgctggctatgcttgaaaaccccgtgcgaaaacgcatgatcgaactggaaagaaagcaaaaaccccaacccggaaaaaacgcgtacaaaaaatatcataatattttaaaaaagtactggaagaaaggcctgtataaccggagataccttgatctttccggtaataacacgatcaaacatccaagcaagtctgaaataactgaaatcttccacagcatgaagaaatacgaaaaggaagacatatacaactgtacctgctgcggttacggaagctgcgaagcgatggcgacggcaatcttcaacaaacttaacaaaccggaaaattgcgcccattatattcttgccttgctaacggaaataactgactccgaagagtctaaccgtcttcatcttcaggaacacattgaccacgcgtcacagactattgaaggaataaacagattaataaatgaactgaacgcctctatcatgtcgcagtcggaaacaatcgcccagtcctcggtcgcgaccgagaaatga

SEQ ID NO: 45774 - protein, 456 aa, Unknown
  Obtained from environmental sample
  DOMAIN (8)...(31): 4Fe-4S binding domain
  misc_feature (1)..(456): Xaa is any amino acid
MDGSVDKLQINHNICIGCGNCINACTHKARTLIDNTDHFFDDLKQGKKMIAVAAPAVASFFPNQFLNLNGWLHSLGIEAFFDVSLGAELTVITYLDYIKEKAPRTVISQPCPALVTYIEIHHPKLIPYLAPADSPILHTIKMIREYYPQYNNHKIAVISPCIAKRREYDETGLGDYNVTMIALKNFMDDKRINLSSFPKVEYTGVSAERAAGFPIPGGLLDTAERFMPGIRRNTLKIEGVHSIYPYLKEIENLLHTTTELPLLIDCLNCEKGCIGGPGTGNAHQPLAMLENPVRKRMIELERKQKPQPGKNAYKKYHNILKKYWKKGLYNRRYLDLSGNNTIKHPSKSEITEIFHSMKKYEKEDIYNCTCCGYGSCEAMATAIFNKLNKPENCAHYILALLTEITDSEESNRLHLQEHIDHASQTIEGINRLINELNASIMSQSETIAQSSVATEK

SEQ ID NO: 45775 - DNA, 867 bp, Unknown
  Obtained from environmental sample
  misc_feature (1)..(867): n is a, c, g, or t
atgggagttgaaatccctatcgcccagtggtggcctgtacgccagcctcgtcccataatggagcgctttgcgccggacgagccgttagttacaggcagacgagttattgacgttttcttccccctgtccaaaggaggagcggcggcaattccaggcggcttcggaacaggaaaaaccatgacccagcacgccgtagcaaaatggtgcgacgctaatgtaattatctacatcggctgcggagagcgcggcaatgaaatgacagacgtacttaccgagtttcccgagcttcaggaccctcgcacaggtcgcagccttatggaaagaaccttattaatcgcgaatacttcaaatatgcctgtagcggcgcgtgaagtgtcaatatacacaggcgtaacgcttgcggaattttaccgtgatatgggctaccacgtggctattatggcggattcaacaagccgctgggctgaagcgttacgtgaactttcaggccgcatggaagagatgcccgccgaagaagggtttcccgcatatcttcccacaaggcttgcagaattctacgagcgggcaggccgtgtccgagcgctttgcggagagcaaggctctatctcaataatcggggcagtctctcctccgggcggcgatttttccgagcctgtaacgcagcatacaaaacgatttatccgctgtttctgggctttggacagggaccttgcccacgcaagacattatccccgcataagctggatcgacagttactcggaatacgccgaggaagtacagcactggtgggcgcaggtaaatcccatgtggacagaagtccgtaaaaaaagcatgggaccttttaaaacaggaacaaaggttagctga

SEQ ID NO: 45776 - protein, 288 aa, Unknown
  Obtained from environmental sample
  DOMAIN (31)...(253): ATP synthase alpha/beta family, nucleotide-binding domain
  misc_feature (1)..(288): Xaa is any amino acid
MGVEIPIAQWWPVRQPRPIMERFAPDEPLVTGRRVIDVFFPLSKGGAAAIPGGFGTGKTMTQHAVAKWCDANVIIYIGCGERGNEMTDVLTEFPELQDPRTGRSLMERTLLIANTSNMPVAAREVSIYTGVTLAEFYRDMGYHVAIMADSTSRWAEALRELSGRMEEMPAEEGFPAYLPTRLAEFYERAGRVRALCGEQGSISIIGAVSPPGGDFSEPVTQHTKRFIRCFWALDRDLAHARHYPRISWIDSYSEYAEEVQHWWAQVNPMWTEVRKKSMGPFKTGTKVS

SEQ ID NO: 45777 - DNA, 318 bp, Unknown
  Obtained from environmental sample
  misc_feature (1)..(318): n is a, c, g, or t
ttgatccttcttacggcgcagataatcaaagacggatttttacagcaaaattcatttgatgatgttgatatgtactgcgtccctgaaaaacaggtcaggcttcttgaaataataatggaatttcacaggcgtgcgcttacctgcattgagctgggcgctcctatgacaaaaataacgggaacaggccttaaagaaattttatcccgcctgaaaagcactgtaaaaaacgatgcagtcagcgggtttaatccgattgaaggtaaaatgcgttatactctggaagaactggaacgatcctaccggacaaggaacgcataa

SEQ ID NO: 45778 - protein, 105 aa, Unknown
  Obtained from environmental sample
  misc_feature (1)..(105): Xaa is any amino acid
MILLTAQIIKDGFLQQNSFDDVDMYCVPEKQVRLLEIIMEFHRRALTCIELGAPMTKITGTGLKEILSRLKSTVKNDAVSGFNPIEGKMRYTLEELERSYRTRNA

SEQ ID NO: 45779 - DNA, 477 bp, Unknown
  Obtained from environmental sample
  misc_feature (1)..(477): n is a, c, g, or t
atgagaggtattgaatacaagggcttggaacgaatagaagggcctgtggttattacttcccgcagccgcaacgtaggttttaacgaagtagtagcggtctatgaccgtgaaaacaacaaaaaacttggacgcgtactggatttaagcagggattgggctgcaattcaaatattcggaaacagtacaggactttccgcagatgattcaagagttgaattcttggacaagcctatggaaattcgagtcggcagcggtcttttgggcagggtgtttaacggactcggcgaaccgattgacgggtacggaaatattttttcgtcaaaaacctacgacattaacggggcttccgatcaatccctgggcgcgcacctacccgcgcgactttatccagacgggcatatccgcgatagacggcatgaccacgctgatccgcgggcaaaagctgccgattttctccggcaacggtctgccgcataa

SEQ ID NO: 45780 - protein, 158 aa, Unknown
  Obtained from environmental sample
  DOMAIN (9)...(75): ATP synthase alpha/beta family, beta-barrel domain
  misc_feature (1)..(158): Xaa is any amino acid
MRGIEYKGLERIEGPVVITSRSRNVGFNEVVAVYDRENNKKLGRVLDLSRDWAAIQIFGNSTGLSADDSRVEFLDKPMEIRVGSGLLGRVFNGLGEPIDGYGNIFSSKTYDINGASDQSLGAHLPARLYPDGHIRDRRHDHADPRAKAADFLRQRSAA

SEQ ID NO: 45781 - DNA, 1086 bp, Unknown
  Obtained from environmental sample
  misc_feature (1)..(1086): n is a, c, g, or t
atgattcaagagttgaattcttggacaagcctatggaaattcgagtcggcagcggtcttttgggcagggtgtttaacggactcggcgaaccgattgacgggtacggaaatattttttcgtcaaaaacctacgacattaacggggcttccgatcaatccctgggcgcgcacctacccgcgcgactttatccagacgggcatatccgcgatagacggcatgaccacgctgatccgcgggcaaaagctgccgattttctccggcaacggtctgccgcataaccgtctcgcggcgcagatcacgcggcaggcaaagatcctgagcgccaacgaagaattcactatcgtattttgcgcgatggggattaagcatgacatcgcccagttcttcatccgttcctttgaggagagcggggtgctgcatcgcgtctcaatgttcctctcgctggccgacgatccgaccatggagcgattggtcacgccgcgatccgcgcttaccctggccgagtatctcgcctttgactgcggtatgcacgtactggttgtgatgaccgacatgaccaattactgcgaggctctgcgcgagatcgcgatcgcgaagggggagatcccctcacgcaagggatacccgggatacctctacagcgatctctctacgatttatgaacgcgccggcaggatcaaaacctcgaagggctcgatcacccaggttccgattttgaccatgccttccgacgatatcacgcatcccgtgcccgacttaacggggtatatcacggagggacagatagtccttgagcgcgagctttacgggcattccgtgtatccgccgatcgcggggctgccctccctctcgcgcctcatgaaggacgggatcggtgccggttctacccgcgaggatcaccagcgggtatcaagtcagctctttgcggcgtattcgcgcgtcaaggacgcgcgcagcctcgcggcggtcgtcggcgaagaggagctctccccgcttgagaagcaatacctcaaatttggcgaagccttcgagaagagattcctgaatcagggcgagcatgaggacagatcgatgaacaaaccctga

SEQ ID NO: 45782 - protein, 361 aa, Unknown
  Obtained from environmental sample
  DOMAIN (65)...(284): ATP synthase alpha/beta family, nucleotide-binding domain
  misc_feature (1)..(361): Xaa is any amino acid
MIQELNSWTSLWKFESAAVFWAGCLTDSANRLTGTEIFFRQKPTTLTGLPINPWARTYPRDFIQTGISAIDGMTTLIRGQKLPIFSGNGLPHNRLAAQITRQAKILSANEEFTIVFCAMGIKHDIAQFFIRSFEESGVLHRVSMFLSLADDPTMERLVTPRSALTLAEYLAFDCGMHVLVVMTDMTNYCEALREIAIAKGEIPSRKGYPGYLYSDLSTIYERAGRIKTSKGSITQVPILTMPSDDITHPVPDLTGYITEGQIVLERELYGHSVYPPIAGLPSLSRLMKDGIGAGSTREDHQRVSSQLFAAYSRVKDARSLAAVVGEEELSPLEKQYLKFGEAFEKRFLNQGEHEDRSMNKP

SEQ ID NO: 45783 - DNA, 390 bp, Unknown
  Obtained from environmental sample
  misc_feature (1)..(390): n is a, c, g, or t
ttggtcatgtcggtcatcacaaccagtacgtgcataccgcagtcaaaggcgagatactcggccagggtaagcgcggatcgcggcgtgaccaatcgctccatggtcggatcgtcggccagcgagaggaacattgagacgcgatgcagcaccccgctctcctcaaaggaacggatgaagaactgggcgatgtcatgcttaatccccatcgcgcaaaatacgatagtgaattcttcgttggcgctcaggatctttgcctgccgcgtgatctgcgccgcgagacggttatgcggcagaccgttgccggagaaaatcggcagcttttgcccgcggatcagcgtggtcatgccgtctatcgcggatatgcccgtctggataaagtcgcgcgggtag

SEQ ID NO: 45784 - protein, 129 aa, Unknown
  Obtained from environmental sample
  misc_feature (1)..(129): Xaa is any amino acid
MVMSVITTSTCIPQSKARYSARVSADRGVTNRSMVGSSASERNIETRCSTPLSSKERMKNWAMSCLIPIAQNTIVNSSLALRIFACRVICAARRLCGRPLPEKIGSFCPRISVVMPSIADMPVWIKSRG

SEQ ID NO: 45785 - DNA, 582 bp, Unknown
  Obtained from environmental sample
  misc_feature (1)..(582): n is a, c, g, or t
atgatacgttttgctgaaaaatttaacaatttacgaattgtgacgaagctgtcgtcacaattgagctggtcgcattttatagaaattttgccattggaaaccgaaaaagcaagactatattatgcaaatgacgctattacaagaaatttaggtatccgtgaacttcgtaaccaaatctcccgaaaagcctatgaaaggcgtgaaatcgcaaataataaaataaaagaaaattcaaaagtaccctttaatgttttcaaagacccatatttactggatactttgggattaaaagagaattttctggaggccgatcttgaaaaagcaatactaacagaacttgaagcgtttattttggaatttggtcatggttttacatttgtagaacggcaaaaacgcatgacaatggatgccgatgattttacgcttgacctgcttttttaccatagagacttaaaacgtctagtagctatagaattaaaaattggtaaatttattcttttttccctgaaaactagtactaaatccgaagtatctttccaattaaaaacattatacttatcaatacacaaattcaccgtttag

SEQ ID NO: 45786 - protein, 193 aa, Unknown
  Obtained from environmental sample
  DOMAIN (1)...(192): Protein of unknown function (DUF1016)
  misc_feature (1)..(193): Xaa is any amino acid
MIRFAEKFNNLRIVTKLSSQLSWSHFIEILPLETEKARLYYANDAITRNLGIRELRNQISRKAYERREIANNKIKENSKVPFNVFKDPYLLDTLGLKENFLEADLEKAILTELEAFILEFGHGFTFVERQKRMTMDADDFTLDLLFYHRDLKRLVAIELKIGKFILFSLKTSTKSEVSFQLKTLYLSIHKFTV

SEQ ID NO: 45787 - DNA, 1338 bp, Unknown
  Obtained from environmental sample
  misc_feature (1)..(1338): n is a, c, g, or t
ttgctggtgaaaagtcagctgccaaatggttcattcccatactggccaggcggacaatttggagaccactatgttacgctcagggttgcacacataatttatctcgcaaggcaaaaaggctatgcaattcctgaaacattcaatacccagaccctgaccaaatacattacggaaaacgatttttcctcaacaatatttaaagaagatcctttccttaagggttactctctgtgggtacgtgccatgtacggggcgcgaattggggcggagatctcagcctttttacggcgtggggacgagcttggcatttcaggctggggctttgcgggccttgccgcaatagagcttggcttgaaagaccttgccgtttccgcacgggacagggtaaggcgctttatacgtccgggaactcgcacgctggatctgacagacacgtatgagcggagtggcaatatttggggctacgataccgaccgttatgcgatagccacgatgctttaccaggctttaagccctgctgacgacatgaccacgaggctggtgaactcccttatcgaacgccagcgccggggaatatggaccaacaccgcttcttccttttgggcgattcttgcttttagtaaaattgcagacgctgaagaaaaagaccaaagcggcacgctcaattccaggctttccctgggaggaaacacgttgttggaagccactttcagcacagctggtggcacgcctgtctcccgcacctgggctttcggcgaaactccccttgacgtaacaacgagggacactcttctgccattgagaatcgaacaagaaggcacggggcggctttactacaccgtaagcctcaagtatggaattcccaccgagcttgcatcagcaagggacgaaggcttgagcgttttttcggaaaccttcgattcagcggggaatcctgttttgggaggcgtgcttgttccgggcaagacctacaccagaaaggtgacggtttccagctccagggatcgcacccatgtggcgctcagagcgcctattccgtccggggctgaaattgtagacgcgacttttattacaagttccacggttccgccaagagatagtgacaacgagcgggaggatcggctcaaacgccggacgccgccgtcagtacggttcatcatagatgacgaggccgttttccactgggattttttccccgcgggaaaaaaagaagtagagttccgcttccgcgctgtgatgagcgggatataccccacaccaccggctcaggcggaatgtatgtatgaggaagaaattttcggaaggggacccggcgaattgtatcgcataggtctctga

SEQ ID NO: 45788 - protein, 445 aa, Unknown
  Obtained from environmental sample
  misc_feature (1)..(445): Xaa is any amino acid
MLVKSQLPNGSFPYWPGGQFGDHYVTLRVAHIIYLARQKGYAIPETFNTQTLTKYITENDFSSTIFKEDPFLKGYSLWVRAMYGARIGAEISAFLRRGDELGISGWGFAGLAAIELGLKDLAVSARDRVRRFIRPGTRTLDLTDTYERSGNIWGYDTDRYAIATMLYQALSPADDMTTRLVNSLIERQRRGIWTNTASSFWAILAFSKIADAEEKDQSGTLNSRLSLGGNTLLEATFSTAGGTPVSRTWAFGETPLDVTTRDTLLPLRIEQEGTGRLYYTVSLKYGIPTELASARDEGLSVFSETFDSAGNPVLGGVLVPGKTYTRKVTVSSSRDRTHVALRAPIPSGAEIVDATFITSSTVPPRDSDNEREDRLKRRTPPSVRFIIDDEAVFHWDFFPAGKKEVEFRFRAVMSGIYPTPPAQAECMYEEEIFGRGPGELYRIGL

SEQ ID NO: 45789 - DNA, 543 bp, Unknown
  Obtained from environmental sample
  misc_feature (1)..(543): n is a, c, g, or t
ttgtcaaaacttccaaagtacacaaaggtaaagtgcgcccgttgcggcgactgctgccgcatccctgtagtccccgttacccataaagacgtggcgaggctcatcaaacacaccggcttgtccgtaagcgcgttggtgcgtttctgtccgtcctctgaaatggcctacgacgaggattcggggctgtggataaaattcaaatcggtcaggcgcgctatggtgctgcgcaagcgcggcgaacggtgtatctttcaaacgccggaaaaggcctgctccgcatacgaggcaaggccgcagacttgccgtacattcccgtacagtatggatttcgacggcaaaaaagtcgtggaaatcacactaaacaaggtaatgaagtgcaacgcgataaaatgctctaagggctgtattgatattgatacggtcatagccaacgtaaggaaagaggatcgggaagacaatgagtatcacaaactggtagaacggtggaatttgtcgcatagtacgggcaccgtgaaagattttctgaaatttatcgggctttaa

SEQ ID NO: 45790 - protein, 180 aa, Unknown
  Obtained from environmental sample
  DOMAIN (10)...(131): Uncharacterised protein family (UPF0153)
  misc_feature (1)..(180): Xaa is any amino acid
MSKLPKYTKVKCARCGDCCRIPVVPVTHKDVARLIKHTGLSVSALVRFCPSSEMAYDEDSGLWIKFKSVRRAMVLRKRGERCIFQTPEKACSAYEARPQTCRTFPYSMDFDGKKVVEITLNKVMKCNAIKCSKGCIDIDTVIANVRKEDREDNEYHKLVERWNLSHSTGTVKDFLKFIGL

SEQ ID NO: 45791 - DNA, 690 bp, Unknown
  Obtained from environmental sample
  misc_feature (1)..(690): n is a, c, g, or t
atggacgataaaagactatacttagtagacggttacgcgttcgcctaccgcgcctactacgctctcattcgtagcccgcttatcaattcgaagggcttccccaccagcgctatttacggcttcgcaaactatctgctgcgcctcatagaggcctacggctgcccatacttagcggtggcaatggacagcgcaggccccaccttccgccacgcggcatacgcgccgtacaaggccaatcgcgaggcgatgccggaagaccttaagcaacagatgccgcgcatattcgagttgctcgacgcgttcaacatccccatcgtcaaaaaggacgggtttgaggcggacgacatcgtcgcgtctctcaccaagcgggcgctcgcggaggggtttgaggtgtttttggtgaccaaagacaaggacctcatgcaactcatcggcccgaaagtgactatgctcgccccggacgggtcgggcgtcttttcccccatgaaaccgcgtgacgtgcttgacaagatgggagtgccgccggaaaagattttggactatctggccctcgtaggcgacacatcggacaacattcccggagtactcggaatangccaaaagagcgccgtgaatattttgaagactttgacggtcgatcaaatattaaaagacccctcccggatcgaaaccgataaatatgccaaataa

SEQ ID NO: 45792 - protein, 229 aa, Unknown
  Obtained from environmental sample
  DOMAIN (173)...(229): 5'-3' exonuclease, C-terminal SAM fold
  misc_feature (1)..(229): Xaa is any amino acid
MDDKRLYLVDGYAFAYRAYYALIRSPLINSKGFPTSAIYGFANYLLRLIEAYGCPYLAVAMDSAGPTFRHAAYAPYKANREAMPEDLKQQMPRIFELLDAFNIPIVKKDGFEADDIVASLTKRALAEGFEVFLVTKDKDLMQLIGPKVTMLAPDGSGVFSPMKPRDVLDKMGVPPEKILDYLALVGDTSDNIPGVLGIXQKSAVNILKTLTVDQILKDPSRIETDKYAK

SEQ ID NO: 45793 - DNA, 408 bp, Unknown
  Obtained from environmental sample
  misc_feature (1)..(408): n is a, c, g, or t
ttgacagtgggcgaattaaaacccggcgacagggcgacatttaccgttatcagggacaagaaatcaactgatttccaggtccgcatagaggcgcgcaccgatcaggtatcatcaaacaacagcaaactgtggcccggcgtaaacgttgtcccgttaaacgaccagcttaaggaaacccttgaacttcccaaagacgcaaaaggcctgtatgtggttgacgttacggacggcagtcccgcaaaaattgtcggattgcagcgcggggacagaatcttatccgttaacggcgaaaaaacagagaacatggccgcgttcttcaaggcgttacgcgaaaaaacaggcagcgagctgtggttcggtatgcagcgcggagacgctacggttgagtcgttgaggtataagaagtaa

SEQ ID NO: 45794 - protein, 135 aa, Unknown
  Obtained from environmental sample
  DOMAIN (35)...(122): PDZ domain (Also known as DHR or GLGF)
  misc_feature (1)..(135): Xaa is any amino acid
MTVGELKPGDRATFTVIRDKKSTDFQVRIEARTDQVSSNNSKLWPGVNVVPLNDQLKETLELPKDAKGLYVVDVTDGSPAKIVGLQRGDRILSVNGEKTENMAAFFKALREKTGSELWFGMQRGDATVESLRYKK

SEQ ID NO: 45795 - DNA, 624 bp, Unknown
  Obtained from environmental sample
  misc_feature (1)..(624): n is a, c, g, or t
atgaaactattttatcaatattgttcttttggcttcagtaattgctatgttatcggaacagacagaatcaagcccggactgccgaacgccgcggtcattatcgatcccggaagcatagaaaacgtaatcttggacacgattgaaaacaacaacatggatgtaaaagcggttcttataacccatgatcacctaagccatgtgcgcggcctgcgtacgttaatgcgcatatacaacattgaggtttttgccgtaaatcaaagcattctggatcacaagacaaccgtggtaaaagacggcgacaaattatttatcggcggatttacggttgaagttatttctatacccggacattcctcagattccgttgtttaccgcgtaggcgacatgcttttcacaggcgacgtgcttacggccggtcttgtcggcagtacggcaagcgcttacggatcggctacgcaaatgaacaacttacgcagccgtcttctctcccttcccggcgattatttggttctgcccggacacggcccgcccacaacgctggaagcggaacgccgttttaacacggatatctttcactacgacgaaaaccgcagcaagcgccccgtcttccgcgttgaaacctaa

SEQ ID NO: 45796 - protein, 207 aa, Unknown
  Obtained from environmental sample
  DOMAIN (12)...(174): Metallo-beta-lactamase superfamily
  misc_feature (1)..(207): Xaa is any amino acid
MKLFYQYCSFGFSNCYVIGTDRIKPGLPNAAVIIDPGSIENVILDTIENNNMDVKAVLITHDHLSHVRGLRTLMRIYNIEVFAVNQSILDHKTTVVKDGDKLFIGGFTVEVISIPGHSSDSVVYRVGDMLFTGDVLTAGLVGSTASAYGSATQMNNLRSRLLSLPGDYLVLPGHGPPTTLEAERRFNTDIFHYDENRSKRPVFRVET

SEQ ID NO: 45797 - DNA, 591 bp, Unknown
  Obtained from environmental sample
  misc_feature (1)..(591): n is a, c, g, or t
atgtttaaaattaatccttgtgcggcaggctgcggaagacccgccgttacaggttataatctttgtttcatccatctggcaaaccccgaacaggaatacaagcgtatatgtgaatttatcgaggaaaacaagtcaattaaagacgtatgtatctcgggcgtgcgttttgaaaacaccgatttttccgctcatcaaattttcggatgtaatttcagggaagcgtcctttatacactgtaattttaccggcgttgtaacgcgtatgagtttttttgattttgcgacatttaacgactgcgatttttcaaagtcagatcttcaattcgcgtcatttgccggaacgcgcgttaataactgcacttttgaaggttcggaaatagtgcatgttaattttgagggcgccgcgatagccggttcccggtttgacaattcaaatttatacaacagccggtttatcagcgcggatttggaaaaaaccacttttattaactgcaacttaaaacaggtttattttatcagcgcgaagcaaaaggatattttctttaagtcgtcaaataccgccgaggccgtatttgaaatggaagaatcatga

SEQ ID NO: 45798 - protein, 196 aa, Unknown
  Obtained from environmental sample
  DOMAIN (74)...(113): Pentapeptide repeats (8 copies)
  misc_feature (1)..(196): Xaa is any amino acid
MFKINPCAAGCGRPAVTGYNLCFIHLANPEQEYKRICEFIEENKSIKDVCISGVRFENTDFSAHQIFGCNFREASFIHCNFTGVVTRMSFFDFATFNDCDFSKSDLQFASFAGTRVNNCTFEGSEIVHVNFEGAAIAGSRFDNSNLYNSRFISADLEKTTFINCNLKQVYFISAKQKDIFFKSSNTAEAVFEMEES

SEQ ID NO: 45799 - DNA, 351 bp, Unknown
  Obtained from environmental sample
  misc_feature (1)..(351): n is a, c, g, or t
atgggccagaaaagcaccattgacaaactgccgaaaaaactccgcgacaaacttacagagatgctgcaaaatccggccgtaacgcaggcggaaattgtagacgcaataaacgccgaggcgggcgagccgcttatttcaaaatcgtcaatgaaccgctacgcgcaaaaaatgaaacacttcacggaaaagaaccggcaggcgaaagaaatagccgatgcgtacattgaaaaatacggcagcgaaaatcggcagaacttaggcaaagtaatcaatcagcaaatgcgtgtggcgatattcgaccttatgggtgagtttgaagaaatccttgccgaccctgaaacaaaagcgtga

SEQ ID NO: 45800 - protein, 116 aa, Unknown
  Obtained from environmental sample
  misc_feature (1)..(116): Xaa is any amino acid
MGQKSTIDKLPKKLRDKLTEMLQNPAVTQAEIVDAINAEAGEPLISKSSMNRYAQKMKHFTEKNRQAKEIADAYIEKYGSENRQNLGKVINQQMRVAIFDLMGEFEEILADPETKA

SEQ ID NO: 45801 - DNA, 1500 bp, Unknown
  Obtained from environmental sample
  misc_feature (1)..(1500): n is a, c, g, or t
gtgggaagcaactccggaagcaccgtgcgatactgcgtatcactcggcgcaagggtaaccggcggaaataatacctgccgtgtagtgggaattatgtcgggaacaacaactctcaccaacaacaaagcccgcgcggatatgaaagtcggcgcaagcggatcggaagcattaccaactataaatataggagcaaatgaaagagaaggcgcagatgtcagtctgggtacggcacagaactctgttttcagcagtttctttacaaccacgatttggactttaggcagtaatttgaccgtaggcggcgcattgcccagactccagatgaatacgcaaagcccggctcccacgcttccggcggcgtactctgtacccggctcggcggacaatcctttcctcgttgccaccgaagccgatctccgcaaggtcggcacagaaaccgcaacaggaggctggacgctttcggcgtactacaaacagacagcgaatatcaccgtaacatcgactaacaactgtccggcgataggaagtaacgccaacagattcaccggcacgtatgatggggacggaaaatccatcaccggcttgacccaagttaccacgagcagttattcaggtatctttggttatatcggcgatggcggcacggtgaaaaacgttacagttatcaacggcacgataacccaaaacggaagcaacacttcgttcactggcggcattaccggatataatctaggtacgatagacaactgttcctttagcggaaacgtcaacggcaacacaaccaatgatgtgataggcggcattgccggaaggaataacggcacggtgataaacagcagaagcaccgcaacggtaagcggcagaatttgtatcggcggcattgtcggagagaataccggcaagattgaaaacagttacaacacaggaaacgtcagcggcacaaatcagataggcggtatcgccggagctctttccggcagcagttcatacataaagaacagctataacacgggcaatgttaccgcaactgacagcacctccaatgtcggcggcattgccgggaattgcacgacaggctcattggtagaatattgctacaattccggaaccgtttccggcgcacaatatgtcggaggcatagttggaaccggcggttcaacagttaccgtgcaatactgcatatcactcagcacaagggtgataaccaccacaaacagcacctatgccggacgcataagtggaattcaaggcgtaaccatgaccggcaacaaagcccgttcagatttactgctcggaccaagcactcaaaccacaccggtaactacaggcacaggatcaaacaaagacggcgaaaatgtcagtttaggtacgacagtgatgaacgttttcaccagctttgatgcgaatatttggtatatatggaacacacccatgaatacaggcggtgatttgcccgcattaaggaagaaagagcaagttcccgcacccaagcttccgtga

SEQ ID NO: 45802 - protein, 499 aa, Unknown
  Obtained from environmental sample
  DOMAIN (287)...(312): The GLUG motif
  misc_feature (1)..(499): Xaa is any amino acid
MGSNSGSTVRYCVSLGARVTGGNNTCRVVGIMSGTTTLTNNKARADMKVGASGSEALPTINIGANEREGADVSLGTAQNSVFSSFFTTTIWTLGSNLTVGGALPRLQMNTQSPAPTLPAAYSVPGSADNPFLVATEADLRKVGTETATGGWTLSAYYKQTANITVTSTNNCPAIGSNANRFTGTYDGDGKSITGLTQVTTSSYSGIFGYIGDGGTVKNVTVINGTITQNGSNTSFTGGITGYNLGTIDNCSFSGNVNGNTTNDVIGGIAGRNNGTVINSRSTATVSGRICIGGIVGENTGKIENSYNTGNVSGTNQIGGIAGALSGSSSYIKNSYNTGNVTATDSTSNVGGIAGNCTTGSLVEYCYNSGTVSGAQYVGGIVGTGGSTVTVQYCISLSTRVITTTNSTYAGRISGIQGVTMTGNKARSDLLLGPSTQTTPVTTGTGSNKDGENVSLGTTVMNVFTSFDANIWYIWNTPMNTGGDLPALRKKEQVPAPKLP

SEQ ID NO: 45803 - DNA, 855 bp, Unknown
  Obtained from environmental sample
  misc_feature (1)..(855): n is a, c, g, or t
atgaaatgggcgcaatcactaaggcccggcggggtcaaaggtttcaccatttcatttgacgggaaaacaatccgttctactgggaagatggacagttatgacaacccgctgcatatactcagcgcgcacttggctgaactgggtataaccataggtcaaagaacggtgggggagaaaagcaacgaaatccctgcgatgcgggaacttttagagtttttaaccatagagggctgtatggtagtcgccgacgcgttgaactgccagaaagaaacggcagcggctgtaattgagggcaagggagattatttgttttcggtgaaggataatcagcaaacattgaaagaggacatagaaggttacgtgcaagacaagcatttacaaaaaacaatggacgtccacacaacacttgaaaaaacgagcggcaggatagaacggagaaccgcatatacgagcggcgatataggatggctttccggcaaggaggaatgggagggtctggcttgtattggggctgtgaacactcaagtttccagcaaaaagggagaggcaaacgagtggcattattacatctgcagccgcaacttgacggcggaggaactgctcaggcacgcccgcttggaatggtcggtagaaacaatgcattggctgcttgacgtgcatttcggcgaggatttctgtcgtgttgaggatcggaatgtccagcaaaatttgaacattgtccgcaagatcgctcttaacactattaaagactacaaaaacaaaacggcatctaaacgccctatttccaaactcatgtttgattgcttgcttgaatcagaaaatatcttgtctgttttagctgttaatgaaaattga

SEQ ID NO: 45804 - protein, 284 aa, Unknown
  Obtained from environmental sample
  DOMAIN (16)...(247): Transposase DDE domain
  misc_feature (1)..(284): Xaa is any amino acid
MKWAQSLRPGGVKGFTISFDGKTIRSTGKMDSYDNPLHILSAHLAELGITIGQRTVGEKSNEIPAMRELLEFLTIEGCMVVADALNCQKETAAAVIEGKGDYLFSVKDNQQTLKEDIEGYVQDKHLQKTMDVHTTLEKTSGRIERRTAYTSGDIGWLSGKEEWEGLACIGAVNTQVSSKKGEANEWHYYICSRNLTAEELLRHARLEWSVETMHWLLDVHFGEDFCRVEDRNVQQNLNIVRKIALNTIKDYKNKTASKRPISKLMFDCLLESENILSVLAVNEN

SEQ ID NO: 45805 - DNA, 471 bp, Unknown
  Obtained from environmental sample
  misc_feature (1)..(471): n is a, c, g, or t
ttgctattgttttcttgcgctgccaaaacaagaaaagagagtggcgaaaaatattatttctcagggaaaaatgaatggggaaatatgacaaaggatttcaaatatcctgtggaacttgaaaaacgcattgaagattttttaagcattccttatgtatggggtggcaataacagtgatggcttggattgctcagcttttgttaaacaagtatatgaaatataccgctttgatttgccaagaacttcaattttgcagagcaaattgggaattaaaatcccgcgcagtgctcttttgccgggcgatttggtgttttttggtgaaataggtaaagattcggttacccacgttggcatttatatgggaggtaataaatttgcaaatgcgacaaattcagaaggtgtaaaatattccagtttaaatgagtcttttttcttttcaaaatatttatttgcaaaaagattgaatttttag

SEQ ID NO: 45806 - protein, 156 aa, Unknown
  Obtained from environmental sample
  DOMAIN (50)...(153): NlpC/P60 family
  misc_feature (1)..(156): Xaa is any amino acid
MLLFSCAAKTRKESGEKYYFSGKNEWGNMTKDFKYPVELEKRIEDFLSIPYVWGGNNSDGLDCSAFVKQVYEIYRFDLPRTSILQSKLGIKIPRSALLPGDLVFFGEIGKDSVTHVGIYMGGNKFANATNSEGVKYSSLNESFFFSKYLFAKRLNF

SEQ ID NO: 45807 - DNA, 417 bp, Unknown
  Obtained from environmental sample
  misc_feature (1)..(417): n is a, c, g, or t
atggtttctgaaggcaaaagcggttattgggttatagcagacgactcagggctggaggttgaggcactggatggcaaacccggcgttctttccgctcgctatgcgggcgagaatgctaccagaacgcaacgctacacaaaattgcttaaagagatggaaggtaaaaccaacagaaatgcgagattcgtttgctgcctttgcttgataaagcccggcaattcgccagaattttttgaaggagagtgcaagggtagcattttaaccgaagctagaggcaatggcggttttggttatgaccctgtttttttgcctgaagggcatagcaggagttttggggaaatgaatgaagaagagaaaaatgctttgagccataggggcaaggctataaaaaatatgcttgcaaaattaggggggtga

SEQ ID NO: 45808 - protein, 138 aa, Unknown
  Obtained from environmental sample
  DOMAIN (1)...(136): Ham1 family
  misc_feature (1)..(138): Xaa is any amino acid
MVSEGKSGYWVIADDSGLEVEALDGKPGVLSARYAGENATRTQRYTKLLKEMEGKTNRNARFVCCLCLIKPGNSPEFFEGECKGSILTEARGNGGFGYDPVFLPEGHSRSFGEMNEEEKNALSHRGKAIKNMLAKLGG

SEQ ID NO: 45809 - DNA, 1485 bp, Unknown
  Obtained from environmental sample
  misc_feature (1)..(1485): n is a, c, g, or t
atgatcgccgagttcggcggtctgggaatcctttccggcgaccacatgaaaacgtcttcggatttaggtctgccccttgtcggtatcgggcttttgtacaggcagggttattttaaacagatgctgaacgccgacggtttccaacaggaaagttatcctgaaaacgactggtacaatatgcccgtcgaaaagaaagtcggcaaagacggacagcctttaaaaatttccgtagatttggcgggcagacaggcagttgctcaaatctgggaagttagagtaggtcgttcctcactgtatttgttggatacaaatatcgaagaaaacgcgccggatataagaaacattaccgcggcgctttacggcggcgataaagaaacccgtatgcagcaggaaatactgctcggcatcggcggcatacgcgcgttacgcgcattaggcattaatccggcggctactcacatgaacgaaggacacgccgctttcatggggcttgagaagattcgcgaaataatgagcgagatgaactttacttttgcggaagcgctcgaagcggtttggcctacaaatatttttactacccacactcctgttccggcgggaaacgagcgttttgatatttccatgatggaaaaatatttccgttcatggcctcaggttttgggaatttcttggaaagatttcttaggtctcggcagaatcaatgtaaacgatgaacatgaaactttctgtttaactgttcttgcgttaaaaatggtcgcttatgccaacggcgtcgcgaaacttcacggagtggtatcgcgcgatatgtggaaaggactgtggcccggacttccgcttaacgaagttccaatcggtcatgttacaaacggcgttcatacgcgcacatggatttcttccggtatgctcgatcttttggacagatattttggtcctaagtttgaagacagaccgacagaactgaatatttgggaacgcatggatcgtatctccgatgaagaattgtggcgcacccatgaacgccgccgcgaacgtcttgtcgcttttgtgcgtgaacgtatccgcgagcaatacaaacgaacgggcgcggtagaacggcggattcgtcaggcggaggatgttctttctccttactcgctgactctttgttttgcgcgccggtttgctacttataaacgcggcaacctgcttcttcgcgaccctgaacgccttttacggctggtcagagataacgatcgtcctgttcaattaatttttgccggtaaagcgcatccgcatgatatgcccggtaaagatttaatccgcgatataattcactttgcggaaaaatacgacgttacaaaccgcatagtctttgttgaaaactacgacatgagcgtagcgaaatatttaacctcaggcggcgacgtatggcttaacaaccccgcgccgtcccatggaagcgtccggcacaagcggcatgaaagcggctatgaacggcgttcttaa

SEQ ID NO: 45810 - protein, 494 aa, Unknown
  Obtained from environmental sample
  DOMAIN (6)...(492): Carbohydrate phosphorylase
  misc_feature (1)..(494): Xaa is any amino acid
MIAEFGGLGILSGDHMKTSSDLGLPLVGIGLLYRQGYFKQMLNADGFQQESYPENDWYNMPVEKKVGKDGQPLKISVDLAGRQAVAQIWEVRVGRSSLYLLDTNIEENAPDIRNITAALYGGDKETRMQQEILLGIGGIRALRALGINPAATHMNEGHAAFMGLEKIREIMSEMNFTFAEALEAVWPTNIFTTHTPVPAGNERFDISMMEKYFRSWPQVLGISWKDFLGLGRINVNDEHETFCLTVLALKMVAYANGVAKLHGVVSRDMWKGLWPGLPLNEVPIGHVTNGVHTRTWISSGMLDLLDRYFGPKFEDRPTELNIWERMDRISDEELWRTHERRRERLVAFVRERIREQYKRTGAVERRIRQAEDVLSPYSLTLCFARRFATYKRGNLLLRDPERLLRLVRDNDRPVQLIFAGKAHPHDMPGKDLIRDIIHFAEKYDVTNRIVFVENYDMSVAKYLTSGGDVWLNNPAPSHGSVRHKRHESGYERRS

SEQ ID NO: 45811 - DNA, 1359 bp, Unknown
  Obtained from environmental sample
  misc_feature (1)..(1359): n is a, c, g, or t
ttgcattaccgttccgtactttccacacgcaaagacgccattacagggcttgagataaaagtcattccggcaggcgaaggcgaaaaagaaacggaacttgccgcggcggtagaacgtgacatagttaaaaatccaaacgcgaaactgcgttcattgctccgaaatatgcttgacgctctgggcaaaggattttcagtcaatgaaattatctgggacacaggaagcgttccgtggaaaccgaaagcgtacaaattccgagaccctcgctggtttcagtacgacagagaaaccggagacaatcttatgttacgcgttccatacggaaacgatcttgaaccgctcaagcagtttcaatttgtcgtacacgagccgcacttaatcagcggaaaacaaatcaccgcagggctggcgcttcccgcattattttattggatgatcaaaacttacgacgtaacaagctgggcggcgttcattgaccgctacggttatccgatccgcatcggcaaatacgggaaaaaattcaccgaagaggatcgaattacgctcaaaagagcagtcgccgccatcggtcaggatttcggcgctatcattccagaaagcgcacagcttgaaattatcgagtccaaaagcaccggcgaaaaagcaaatgtttataacaacatggctgactggatcgacaaacagatcagtaaacttgtacttggtcagaccatgaccacagacgaaggctcaagcagatcgcagagcgagactcacgaaaaagttcgtgacgatattgccgacagcgacattcagcagattgttgatacattgaacgccgcgctgaccgttccttacattaaccttaactttggcgaacaaagcgaataccccaagatagaccttttcaaacccgatgaaaaaaacatcgagcagataattacggcggttgaaaagttgggaccgcaagggttgaaagtcaaagccgatgaagttcgctctcttatccgtctatccaatcccgaacccgaagacgaagtaatcggcggcaaatcgtcatatccgcaaaacctatctaataatcttgacgatttaaattcggctcggaaaatcgcgctcaactccgccgcaaacaatgaacctgccgacagcgttgacgaacttgacgctgaaaacggaaacggctatatcgcaatctccgacgagatcgccggcgtgattgaaaaagcggctgacgctgctgtcgattttgagtcattccaaaaggaactgaaaaaactggttaccggctgggcgccggataaaatcgccgaatgtatcgccgtggcgacattcaaagcaagagcgcttggaagcgcggagtttgacaaggggaaatga

SEQ ID NO: 45812 - protein, 452 aa, Unknown
  Obtained from environmental sample
  DOMAIN (1)...(442): Protein of unknown function (DUF935)
  misc_feature (1)..(452): Xaa is any amino acid
MHYRSVLSTRKDAITGLEIKVIPAGEGEKETELAAAVERDIVKNPNAKLRSLLRNMLDALGKGFSVNEIIWDTGSVPWKPKAYKFRDPRWFQYDRETGDNLMLRVPYGNDLEPLKQFQFVVHEPHLISGKQITAGLALPALFYWMIKTYDVTSWAAFIDRYGYPIRIGKYGKKFTEEDRITLKRAVAAIGQDFGAIIPESAQLEIIESKSTGEKANVYNNMADWIDKQISKLVLGQTMTTDEGSSRSQSETHEKVRDDIADSDIQQIVDTLNAALTVPYINLNFGEQSEYPKIDLFKPDEKNIEQIITAVEKLGPQGLKVKADEVRSLIRLSNPEPEDEVIGGKSSYPQNLSNNLDDLNSARKIALNSAANNEPADSVDELDAENGNGYIAISDEIAGVIEKAADAAVDFESFQKELKKLVTGWAPDKIAECIAVATFKARALGSAEFDKGK

SEQ ID NO: 45813 - DNA, 1725 bp, Unknown
  Obtained from environmental sample
  misc_feature (1)..(1725): n is a, c, g, or t
ttggagcatttgaagcggttgcccgtcgccgaggcgttcaatatgtctaagaacgatccgcagaatatggtgctgaaagttttgccggtcttgccgccggatttgcggccgcttgtgccgctcgaaggcgggcgtttcgcgacttcggatctcaacgatcttnatcgccgcgtgataaataggaacaaccgtttgaagaagctgcttgagatcaaggcgccggaggtcattttacgcaacgagaaaaggatgcttcaagaagcggtcgatacgttgtttgacaacggccgccgcactttctccgtcaagggagagggcaagcgtccgctcaagtctttgagcgatttgttgaaaggaaagcaggggcggttccgtcagaacttgttaggtaaacgtgtcgactattcgggacgtagcgtgatcgtcgtcggccccgagttgaagatacatcaatgcggattgccgaagcttatggcgcttgaacttttcaagccgtttgtgatacagaagttggaagagaagggtttggtgcagactgttaagagcgcgaagaagtttgtggagaaggagcgccctgaggtttgggacatattggaggaggtcatcaaagatcaccccgtgcttctgaaccgcgcgcccacgttgcacagattgggtattcaggcgtttttcccggtgcttgtcgagggcaaggcgatacgccttcacccgctcgtgtgttccgcgttcaacgccgacttcgacggcgaccagatggccgttcacgtgccgctctcggcggagtcgcagcttgagtgccggttcctgatgctctcggcgaacaaccttctcagcccggcgtccgggcacccggttatgacgcccacgcaggacattgttcttgggatatattatttgacgaagatgtctcccgaccgtatggggcaggggcgcgcgttcagcgatacggacgaggtgttgctcgccatggccgacaagcaggtggacatccacgcgaaaatcaaggtgcgtcacaacgggaaaatgatagagaccaccccgggccgcgtcgtgttcaacacggtcgttcccaaagagattgagtttgtcaacgagctactcaacaagaagcgcgtgcagcagcttgtggagcgcgtctacaacgccgccggcacaaagacggcttgcaagttcttggacgagatcaaggcgctgggttacgaatacgccacgagggcgggaataactttcggggccgaagacctcgttattcccgacgagaagaaagagattatagacaagtcgcaggaagaggttacgcgcataaggaagcagtacgaccgcggtatcatcaccgagggcgagcgctacaacaagttaattgacttgtggacgcacaccacgagccaaatcgcggacaagatgcacgagaggctcgcgggggataagaacggattcaatcctgtatacattatgatggactcgcaagcccgcggaagcaaagaccagatcaagcagctcgccggtatgcgcgggctcatgcagaagccgcagaagaagatcaccggcgcggtcggtgagatcattgagaacccgatcatctccaacttcaaggatgggttgacggttcttgaatactttatatcgacgcacggagcgcgtaaaggtttggccgatacggcgctcaagaccgccgacgccgggtatctcacgcggcgtttggtcgacgtcctcgtgccgatctga

SEQ ID NO: 45814 - protein, 574 aa, Unknown
  Obtained from environmental sample
  DOMAIN (1)...(128): RNA polymerase Rpb1, domain 1
  misc_feature (1)..(574): Xaa is any amino acid
MEHLKRLPVAEAFNMSKNDPQNMVLKVLPVLPPDLRPLVPLEGGRFATSDLNDLXRRVINRNNRLKKLLEIKAPEVILRNEKRMLQEAVDTLFDNGRRTFSVKGEGKRPLKSLSDLLKGKQGRFRQNLLGKRVDYSGRSVIVVGPELKIHQCGLPKLMALELFKPFVIQKLEEKGLVQTVKSAKKFVEKERPEVWDILEEVIKDHPVLLNRAPTLHRLGIQAFFPVLVEGKAIRLHPLVCSAFNADFDGDQMAVHVPLSAESQLECRFLMLSANNLLSPASGHPVMTPTQDIVLGIYYLTKMSPDRMGQGRAFSDTDEVLLAMADKQVDIHAKIKVRHNGKMIETTPGRVVFNTVVPKEIEFVNELLNKKRVQQLVERVYNAAGTKTACKFLDEIKALGYEYATRAGITFGAEDLVIPDEKKEIIDKSQEEVTRIRKQYDRGIITEGERYNKLIDLWTHTTSQIADKMHERLAGDKNGFNPVYIMMDSQARGSKDQIKQLAGMRGLMQKPQKKITGAVGEIIENPIISNFKDGLTVLEYFISTHGARKGLADTALKTADAGYLTRRLVDVLVPI

SEQ ID NO: 45815 - DNA, 345 bp, Unknown
  Obtained from environmental sample
  misc_feature (1)..(345): n is a, c, g, or t
gtgagatacccggcgtcggcggtcttgagcgccgtatcggccaaacctttacgcgctccgtgcgtcgatataaagtattcaagaaccgtcaacccatccttgaagttggagatgatcgggttctcaatgatctcaccgaccgcgccggtgatcttcttctgcggcttctgcatgagcccgcgcataccggcgagctgcttgatctggtctttgcttccgcgggcttgcgagtccatcataatgtatacaggattgaatccgttcttatcccccgcgagcctctcgtgcatcttgtccgcgatttggctcgtggtgtgcgtccacaagtcaattaacttgttgtag

SEQ ID NO: 45816 - protein, 114 aa, Unknown
  Obtained from environmental sample
  misc_feature (1)..(114): Xaa is any amino acid
MRYPASAVLSAVSAKPLRAPCVDIKYSRTVNPSLKLEMIGFSMISPTAPVIFFCGFCMSPRIPASCLIWSLLPRACESIIMYTGLNPFLSPASLSCILSAIWLVVCVHKSINLL

SEQ ID NO: 45817 - DNA, 648 bp, Unknown
  Obtained from environmental sample
  misc_feature (1)..(648): n is a, c, g, or t
atgccagacatgctgagccagttggacaaaaaagcgcaggagatcgcgggagtgtcaatccgtttggcctcacccgacgctatcaggagttggtctttcggcgaggtcactaagcccgagaccataaactaccgttcgttcaagcccgaaaaggacggcctcttctgcgaaaagatattcggcccggtccgcaactgggagtgcaactgcggcaagtacaagcgcatccgctaccgcggcgtggtctgcgaccgttgcggcgttgaggttatgcactccaaggttcggcgcgagcgtatgggccacatagagctcgccgagccggtcgtccacatctggttcttaaagagcacgccctcccacatcagctatcttctcggcatcacgaacagcaatctggaaaggatcatctactacgagtcttacgtggtcatcgatccgggcgacacgaatctgcgcaaagatcagctcctctccgaggagcagtactccgagctcatggagcagggcaagaagttcgacgcgaaaatgggcggtcaggctgtattggaacttttggctaaagttgaggttgagaaattggtgatagaattgcgccacttggttaagcgcgagacttcggagccagcgcccgtttggagcatttga

SEQ ID NO: 45818 - protein, 215 aa, Unknown
  Obtained from environmental sample
  DOMAIN (12)...(214): RNA polymerase Rpb1, domain 1
  misc_feature (1)..(215): Xaa is any amino acid
MPDMLSQLDKKAQEIAGVSIRLASPDAIRSWSFGEVTKPETINYRSFKPEKDGLFCEKIFGPVRNWECNCGKYKRIRYRGVVCDRCGVEVMHSKVRRERMGHIELAEPVVHIWFLKSTPSHISYLLGITNSNLERIIYYESYVVIDPGDTNLRKDQLLSEEQYSELMEQGKKFDAKMGGQAVLELLAKVEVEKLVIELRHLVKRETSEPAPVWSI

SEQ ID NO: 45819 - DNA, 597 bp, Unknown
  Obtained from environmental sample
  misc_feature (1)..(597): n is a, c, g, or t
gtgattacaattgacgaaattttcgaaaaatggcagagggcgacagatattgccgcttctcttgacgatcgtctgcttgcggctcaagttttaattagcggaattgagggcaaggggagtttaaattcaaacatagcaaccctgttaagcgaattccctaccggcgggattatgcttttcaagtataaccttgacacagacaacgattcaatccgcgccctgattagtcaaaccgtctcgcttgtaaacagcgaatcgggcatccctccgtttatggcggtagatcacgagggaggcactgtaaaccgtttcaggcaaggcacggccgacttgccggacgcttcattttattgggaactttcgcnaaaacaagacaaacagaccagctttaaaaaaattgaaaatgacagttttagggcgggtaagggactaaaagagttggggatcaatgtaaatttcgcgcctgtggcggaatacttaaatgacgaaaaccgtgtttttttagccgccgctcctacgggcccgacccgctttttacggcaaacgcggcgcaggcttttatcatggggatggaacaggccggagtcttatgcgtaa

SEQ ID NO: 45820 - protein, 198 aa, Unknown
  Obtained from environmental sample
  misc_feature (1)..(198): Xaa is any amino acid
MITIDEIFEKWQRATDIAASLDDRLLAAQVLISGIEGKGSLNSNIATLLSEFPTGGIMLFKYNLDTDNDSIRALISQTVSLVNSESGIPPFMAVDHEGGTVNRFRQGTADLPDASFYWELSXKQDKQTSFKKIENDSFRAGKGLKELGINVNFAPVAEYLNDENRVFLAAAPTGPTRFLRQTRRRLLSWGWNRPESYA

SEQ ID NO: 45821 - DNA, 504 bp, Unknown
  Obtained from environmental sample
  misc_feature (1)..(504): n is a, c, g, or t
atggggatggaacaggccggagtcttatgcgtaatcaagcattttcccggtattgcgggaaacgatcctcactactgggcttccgttattaacggagacaaggctgagttggacaagctggtttttccttttaaggcgcttattgataatggctatggaagcgcgataatggtttcacataccgcagtcccggctctggacagcaaaatagcgagcctgtcgaagattgttatgggagactggttaagaggcgaacttggtttttccaagttattgatagccgatgacttcaacatggccgccgccggtgtgaaaagtcccgaagaggcggcggtcatgtccatcgccgccggagcggacatggtgcttgtctggcccaaggatttaaagcgtacgcacggcgctattatgtacgcactctatgacgggcggctttcccgcgaaagattgcgcaatattgcctataggataattattactaaaataaacatgggattaatataa

SEQ ID NO: 45822 - protein, 167 aa, Unknown
  Obtained from environmental sample
  misc_feature (1)..(167): Xaa is any amino acid
MGMEQAGVLCVIKHFPGIAGNDPHYWASVINGDKAELDKLVFPFKALIDNGYGSAIMVSHTAVPALDSKIASLSKIVMGDWLRGELGFSKLLIADDFNMAAAGVKSPEEAAVMSIAAGADMVLVWPKDLKRTHGAIMYALYDGRLSRERLRNIAYRIIITKINMGLI

SEQ ID NO: 45823 - DNA, 663 bp, Unknown
  Obtained from environmental sample
  misc_feature (1)..(663): n is a, c, g, or t
gtgaagctgtcgaaggcgccggcagcggtatggttaatctgccaaaaagagctgtcttccctgctcccctcggacacggaacttatagaagccgtccaccgtcttgacgtgccggtaacaggctgcgcgctgttcgcgcttacaaaagacgctctcgtttttttaaacgacgcctttgcgggcaaaaacgcaatggtcgtcgaaaaaatttattgggcaattgtagaaaagccttcccgtcccgtaaacgatagcgtattgtccggcgcggatcttgtccactggatagaaacaaattcgcaaaaaaacatatcgttcgcatataacgaaaacgctcccgggcgcaaaaaagcgtccttgcgcctgagaaaaacaggcgaagggaaaaactatcttttcatggaaatagaacttctttccggcagacatcatcagatacgcgcgcaattggcgaaagagggcttgcacataaaaggcgacttaaaatacggcgcgaaacgaagcgaaaaaggaggcggcatccgccttcacgcccgctctctttctttccccgacccgctaaacaaagacggaaaaatacgcgtaatagcggatcctccggaaccggataatttatggcagtctatgatgagcgtttacctattcaagcatatgcccggataa

SEQ ID NO: 45824 - protein, 220 aa, Unknown
  Obtained from environmental sample
  DOMAIN (9)...(152): RNA pseudouridylate synthase
  misc_feature (1)..(220): Xaa is any amino acid
MKLSKAPAAVWLICQKELSSLLPSDTELIEAVHRLDVPVTGCALFALTKDALVFLNDAFAGKNAMVVEKIYWAIVEKPSRPVNDSVLSGADLVHWIETNSQKNISFAYNENAPGRKKASLRLRKTGEGKNYLFMEIELLSGRHHQIRAQLAKEGLHIKGDLKYGAKRSEKGGGIRLHARSLSFPDPLNKDGKIRVIADPPEPDNLWQSMMSVYLFKHMPG

SEQ ID NO: 45825 - DNA, 864 bp, Unknown
  Obtained from environmental sample
  misc_feature (1)..(864): n is a, c, g, or t
atggcatacatacgttacatcaagaaaagcaatgggcaggaatacgcatccttggcagataccaaccgtagtggcaaacaggtcaagcaggaatacctcgggaacttaggacttgtagttgacaaggaagcaggcgtttttcagagcagagagcgcgggacgttccgctatacgttggaggaaggcttctgcgatttgtcggatgcctattctaatgggcttgggtcggcaaagtcggaaagactgatactcgacttcggggacagtttctttctgtcgcagtatttcgaaagacaggtattcagggatgcgtttcaccaagttcttcctgagcagacagacaccctgctctcgctaatgttttacaggatactcactgacaagaaggccaactgctatgctgatatgtggtggcaaggcaactatgcttccatactattcccgggggcgaagcttgccagccagagagtcagcgaatttctagtggatatcggtgacgaggaggttcagcgaagattctttcatgaatatttccgcattttatacggaagtcaaagtgccacgggaatattgattgacagttctggatgtcccaatgcgtccaagatgtccgtcacgcagatcagcaatcacaacggcgatataagtttggaggcgagactcatctatgtgatcgacagggtgacggggatgccaatatacttcaggtactgcccaggcaacattgtcgatgtcaccactttgtgtacgactttggccgagttgcggcagtacagcatagccatcgactacgcaattgtcgatgctggctactgtagcgaggataacaatgtcagcaacttaggaaccaaatatttccattag

SEQ ID NO: 45826 - protein, 287 aa, Unknown
  Obtained from environmental sample
  misc_feature (1)..(287): Xaa is any amino acid
MAYIRYIKKSNGQEYASLADTNRSGKQVKQEYLGNLGLVVDKEAGVFQSRERGTFRYTLEEGFCDLSDAYSNGLGSAKSERLILDFGDSFFLSQYFERQVFRDAFHQVLPEQTDTLLSLMFYRILTDKKANCYADMWWQGNYASILFPGAKLASQRVSEFLVDIGDEEVQRRFFHEYFRILYGSQSATGILIDSSGCPNASKMSVTQISNHNGDISLEARLIYVIDRVTGMPIYFRYCPGNIVDVTTLCTTLAELRQYSIAIDYAIVDAGYCSEDNNVSNLGTKYFH

SEQ ID NO: 45827 - DNA, 333 bp, Unknown
  Obtained from environmental sample
  misc_feature (1)..(333): n is a, c, g, or t
ttggaaaaaatggatgaacaggagattggcgaggctctttacgggatgggaaaccttatccggaatatcgcgcctgtttttcttctctgcgacccgcgcgatcttggaatcgcggagcgcgtgcgcgacacgcacttcagcgttccggctctttacatttacgacaaatatccggggggaaccggccttactgaaagcctcgctcaaagaattgatccgctgttagacgccatccgcgaagccttaagaaattgcccctgcaaaaacggctgtccttcctgcgttggcgcgggagggaataaagccgcggtaagacagctgttaagtttttaa

SEQ ID NO: 45828 - protein, 110 aa, Unknown
  Obtained from environmental sample
  misc_feature (1)..(110): Xaa is any amino acid
MEKMDEQEIGEALYGMGNLIRNIAPVFLLCDPRDLGIAERVRDTHFSVPALYIYDKYPGGTGLTESLAQRIDPLLDAIREALRNCPCKNGCPSCVGAGGNKAAVRQLLSF

SEQ ID NO: 45829 - DNA, 381 bp, Unknown
  Obtained from environmental sample
  misc_feature (1)..(381): n is a, c, g, or t
atgaaagacctgtacgaggtgtatccttgcccctctgcattgaagatgttgaaattattggaacatataaaaccggatttaatattgctggatgtaaagatgccggacatggacgggtacgaagcgataaagaaactgaaaagcgacgctaaattaaaggacgtgccggtcattttcctgtccgcaatgagcgacgaacaaaacgaaatagaaggcttaaaactaggcgccgttgattatatccataaaccttttgttacccccttattgcttcagcgtataaaagtacatctttccctgtcggatcagaaaaaaacaatattggacagaaacagggaaatcgaggattttctgaagaaaatctcaaatacccctaattaa

SEQ ID NO: 45830 - protein, 126 aa, Unknown
  Obtained from environmental sample
  DOMAIN (1)...(95): Response regulator receiver domain
  misc_feature (1)..(126): Xaa is any amino acid
MKDLYEVYPCPSALKMLKLLEHIKPDLILLDVKMPDMDGYEAIKKLKSDAKLKDVPVIFLSAMSDEQNEIEGLKLGAVDYIHKPFVTPLLLQRIKVHLSLSDQKKTILDRNREIEDFLKKISNTPN

SEQ ID NO: 45831 - DNA, 1215 bp, Unknown
  Obtained from environmental sample
  misc_feature (1)..(1215): n is a, c, g, or t
ttgatggccgagggtaaaatgatgaaacgggcaatcaatgcgcaaagcgagtacggcaagggcactgcgtttattgtgcgaataaagcaaggctttgttgataattcgattcttggccctgaagttgtcaagaaactccgcagtttcaagtatgccgaagacaagcgtattgccgctaaaaagatattacgtctcgatttaagctatgcccgcgcgcttgtagttgacgacgtgcttaccaacctggacgtaacgtcgggacttttgcgcaaatacaggatgcaggttgactgcctggacaacgggccggcggcgattgaaaggataaaggccgggacgccggtttacaatgccgtattcatggaccacatgatgcccgatatggacggcatagaaacggtggaccatatccgcgccttagactcgcaatacgcgaagaagatacccataatcgcccttaccgccaacgcgattcaaggaacggatcagctgttttttcatcacaaatttcaggcgtatttaaccaaacccattgacatggcggagctggatttgattgtaagaaaatgggtgcgcgacgaaacccgcgacgaagtgccggttcttaacgcgccggtttacagtgaaatttcacaacatatagattttgacataccgggcgtggatacgaaaaaagggcttgccctgtactccggcgacacgagcgtatatctggcgcttctgcgttcctttgccgccaatactcccggactcctggaaaaattaaagatcgtctcggaaagcacccttcctaaatataatatctttgtacacggcttaaaaggctcctgcgccaacataggcgcggaaacaatacgtgaatcggcttttgaacttgaaaaaatatccagggaaggcaacttgcagggcgtttgggcgcttaacggcaaactcattgccgatacgaagatcattatcgcaaatataaaagagtggctggacatatatgacgccacaagggagaaaaaacccgtccataaagccccggataagggacttcttaaccgcctgcggcaaagttgtgaaaaatacgacataaaaagcgccgataaaactttgacaattcttgaaagcgccaattacgaaaatgacaatgatctgataaaatggttaagggataaaattgaaaactcggacttttccgaggcggcagaaaagcttaaagaatatgaataa

SEQ ID NO: 45832 - protein, 404 aa, Unknown
  Obtained from environmental sample
  DOMAIN (239)...(325): Hpt domain
  misc_feature (1)..(404): Xaa is any amino acid
MMAEGKMMKRAINAQSEYGKGTAFIVRIKQGFVDNSILGPEVVKKLRSFKYAEDKRIAAKKILRLDLSYARALVVDDVLTNLDVTSGLLRKYRMQVDCLDNGPAAIERIKAGTPVYNAVFMDHMMPDMDGIETVDHIRALDSQYAKKIPIIALTANAIQGTDQLFFHHKFQAYLTKPIDMAELDLIVRKWVRDETRDEVPVLNAPVYSEISQHIDFDIPGVDTKKGLALYSGDTSVYLALLRSFAANTPGLLEKLKIVSESTLPKYNIFVHGLKGSCANIGAETIRESAFELEKISREGNLQGVWALNGKLIADTKIIIANIKEWLDIYDATREKKPVHKAPDKGLLNRLRQSCEKYDIKSADKTLTILESANYENDNDLIKWLRDKIENSDFSEAAEKLKEYE

SEQ ID NO: 45833 - DNA, 981 bp, Unknown
  Obtained from environmental sample
  misc_feature (1)..(981): n is a, c, g, or t
atggatttgcaaagagcttaccgccgttgtgccgacccgtcagaatatgaaacggtatttttcggcggttccggcactgccgccgatgaagtaatgatttcttcatgtgttacagaagccggacatattcttattgtcgataacggctcttacggagaacggcttgcaaaaattgcgtctgtttataaaattaaccacactgtttttaaaagttcaacttacgaaaaaatagatatatccgctcttgaaaacgaatttaaaacaggcaaatatacccatcttggcattgtttaccatgaaaccacaacaggattgctcaatccgcttgatattatctgcccgcttgccaaaaaatacaacatagttactatagttgacgccgtaagcatttacgccggaatgccgatggagttatcaaaactcggcattgattttatggcttctacttctaacaaaaatattcagggaatggcgggcgttggttttgttatctgcaaaaaaagcgagcttgaaaaaacaaaaactattcccatgcggaattattatcttaacctgtatgatcaatacgcgcactttaccaaaacaggacaaacccgttttactccgcctgttcaaactctttacgcgctcagacaagcgattcttgaaacaaaacaagaaacagttgaaaaacgctgggagcgttacacagaatgttggcgtattcttgttgacgcggttaagaaatttaatcttaaaatgctggtaaaagaagaagatcagtctcatttaattaccgccatttttgatcctgatacgccgaaatacagttttgaagatttacatgatcttgcccgtaaacatgaatttaccatttaccctggaaaactcggcaatataaatacattcagaatcgctaatataggcgatattaaaccgcacgaaatgaaaagatttaccgaagttcttaaaaattatcttgattctatcggatggaaataa

SEQ ID NO: 45834 - protein, 326 aa, Unknown
  Obtained from environmental sample
  DOMAIN (1)...(298): Aminotransferase class-V
  misc_feature (1)..(326): Xaa is any amino acid
MDLQRAYRRCADPSEYETVFFGGSGTAADEVMISSCVTEAGHILIVDNGSYGERLAKIASVYKINHTVFKSSTYEKIDISALENEFKTGKYTHLGIVYHETTTGLLNPLDIICPLAKKYNIVTIVDAVSIYAGMPMELSKLGIDFMASTSNKNIQGMAGVGFVICKKSELEKTKTIPMRNYYLNLYDQYAHFTKTGQTRFTPPVQTLYALRQAILETKQETVEKRWERYTECWRILVDAVKKFNLKMLVKEEDQSHLITAIFDPDTPKYSFEDLHDLARKHEFTIYPGKLGNINTFRIANIGDIKPHEMKRFTEVLKNYLDSIGWK

SEQ ID NO: 45835 - DNA, 825 bp, Unknown
  Obtained from environmental sample
  misc_feature (1)..(825): n is a, c, g, or t
gtggctatggattattcagaacgtataaaagtcttaaaatcaaaactttccatgaaacagtctgaatttgctacatatttgggagtatcaagaaccgctttatctgagtttgaaacgggggcaagggaaccatcaaaagactttattttagcccttggaaaaaagggtataagcactgactggtttctatcaggagaaggcgagccctttagggtaacaaattatcctcttaataatcaaaaagataataagttatcccattccccgcaaaggctaacaagtcagcctactatacatgaggaagcaaacaagattgctaattcccccttgcccgatacccccgccgatagtacgatagaaacatcccggcaaaagccgcccggcattcctctggtttacgagggggacggcgggcttgaggacggaatagtaatcccgttgctggaaaacgcggtgtccgccgggtatggcgcggaactggacggcgaggacgtgccggcgcggtatgtccaggttccccggtttctggcgaaataccctcacttggcgagtctgccggtgaaaggcgacagcatggaaccgaccctgcatgacggggatttggtggtctgcgacggcgggggctgggacggcgacgggctgtatgttttgaaatcgccggagatgtcctatgtcaagcgcttgctgtttacgccgcagggttatcaggttatcagcgacaacaaaatgtaccccggctacaccgggcgtgcggaggatctgtcaatagtggggaaagtgcgggcgatactggttgtcacgccggggaggagagggggagtgtag

SEQ ID NO: 45836 - protein, 274 aa, Unknown
  Obtained from environmental sample
  DOMAIN (9)...(62): Helix-turn-helix
  misc_feature (1)..(274): Xaa is any amino acid
MAMDYSERIKVLKSKLSMKQSEFATYLGVSRTALSEFETGAREPSKDFILALGKKGISTDWFLSGEGEPFRVTNYPLNNQKDNKLSHSPQRLTSQPTIHEEANKIANSPLPDTPADSTIETSRQKPPGIPLVYEGDGGLEDGIVIPLLENAVSAGYGAELDGEDVPARYVQVPRFLAKYPHLASLPVKGDSMEPTLHDGDLVVCDGGGWDGDGLYVLKSPEMSYVKRLLFTPQGYQVISDNKMYPGYTGRAEDLSIVGKVRAILVVTPGRRGGV

SEQ ID NO: 45837 - DNA, 1449 bp, Unknown
  Obtained from environmental sample
  misc_feature (1)..(1449): n is a, c, g, or t
ttgaagacgtggaagtcggtaactactatgattacagctaacggttacggcctgcccgatccgcaagagcttgaacgctgggccttgtcttattttcccgaatttcaggaaaaaaagcccggtacagattttgacgcccaaaccgcctattctccggttgtcgagccgtataaaaacgcggccgcgggcggatcttccgaaggagcgctttataaagactctcctttgggcgcaggcgtttttgacgtaaaccgtattcgccgcgattttcccatactgaacgaaaaggtctcgggcggcaaaccgcttatctggcttgacaacggcgcgaccacgcaaaaaccacggcaggttatagaccgtatttcgcatttctacgaacacgaaaattcaaacgtccatagaggggcgcatgaattggcggctcgttcaactgatgcttatgaggcagctagagaaactgttgcaaaatttttaggagcgccgtcaaaggataatatcgtctttgttcgcggaacaacggaaggcataaatcttgtggcaaacagttttgtaaagcccctgctcagtcccggagatgaaattctattgaccatcttggagcatcacgccaatattgtgccgtggcaactcattgcacaagaaacaggtgcggttatcaaagttgcgccagttgatgctacagggcagattattttatccgaatacgcacgtctgttcagcccgtgtacaaagtttacatcggtcacgcatgtttccaatgctttgggaacaattactcctattcacgagatggtgcaaattgcgcacggtcacggggttaggattttggtggatggagcgcagtccgttgcgcatactccactgaacgtgagcgcgttggatgcggatttctttgtcttttctgggcacaagatatttgctccgactggtataggtgctgtatatggcaaatcggatgttttggaagaggcaaaaccctaccaaggcggcggcaatatgattagagatgtgacgtttgagcgcacaatttataatcctgcgccgagcaagttcgaagccggaactggaaatattgccgatgcaataggtttgggcgcggcactggattatgtttcaggtgtgggactgacgaacatcagcacctatgaacatgaactgcttgattacgcaacccgcgaactaaagcgtataaacggattgcaccttatcggcactgcggctaaaaaggcgagcgttttgtcttttgtgcttgacggcgcaagcgcggagcaggtcggcaaacatctttccgatcatggaattgccgtgcgtgccggacaccattgcgctcagccgattttgcgccgctttgggcttgaagcaacggtgagagcgaccatcgcattttataacacagcggaagaaattgacaaactggtgagcgcgatcaaagaacttgcgttgtaa

SEQ ID NO: 45838 - protein, 482 aa, Unknown
  Obtained from environmental sample
  DOMAIN (139)...(423): Beta-eliminating lyase
  misc_feature (1)..(482): Xaa is any amino acid
MKTWKSVTTMITANGYGLPDPQELERWALSYFPEFQEKKPGTDFDAQTAYSPVVEPYKNAAAGGSSEGALYKDSPLGAGVFDVNRIRRDFPILNEKVSGGKPLIWLDNGATTQKPRQVIDRISHFYEHENSNVHRGAHELAARSTDAYEAARETVAKFLGAPSKDNIVFVRGTTEGINLVANSFVKPLLSPGDEILLTILEHHANIVPWQLIAQETGAVIKVAPVDATGQIILSEYARLFSPCTKFTSVTHVSNALGTITPIHEMVQIAHGHGVRILVDGAQSVAHTPLNVSALDADFFVFSGHKIFAPTGIGAVYGKSDVLEEAKPYQGGGNMIRDVTFERTIYNPAPSKFEAGTGNIADAIGLGAALDYVSGVGLTNISTYEHELLDYATRELKRINGLHLIGTAAKKASVLSFVLDGASAEQVGKHLSDHGIAVRAGHHCAQPILRRFGLEATVRATIAFYNTAEEIDKLVSAIKELAL

SEQ ID NO: 45839 - DNA, 924 bp, Unknown
  Obtained from environmental sample
  misc_feature (1)..(924): n is a, c, g, or t
gtgcattgccataatgatctggggctggctgtggcaaacagcatcgccgccatcgctaatggcgcggatcaggttgaatgtacgattaacggaatcggcgagcgggcaggaaacgcgtctttggaagaagtggtcatgggtctgcgcgttcgcgccgactttttttccgcagacacaaaaattgacagtacgcagatatacgcggcaagccgtcttgtgtcccaggtgacgggggtgaaggttcagccgaataaagccatcgtaggcgacaacgcttttgcgcatgaagctggaatccaccagcacggcgtattggcgaaaagggaaacctacgagatcatgactccgcagtcgatcggcattccgcaaaaccgcatggttctgggaaaacattcaggccgccacgcttttgaggagcgtctgaaagatctgggcttgtccgttgatacaaacgcgttggaaaaaatcttctcggacttcaaagaccttgccgacaaaaagaaagtggtaagcgaccgcgacattgaagctcttgtaatggacagagcggtctcggttcccgaaacatggaagcttgatcattgggcggtgaacacaggttccgctttgggcgcggcgggcgttatccgcttacagcacaaagacggtgaatataaaaaactggtctgcatgggcgacggccccatcgattcaatcttcaaagcgatcaatcaaattgtaggcaaagagccggaactggaactttatgaaatcggcgcagttaccggcggttcttcttcgcagggcgaggcaatggtaaaaatcgcgatggacggccggcgctggaacggccgcggcgtctccacagacgtaatcgagtcgtcgataatggcatacctctccgcgattaacgcaatggaatgggacttgtcgcagagggattaa

SEQ ID NO: 45840 - protein, 307 aa, Unknown
  Obtained from environmental sample
  SIGNAL (1)...(21)
  DOMAIN (169)...(300): LeuA allosteric (dimerisation) domain
  misc_feature (1)..(307): Xaa is any amino acid
MHCHNDLGLAVANSIAAIANGADQVECTINGIGERAGNASLEEVVMGLRVRADFFSADTKIDSTQIYAASRLVSQVTGVKVQPNKAIVGDNAFAHEAGIHQHGVLAKRETYEIMTPQSIGIPQNRMVLGKHSGRHAFEERLKDLGLSVDTNALEKIFSDFKDLADKKKVVSDRDIEALVMDRAVSVPETWKLDHWAVNTGSALGAAGVIRLQHKDGEYKKLVCMGDGPIDSIFKAINQIVGKEPELELYEIGAVTGGSSSQGEAMVKIAMDGRRWNGRGVSTDVIESSIMAYLSAINAMEWDLSQRD

SEQ ID NO: 45841 - DNA, 576 bp, Unknown
  Obtained from environmental sample
  misc_feature (1)..(576): n is a, c, g, or t
gtggacgatgtgccaccaaatccggccacgcgatgggcgcgagggacgcgggccgcaggccggggcggcacagtggagatggacgagaccttcttcggggcgcccgaggaggggggcaagcgcgggcgcggcgcggagaagacgccggtgctggtctcggtgtcgcccacgggcgggggcaagccaaaggccgcgaggatgaaggtggtgagggccgtgggccgcggggaggtgaaagagttcgccgaggccgcggccagcgggggcagcgaggtgcgcacggacgggctgcacgtgtacaggcagctggcggggctcggcttcacgcacgtccggaaggggcacggcccgaagaaggagccggcgcacctccgctgggcgcacgtcataatctcgaacgcgaaggcgatggtgggcgggacgttccacgggcttgacgcgaggcacctccagcggtacctggacgagttctgctaccgcttcaacgggcggctgtcaccggacggcatcttcggcaggctgctggacgcctgcctctgtgccggcagggtcaacgcgcatgagctaattggatag

SEQ ID NO: 45842 - protein, 191 aa, Unknown
  Obtained from environmental sample
  misc_feature (1)..(191): Xaa is any amino acid
MDDVPPNPATRWARGTRAAGRGGTVEMDETFFGAPEEGGKRGRGAEKTPVLVSVSPTGGGKPKAARMKVVRAVGRGEVKEFAEAAASGGSEVRTDGLHVYRQLAGLGFTHVRKGHGPKKEPAHLRWAHVIISNAKAMVGGTFHGLDARHLQRYLDEFCYRFNGRLSPDGIFGRLLDACLCAGRVNAHELIG

SEQ ID NO: 45843 - DNA, 405 bp, Unknown
  Obtained from environmental sample
  misc_feature (1)..(405): n is a, c, g, or t
atgggcgcgagggacgcgggccgcaggccggggcggcacagtggagatggacgagaccttcttcggggcgcccgaggaggggggcaagcgcgggcgcggcgcggagaagacgccggtgctggtctcggtgtcgcccacgggcgggggcaagccaaaggccgcgaggatgaaggtggtgagggccgtgggccgcggggaggtgaaagagttcgccgaggccgcggccagcgggggcagcgaggtgcgcacggacgggctgcacgtgtacaggcagctggcggggctcggcttcacgcacgtccggaaggggcacggcccgaagaaggagccggcgcacctccgctgggcgcacgtcataatctcgaacgcgaaggcgatggtgggcgggacgttccacgggcttga

SEQ ID NO: 45844 - protein, 134 aa, Unknown
  Obtained from environmental sample
  misc_feature (1)..(134): Xaa is any amino acid
MGARDAGRRPGRHSGDGRDLLRGARGGGQARARRGEDAGAGLGVAHGRGQAKGREDEGGEGRGPRGGERVRRGRGQRGQRGAHGRAARVQAAGGARLHARPEGARPEEGAGAPPLGARHNLEREGDGGRDVPRA

SEQ ID NO: 45845 - DNA, 894 bp, Unknown
  Obtained from environmental sample
  misc_feature (1)..(894): n is a, c, g, or t
gtgtttaaactggcaaaatacctaaaaccatttattcctctcatatttcttgcaattggggttctttttttacaagccttttgcgatctcagcctgcccaacctcatgtcccggcttgtgaacatggttattggccaaaacaactctggaaatcagggccttcccgacagaaatattttctctctgggtctccaaatgcttgccatagccctaaccggaggcgctgcggcggtaggtgtaagttttctttcaacaagaattgccgcaggcattgccagggatctacggtttgaggttttcaggaaagtcgaaagtttttcaaccgccgaattcgataaattttctacagcgtctctcataacacgctgtacaaatgatataacccagatacaacaactctttgtaatgggaatccgcatgacctgctatgctccaattatggggataggcggaataataatggcgataaacaaggcccccagcatgagctggattattgttctggcagtgttcatcctaatctgccttataactatgcttatttccattgtcatgcccaaatttaaaattattcagaatttgattgatcgtcttaacagaatagccagggaaaccttaaacggccttatggtaatacgggcttttagcgcccaggaacacgaaaagaaaaggtttgacagcgtaaacaaagatcttgcagacaccacactctttgtaaatcgggtcatgatcctccaaatgcccggaatgcagtttattatgaataccgcgatactcctgataatctggacaggaactcatagaatagcggcatcccttatgggtgttggggacatgatggcctttatccagtacaccatgcagattattttttccttccttttcttttcatga

SEQ ID NO: 45846 - protein, 297 aa, Unknown
  Obtained from environmental sample
  DOMAIN (15)...(293): ABC transporter transmembrane region
  misc_feature (1)..(297): Xaa is any amino acid
MFKLAKYLKPFIPLIFLAIGVLFLQAFCDLSLPNLMSRLVNMVIGQNNSGNQGLPDRNIFSLGLQMLAIALTGGAAAVGVSFLSTRIAAGIARDLRFEVFRKVESFSTAEFDKFSTASLITRCTNDITQIQQLFVMGIRMTCYAPIMGIGGIIMAINKAPSMSWIIVLAVFILICLITMLISIVMPKFKIIQNLIDRLNRIARETLNGLMVIRAFSAQEHEKKRFDSVNKDLADTTLFVNRVMILQMPGMQFIMNTAILLIIWTGTHRIAASLMGVGDMMAFIQYTMQIIFSFLFFS

SEQ ID NO: 45847 - DNA, 834 bp, Unknown
  Obtained from environmental sample
  misc_feature (1)..(834): n is a, c, g, or t
atgatgttcgtgataattcccagaactgcggtttcagcggacagaatcgtccaggtgcttgaaacagaaatttccgttatggattcggcacagcctctggctatcgttgaaaacggaaaaaataaaaaaaacgaaacggcttccggtacagaccgtggctacagtgttaagtttaaagatgtgtttttccgctatacgaacacggcggaatatgccctggaacacattagctttaccgccgataaaggaaaaactaccgcaataatcggcccgacaggatcgggaaaatccacaatagcaaatctcatcttgagattttacgatgtaaccggcggcagcatagcagttaatggggtagatataagagaactgtcgcaaaaagatctccggtcattgatagggtatgtgcctcaaaaaagcatgcttctttccgggcctgtttcctttaacctgcgttacggaaaaaaagacgcttctgacgccgagattcgcgaaggggcggaaattgcccaggcgttggactttatcgaagaaaggcccggcggctttgaatcaaatttggcgcagggagccgccaatgtttccggcggccagaaacagcggctttccattgcgcgagcgctggtacgtgatcctgagatacttattttcgacgacagcttttccgccctggactttgccaccgatgcaaggctaaggcaggccctggaagaaaaaagaaaaaacgtaacaaagatagtcattgcccagcgggtaggaaccattagccaggcggataaaatcattgtccttgaaaacggccaaatcgtcggaagggaacccatgcggaactga

SEQ ID NO: 45848 - protein, 277 aa, Unknown
  Obtained from environmental sample
  DOMAIN (83)...(267): ABC transporter
  misc_feature (1)..(277): Xaa is any amino acid
MMFVIIPRTAVSADRIVQVLETEISVMDSAQPLAIVENGKNKKNETASGTDRGYSVKFKDVFFRYTNTAEYALEHISFTADKGKTTAIIGPTGSGKSTIANLILRFYDVTGGSIAVNGVDIRELSQKDLRSLIGYVPQKSMLLSGPVSFNLRYGKKDASDAEIREGAEIAQALDFIEERPGGFESNLAQGAANVSGGQKQRLSIARALVRDPEILIFDDSFSALDFATDARLRQALEEKRKNVTKIVIAQRVGTISQADKIIVLENGQIVGREPMRN

SEQ ID NO: 45849 - DNA, 558 bp, Unknown
  Obtained from environmental sample
  misc_feature (1)..(558): n is a, c, g, or t
gtggccgctttcgtaggttcggacaacaggaacgcgggttatgtctgcggcgttgacatggtaaaacgtttccccaatggcggcgccatcgccgtctttgatttcccggctagtctctcgatccgtgaccgcatcgacggcttcaatgaagcaactgtgggaaggggttttaccgtggtgttcctgagggagatgggagatccttccacagtgcggcgccacaccgaagagatgctcaagtctaatcctgaagtaatcgccatcatgggcggcaatgacccgacggcgctctactcttttgcggcctgcaaggccatgggccgtactgacatcctcatatatggtgtagacggctccccggaggccaaagccgcaatcgcgcaaggcggacagtttgtcggcacgggcgcgcaaagccctatcgccattgcgaaggaatcagtcgtactcgcgtataagattctgaacaaggagccttacgaaaagcgggttccggttaagaccttcatgatcaatcaggaaaacattaaccggtacgacatcgaaagctggcagtaa

SEQ ID NO: 45850 - protein, 185 aa, Unknown
  Obtained from environmental sample
  misc_feature (1)..(185): Xaa is any amino acid
MAAFVGSDNRNAGYVCGVDMVKRFPNGGAIAVFDFPASLSIRDRIDGFNEATVGRGFTVVFLREMGDPSTVRRHTEEMLKSNPEVIAIMGGNDPTALYSFAACKAMGRTDILIYGVDGSPEAKAAIAQGGQFVGTGAQSPIAIAKESVVLAYKILNKEPYEKRVPVKTFMINQENINRYDIESWQ

SEQ ID NO: 45851 - DNA, 336 bp, Unknown
  Obtained from environmental sample
  misc_feature (1)..(336): n is a, c, g, or t
atgaaaaaatttttaacaatttgtttattggcgtttctcgcggcgggtatgctgtttgtcggctgcaaaagggaaaaaaaagcaaggacattcggttatacctgtatgcgtctcagtaatccgttctttgctattctggaggaaacaatccgcgaacaggtggagaaaaacggcgacaggctgattacggttgatcctgacatggatcccataaagcagatcagtcagatcgaggaactgatcactcagaaaattgacgctatttttattaatccggttgactgggaagcgatcaagcccgcgctggtttcccttaacgggtccatatccccgtaa

SEQ ID NO: 45852 - protein, 111 aa, Unknown
  Obtained from environmental sample
  SIGNAL (1)...(20)
  misc_feature (1)..(111): Xaa is any amino acid
MKKFLTICLLAFLAAGMLFVGCKREKKARTFGYTCMRLSNPFFAILEETIREQVEKNGDRLITVDPDMDPIKQISQIEELITQKIDAIFINPVDWEAIKPALVSLNGSISP

SEQ ID NO: 45853 - DNA, 549 bp, Unknown
  Obtained from environmental sample
  misc_feature (1)..(549): n is a, c, g, or t
gtgggttctgacaacaggaacgcgggttatatctgcggcgttgacatggtaagacgtttcccccacggcggccccatcgccgtccttgattcaccggcgaggatctcgactcgtaaccgtatcggcggtttcaacgacgctatcgcgggaaaggggtttaccatagtgttcctgagggatgcgcagggcaatatttccctggcgcggcaatatacggaagagatgctcaagtccaatcccgaagtaatcgcccttatgggcagcaatgatcttatagcgctcgccgcttatgccgtctgccagtccgcgggccgcactgacatcctcatatacggcgttgacggatcacccgcggccaaagccgaaatcgccaagcgaggacagttcgccggctcgggcgcgcaaagcccaatttccatcgcaaaggaatcagctgcagtcgcctataagattctaaacaaccaggcttacgaaaaacggatcccgatcaggaccttcatgatcaaccaggataacattgacgagtacgacattgacggatggcagtag

SEQ ID NO: 45854 - protein, 182 aa, Unknown
  Obtained from environmental sample
  misc_feature (1)..(182): Xaa is any amino acid
MGSDNRNAGYICGVDMVRRFPHGGPIAVLDSPARISTRNRIGGFNDAIAGKGFTIVFLRDAQGNISLARQYTEEMLKSNPEVIALMGSNDLIALAAYAVCQSAGRTDILIYGVDGSPAAKAEIAKRGQFAGSGAQSPISIAKESAAVAYKILNNQAYEKRIPIRTFMINQDNIDEYDIDGWQ

SEQ ID NO: 45855 - DNA, 678 bp, Unknown
  Obtained from environmental sample
  misc_feature (1)..(678): n is a, c, g, or t
atgttagccgcaaccggccaggactctttccacaaggacttcggccccttcacggaaggctttacctatattcccggcaacgacgttgaggcgctggaaaaagcccttgacgcgaaaaccgtcgcgggactgcttatcgaggcggtgcagggcgaaggcggcgtcaggccccagtcccgggaatttattgaaacagcggcccggctctgcgccgagcgggacatactcctcatgtttgacgaaatccagtgcggcattggccggacaggaactttcctgggctttgaacattacagctatggcggcaaacccgttaaagccgacattgtaacgcttgccaaaagtctggcgggcggcatccccgccggcgcggtgctcgccggggaaaaagccgccggggttttcgaagtaggcgatcacaacagcacctttggcggcaaccccatcgccgccgcagccggactcgttgtcctggaaacggtcaacaggcccgaatttctcgcggaagtttcccgcaagggcgaaaagatcatgaccgcgatcaggggctggaatcatccgctgataaaggaagtcaggggccgcggcctgttgatcggcatcgatattgacaaggacgcctggcctttcctggaaaaagccatcgcccgcgccgacggaaaaaccacggcctgttga

SEQ ID NO: 45856 - protein, 225 aa, Unknown
  Obtained from environmental sample
  DOMAIN (1)...(205): Aminotransferase class-III
  misc_feature (1)..(225): Xaa is any amino acid
MLAATGQDSFHKDFGPFTEGFTYIPGNDVEALEKALDAKTVAGLLIEAVQGEGGVRPQSREFIETAARLCAERDILLMFDEIQCGIGRTGTFLGFEHYSYGGKPVKADIVTLAKSLAGGIPAGAVLAGEKAAGVFEVGDHNSTFGGNPIAAAAGLVVLETVNRPEFLAEVSRKGEKIMTAIRGWNHPLIKEVRGRGLLIGIDIDKDAWPFLEKAIARADGKTTAC

SEQ ID NO: 45857 - DNA, 738 bp, Unknown
  Obtained from environmental sample
  misc_feature (1)..(738): n is a, c, g, or t
atggaatgtaaatatgatagagaaatgccttcaggtcttaatggtccaagacctcaaaaagcaggtaaaatctttaatgatttttttcgacttgcatcatttacgaatgacgcaaatgtaataaaatggttaatttatttgaccgatgcagaaatggtaaattattttaataatgtaaataataaattaaacgatttttttaatcttgctacaggctcaacattaataataaatgagcagtatcttaaaaataaatcaacaacatttaatggtgaaatagatactaatggtatttctaaaataaatataaaaagcatttttcaaaacgatttgccaaataatcataagataaaaatatatgaagtagaaataccaaatgacgttgtattacctaattacgaagttgatagtaatcagagtaatataaatattaaacacaaagagaaaaatagcatagaaaaatttgatacgataaaaaaatcaaacattttgctttcgcaagatgagacaataataagagacaaagaatttacttatgaaaataaaaagtatattgctcgtgcgtataaacttggaaataataaccatgtttattataaaattttattaaaaggtgaagaaaatcaaaatattaatagtatagatattgctagaaaatatctactttcctttggtatatcaacagctcccgatatgaatactcataggactgtaaaaaaaataatggatatggagtaa

SEQ ID NO: 45858 - protein, 245 aa, Unknown
  Obtained from environmental sample
  misc_feature (1)..(245): Xaa is any amino acid
MECKYDREMPSGLNGPRPQKAGKIFNDFFRLASFTNDANVIKWLIYLTDAEMVNYFNNVNNKLNDFFNLATGSTLIINEQYLKNKSTTFNGEIDTNGISKINIKSIFQNDLPNNHKIKIYEVEIPNDVVLPNYEVDSNQSNINIKHKEKNSIEKFDTIKKSNILLSQDETIIRDKEFTYENKKYIARAYKLGNNNHVYYKILLKGEENQNINSIDIARKYLLSFGISTAPDMNTHRTVKKIMDME

SEQ ID NO: 45859 - DNA, 543 bp, Unknown
  Obtained from environmental sample
  misc_feature (1)..(543): n is a, c, g, or t
gtggcgacacataagcgatgtgatgaccgagggcgcgtggtcgttcgaactaaagtggcggcccatttccacgcctgcccgcacggcgtggccattccgcttgctgctgtccgcgctcgtcattcttcttggtttgctcgctctgtcggcggacaaaaagagggcaggttgaccgcgccaccgctgatactggcctcagaaagcccccggcggaggtcctggctggaggcagtacgcatcccctttgaggtaattgcgccacagatagacgaaaccccgctgaccggcgaagaccccaaagagatggtcgccaggctttcaaggggaaaggcgctctccgtagccgccaagcaccccagccgctgggtgctggcggcggacactaccgtggtggtggacgaccgcatcctcggcaagccaagcgatgaagacgaagccattgccatgctacagctcattcaggggcgccagcacttaatccataccggcgtgtgtttggctagggacggtgatgtccaccattcacggacacgggcgaagtga

SEQ ID NO: 45860 - protein, 180 aa, Unknown
  Obtained from environmental sample
  DOMAIN (60)...(178): Maf-like protein
  misc_feature (1)..(180): Xaa is any amino acid
MATHKRCDDRGRVVVRTKVAAHFHACPHGVAIPLAAVRARHSSWFARSVGGQKEGRLTAPPLILASESPRRRSWLEAVRIPFEVIAPQIDETPLTGEDPKEMVARLSRGKALSVAAKHPSRWVLAADTTVVVDDRILGKPSDEDEAIAMLQLIQGRQHLIHTGVCLARDGDVHHSRTRAK

SEQ ID NO: 45861 - DNA, 615 bp, Unknown
  Obtained from environmental sample
  misc_feature (1)..(615): n is a, c, g, or t
atgaacggtcaggtcaatacgggcatttataaggtgctgaaaaaagcggccattttctcgaacctgagcggattggagcttgacgcggttgtttcttttcttgagcctcgaagcatgaagaaaggggaggttgtctttaacgagggaaccataggggaagaaatgtttgtcattgtttccggccgtatagaagcatgggtagcccaggccgacggtacccagcgatggagttttgaattaaaaaccggggatttttttggggaaatgtcgattattgcgaacgaaacaagatccgctactatagtaacaaaggaagacacggagctactcacccttcacggagttgatttttaccacatagtttttgagtatcccatgataggagcaaaaatactcaattctatacgaatagttcaaaatacatggtttgaacagatctcgaaacaccttggcgatattatgcgctggggcgagactgcacgccgccgggctcttatcgatgagcttacgggtttatataaccgccgctttcttgaagaatcccgcagggaatcgctttttacagggcactcttgggctccgcaacgtttcacttatgatgatggatctggataa

SEQ ID NO: 45862 - protein, 204 aa, Unknown
  Obtained from environmental sample
  DOMAIN (36)...(126): Cyclic nucleotide-binding domain
  misc_feature (1)..(204): Xaa is any amino acid
MNGQVNTGIYKVLKKAAIFSNLSGLELDAVVSFLEPRSMKKGEVVFNEGTIGEEMFVIVSGRIEAWVAQADGTQRWSFELKTGDFFGEMSIIANETRSATIVTKEDTELLTLHGVDFYHIVFEYPMIGAKILNSIRIVQNTWFEQISKHLGDIMRWGETARRRALIDELTGLYNRRFLEESRRESLFTGHSWAPQRFTYDDGSG

SEQ ID NO: 45863 - DNA, 558 bp, Unknown
  Obtained from environmental sample
  misc_feature (1)..(558): n is a, c, g, or t
ttgggggctactttccgaaacaagtggttgtatatgcaattgagaggaacatattcgccaagcaacaccaattattcaacaggtagagaaggcgtgctgacgcataacttcggcggtatgtttaatgcgcagttgacgttgcccaaagcgtggtctatcgggtcggatatgcggtatgagggaatgtcgggatacagtaatgggtacaatcgaaaccaaacaatctggaatgccgaaataagcaagcggtttcttaaaagcaaggctgcaacacttcgtctgcgcgtaacagatattcttcaacaacggaaaaatattgtgcgcaatacgtcgagcgattactttgaagatgtgaaatataacacattaggcagttactttatgctaacatttgcgtacaggttcaactcaatgggcaataggggcggcggttcaagaagcggcggcggcgacggctttggcggtggtgagcgcggcggttttggcggcggcgaacaacgaggcggctttggcggcggagagcgcggtggtatgcgtatgatggaaggtggtttctaa

SEQ ID NO: 45864 - protein, 185 aa, Unknown
  Obtained from environmental sample
  misc_feature (1)..(185): Xaa is any amino acid
MGATFRNKWLYMQLRGTYSPSNTNYSTGREGVLTHNFGGMFNAQLTLPKAWSIGSDMRYEGMSGYSNGYNRNQTIWNAEISKRFLKSKAATLRLRVTDILQQRKNIVRNTSSDYFEDVKYNTLGSYFMLTFAYRFNSMGNRGGGSRSGGGDGFGGGERGGFGGGEQRGGFGGGERGGMRMMEGGF

SEQ ID NO: 45865 - DNA, 876 bp, Unknown
  Obtained from environmental sample
  misc_feature (1)..(876): n is a, c, g, or t
ttgggtcaagggcttgtgggttccataaaaagcatggcagagcgttttaaatatggcggcagccccggcaaagaccagcgcgtatattattttaacacaaaggaaatacttgggaataaatacggcacaccaaatcccattccctatctcatagttgaccctaatatcaatttgcgtcttacaataagtttaagggcaaatggcgaatattcttaccgcatggttaatcctgcgttgttctatgccaatgtgtgcggcaatgtggatgagcaatataccagagataaaatagatagccagctcaaatccgaaataatcactgttttaggaccatcgcttggaaagctcggcacgggtttggaatatcacgaaatttccttccacaccgataaactcgcagatattctcaacgaggctcttagcgcaaagtggagagaaggcagagggctagagatagtaaactttggaattacttgcacagcctcgccagaagacgataatcgaataaagcaattgcaaactgccgccgtgatgcgagacccaactatggcggcggcttctttggtgggtgctcaaagcgatgctatgcgcgctgcggcagagaataaggctggagctatgacaggcttcctcggcatgggaatggcggctcaagcgggcggaatgaatccgcaggctctctttcaaatggggcagcaacaaccagctcccgcaagcggtgctgctacctgggtttgctcctgcggtgcccagaacacgggcaagttctgcgctgaatgcggaaagccttcccctaattcaccttggacttgttcttgcggcaatgcagggaatactggcaaattttgcgccgagtgcggcaaaccgagaccttaa

SEQ ID NO: 45866 - protein, 291 aa, Unknown
  Obtained from environmental sample
  misc_feature (1)..(291): Xaa is any amino acid
MGQGLVGSIKSMAERFKYGGSPGKDQRVYYFNTKEILGNKYGTPNPIPYLIVDPNINLRLTISLRANGEYSYRMVNPALFYANVCGNVDEQYTRDKIDSQLKSEIITVLGPSLGKLGTGLEYHEISFHTDKLADILNEALSAKWREGRGLEIVNFGITCTASPEDDNRIKQLQTAAVMRDPTMAAASLVGAQSDAMRAAAENKAGAMTGFLGMGMAAQAGGMNPQALFQMGQQQPAPASGAATWVCSCGAQNTGKFCAECGKPSPNSPWTCSCGNAGNTGKFCAECGKPRP

SEQ ID NO: 45867 - DNA, 603 bp, Unknown
  Obtained from environmental sample
  misc_feature (1)..(603): n is a, c, g, or t
atgctgaatgaaaaacgcatacggctgttaatattttttatagtcgcggtaatacacattgtcctcattttctttctgtcgttcagcctgaacgtggattcccaaaccgcgcccgagagcgcccgcatgatgaaactgaccgatctttccgaaatagaacccgagcctccccctccggaggaagtcgtgacgcccatggtcgaatccatcgccgaaaccatgattgaaacagaagtagtgccggagcagatcgttgtcgcgcccggcaccattatcaccaccgccccttcctgggacgactaccttcccatacataaggtttcggatccgccgaggttcaatgaaagggacatatacgccgaccttgtttaccctcccatagccctgcgttccggcatcgcgggcagggtgattctcgaactcttcattgaccgcaacgggcatgtccagcagatactgattttgcaggaagaacccaaggacaggggctttggcgaggccgccgtgaaagcctttaccggcaagcgcgggacccccgcctacgccaacggcgagcccgtctccgcccgctaccgctatcctgtcagctttaaaataaagtag

SEQ ID NO: 45868 - protein, 200 aa, Unknown
  Obtained from environmental sample
  DOMAIN (121)...(155): Gram-negative bacterial tonB protein
  misc_feature (1)..(200): Xaa is any amino acid
MLNEKRIRLLIFFIVAVIHIVLIFFLSFSLNVDSQTAPESARMMKLTDLSEIEPEPPPPEEVVTPMVESIAETMIETEVVPEQIVVAPGTIITTAPSWDDYLPIHKVSDPPRFNERDIYADLVYPPIALRSGIAGRVILELFIDRNGHVQQILILQEEPKDRGFGEAAVKAFTGKRGTPAYANGEPVSARYRYPVSFKIK

SEQ ID NO: 45869 - DNA, 489 bp, Unknown
  Obtained from environmental sample
  misc_feature (1)..(489): n is a, c, g, or t
atggcaaagggtggtatcgtttgtggaactcgcccagaagcacagaatcgaggcgttctctttcaccatgaagaaggacgaataatgaagctgaaacgggccaaagaaaaaaattttaccatacccctcaactccatgtccgacgtcgcttttctgctgttgatcttcataatggtaatagctctgataaatttccgcaaggaaatccatattgagtacgccacggcggaaacggtattgaacaccggggcggaacaaaatcttgaggtatgggttaaccaggaaggcaatatattcatctcgggcgatcctgcggacattccaatgctggagcaggttgtcgccgatctgtatacgggcgcgcctgacacccgcatacatattttggccgacaagaatactccctatgaaaaaataaacgccgtgctggaggtgctgcagatactccagtaccgcacggtaagttttgtggtgaaaaatgctgaatga

SEQ ID NO: 45870 - protein, 162 aa, Unknown
  Obtained from environmental sample
  DOMAIN (34)...(161): Biopolymer transport protein ExbD/TolR
  misc_feature (1)..(162): Xaa is any amino acid
MAKGGIVCGTRPEAQNRGVLFHHEEGRIMKLKRAKEKNFTIPLNSMSDVAFLLLIFIMVIALINFRKEIHIEYATAETVLNTGAEQNLEVWVNQEGNIFISGDPADIPMLEQVVADLYTGAPDTRIHILADKNTPYEKINAVLEVLQILQYRTVSFVVKNAE

SEQ ID NO: 45871 - DNA, 645 bp, Unknown
  Obtained from environmental sample
  misc_feature (1)..(645): n is a, c, g, or t
atggaaaattcaacattttcgatgctggagctttttaagcttggcggtcctattatgtggccgctgcttttattctctatagcggttatagctatatcaatagaacgagttgtttatattttttataatgacttaaaagttgatgatttattcgaaaaagtttccgagtatgtgaaatcaaacgattattcaagcgcccgtgagtatcttacaggtttaaccgagaaacgaatgggagcgcgtattcttttaacccttttagaacaggcaaacccgggacagccgtttatagtacaccgcgtagaacgcgccgtggaaacagaagcgaaaaactgcctaaactcgctggagaacggctttaactttcttacagcgttaggctctctttcgccgttaacaggcttccttggaacagtatcgggaatgatcggcgcttttaagtcaatagccgaagcgacagaggtaaacgcgcagatagtcgcaaacggtatttacgaagcgcttatcaccacggtattcggtcttataatcgccatcatcgcaatggtcgcgcattcaattttaagccatatcgttgataaatttgccgcaagagttgaaaaaagctgctccgatctgattgcggaaatagccggtcaacaataa

SEQ ID NO: 45872 - protein, 214 aa, Unknown
  Obtained from environmental sample
  DOMAIN (61)...(204): MotA/TolQ/ExbB proton channel family
  misc_feature (1)..(214): Xaa is any amino acid
MENSTFSMLELFKLGGPIMWPLLLFSIAVIAISIERVVYIFYNDLKVDDLFEKVSEYVKSNDYSSAREYLTGLTEKRMGARILLTLLEQANPGQPFIVHRVERAVETEAKNCLNSLENGFNFLTALGSLSPLTGFLGTVSGMIGAFKSIAEATEVNAQIVANGIYEALITTVFGLIIAIIAMVAHSILSHIVDKFAARVEKSCSDLIAEIAGQQ

SEQ ID NO: 45873 - DNA, 402 bp, Unknown
  Obtained from environmental sample
  misc_feature (1)..(402): n is a, c, g, or t
atgcacgttcctgatccggctgccctggagttgttccgtctcagcctccatgagcttgatgcgctggcggaacttgaaaagcggtgcttcaccctgccgtggcgcaaagagcaactcgccggacacctcggcttgccgaacttcgccgccttcggcctgcgcacgccgccggggcaagactccggggcggaaggcgaagcaagtctggcagcttacatatccttctatcacggcccggatgaactggaaatactcaatctggccgttgcgccggagtggcgccgctgcggctgcggcgcccgtctcctgcgctttgtgctgtatatggccgcgcgcaggggcatagtgcgggccgtgcttgaggtgcgatcggggcaacgctccggcgcttgccctctataa

SEQ ID NO: 45874 - protein, 133 aa, Unknown
  Obtained from environmental sample
  DOMAIN (61)...(131): Acetyltransferase (GNAT) family
  misc_feature (1)..(133): Xaa is any amino acid
MHVPDPAALELFRLSLHELDALAELEKRCFTLPWRKEQLAGHLGLPNFAAFGLRTPPGQDSGAEGEASLAAYISFYHGPDELEILNLAVAPEWRRCGCGARLLRFVLYMAARRGIVRAVLEVRSGQRSGACPL

SEQ ID NO: 45875 - DNA, 465 bp, Unknown
  Obtained from environmental sample
  misc_feature (1)..(465): n is a, c, g, or t
atgtcccttccagcgatcaacttccggcgtgtcgtagcggcggcccatcaggcgcttgacggcaaaaatcgtgcgttcgggattggttacggcctgacgcttggcgatttcaccgaccagacgctccttgtcggtaaacgcgatgaccgagggcgtggtgcgtccgccttccgggttggtgatgcacttgggttccttgccttccatgacgaatacgcaggagttggtggttccccagtcatgccgataattttgcccataacttcctccttggggagaagaccggtcggcctctcaatccgactggaggagagagtaaggctctttgcgccggcgtccagaggcggaggcaaattttttttcaggaaaccgggaacggcaagggtttttgcaggacacgctccagtatcaacgcatcttcgccgctgtcgtgataatacgcgcgcctgcatcccacttgagtga

SEQ ID NO: 45876 - protein, 154 aa, Unknown
  Obtained from environmental sample
  misc_feature (1)..(154): Xaa is any amino acid
MSLPAINFRRVVAAAHQALDGKNRAFGIGYGLTLGDFTDQTLLVGKRDDRGRGASAFRVGDALGFLAFHDEYAGVGGSPVMPIILPITSSLGRRPVGLSIRLEERVRLFAPASRGGGKFFFRKPGTARVFAGHAPVSTHLRRCRDNTRACIPLE

SEQ ID NO: 45877 - DNA, 771 bp, Unknown
  Obtained from environmental sample
  misc_feature (1)..(771): n is a, c, g, or t
atggaaggcaaggaacccaagtgcatcaccaacccggaaggcggacgcaccacgccctcggtcatcgcgtttaccgacaaggagcgtctggtcggtgaaatcgccaagcgtcaggccgtaaccaatcccgaacgcacgatttttgccgtcaagcgcctgatgggccgccgctacgacacgccggaagttgatcgctggaagggacattcaccctaccgcatcgttgccgccggcaacggcgacacctccgtggaggtggacaaccgccagtacagcccgcctgaaatttccgccatgctgcttgccaagctgaaggccgacgcggaagcgtatctcggcgaaagcgtcggcgaggccgtgattaccgtgccggcgtatttcaacgatgcccagcgccaggccaccaaggacgccggacgcatcgcgggactggaagtcaaacggatcattaacgaacccaccgcggcctccctggcctacggctttgaccgcaagagcaacgaaaaaatcgcggtcttcgacctcggcggcggcacctttgacatttccatcctggaagtgggcgacaacgttgtcgaggttcgtgccaccaacggcgataccttcttgggcggcgaagacttcgatcaacgcatcatcaacttcctggtggaagaattcaaaaaggaaaacggcatcgatctcgccaaggatcgcatggccttgcagcgcttgaaggagtccgccgaaaaggccaaaaaggattgtccacggcgatggaatccgaggtaa

SEQ ID NO: 45878 - protein, 256 aa, Unknown
  Obtained from environmental sample
  DOMAIN (1)...(254): Hsp70 protein
  misc_feature (1)..(256): Xaa is any amino acid
MEGKEPKCITNPEGGRTTPSVIAFTDKERLVGEIAKRQAVTNPERTIFAVKRLMGRRYDTPEVDRWKGHSPYRIVAAGNGDTSVEVDNRQYSPPEISAMLLAKLKADAEAYLGESVGEAVITVPAYFNDAQRQATKDAGRIAGLEVKRIINEPTAASLAYGFDRKSNEKIAVFDLGGGTFDISILEVGDNVVEVRATNGDTFLGGEDFDQRIINFLVEEFKKENGIDLAKDRMALQRLKESAEKAKKDCPRRWNPR

SEQ ID NO: 45879 - DNA, 438 bp, Unknown
  Obtained from environmental sample
  misc_feature (1)..(438): n is a, c, g, or t
atggtcagattggccgagcagcacaattacggaacccttatcttcagcgaagacgggcgtttttcctggagcggcaattatcttttggtgcctcaggtaatttccgcgtcggcccttggaagcggcgttctggatatgcggctccacgtgtccgatgttttgagcagccgttatgacggagcgtttaccatgcgttttgacggaatcggcggcatcgggacaacaacggatttcatttacgccatagatcctcagggtcttagaatggaatatgtgccggagacaagcctggacggagttaccgttgtaaggcgggcttcttctcctgtggtggtttacttctttaaaaacgatattcaggacgacagcgcttcccttttcccagactttgaggtggaggacgacgattcagaatacaattttgagttattgaactga

SEQ ID NO: 45880 - protein, 145 aa, Unknown
  Obtained from environmental sample
  misc_feature (1)..(145): Xaa is any amino acid
MVRLAEQHNYGTLIFSEDGRFSWSGNYLLVPQVISASALGSGVLDMRLHVSDVLSSRYDGAFTMRFDGIGGIGTTTDFIYAIDPQGLRMEYVPETSLDGVTVVRRASSPVVVYFFKNDIQDDSASLFPDFEVEDDDSEYNFELLN

SEQ ID NO: 45881 - DNA, 1218 bp, Unknown
  Obtained from environmental sample
  misc_feature (1)..(1218): n is a, c, g, or t
atggcctttgtccagttttccagagtctgccttgcttttggcgacagggacatacttaaagacgtaagcctcaatcttgcttccggctcgcgtgcagctctggcgggggctaacggggcgggcaaatccactttaatgaaggtcatagccggaaagcttccggccgattcaggcgagcgttccgtgcagaaaggctgccgcgtctcttacctgccgcagtcgggcattgtgcatcagggcaaaaccctcagggaagaagctgaaaccgcttacgaaagcatcttgcttcttattgcgcgtgtggaagaattgggcagggagcttgaaaaaaccacaggggactcaggccgcacccgtacgcttttggaagagcatcaccgtttattgaacgaagttgaaaattcaggctattaccgccgggatgcagttatctcccaggttctttcggggctgggattctccgaaaacgatgcggagagggacacaggcgagttttctggcggctggcagatgcggatcgccctcgcgaaagcgctgcttgaacagcctgacattctgcttcttgacgaaccgaccaactatctggacatagaagcccgcgcctggcttgaaaactggctggctaaatttccgggcggctgcctgctggtttcccatgaccgctacttccttgatgttaccgtcaacgaggtatacgaaatttttcagggtaatcttaaacgctacgcgggcaactacagcgcctacgaaaaaacacggcagatggaactttccgctgttatgaaacgctatacggaacaacaggaagaaatcgccaaaaccgaggcgctgatccgccgcttccgttacaaggcaaccaaggcggccttcgcgcaggagcttatcaaacggctggaaaagatggagcgtatagaaatccccgaaaacctgaaaaagataaacataacttttccgccgccaccccattcgccgcgggtggcgctgaccatcgagggccttggcaagagctacggcgcaaagagggttcttggcgggctggatctgaccattgattccggcgagcggctggtggttgccgggcctaacggtgccggtaaaacgaccctgctgcggatactttccggtaatgacattgattttgaaggctctgtaaaattcggctcgggtataagctccggctattttcgcaggacgcggccgaggcgtgaatcgggataa

SEQ ID NO: 45882 - protein, 405 aa, Unknown
  Obtained from environmental sample
  DOMAIN (29)...(237): ABC transporter
  misc_feature (1)..(405): Xaa is any amino acid
MAFVQFSRVCLAFGDRDILKDVSLNLASGSRAALAGANGAGKSTLMKVIAGKLPADSGERSVQKGCRVSYLPQSGIVHQGKTLREEAETAYESILLLIARVEELGRELEKTTGDSGRTRTLLEEHHRLLNEVENSGYYRRDAVISQVLSGLGFSENDAERDTGEFSGGWQMRIALAKALLEQPDILLLDEPTNYLDIEARAWLENWLAKFPGGCLLVSHDRYFLDVTVNEVYEIFQGNLKRYAGNYSAYEKTRQMELSAVMKRYTEQQEEIAKTEALIRRFRYKATKAAFAQELIKRLEKMERIEIPENLKKINITFPPPPHSPRVALTIEGLGKSYGAKRVLGGLDLTIDSGERLVVAGPNGAGKTTLLRILSGNDIDFEGSVKFGSGISSGYFRRTRPRRESG

SEQ ID NO: 45883 - DNA, 564 bp, Unknown
  Obtained from environmental sample
  misc_feature (1)..(564): n is a, c, g, or t
atggggtggcggcggaaaagttatgtttatctttttcaggttttcggggatttctatacgctccatcttttccagccgtttgataagctcctgcgcgaaggccgccttggttgccttgtaacggaagcggcggatcagcgcctcggttttggcgatttcttcctgttgttccgtatagcgtttcataacagcggaaagttccatctgccgtgttttttcgtaggcgctgtagttgcccgcgtagcgtttaagattaccctgaaaaatttcgtatacctcgttgacggtaacatcaaggaagtagcggtcatgggaaaccagcaggcagccgcccggaaatttagccagccagttttcaagccaggcgcgggcttctatgtccagatagttggtcggttcgtcaagaagcagaatgtcaggctgttcaagcagcgctttcgcgagggcgatccgcatctgccagccgccagaaaactcgcctgtgtccctctccgcatcgttttcggagaatcccagccccgaaagaacctgggagataactgcatcccggcggtaatagcctga

SEQ ID NO: 45884 - protein, 187 aa, Unknown
  Obtained from environmental sample
  misc_feature (1)..(187): Xaa is any amino acid
MGWRRKSYVYLFQVFGDFYTLHLFQPFDKLLREGRLGCLVTEAADQRLGFGDFFLLFRIAFHNSGKFHLPCFFVGAVVARVAFKITLKNFVYLVDGNIKEVAVMGNQQAAARKFSQPVFKPGAGFYVQIVGRFVKKQNVRLFKQRFREGDPHLPAARKLACVPLRIVFGESQPRKNLGDNCIPAVIA

SEQ ID NO: 45885 - DNA, 789 bp, Unknown
  Obtained from environmental sample
  misc_feature (1)..(789): n is a, c, g, or t
gtgagcgtgccgggctacgaaagcaaaaccgtgacggttaccgtagttcagttatatacaatccagatcgaaaaaaccggtaatgtaaacggcgatacagtaacagcatcccccaataaaggagtcgcgggcgatacgattacgctttcatacacggttgcgaatacggcgcctagcaatcaactggacttcggcggcgttaacgacagtatcgcttccgtagaaagcgcgagcatggggagcagaacttacaccataaacgccgctgactcttcaaacggggttatcaccattaccgcaatctttacccataccgatctggaaattgatcacatcgtgttcaacgaacataacgaagggcatataaccaagacttatggcgacccggcgtttaccaacgctattactgaaggcttatataaaggaagcggagcgataacttatcacagcagtaatacaaatgtcgccacggtgaacagttcaacaggacaggtaacaattctgaaagccggttctgccgttatttccgccgaaaaagcggctgatggaatatacgcccacgcccaaacaacctacacgctaactgttaaccccaagccggttaccataacaggcttgtccgtaagtaacagaccttacgacggtacgagaacggcaactgttaccggaaccgcgacaatcagcggcaaggtggccagtgatacggtaaacgtcactgcgggatcagctttgtttgtggacaaaaatgtaggtaccggcaagtctgtacattcagcggatatttgctga

SEQ ID NO: 45886 - protein, 262 aa, Unknown
  Obtained from environmental sample
  misc_feature (1)..(262): Xaa is any amino acid
MSVPGYESKTVTVTVVQLYTIQIEKTGNVNGDTVTASPNKGVAGDTITLSYTVANTAPSNQLDFGGVNDSIASVESASMGSRTYTINAADSSNGVITITAIFTHTDLEIDHIVFNEHNEGHITKTYGDPAFTNAITEGLYKGSGAITYHSSNTNVATVNSSTGQVTILKAGSAVISAEKAADGIYAHAQTTYTLTVNPKPVTITGLSVSNRPYDGTRTATVTGTATISGKVASDTVNVTAGSALFVDKNVGTGKSVHSADIC

SEQ ID NO: 45887 - DNA, 1200 bp, Unknown
  Obtained from environmental sample
  misc_feature (1)..(1200): n is a, c, g, or t
atggttctaaccgagccggacgcgggaagcgatcttcagtcggtgaatctgaaggccatacttggcagtgacggccaatggcggctaaacggggtcaagcgcttcatcaccaacggttgcggaacaataggcctggtacttgcccgaagcgaggaaaagggcaagggcgcgcgcgggctttcgtttttcatttacaagcgcgacgataagatgaccgtcaggcggcttgaacacaagctcggcatccacggttccccgacctgcgaactgcaattcaacaacgcgcctgctgaacttttgggcgagcgtcagcgtggcctcaccaagtacactctgtggctcatgaacaacgcccgtctcggcgtggccgcccaggcagtgggcattgcggaagcggcctaccgcgaagctgacctttacgccgcaaagcgcatccagttcggcgcgcctgtgcgcgatcttccagcagtttttgaaatgctcacggagatgaagatcgccgtcgaagcgggccgcagtctcctctacgaaaccgcccgtttcgttgacttaaaggaagcgctggaggattattccgaaaagcacccggaagacaaaggcgagatagtggacgataaaaagaaatacgcgaaatatgccgggttcttcaccccgctggtcaaaggttacgccactgaaatggcaaacaaggttgccaatgacgcgattcaaatccacggcggcaccggctacatgagggagttcaacgccgaacgccactacagggacgcgaggatcaccaacatttacgagggaaccacccagcttcaggtagtggccgccatcgggcctgtaacttcaggtatagcccaggccgttctggacgaatatgataaggcaaactacaaccacagccccgctttgctggagaaagtccgcgatgcccgcaagttttttgaggaagctctggagtacgcgaaggcctacaaaggcaatgagcagttcctgacctaccattcccgccgcctcgtggaaatggcaaccgatctcgtcatcagttaccttctgctccgcgaaggcaaccacagcgagcgcaaacaaaagacggcggcggtcttcattgccaagatgccctcgcgcctcaaagcgaaccgtgatttcatcatgagcgaagacgggactttgctgaagaattacgaagcagtgattgggaagacttga

SEQ ID NO: 45888 - protein, 399 aa, Unknown
  Obtained from environmental sample
  DOMAIN (1)...(51): Acyl-CoA dehydrogenase, middle domain
  misc_feature (1)..(399): Xaa is any amino acid
MVLTEPDAGSDLQSVNLKAILGSDGQWRLNGVKRFITNGCGTIGLVLARSEEKGKGARGLSFFIYKRDDKMTVRRLEHKLGIHGSPTCELQFNNAPAELLGERQRGLTKYTLWLMNNARLGVAAQAVGIAEAAYREADLYAAKRIQFGAPVRDLPAVFEMLTEMKIAVEAGRSLLYETARFVDLKEALEDYSEKHPEDKGEIVDDKKKYAKYAGFFTPLVKGYATEMANKVANDAIQIHGGTGYMREFNAERHYRDARITNIYEGTTQLQVVAAIGPVTSGIAQAVLDEYDKANYNHSPALLEKVRDARKFFEEALEYAKAYKGNEQFLTYHSRRLVEMATDLVISYLLLREGNHSERKQKTAAVFIAKMPSRLKANRDFIMSEDGTLLKNYEAVIGKT

SEQ ID NO: 45889 - DNA, 717 bp, Unknown
  Obtained from environmental sample
  misc_feature (1)..(717): n is a, c, g, or t
atgccttgcttatctggccgattatcattattatatagttatacctattcacggaggccagaagtgcgatttttgggaaaagatatggaaaaaagggcgataattagccaggttttactgtcagacgacgatgaagacgatgatgatattgatgatgaaaagccggaaaactggcaggagcttttggccgggaagatgctcaaaaccagaactatactgctttccggcgagattcgcaaaggacttgcggaaaagaccatacgccagcttcttttaatggaagctatgggcaatgatcccgtgcgtatttttatcgactcacccggcggagacgccgacgcgggttacgccatttttgacatgatccggtttataaaacccccggtgtggactataggtatggggcttgtggcgagcgccgcggctattatccagcttgccgcgccgaaagaacggcggctggggctgcccaacagccattaccttatacatcagcccctttccggcatacgcggtgtcgccaccgacatcgaaatccacgccagagaactggaaaaactgcgggcgaagataaacagcctcatagcggaagaaacgggcaaccctttcgagcaggttgaaaaagatactgaccgcgactactggatgagcgcacaggaagctgtcaagtacggcttgatcagcaaggtgataacaaacagagacgaaatacaatga

SEQ ID NO: 45890 - protein, 238 aa, Unknown
  Obtained from environmental sample
  DOMAIN (53)...(234): Clp protease
  misc_feature (1)..(238): Xaa is any amino acid
MPCLSGRLSLLYSYTYSRRPEVRFLGKDMEKRAIISQVLLSDDDEDDDDIDDEKPENWQELLAGKMLKTRTILLSGEIRKGLAEKTIRQLLLMEAMGNDPVRIFIDSPGGDADAGYAIFDMIRFIKPPVWTIGMGLVASAAAIIQLAAPKERRLGLPNSHYLIHQPLSGIRGVATDIEIHARELEKLRAKINSLIAEETGNPFEQVEKDTDRDYWMSAQEAVKYGLISKVITNRDEIQ

SEQ ID NO: 45891 - DNA, 1185 bp, Unknown
  Obtained from environmental sample
  misc_feature (1)..(1185): n is a, c, g, or t
atgaaagcaaaaaattgcgtttcacagttgatgttggaacggtacaacttgggcaaagtttcttccggcgaacgaaaatttatagaaaccgcgcttgaatcggatacggaattgcgcctgctttatgaagagattaaaaaatctgacgaggaaatcaggcttctttaccctttggaaaatctgcctcaattggccgccataaaggataccgtcgtgccaattcctgtagatgaatcctcttcgcgcgctcgttttcggctggtatggtatcgcgcgaaaaaggttaaatggggattagccgccgccgccctcatctgcgtggttttttccgttatttattttttgagatggcgtagtaacaatagcgcggaacgacctcttgctgcggcatcgcctcaagcccccgaacttcttttctatgatctaaactccggagttgctaatgaaaaaattggctccctaagcataaaaccccgaacccccggacttgcttatgatgattcaacgattacaggctctattacccgttcaaaatctgcttcgactactaactggcatggaacaggatttaacccgcaaggaccggcaggtctggaaggacaagtaccgcctgcgtttaaggatatgtcaaacttgtatggaagaatgacacaagaagaattcaataccagtgaatttgatcatattattgacaatcctttcatgcgtgtaattgacaacccgctttccaccttttcggtagatgtagacacagcggggtattcaataacccgctactttttaatgaacgaacggaagccccctaaatcggctgtcaggatagaagagctgataaattattttgactatgactatccccctcctatggatggaaaaccgtttgcggttcatgttgaaaccagcgccgctccctggaataccgatcatcttctggcccgaatagctttaaagggtaaagaattcccggtcaatgaaaggccaaaggtcaatttggtgtttttgctggatgtttccggttctatggatgagccgaacagattgcctctggtaatatcttccatgaaaatgctttgtcacgaactgaaggggactgataaaatcgcgatttgcgtgtatgccggggcagcgggaactgtgctgctgccgacagcggcgacagtaaaaacaaaatcctgcggcggctga

SEQ ID NO: 45892 - protein, 394 aa, Unknown
  Obtained from environmental sample
  misc_feature (1)..(394): Xaa is any amino acid
MKAKNCVSQLMLERYNLGKVSSGERKFIETALESDTELRLLYEEIKKSDEEIRLLYPLENLPQLAAIKDTVVPIPVDESSSRARFRLVWYRAKKVKWGLAAAALICVVFSVIYFLRWRSNNSAERPLAAASPQAPELLFYDLNSGVANEKIGSLSIKPRTPGLAYDDSTITGSITRSKSASTTNWHGTGFNPQGPAGLEGQVPPAFKDMSNLYGRMTQEEFNTSEFDHIIDNPFMRVIDNPLSTFSVDVDTAGYSITRYFLMNERKPPKSAVRIEELINYFDYDYPPPMDGKPFAVHVETSAAPWNTDHLLARIALKGKEFPVNERPKVNLVFLLDVSGSMDEPNRLPLVISSMKMLCHELKGTDKIAICVYAGAAGTVLLPTAATVKTKSCGG

SEQ ID NO: 45893 - DNA, 807 bp, Unknown
  Obtained from environmental sample
  misc_feature (1)..(807): n is a, c, g, or t
atgaatatgattttaattgcgataatttccgtaaccgctataggcggaatctgcggcattattctctcagtggcgtcaaaactaatgtatgtaaaaattgacgagcgcgtcatccagcttcaggaaattctaccggccgcaaattgcggcgcatgcggttatgcgggctgttgcggttacgcgcaggctcttgcgggcggaaaagtagccatcaatctttgcactcccggcggaacaggagttctgtcaaaaataagcgctattcttggagttgatgccggcagtatagaaaaaaagagcgcctttattcattgtataggcgcggagcaatttcgaattttaaagatggaatataaaggggtacaatcctgcaccgccgcaaaacagttttttggcggacataccgcatgcacattcggatgtcttggttttggcgactgtaaatccggatgtcccagtaacgcgatttgcatagataacgggcttgcccgcgttattacagaactttgcacaggctgcggtctttgcgttaaaacttgtcctaataagttaatatggatagagaactcaaatatacccgtaattcttgcgtgcaataacattgaaaaaggcgtcgtagccagaaaaaaatgtaaatcaggctgtatcgcctgcggtaaatgcgtaagggaatgtaaggataacgccctggttatcatagataatcacgcgaagattgattattcaaaatgcacgggatgcggccattgcgcggaagtttgcgtttcaaaaaatatagtaaaaaatcacttgccggccgtttcgtaa

SEQ ID NO: 45894 - protein, 268 aa, Unknown
  Obtained from environmental sample
  SIGNAL (1)...(23)
  DOMAIN (43)...(77): Putative Fe-S cluster
  misc_feature (1)..(268): Xaa is any amino acid
MNMILIAIISVTAIGGICGIILSVASKLMYVKIDERVIQLQEILPAANCGACGYAGCCGYAQALAGGKVAINLCTPGGTGVLSKISAILGVDAGSIEKKSAFIHCIGAEQFRILKMEYKGVQSCTAAKQFFGGHTACTFGCLGFGDCKSGCPSNAICIDNGLARVITELCTGCGLCVKTCPNKLIWIENSNIPVILACNNIEKGVVARKKCKSGCIACGKCVRECKDNALVIIDNHAKIDYSKCTGCGHCAEVCVSKNIVKNHLPAVS

SEQ ID NO: 45895 - DNA, 300 bp, Unknown
  Obtained from environmental sample
  misc_feature (1)..(300): n is a, c, g, or t
ttggggggggggaaaaaaatttcccccccaaaaaaaaaaaaaaaagggttttttttttcctcccccccccaacaaaaaaaaaaaaaggggggggggggtttttactttttttttttttctccccacaaccnntttttgggggggggggggggaggaaaaaaaaaaaaaaaaaaaaaaaaccccccccccccnccnnnnccccccccctctttttttttttttgtggggggggnngaaannnaaaaaaaaaaaaaaaaacccccccccccccttctcttttttttttttttttttatataa

SEQ ID NO: 45896 - protein, 99 aa, Unknown
  Obtained from environmental sample
  misc_feature (1)..(99): Xaa is any amino acid
MGGGKKISPPKKKKKGFFFSSPPQQKKKKGGGGFYFFFFSPHNXFLGGGGGGKKKKKKKNPPPPPXPPPSFFFFVGGXEXXKKKKKPPPPLLFFFFFFI

SEQ ID NO: 45897 - DNA, 786 bp, Unknown
  Obtained from environmental sample
  misc_feature (1)..(786): n is a, c, g, or t
atgagcgcagtgcgtctcttggcacttgatttggatgatacccttctcaggtcggatttaaccatctcctatcagaccagaaatgccatcaaaaaggcggaagcggcaggcgtgatcgtggttttggcttcgggaaggataccggcggcaatgaatcaattttcctcgcttttggggatgcataaaagagccggttaccttatatgcaataacggcaccttaatacaggaaagccataccgggaaaatcgtttacgagattagaatggacgtaaaaaccgcgcttaccgcctttgatttagccgatgccgaaggatttcccgtacagatctatgaagacgatataatgtatgtttcgcgccataatgaatataccggctatgatcagaagcttaccggccttcggcaagtagtagtggagaatttccgggccatggtgggcggaggctgccataaactgcttatcccaggggatccaaagctcctcccgccgctggaaagtattttacgtacctatcttggagacagcatcacgatttttaccagcaaaccgtattttctggaaatactgcccgccaataccaataaagggacagccctggaaaaggttgcgaatttgctggaaattagccagaaagatgtgatggccattggggattcgatgaacgatgaagccatgctccgctgggccggcatgggcatcgcaatggcgaacagcgatgagaggataaaaaatatcgcggctctggtgacatcaagggacaatgatgatactctgccgatctga

SEQ ID NO: 45898 - protein, 261 aa, Unknown
  Obtained from environmental sample
  DOMAIN (4)...(240): haloacid dehalogenase-like hydrolase
  misc_feature (1)..(261): Xaa is any amino acid
MSAVRLLALDLDDTLLRSDLTISYQTRNAIKKAEAAGVIVVLASGRIPAAMNQFSSLLGMHKRAGYLICNNGTLIQESHTGKIVYEIRMDVKTALTAFDLADAEGFPVQIYEDDIMYVSRHNEYTGYDQKLTGLRQVVVENFRAMVGGGCHKLLIPGDPKLLPPLESILRTYLGDSITIFTSKPYFLEILPANTNKGTALEKVANLLEISQKDVMAIGDSMNDEAMLRWAGMGIAMANSDERIKNIAALVTSRDNDDTLPI

SEQ ID NO: 45899 - DNA, 666 bp, Unknown
  Obtained from environmental sample
  misc_feature (1)..(666): n is a, c, g, or t
gtgatattttttgacgcgcattttggacagaatgtaaacatggttatccggcattatgcccataaacaatgcatttctgctataataaaacaaatgaaaatgtgctgtactgataccgccggactgcccgccgaatggatggccggggccgccgcccacgcggttgattttttttcttttttttccgcagacgacatacgttgggttgaacgttctgaagcagaatcaaataacgcgtacaaacagataattccgtatattgtggtgcggcaaagcaacggacatatcctgtgttaccctcggcatggcgcggaaagccgtctgcacggtttttattcctgcggcataggcgggcatatcgacatcgaagacgcgcgggatacttttaaagaaaccgttactaccggcatgacgcgcgaattaaaagaggagcttgccggttttcgggaagacagggtcgagcttgtttacaggggcattatcaacgaaacggaaagtcccgtagggcgggttcatctggggctggtatacacctgtctgtgcctgggcgattacgcgccgcagccttcggaagaaacaaccggcatggaatggaaaaccccggaagaactgaagctggtcaaaaaagaactgtgctccgatttggcgctggagttatcttgctaa

SEQ ID NO: 45900 - protein, 221 aa, Unknown
  Obtained from environmental sample
  misc_feature (1)..(221): Xaa is any amino acid
MIFFDAHFGQNVNMVIRHYAHKQCISAIIKQMKMCCTDTAGLPAEWMAGAAAHAVDFFSFFSADDIRWVERSEAESNNAYKQIIPYIVVRQSNGHILCYPRHGAESRLHGFYSCGIGGHIDIEDARDTFKETVTTGMTRELKEELAGFREDRVELVYRGIINETESPVGRVHLGLVYTCLCLGDYAPQPSEETTGMEWKTPEELKLVKKELCSDLALELSC

SEQ ID NO: 45901 - DNA, 576 bp, Unknown
  Obtained from environmental sample
  misc_feature (1)..(576): n is a, c, g, or t
atgtttacattctgtccaaaatgcgcgtcaaaaaatatcacttttaagaacgggaattctttccattgccctgattgcggctttgtatactatcacaacactgccgccgctacaggctgcattatcaatgcggacgggcgcctgttgtttctggtgcgaggcaaggagccgtcaattggcaagctggatctgtgcggcggctttgtcgatccgggcgaaggcgcgcttgagggcctgttaagggaactccgggaagaactcggctggtcgccgcccgttccgcaaggcacgcctcttagcgaagtatttaccttctttgcctcgttttccaatcgctatccttataaaaacattatttacaatacctgcgatatgtatttttacctttccgcgccgggcctgtgcgagcgcgatcttgttctcgaaaaggcggagatagaggcagtccgtttcctgaagcccgaagaaattgacatgggggaaatcgcttttgattcaaccaggcgggcagtgcaggcgtatttagaaagaaaattcaatagcggttttattgctggtaatgccggctctcgctaa

SEQ ID NO: 45902 - protein, 191 aa, Unknown
  Obtained from environmental sample
  DOMAIN (33)...(173): NUDIX domain
  misc_feature (1)..(191): Xaa is any amino acid
MFTFCPKCASKNITFKNGNSFHCPDCGFVYYHNTAAATGCIINADGRLLFLVRGKEPSIGKLDLCGGFVDPGEGALEGLLRELREELGWSPPVPQGTPLSEVFTFFASFSNRYPYKNIIYNTCDMYFYLSAPGLCERDLVLEKAEIEAVRFLKPEEIDMGEIAFDSTRRAVQAYLERKFNSGFIAGNAGSR

SEQ ID NO: 45903 - DNA, 387 bp, Unknown
  Obtained from environmental sample
  misc_feature (1)..(387): n is a, c, g, or t
atggacatcatagacaaaatcgaagcgggcttggtgaggaaagaccttcccaggatcacgcctggcgacagggtgaaggtccacgtcaaagtgaaggaaggcgaaaaggagcgcatacaggtgttccagggtgacatcatcgccatccgcggtggcggcatgagggcctctttcactgtgcggaagatcagctcgggcattggcgtggagcgcgtgttcccgctcaacagccccaccatcgcaaagctggagataatgcgccaccaaaaggtgcgccgcgccaagctttactatctgcgcgacaagatcggcaaggccggccggcttagggagctcagaaaagacgcaaaggctgcaaaagaagcccccgagacagcgggcgagtaa

SEQ ID NO: 45904 - protein, 128 aa, Unknown
  Obtained from environmental sample
  DOMAIN (1)...(113): Ribosomal protein L19
  misc_feature (1)..(128): Xaa is any amino acid
MDIIDKIEAGLVRKDLPRITPGDRVKVHVKVKEGEKERIQVFQGDIIAIRGGGMRASFTVRKISSGIGVERVFPLNSPTIAKLEIMRHQKVRRAKLYYLRDKIGKAGRLRELRKDAKAAKEAPETAGE

SEQ ID NO: 45905 - DNA, 1092 bp, Unknown
  Obtained from environmental sample
  misc_feature (1)..(1092): n is a, c, g, or t
atggaaacagcccgttttttttccacccttgataatggcagtatcaggtgcgggctttgttgccatagatgcgccatacccagcggcggatccggggtttgcggcgttaggggcaataagggcggcaaaggcttgattcctttttacggttatgtcaccgcccttgccgtagatccgattgagaaaaaacctttataccatttccgacccggttcaaaaatactttcagccggtttcgcgggctgcaacctcaaatgccccttttgccaaaactggcatatttcacaatgcgctaaaggggtctcagcaggcggcgtcttcggaggggaccttgcccccggaagaaaaatgtctccgggggatttggtttcagcggctctgcatgaagacagtatgtcaatcgcctacacgtattccgagcctttggttcacattgagtttcttctggactgcatggctctggcgcgtaagcacggcatagccaacgtgctggttaccaacggatgcataaacggcgaagcagcgcgggaggcgcttgcgcttaccgacgcggcaaacatagacctgaaatgtttctcggcggaaacatactcgaaggtattaggcggcgatttggattccgtgctcgcgtttataaggctcgcgcttgagaagaaagtccatgtcgagcttacgacgcttgtcgtccccggcctgaacgattcaacagaagaacttgacaagtgcgccgctttcatcgcgaatcttcgcgccgcgaattttcgcgccgcctctctttccgatccgttacgcgaaactcagactgttccctggcatttatcggcctatcacccggatttccgctggaacgcgccggcgacagacgccaaattcctgttggggataaagaaacgggtttccaatacgctcacctttgtgtacgcaggcaatatccccggcgaagaanacgccaccctatgcccccattgcgggaagcccctggtacggcgtttcggctacnaggttgaaaccggcgggcttgcaagccccgcggagggagaaaaagtatatcgctgcgcccattgcgagggcgttacggcaatcagaagttag

SEQ ID NO: 45906 - protein, 363 aa, Unknown
  Obtained from environmental sample
  DOMAIN (76)...(243): Radical SAM superfamily
  misc_feature (1)..(363): Xaa is any amino acid
METARFFSTLDNGSIRCGLCCHRCAIPSGGSGVCGVRGNKGGKGLIPFYGYVTALAVDPIEKKPLYHFRPGSKILSAGFAGCNLKCPFCQNWHISQCAKGVSAGGVFGGDLAPGRKMSPGDLVSAALHEDSMSIAYTYSEPLVHIEFLLDCMALARKHGIANVLVTNGCINGEAAREALALTDAANIDLKCFSAETYSKVLGGDLDSVLAFIRLALEKKVHVELTTLVVPGLNDSTEELDKCAAFIANLRAANFRAASLSDPLRETQTVPWHLSAYHPDFRWNAPATDAKFLLGIKKRVSNTLTFVYAGNIPGEEXATLCPHCGKPLVRRFGYXVETGGLASPAEGEKVYRCAHCEGVTAIRS

SEQ ID NO: 45907 - DNA, 1074 bp, Unknown
  Obtained from environmental sample
  misc_feature (1)..(1074): n is a, c, g, or t
atggggttatctatgcgggagaaaaaggcgcttaccggggaaataagtaaacggtatcaaagagcggagagaaaagagaagactgagattcttaacgaactggtcaaaacaaccggttacaaccgcaagtacgttttacacgttctggccaattgggggaaaaccgccgtcgtaagcatcggcggaaaaacggtcaggcttacggtatcgcccggcaagcggcggaaggggggcggcaggaagccgaaatacacgggcggttttgtaaccgccttacggaagatatggacgttcttttcgtaccggtgcgggaaaatacttgcgccgttcatgcgggagcagatgggcttcctggaaaagccgtttcacctaacggagaaggagaaggaactgctgctctcggccagcccgtccactatcgaccgcctgctgaaaacggacaaaaaaaagctcgccctcaaggggaaaagcgggacgaagccggggaagctcctgaaaaagcagatccccgtccgtacgtattacgccgacgccgacaaaaagcccggtttttttgaaattgacacggtccaccattgcgggacatcggattcgggcgaattctgcctcaccttaaccgccgccgacgtgtattccggctgggtcgaactgcgcccgacgctcaacaaagcccataaatgggtttttgaagccctgctggacatcaagtcatccctccctttcccgcttacgggcatagacagcgacaacggctcggaattcatcaattccgccctgctcaaatggtgccaggacgagcgcatccagtttacaaggtcgcgggcataccgcaaaaacgataactgctttgtcgagcagaaaaacttcacctgcgtcagaaacttcgtgggttattaccgcttttccgcagaggcggagcgcgacgccctcgccttagtctaccgctccctttgcccgctgcttaacttctttatgccaaccatcaagcttataagcaaagaaagagttggtgcaaaaataaaaaaggtgtatgataaaaaaattacgcccttaccaaaggcttatggattctga

SEQ ID NO: 45908 - protein, 357 aa, Unknown
  Obtained from environmental sample
  DOMAIN (177)...(332): Integrase core domain
  misc_feature (1)..(357): Xaa is any amino acid
MGLSMREKKALTGEISKRYQRAERKEKTEILNELVKTTGYNRKYVLHVLANWGKTAVVSIGGKTVRLTVSPGKRRKGGGRKPKYTGGFVTALRKIWTFFSYRCGKILAPFMREQMGFLEKPFHLTEKEKELLLSASPSTIDRLLKTDKKKLALKGKSGTKPGKLLKKQIPVRTYYADADKKPGFFEIDTVHHCGTSDSGEFCLTLTAADVYSGWVELRPTLNKAHKWVFEALLDIKSSLPFPLTGIDSDNGSEFINSALLKWCQDERIQFTRSRAYRKNDNCFVEQKNFTCVRNFVGYYRFSAEAERDALALVYRSLCPLLNFFMPTIKLISKERVGAKIKKVYDKKITPLPKAYGF

SEQ ID NO: 45909 - DNA, 372 bp, Unknown
  Obtained from environmental sample
  misc_feature (1)..(372): n is a, c, g, or t
atggaagaagtagttattacaggaatgggttgtgttacggatttaggcaacacacccgatgagttatggagcaacctcttagccggaaaatccggcgttgggttgattgaccgttttcacgtggaaacgtatccggttagatttgcagggcagataaagaaattcgatgcctcgccctattacagcgaaagagaccggaaacgcatttcgcgtagcatacagtatgcggttcatgctgctgaaacagctcttaaaatggctggcatagagaattcaagaacttccgtcgatgtgaaaagagcggctgttcttgtaggctctggcatgggcggcatggaaatgtttttgaaagctccgcctcggccgatctga

SEQ ID NO: 45910 - protein, 123 aa, Unknown
  Obtained from environmental sample
  misc_feature (1)..(123): Xaa is any amino acid
MEEVVITGMGCVTDLGNTPDELWSNLLAGKSGVGLIDRFHVETYPVRFAGQIKKFDASPYYSERDRKRISRSIQYAVHAAETALKMAGIENSRTSVDVKRAAVLVGSGMGGMEMFLKAPPRPI

SEQ ID NO: 45911 - DNA, 600 bp, Unknown
  Obtained from environmental sample
  misc_feature (1)..(600): n is a, c, g, or t
atgtattcttctcctcctgtactggaaaaactggtgcaggaaatttccaaactgcctggcatagggcgaaaaaccgcccgcaggctcgctttccatttaatctcaggtgacagggaaaaaatggaaaacttggcacaagttctcttggaagcaaaaaacaagctggttcattgcaaactatgttatggatttgccgagagcgagatttgccagatatgcgacaacccgcgcagagatagggaatccctttgcgttgttgaaagagcgagcgatattttaccatttgaaaacagcggggcacataaggggctttattttgtgctaggcggggttctttctccgttggacgggataaaacctgaatctttgcatataccggagcttattgaacgggtggaaaaagagaatataaaggagctgattctagccttgggttcaagccctgaggcggagagcacagccctttacatagatcgggtgcttttaaactcccctatccaccgtacaaggcttgccaggggcatacctgtgggtagcgacttggaatttatagacgatgtgaccatgctaagggcttttaaggaaagggtaaagatttaa

SEQ ID NO: 45912 - protein, 199 aa, Unknown
  Obtained from environmental sample
  DOMAIN (81)...(174): Toprim domain
  misc_feature (1)..(199): Xaa is any amino acid
MYSSPPVLEKLVQEISKLPGIGRKTARRLAFHLISGDREKMENLAQVLLEAKNKLVHCKLCYGFAESEICQICDNPRRDRESLCVVERASDILPFENSGAHKGLYFVLGGVLSPLDGIKPESLHIPELIERVEKENIKELILALGSSPEAESTALYIDRVLLNSPIHRTRLARGIPVGSDLEFIDDVTMLRAFKERVKI

SEQ ID NO: 45913 - DNA, 462 bp, Unknown
  Obtained from environmental sample
  misc_feature (1)..(462): n is a, c, g, or t
ttgatcgactgccccccgagtctgggcattcttacccttaacggcatggccgcggccgacgccgtgctgattcccatgcaatgcgaatacttcgcgatggaaggcctgagcctgcttttgcaaaccatacagcgtatccagcggggcattaaccgtaccctgggcatgggcggtattttttttaccatgtacgatccaagaacacggcttgcccaggatgttgtaaagcaggtaagcgcatacttcaaagacgcggtatattctactattataccccgcaatgtccgcctctccgaagcgccttcccacggccagccgattttgttgtatgatcctaactgtgcgggcgcgaaagcgtatcaaagccttgcgcgcgaaataattaagcgttcagacgctacggagaaaaacaagaatgttcctgctcaaagcgcagaaatatcgtcaagaaatggagggtga

SEQ ID NO: 45914 - protein, 153 aa, Unknown
  Obtained from environmental sample
  SIGNAL (1)...(19)
  DOMAIN (1)...(99): CobQ/CobB/MinD/ParA nucleotide binding domain
  misc_feature (1)..(153): Xaa is any amino acid
MIDCPPSLGILTLNGMAAADAVLIPMQCEYFAMEGLSLLLQTIQRIQRGINRTLGMGGIFFTMYDPRTRLAQDVVKQVSAYFKDAVYSTIIPRNVRLSEAPSHGQPILLYDPNCAGAKAYQSLAREIIKRSDATEKNKNVPAQSAEISSRNGG

SEQ ID NO: 45915 - DNA, 534 bp, Unknown
  Obtained from environmental sample
  misc_feature (1)..(534): n is a, c, g, or t
atggggacaagctgtcgacgcaaaagctgtacgaccgaatcgttcgacaatgccgccgtttcgacctcagcgggttcagcggtctctacgggctcagtggcctctacgacctctgcgggctctgcaacctctacggcttcagcggcctctacaacctctgcgggctctacaacctctgcgacttcaacgggctcagtagcctcagcggtctctgcgggctcagtggcctctgcaacctctgcggcttcagcggtctctacgatctctgcggactctgcaatctctgcgacttcaacgggctcagtagcctctgcgggctctgtggcttcagcgacctctgcggatggttccggctgctccgcaggaggttcaatactggttacatcatcaatatcaatgtcgcttctaacctcaatatcggattcgaccgcctctgtttctgtctcaattgagaaatcgcctacgggaatcagggcgtcgagaccccttcccaacgcaggtttacgagccatttcatcaccctccatttcttga

SEQ ID NO: 45916 - protein, 177 aa, Unknown
  Obtained from environmental sample
  misc_feature (1)..(177): Xaa is any amino acid
MGTSCRRKSCTTESFDNAAVSTSAGSAVSTGSVASTTSAGSATSTASAASTTSAGSTTSATSTGSVASAVSAGSVASATSAASAVSTISADSAISATSTGSVASAGSVASATSADGSGCSAGGSILVTSSISMSLLTSISDSTASVSVSIEKSPTGIRASRPLPNAGLRAISSPSIS

SEQ ID NO: 45917 - DNA, 945 bp, Unknown
  Obtained from environmental sample
  misc_feature (1)..(945): n is a, c, g, or t
ttgatttgggagattcaaatgcagattgacagtattaccatgcgcgccgcggaggattttacaagagcgcggggaaaggcgcttctctcgcagattcagcatttcctgaatattgaccgcgacaggctgctttcttttaatgatgttaaagatatcttaaagccaaaaaacgaagtttacaggggaaatcaggtagtgccgattaaaatgattgtcggcagcgaggggcgttatcacgattttaacaaatacttcctgcctaaatccgaacatttacggcaccgctggcagaaggtggacgaagctcatattaaagatataattctgcctcctatccagttatacgaaatcgggggagtttattttgtccgcgacgggaaccaccgcgtgtctgttgcaaaaacccaaggggttgaatttattgacgccgtggtaaccagcctcgcgacagaagttaatattaatccctcgatgacctccgacgaactgcgtgaagcgcttatttcttacgaaaaaagcatcttctatgaaaaaacaaatttcggcgaacttacaaattatacagaattaaatttcagttctccgggacgttatgacgttatttacaaccacatacttgttcataaatactacctgaacgaaaaccataatgaggaaatcccgttcagcgacgcccttgtttcatggtacaagaatgtatataatcccgtaataacgataatcagggaacagtggctgcttgtaaattttgccggaagaacggaagccgatctttatgtgtggattatcaagcattgggattttttgaaaagaaaatacggcaaatactctctggcaaaagccgcgggggatttttcaaaaaaatacggtcaaaaaggcagcatattaaggtatattgccgtctttgtcgaaaaaatattccgcacaaacaaaggaggggcgtaa

SEQ ID NO: 45918 - protein, 314 aa, Unknown
  Obtained from environmental sample
  misc_feature (1)..(314): Xaa is any amino acid
MIWEIQMQIDSITMRAAEDFTRARGKALLSQIQHFLNIDRDRLLSFNDVKDILKPKNEVYRGNQVVPIKMIVGSEGRYHDFNKYFLPKSEHLRHRWQKVDEAHIKDIILPPIQLYEIGGVYFVRDGNHRVSVAKTQGVEFIDAVVTSLATEVNINPSMTSDELREALISYEKSIFYEKTNFGELTNYTELNFSSPGRYDVIYNHILVHKYYLNENHNEEIPFSDALVSWYKNVYNPVITIIREQWLLVNFAGRTEADLYVWIIKHWDFLKRKYGKYSLAKAAGDFSKKYGQKGSILRYIAVFVEKIFRTNKGGA

SEQ ID NO: 45919 - DNA, 306 bp, Unknown
  Obtained from environmental sample
  misc_feature (1)..(306): n is a, c, g, or t
atgttcatggaagcgttaaaacttgttcctaaactttggtggaaccgtctttttcacggccgctttttggatattcttcttacccacgcgccgccaaaaggcatacatgataaaaacgacaagtgccattgggggtttaaaacatatctttggtttatgaagacgtttaagccgaaatatctggttcacggccatattcatctgtacgatttgtcagccgtgcgatgcaccaagtgggaaaaaacgaccgtaattaacgcttacggccattatgtaattgatttgggagattcaaatgcagattga

SEQ ID NO: 45920 - protein, 101 aa, Unknown
  Obtained from environmental sample
  misc_feature (1)..(101): Xaa is any amino acid
MFMEALKLVPKLWWNRLFHGRFLDILLTHAPPKGIHDKNDKCHWGFKTYLWFMKTFKPKYLVHGHIHLYDLSAVRCTKWEKTTVINAYGHYVIDLGDSNAD

SEQ ID NO: 45921 - DNA, 411 bp, Unknown
  Obtained from environmental sample
  misc_feature (1)..(411): n is a, c, g, or t
atgctcggactatttattttcgggcttcatgtcgaaaggcaaatgggaagccgggaattccttttgtattatttgcttacgggaacccttgcgggaatattttctttttttgtttacaattttacgcacaattattatacggcgcttatgggagcgtccggcgctctttttgcggtagaacttgcatatgccgtattttttcccgactcgattatttacatttggggcatacttccccttcgcgctcctgtgatggtgcttgggtttacggctctggaattgtttttctccataactggacggcagagcaatgtagcccaccttacccaccttgcgggtttcggcttcggctggttttatttcctgatacgtttcggaatgaatccatggaagcggcttacggggcgctaa

SEQ ID NO: 45922 - protein, 136 aa, Unknown
  Obtained from environmental sample
  DOMAIN (1)...(129): Rhomboid family
  misc_feature (1)..(136): Xaa is any amino acid
MLGLFIFGLHVERQMGSREFLLYYLLTGTLAGIFSFFVYNFTHNYYTALMGASGALFAVELAYAVFFPDSIIYIWGILPLRAPVMVLGFTALELFFSITGRQSNVAHLTHLAGFGFGWFYFLIRFGMNPWKRLTGR

SEQ ID NO: 45923 - DNA, 1110 bp, Unknown
  Obtained from environmental sample
  misc_feature (1)..(1110): n is a, c, g, or t
atgaaaaaaagagtcggcatacttttcggaggtaaatccgctgagcatgaaatatctcttttgtccgcaaaaaatgtttacgaggcgatagacagaacgaaattcgagcctgttcttgtcggaattgacaaggcaggccgctggttcttgaatgacgcatcacactttttgctgaatgctgataatccttccgcaatcagcctcaacaccgaaggcagccttgtagcgcttcaaccggaaaaacacgggttgatttccgcagagagtaaagaaaatgtgtctgtcgatcttgatgcggcgttcccgattttacacgggcctttcggcgaggacggcactattcagggcttcctcaagctggctgatattccgtttgtcgggcctagcgtacttggttcggctgtcggaatggacaaggacgcaatgaagcggctcctgcgtgatgcgcaaattcctatcgggaaatttattacattgaaaagccatgaaaaaataccgccgtttgcggaagtaagaggcgctctcggtaatcccgttttcatcaagcctgcgaatatggggtcttctgtcgggattagcaaagtccgtaatgagggggaatatgtccttgccgtaaaagacgcttttttatatgacagaaaaatcatcattgaagagtttatcagcggacgggagattgagtgcgccgtgctgggaaacgaagagccggttgcttcagttcccggcgaaataattcctactcacgaattttattcctacgacgcaaaataccttgacgaaaacggcgcggcgcttcagatacccgcaaatcttgatgaagaaacaaaaaagcgaatacaggaacttgccgttaaagtttttcaaacgctctgctgcgaagggctttcccgcgttgactttttcttgaaagaaagcggcgaagtatttgtcaacgaaatcaacacaataccgggttttaccagaattagcatgtacccaaaactttgggaagcaagcggtatttcctataccgagcttatcacccgtctgattgaattggctataagccgttttgaaaaagaacgggtgataaaaaccagcattaagggaacctcaaaaaaacctgattag

SEQ ID NO: 45924 - protein, 369 aa, Unknown
  Obtained from environmental sample
  DOMAIN (138)...(320): ATP-grasp domain
  misc_feature (1)..(369): Xaa is any amino acid
MKKRVGILFGGKSAEHEISLLSAKNVYEAIDRTKFEPVLVGIDKAGRWFLNDASHFLLNADNPSAISLNTEGSLVALQPEKHGLISAESKENVSVDLDAAFPILHGPFGEDGTIQGFLKLADIPFVGPSVLGSAVGMDKDAMKRLLRDAQIPIGKFITLKSHEKIPPFAEVRGALGNPVFIKPANMGSSVGISKVRNEGEYVLAVKDAFLYDRKIIIEEFISGREIECAVLGNEEPVASVPGEIIPTHEFYSYDAKYLDENGAALQIPANLDEETKKRIQELAVKVFQTLCCEGLSRVDFFLKESGEVFVNEINTIPGFTRISMYPKLWEASGISYTELITRLIELAISRFEKERVIKTSIKGTSKKPD

SEQ ID NO: 45925 - DNA, 477 bp, Unknown
  Obtained from environmental sample
  misc_feature (1)..(477): n is a, c, g, or t
ttgctgaagactgttacggaaaggcatttttgttgtttatattatatgaaagtaaaaataatcaaaagagcgtttttctattgcgtggtcgttatcctgctactgacaaccggattgggtgcctgtcaatcaaataaagctgttgacaccgaacataactcaagaaacaatgtggattggcagggcgagtacaccggcgtaattccggcggcagacggtcccggcattgatgttcgaataaccctgaattccgatcaaacctatgaactgcggtatgagtatctggaaagaacaaacaatgtctttaccggcaaaggaagattcgagtgggacagagccggaagcgtcattacccttgatgacaagacatttcccccttattacctggtgggcgaaaatatcctgatccagttggatacaaaggggaaaaaaatcaccggcagcctggcgaataattacatacttaaaaagttgtag

SEQ ID NO: 45926 - protein, 158 aa, Unknown
  Obtained from environmental sample
  DOMAIN (21)...(158): Uncharacterized lipoprotein NlpE involved in copper resistance
  misc_feature (1)..(158): Xaa is any amino acid
MLKTVTERHFCCLYYMKVKIIKRAFFYCVVVILLLTTGLGACQSNKAVDTEHNSRNNVDWQGEYTGVIPAADGPGIDVRITLNSDQTYELRYEYLERTNNVFTGKGRFEWDRAGSVITLDDKTFPPYYLVGENILIQLDTKGKKITGSLANNYILKKL

SEQ ID NO: 45927 - DNA, 1071 bp, Unknown
  Obtained from environmental sample
  misc_feature (1)..(1071): n is a, c, g, or t
atggaagaagacgccggaaagctggtacacgacgtaaacggctctagcacattcatggacttcaaccgctgcggggtacctcttttggaaattgtctcacagcctgacttccgcaatgcagccgaagtaatcgcctatcttgaaaaactgcgcgaaacgcttttgtatcttgacgtgagcgactgtaaaatgcaggaaggttccatccgcgctgacattaacctctccatgcgccgcgaaggcgatgaattgggaacgcgcaccgaaacaaaaaacatgaactcgtttaaagctatcgcccgcgccattgaatacgagacttcacgccagatagaaatactggaagacggcgggcaggtcgttcaggaaacgcgccgctgggacgatgaaaaacttgagtcttatggcatgcgctctaaggaaaacgcgcaggactaccgctacttccctgagcctgacctcttgccgattgatattgacgatgcgtggcttgcgagcgtcagaaaaaacctgccggaactggcgcatcaaaaacgcgaacgctactgccttgatttcggtataagcgaatcagaagcgaatgttttgaccgtccacaaaaacacctgcgatctgtttgaggccatcgcgaaaaaaagcggacaacccgtcgaagcggcgcacctcttgaccggagagatcatgcggttgatgaacaacgccaatattctgccggaagatttggctatagacgcgggcaagctttccacgctcattacgcttgttatgagcggaaaaatcaaccgaaacgcttacaaagaaaccgttgaatctgtattcacgcgcaatgttgatcctgaaagctacatcgccgaaaaaggtctgatgatgatcaacgacgacagcgcggtcatcgaagcggcgaaagcggttatcgctgaaaaccaggattcggtcacggattaccgcgccggtaaggaaaaagtgttcgcctttttaatggggcaggttatgaaaaagctgggcgggaaaggcaatccggaaatggtgaagaagacattgaaagagatgctaatagaggagagtacatga

SEQ ID NO: 45928 - protein, 356 aa, Unknown
  Obtained from environmental sample
  DOMAIN (1)...(117): PET112 family, N terminal region
  misc_feature (1)..(356): Xaa is any amino acid
MEEDAGKLVHDVNGSSTFMDFNRCGVPLLEIVSQPDFRNAAEVIAYLEKLRETLLYLDVSDCKMQEGSIRADINLSMRREGDELGTRTETKNMNSFKAIARAIEYETSRQIEILEDGGQVVQETRRWDDEKLESYGMRSKENAQDYRYFPEPDLLPIDIDDAWLASVRKNLPELAHQKRERYCLDFGISESEANVLTVHKNTCDLFEAIAKKSGQPVEAAHLLTGEIMRLMNNANILPEDLAIDAGKLSTLITLVMSGKINRNAYKETVESVFTRNVDPESYIAEKGLMMINDDSAVIEAAKAVIAENQDSVTDYRAGKEKVFAFLMGQVMKKLGGKGNPEMVKKTLKEMLIEEST

SEQ ID NO: 45929 - DNA, 912 bp, Unknown
  Obtained from environmental sample
  misc_feature (1)..(912): n is a, c, g, or t
atgttcagccattcccgccggatggaacttccccagttaagcaggagtaaactgggtacttatgatagtttgattaacctgatgtggatattttcggtaaaacgccaggatccgctttattaccggctgctgccgggcaatataaaggatatgagcgctttcaagatgagtttgcaggaaagcggcgtgaaagacgccgtagccgtaatggacaaggggtttgcctcaaagagcaatattgaagcgcttgaaaacagcgggctgcagtttattatccccctgccgcgtaataacgcacttatcaattatgagaagatacagggcggcgacaagcgtctttttgacggttatttcaaacacgaggggcgatatatatggtattacgctattgccttagatgcaagaaaaacgctcacggtgtttttggatgaggaactgcgcagccgtgaacagaaagactatttggacagaatagacaacaaggtatcagattattctctacaggcatttcacgacaaacagtaccggctcggtactatagcgattattgagaacacaggcaagaagccatacgaagtctttgccgcctataaaatacgcggggatgtagaggtaatgatagacgcgctaaaaaatatagttgatgcggatagaacctatatgcaaaacgaacaggcgcttgaagggtggatgtttatcaacctgcttgctttaaaatggtattacgctatcttgaacttgctgaaaaaacatggccttaataaaaaatattcaccgtcggactttttattattcctttcagaagtcaaaaaagttaaaatcaacaacctatggtatgatgcggaactaatcaagaatacccgtgaactacttcaatcattgaacatattacgtaaaaatgagaaaagttag

SEQ ID NO: 45930 - protein, 303 aa, Unknown
  Obtained from environmental sample
  DOMAIN (5)...(240): Transposase DDE domain
  misc_feature (1)..(303): Xaa is any amino acid
MFSHSRRMELPQLSRSKLGTYDSLINLMWIFSVKRQDPLYYRLLPGNIKDMSAFKMSLQESGVKDAVAVMDKGFASKSNIEALENSGLQFIIPLPRNNALINYEKIQGGDKRLFDGYFKHEGRYIWYYAIALDARKTLTVFLDEELRSREQKDYLDRIDNKVSDYSLQAFHDKQYRLGTIAIIENTGKKPYEVFAAYKIRGDVEVMIDALKNIVDADRTYMQNEQALEGWMFINLLALKWYYAILNLLKKHGLNKKYSPSDFLLFLSEVKKVKINNLWYDAELIKNTRELLQSLNILRKNEKS

SEQ ID NO: 45931 - DNA, 558 bp, Unknown
  Obtained from environmental sample
  misc_feature (1)..(558): n is a, c, g, or t
atgaaggaagccggctttcccggcggcgccggcatgcccgaacttgttatacgccttacgccttctcccgaggcggctaatatcggcagcatgatggcatcggcgtggaaagataaactcggccttaaagtaagggtagaggttattccttacgagcgttatttccaatccatgaaagaaagcggctatattatcggttcttccacatggatcggcgattttgccgacccttatacatttttgcagatgtggcggcgcgactccaatttgaacgacgcccattacagcgacgatgattatgaagcgctgatggaaaaatcaatgacggaagaaggagacaggcgccttgccactcttgcgagcgcggaaaagcttttgctggaaagaggggcagtactgccgatttcttacagccccgcgcttaacattgtagatacaaatgagctggacggatggtatcccaacgcgctggatattcacccgtttaagttcatatcatttaaaactttccgcgcgcttcccggcgttgcaatggcttctcccgctcagaatgaatag

SEQ ID NO: 45932 - protein, 185 aa, Unknown
  Obtained from environmental sample
  misc_feature (1)..(185): Xaa is any amino acid
MKEAGFPGGAGMPELVIRLTPSPEAANIGSMMASAWKDKLGLKVRVEVIPYERYFQSMKESGYIIGSSTWIGDFADPYTFLQMWRRDSNLNDAHYSDDDYEALMEKSMTEEGDRRLATLASAEKLLLERGAVLPISYSPALNIVDTNELDGWYPNALDIHPFKFISFKTFRALPGVAMASPAQNE

SEQ ID NO: 45933 - DNA, 585 bp, Unknown
  Obtained from environmental sample
  misc_feature (1)..(585): n is a, c, g, or t
atgagctggacggatggtatcccaacgcgctggatattcacccgtttaagttcatatcatttaaaactttccgcgcgcttcccggcgttgcaatggcttctcccgctcagaatgaatagaatcggaataggttacgatattcaccgccttaaaaaagggcggcgttttttgcttggcggagcggaaattccttttaacaagggagaacttggacactccgacggggacgttcttgcccacgccgtatgcgacgctctgcttggagcttcggctctgggcgacatcggcgaattgttcccgccctccgaccctaagtttaaggacgcggactcaatggaacttctgcgcgccgcttttaaacttgtaaaaaaagcgggctggcggcttgtaaaccttgactgcgtgattatctgcgaagaaccgaaaattcttccttttagagacattatccgcaattcgcttgccggggcgctcgaagtttccgctgaaaagatatttgttaaaggcaaaaccgccgaaggtttgggtcagatcggaaagggaaacgcggcagaggtttacgcggtatgccttctggaaaaataa

SEQ ID NO: 45934 - protein, 194 aa, Unknown
  Obtained from environmental sample
  DOMAIN (39)...(194): YgbB family
  misc_feature (1)..(194): Xaa is any amino acid
MSWTDGIPTRWIFTRLSSYHLKLSARFPALQWLLPLRMNRIGIGYDIHRLKKGRRFLLGGAEIPFNKGELGHSDGDVLAHAVCDALLGASALGDIGELFPPSDPKFKDADSMELLRAAFKLVKKAGWRLVNLDCVIICEEPKILPFRDIIRNSLAGALEVSAEKIFVKGKTAEGLGQIGKGNAAEVYAVCLLEK

SEQ ID NO: 45935 - DNA, 1095 bp, Unknown
  Obtained from environmental sample
  misc_feature (1)..(1095): n is a, c, g, or t
ttgcgagctttcccgcctgttacgggcgcgaggggagatcgctctctttcatacctcagccgccctaattacctttccgcctacctgcgctatttcctgccgtggaacattttgcgcctctgccgccttctgccttctctggaccttaatctccgcgccgggaacctaatcacagacctcggaagcggcccgcttacttttgcatcggcgctctggctctcccgcccggacttgcgctctaccgcgcttgaatttatctgtatagacaactgcgctcccgcccttgccgcggggaaaaaattttttgccgctttatgcgcgcaggaagactgcgcgtggaaagtgaatactgcgcgggagaagataaaccttaaaacaaagacggctcttgcgcgcaagaaagcagccctcgtctgcgccgtgaatttttttaacgaaatatacgaagacctgccccacactgacagcgaggctcttaaacgcgccgcctgtgacgccgctttgttaatgcacaatcaggcggaacctgaagcccgcattttaacggttgagccgggagtgccgcaatcggggcaatttatcagtcttttgcgctcagcttttttggagcttggacgccctcccctgtcgccctgccctcattcggaaacttgccctatgcccggcggtaaaagcgccggcgggaaagttaacaggaaaactgttaacacaaaaaaccgctggtgccactttgcctataccgcggtaaacgccccaaaagaacttatccggttatccgccgccgcgggtattcccaaagaacggcttgtgctaagctatttgctggcaggcgctcacaaagagaggcaaaaacactcggcgaatgtttcaaacacaacgcaaaaagtacggataatttccgatgcgttttcgcttcccgaaggcaaatacggaagatacggctgttgttccgaaggacttattcttgtaacaggggacaaaaaccgtatagaaaaaaccgcatccgggaaacttgtgccgaacagcatcgctgacagcgccgctgacagcgcccgtgacaagaaaagcggcgctttgataatggagataaaatga

SEQ ID NO: 45936 - protein, 364 aa, Unknown
  Obtained from environmental sample
  misc_feature (1)..(364): Xaa is any amino acid
MRAFPPVTGARGDRSLSYLSRPNYLSAYLRYFLPWNILRLCRLLPSLDLNLRAGNLITDLGSGPLTFASALWLSRPDLRSTALEFICIDNCAPALAAGKKFFAALCAQEDCAWKVNTAREKINLKTKTALARKKAALVCAVNFFNEIYEDLPHTDSEALKRAACDAALLMHNQAEPEARILTVEPGVPQSGQFISLLRSAFLELGRPPLSPCPHSETCPMPGGKSAGGKVNRKTVNTKNRWCHFAYTAVNAPKELIRLSAAAGIPKERLVLSYLLAGAHKERQKHSANVSNTTQKVRIISDAFSLPEGKYGRYGCCSEGLILVTGDKNRIEKTASGKLVPNSIADSAADSARDKKSGALIMEIK

SEQ ID NO: 45937 - DNA, 897 bp, Unknown
  Obtained from environmental sample
  misc_feature (1)..(897): n is a, c, g, or t
atgaagaaaatgccgcgattttccggcctgcacaaccacacgattttctgcgacggcagggacgacatagaaaccatgtgccgcgccgcttttgaaaaaaaactttgcgcggtaggattcagcgcacacgcgccgatcaaaaagaagacaggcattgaaagccactggcatttaaaagacgaaaaacttgaagaatattccgaacaggttcttgcggcaaaaaaacgctggaaaggaaaactggaagtcttgcttggttttgaaattgattatatcaaaggattgcgctgcgctctggacagcgacatcacggaaataaatcctgattatttaatcggaagcgtacattatcttgttccggcaaacggcgcaaaaccgtttacggtggacggcccgcaggaagaattcttgcagggacttaacgaaggtttcggcggagacatgcaggcgcttatgaacagttattacgacgctcaagccgaaatgacagctctcggcggctttgaaattctggggcatgccgaccttattaaaaaaaattgtatggggaaaaacttatggcagaaggaagaagaaatctgccgtcagaaagaaattgcggctgccgccggaaaaacgggcataatagcggaagtaaacaccggaggaattaacagaaaaaagattaacgaggtttttccttctttaacctttttaaaatttttccgcgaaaacaacgtgcctgtaattatcacatcggacgcccaccgcgcggagcatattaaaggtaattatgatattgcggtacaaactcttttatcagccggtttttcggatcatgtaagtatcttacgaaaaagaaataaaagaataatatatactaaagataaattgaataatttgcttgccgataaataa

SEQ ID NO: 45938 - protein, 298 aa, Unknown
  Obtained from environmental sample
  DOMAIN (8)...(252): PHP domain
  misc_feature (1)..(298): Xaa is any amino acid
MKKMPRFSGLHNHTIFCDGRDDIETMCRAAFEKKLCAVGFSAHAPIKKKTGIESHWHLKDEKLEEYSEQVLAAKKRWKGKLEVLLGFEIDYIKGLRCALDSDITEINPDYLIGSVHYLVPANGAKPFTVDGPQEEFLQGLNEGFGGDMQALMNSYYDAQAEMTALGGFEILGHADLIKKNCMGKNLWQKEEEICRQKEIAAAAGKTGIIAEVNTGGINRKKINEVFPSLTFLKFFRENNVPVIITSDAHRAEHIKGNYDIAVQTLLSAGFSDHVSILRKRNKRIIYTKDKLNNLLADK

SEQ ID NO: 45939 - DNA, 381 bp, Unknown
  Obtained from environmental sample
  misc_feature (1)..(381): n is a, c, g, or t
ttgccgataaataactattttcttattatttattcggaggctatcaaaatgaatacaaatatgaaaacaccgggaacaactcttctggaatttatcggtaaaaacggtctaaattgcaacagggtcgcaaaaaacatcaagtgcagtcaaactgcgttaaggcttatcagcttggataagagccgtattacggcttccgtagctgtccgccttgctaaatattttaatactaaaccggaattttggctgttaactcagatgaaatacgatcttgaaaagccgcggaaaacaaaacattgcttaaaaaacttaaggctattccggctatctagaggcatttacaccgcgccgcaggcagaaatttgcgattatgcagcgtga

SEQ ID NO: 45940 - protein, 126 aa, Unknown
  Obtained from environmental sample
  misc_feature (1)..(126): Xaa is any amino acid
MPINNYFLIIYSEAIKMNTNMKTPGTTLLEFIGKNGLNCNRVAKNIKCSQTALRLISLDKSRITASVAVRLAKYFNTKPEFWLLTQMKYDLEKPRKTKHCLKNLRLFRLSRGIYTAPQAEICDYAA

SEQ ID NO: 45941 - DNA, 645 bp, Unknown
  Obtained from environmental sample
  misc_feature (1)..(645): n is a, c, g, or t
gtgtatcttgcgttttatgatcaggagcgcaagcctgattacgcgagagggcgctggtcgttcccgtcaatggcgtctcatcttaactttgatcattttcacggaagaaacgtgaaagccgccgtgtttaccaactgcgaagaagttgagttgtgggttaacggcaagaagatgggacggcgcaagggtgcggattttgaaaatggaataattgaatggccgcttgagtacaaaagcggcaatatggaaataaaaggattcaacaaggggaaggaagtttgttcctatatattaaaaaccgctgggttgcctcagaaaataaaacttttacccgataaaacaaaattgaaaacgggtgaaatagcgcatattgaaataaatattaccgataataacgggttgttgtacccaaatgatgaatttcttgttgagttttcattgaccggagacggagaaattataggagcgtgttcaggcgatttaagccaaaatctgggttttacactgcctaaagtttttacttttgacggcagggcgcttgcaatgattaaagcgggggattcatccggcgatttggtgttacgcgcatattcagagaaactggaaaaagctgaattgctgtttatagcggaaggggagaaataa

SEQ ID NO: 45942 - protein, 214 aa, Unknown
  Obtained from environmental sample
  misc_feature (1)..(214): Xaa is any amino acid
MYLAFYDQERKPDYARGRWSFPSMASHLNFDHFHGRNVKAAVFTNCEEVELWVNGKKMGRRKGADFENGIIEWPLEYKSGNMEIKGFNKGKEVCSYILKTAGLPQKIKLLPDKTKLKTGEIAHIEINITDNNGLLYPNDEFLVEFSLTGDGEIIGACSGDLSQNLGFTLPKVFTFDGRALAMIKAGDSSGDLVLRAYSEKLEKAELLFIAEGEK

SEQ ID NO: 45943 - DNA, 1665 bp, Unknown
  Obtained from environmental sample
  misc_feature (1)..(1665): n is a, c, g, or t
ttgatcagatcggccgagtatggccacgggctggaggcggggacgattatagctgaaggcggcgggatacttaacatcgccacggcaggggcgatcggcgccagcgcggcggacaatgtaaccatcggggcggcgcttacgcataaagaactggcgacggtaggcgtaggcagcgtcttggttaccggatcgaactttacattggtggatagcacggcctttggcatcgacgataccgcgccgaataaccccggtatatcttcgatgatgagcgtaaacggcgtgcttgttcttactccggacggcggcggcaccgatgtacgggttgaggccggccagagcgttacgttggacaacggtacagtgctgaagaaccacggcggcgggttggtcagcgttgagagcggcagtatcacaatcgacgatgaattagactcaaccggcaccctcacgacggcgttcaacatcgccgcgcaaagcgttttgaattacgacaccgagacccgtttgaacgacacgaacatcattaaggcctcaaaccttctcgtcaaaaacggggcgatcagcagtaacgttacggtcggcaacaccgtcaaccttacttgcaatacaaacgcaaagaccgcggccgcaaacggcgaaatcaacgctctcgccgtaggcagcgtcttggccaagggcagcagcattgagatgctccagacgccgggtacgaccaacaccataaagatcgaggtcaaaggcaaagaggttgatatctcatacgataacgtcaacaaaattctcaaagtgggcggcgagacggtcgcggcgggcaagagcataacgcttgaggacggcacggttctcacgcacaactcaacgctcaacgatccgaataccgccaacggcgtggtgttcgtcgagcagggccgcataacgttggcggagagcatcacggcgatgaccggcgaagtgcccaacgtcgcgagattcatcctcgccaaggacagcactttagccgccggcacaaaattaggcggtacgaataactacaccgggacgggtggcctgaccgccgccaacggcgcggtcaaactgatggccggcacggtagtaaccgacccgaccacgactttctccggcagcgtaaccataggcgcgggcggcaaatccgtacagttctccgccaacgtcaaggacggtttggcggcgcgttactacgacctgaaagttcaggacagtttcacgttcatctttacggaatacgaccccgcgacgtcgaacctcaacgactccgtgatggcccaaatcggcgccaacagcggccagacggctttcgtttcgatgggcgatatgcgcgccaaggctctaggtgtcgccggcgttgacgtgagcaccaaatggggcgcggcgacggccattgagacggtgaacaacgcgttgcagaaggtttcgcatcagcgcagctctttgggcgcgattcagaaccgtcttgagcacacgatcaagaatttggacactgcggcggagaacttgcaagccgccgagagccggattcgcgatgtggacatggcgaaggagatcatggagttcacgaagaacaacattctccagcaggcgtctcaggcgatgttggcgcaggcgaattcgcagccgcagagcgtgttggcattgttgaggtaa

SEQ ID NO: 45944 - protein, 554 aa, Unknown
  Obtained from environmental sample
  DOMAIN (461)...(532): Bacterial flagellin C-terminus
  misc_feature (1)..(554): Xaa is any amino acid
MIRSAEYGHGLEAGTIIAEGGGILNIATAGAIGASAADNVTIGAALTHKELATVGVGSVLVTGSNFTLVDSTAFGIDDTAPNNPGISSMMSVNGVLVLTPDGGGTDVRVEAGQSVTLDNGTVLKNHGGGLVSVESGSITIDDELDSTGTLTTAFNIAAQSVLNYDTETRLNDTNIIKASNLLVKNGAISSNVTVGNTVNLTCNTNAKTAAANGEINALAVGSVLAKGSSIEMLQTPGTTNTIKIEVKGKEVDISYDNVNKILKVGGETVAAGKSITLEDGTVLTHNSTLNDPNTANGVVFVEQGRITLAESITAMTGEVPNVARFILAKDSTLAAGTKLGGTNNYTGTGGLTAANGAVKLMAGTVVTDPTTTFSGSVTIGAGGKSVQFSANVKDGLAARYYDLKVQDSFTFIFTEYDPATSNLNDSVMAQIGANSGQTAFVSMGDMRAKALGVAGVDVSTKWGAATAIETVNNALQKVSHQRSSLGAIQNRLEHTIKNLDTAAENLQAAESRIRDVDMAKEIMEFTKNNILQQASQAMLAQANSQPQSVLALLR

SEQ ID NO: 45945 - DNA, 867 bp, Unknown
  Obtained from environmental sample
  misc_feature (1)..(867): n is a, c, g, or t
atgcgtccctccagcacggatgaagttaaagtagctaaaggaaacaaccagtctaaagtacaggcattactggaaaaagcgcagggaaagttagacggcacaagagtcctgctaaagacaagagaaaaagaacgcgatgaaatagaaagaataatacgtgacagaatgaccaatatttttgagcgtgttcctttgcatgaactgactgatgtaagcgattgtatgtcggaagctcaaaaagcggcaattaatgaaattcaaaatttgcttaagcaattgttaaaaaatgatcatgaattggaattgagcattaaggattttgtcagtgctcaggccgatgtggatcatttaggtgataaacttgaagccgaaggcggcagtggcgccattaccgtagacacaggcgcggtagatgccgaattcgataccttgcgtcaaatggcaaagatgacggtaggacggcagggaaaccactttcccgtgcttacatcggaatattttcactgtggtcctaatgatgtggcgacgcgggaaaatgtcatctctatgcttgcaagaatcgaaagtatcgacgccgaagcttattgccgtatctataaaaacaagttaaaccgaattgctccatttgttctgttaatacccacttatggcgatatgggtttttgctgggaaccgtttgaccgttataaccgcgctacaagccgtggacgtattattgttccaatgtacccgaaaaatttatatttagcggtccttaccgccgttgccgatctgcgctggcaggtggcaaaagagaaagcttctttttactggatggaagaagggcttaccggccattactatcaatggtttcaagcgcaaaaataa

SEQ ID NO: 45946 - protein, 288 aa, Unknown
  Obtained from environmental sample
  misc_feature (1)..(288): Xaa is any amino acid
MRPSSTDEVKVAKGNNQSKVQALLEKAQGKLDGTRVLLKTREKERDEIERIIRDRMTNIFERVPLHELTDVSDCMSEAQKAAINEIQNLLKQLLKNDHELELSIKDFVSAQADVDHLGDKLEAEGGSGAITVDTGAVDAEFDTLRQMAKMTVGRQGNHFPVLTSEYFHCGPNDVATRENVISMLARIESIDAEAYCRIYKNKLNRIAPFVLLIPTYGDMGFCWEPFDRYNRATSRGRIIVPMYPKNLYLAVLTAVADLRWQVAKEKASFYWMEEGLTGHYYQWFQAQK

SEQ ID NO: 45947 - DNA, 669 bp, Unknown
  Obtained from environmental sample
  misc_feature (1)..(669): n is a, c, g, or t
ttgatcggcgagaaatccatttcatctccgaatcatctttatgcggcgataattatcgactgcaatttaataactatactttcagataactcttcatcggtgtttatttttgacggtattttttcggcggtggaatcgtattgttcctcaaaagcaaattttctttctgacacgcttttggaaaaagcgattactttttttgccaaattattaaaaaaggccgcaggcggttcacaggcggaaactttcgcgcaggcggctatgctcatgtctatcggttcctcggtaagctcaccgggcgtaggttccgcgctttccacagcgattaacgcacgctgcggtattccaaagccgcaatgttcagcggcgcttttccccgcaatagcggaacggcttgtaagcgcacgccccgaaaaaatggcgcgaattgcctcattgcttggagcggcaaaagccgcaactcccgccgatgcggcgaattccgcggtagacgccatacgcaaatccatgtcggcattgggcgtaccgatcgatttaaaagaacgcaatatttcgctggatagggtgacagcagcagccgaagcggcgcgtaaattagacataacggcaaattctccgtggactgtatccgaagaagaagtgtttaaaattttaaagcaagttttataa

SEQ ID NO: 45948 - protein, 222 aa, Unknown
  Obtained from environmental sample
  misc_feature (1)..(222): Xaa is any amino acid
MIGEKSISSPNHLYAAIIIDCNLITILSDNSSSVFIFDGIFSAVESYCSSKANFLSDTLLEKAITFFAKLLKKAAGGSQAETFAQAAMLMSIGSSVSSPGVGSALSTAINARCGIPKPQCSAALFPAIAERLVSARPEKMARIASLLGAAKAATPADAANSAVDAIRKSMSALGVPIDLKERNISLDRVTAAAEAARKLDITANSPWTVSEEEVFKILKQVL

SEQ ID NO: 45949 - DNA, 1362 bp, Unknown
  Obtained from environmental sample
  misc_feature (1)..(1362): n is a, c, g, or t
atgaaaggtgagcttgtcgatagcgtccgcattgccgaggttaagggtaacaaaatcacgccgattaaggcgaatttagggcatcttgagcagttaatcaaagacttcggactcgcgcacccgcagggcataacctcccccgccgagatcgcccgaatgatggccggaaaagcccgattgatggctgagatcatcgaaaagacgcttgaaaccggaaacggcgacaattcattagcggaacaaatgaacgcctttaaagaggtactcatacacgacatcacaccaaaagattttgccgatgtctacgcccaaaccatcgcctacggtctgttcgctgcccgtttgcacgacgattcgcctgacaaatttagccgccaaaaagccgcgagtctaatccctaagacaaatccatttttgcgccaactcttccacaccatagcaagccttgacctcgatgatcgtatcgcgtggattgtggacgaccttgctgacacattcagagccgccaatatggtcgagtttaaaaagagtttcggcgaccataactcacagaacgaccccatcatccatttctacgaggatttcctttcagcgtatgatcctatattgcggaaaagccgtggcgtatggtacacaccgcaagcagtagttacatttatcgtccgtgccgtagacgagattttacagaaagatttcaatttgccaacaggcttggcggatacatcaaaaacaaaaatcaaaatacacgattgcgaaacagaagtccacaaagtacaaatcttagacccggcggcaggaacggggacattcctagccgaaacaataaaccgaatttacgaaaagttcagtggacagagcggaatgtggcaaaaatgcgtgaaagaacatcttattccgcgcctcaacgggtttgaattgcttatggcctcatacactatggcgcatattaaacttgaacagttgctttcacagactgggtacagtgctacagataatcaacggttacgtatttatttgaccaattctttagaagagcagtttcctgagacagtatcgctctttgcccaatttttggctaaagaagccaatgaagctaacagcattaaacgagatacacctattatggtagtattaggcaatccaccgtatagcggggaaagccagaataaaagcgaatggattatgcaactaatggatgattacaagaaagaaccacccgccgactcctcgctacaagaaaaaaatcctgaccattggntggaagtgcacgaacaaagcgctcaaaaactgtacgagcgcaattctaaatggattaatgacgattanttgcaatttatccgttttagggcagtattttattga

SEQ ID NO: 45950 - protein, 453 aa, Unknown
  Obtained from environmental sample
  misc_feature (1)..(453): Xaa is any amino acid
MKGELVDSVRIAEVKGNKITPIKANLGHLEQLIKDFGLAHPQGITSPAEIARMMAGKARLMAEIIEKTLETGNGDNSLAEQMNAFKEVLIHDITPKDFADVYAQTIAYGLFAARLHDDSPDKFSRQKAASLIPKTNPFLRQLFHTIASLDLDDRIAWIVDDLADTFRAANMVEFKKSFGDHNSQNDPIIHFYEDFLSAYDPILRKSRGVWYTPQAVVTFIVRAVDEILQKDFNLPTGLADTSKTKIKIHDCETEVHKVQILDPAAGTGTFLAETINRIYEKFSGQSGMWQKCVKEHLIPRLNGFELLMASYTMAHIKLEQLLSQTGYSATDNQRLRIYLTNSLEEQFPETVSLFAQFLAKEANEANSIKRDTPIMVVLGNPPYSGESQNKSEWIMQLMDDYKKEPPADSSLQEKNPDHWXEVHEQSAQKLYERNSKWINDDXLQFIRFRAVFY

SEQ ID NO: 45951 - DNA, 597 bp, Unknown
  Obtained from environmental sample
  misc_feature (1)..(597): n is a, c, g, or t
ttgaagcctaaattcatgctaaaatcatataatgtgacccaccaaaagcctatttctatggccaaatcatgtctttctacccaccagaggactattttcacaacccaaatcatatttccgcgattttccggccctcctcaatttcgggcgaaatcactggacggtcgccgatttgctctcaaagcacaggtcgcgtccgcacaacccgaagatcgccaacacgttcttccgctccggtttcatagagacgtggggtcgggggcttgtcgggaggcggggaagcgcgagccgctgtttgaagtgtcgcccggggaggttaaggttaccttttatattgatgacgagggtggcgtgaataggagcggcaaagaggtggacggtggtgtaaacgaacttcgggtgactattttggaactgatgcgagcgacgccgactatcagcgcgcaacggatagccgcagccctaggcacaacaaagcggcgtgtcgaatcgaatatcaacgcgatgaaaaaagccgggcttcttgaacgtgtcggcagtgacaagaccgggcattgggaagtccgtacaagcagtaatggtatcagatcgccttaa

SEQ ID NO: 45952 - protein, 198 aa, Unknown
  Obtained from environmental sample
  misc_feature (1)..(198): Xaa is any amino acid
MKPKFMLKSYNVTHQKPISMAKSCLSTHQRTIFTTQIIFPRFSGPPQFRAKSLDGRRFALKAQVASAQPEDRQHVLPLRFHRDVGSGACREAGKREPLFEVSPGEVKVTFYIDDEGGVNRSGKEVDGGVNELRVTILELMRATPTISAQRIAAALGTTKRRVESNINAMKKAGLLERVGSDKTGHWEVRTSSNGIRSP

SEQ ID NO: 45953 - DNA, 321 bp, Unknown
  Obtained from environmental sample
  misc_feature (1)..(321): n is a, c, g, or t
gtgaaacgcgccgataaaataggcgtgctgaaaacgatagccgtaaataatgattttcaccgtcacggcatcggatacgcgctcacattagcagcctataatgatttaatcacgcgcgacatccaagcgcttagctccatagcgtggaaaaacggcgaccggattaacgccgacagagtactgtcagcaataggactccgcccccatatcgagatcaagtcatactgggaagcggacggcataaagaacaattacaattgctcagcctgcggcccgcccccgtgcaaatgctcggcggtgctgtattttaaggcgatctga

SEQ ID NO: 45954 - protein, 106 aa, Unknown
  Obtained from environmental sample
  misc_feature (1)..(106): Xaa is any amino acid
MKRADKIGVLKTIAVNNDFHRHGIGYALTLAAYNDLITRDIQALSSIAWKNGDRINADRVLSAIGLRPHIEIKSYWEADGIKNNYNCSACGPPPCKCSAVLYFKAI

SEQ ID NO: 45955 - DNA, 651 bp, Unknown
  Obtained from environmental sample
  misc_feature (1)..(651): n is a, c, g, or t
atgaaaagaattatttttgcggcgttttttattacgctggctgcgggagcgttctgccaaaatggaattattagggagttaaccggagaggttgaactgaaaaaagcagggtcgtctgcttttgttccggcagccgcgggagacgcagtttcttccaacacgattgtttcgacaggttttaaaagtacagccattatcgctgtcggaaattctgtaattaccgtgcgtccgcttacgcggcttacccttgcggaaatacagtctacggaaaataccgagaacgtcaatgttaaattacagacgggaagggtaagagtcgaggtaaaaccgcccgccggaacaaaaacaaaccttaacgtacaaagtcccagcgcaacggcttccgttcgcggaacaactttcgagatggatacaaaaaacctagttggaatagaaggtaaagtcatattgaccggaaattccggcgccggagttatggtaacgggcgcaaactcaagctctgtaaatatcgacggaacagtttctaatccggtagttaacgcggaacaatcagttcaggtgcagcaacccttaggatcagaaggcggctccaaaaaagctaanacaaacagaggcgaggtggatatcaatattgattatggtgaaatctga

SEQ ID NO: 45956 - protein, 216 aa, Unknown
  Obtained from environmental sample
  SIGNAL (1)...(21)
  misc_feature (1)..(216): Xaa is any amino acid
MKRIIFAAFFITLAAGAFCQNGIIRELTGEVELKKAGSSAFVPAAAGDAVSSNTIVSTGFKSTAIIAVGNSVITVRPLTRLTLAEIQSTENTENVNVKLQTGRVRVEVKPPAGTKTNLNVQSPSATASVRGTTFEMDTKNLVGIEGKVILTGNSGAGVMVTGANSSSVNIDGTVSNPVVNAEQSVQVQQPLGSEGGSKKAXTNRGEVDINIDYGEI

SEQ ID NO: 45957 - DNA, 1167 bp, Unknown
  Obtained from environmental sample
  misc_feature (1)..(1167): n is a, c, g, or t
atggtcgatattttacccgcccttcccattttcgccgccgccgcgaaaggagccggttataccaacgttgaacttgataatgacggcgtaagaagacgcatttaccttacgcagaatatgcacgaccattggtacttacagcttgcctttgccccgttaatcgattatcttggcagaccggaaatacttttggaaaaacgcaaattgacggttaagcaggcgaaattccccaacggcaaagttgaagatatcgttattccgctggattacaagggcagaatgatgcttgactggcccaaagaagattacaatgacagttatactcatgtttctttcgcggatttcagtttgttagacgaaattgaagcggaaatagaaaaatacagccgcgctcttgccgacgccgacataatgctttttatcaatcaggataactctttggctttcattccggtcgctctcggcaatatggcgcagtaccttgatttgtcgcgcgaggctagaaaccacgccatggaaaataattcccacggttcttttgacgcttttcttgaatatcgaaactccgcttattatttactgcaggaaatattacaagaggataccgcgtctaagatacaaacaatcagcgaacagttaatcgaaaaacatcccgatttatccggagaaatagaagatgaagccgattacatcgtctcgttattggaagcgctggaagtagatttgtccagtcaccgcgaattgactaacgctaataaaaaaactttttatgataaattcgttatcatagggcgggttgatacgggaactaccgactacggcgcgaatcctttttacggcaaatacatcaacgtaggcactcacggcgtcgtgctggatacgattctttccaaatcttttattgattgtctggataatatttggaaaataatttttatgctgattttagttccgttgttttttttgtttacggataaatttgcgcctgttttacgcgcgtcattggggtttggcgcggcattatttattttgataatttctgttttgatattccgtttatcgggatttttcatgggaccgcttggaataatagcggcaatggttatcgctattattatccgcgaaattatttcttactccaattcggaaaatgaaaaacaattttaa

SEQ ID NO: 45958 - protein, 388 aa, Unknown
  Obtained from environmental sample
  misc_feature (1)..(388): Xaa is any amino acid
MVDILPALPIFAAAAKGAGYTNVELDNDGVRRRIYLTQNMHDHWYLQLAFAPLIDYLGRPEILLEKRKLTVKQAKFPNGKVEDIVIPLDYKGRMMLDWPKEDYNDSYTHVSFADFSLLDEIEAEIEKYSRALADADIMLFINQDNSLAFIPVALGNMAQYLDLSREARNHAMENNSHGSFDAFLEYRNSAYYLLQEILQEDTASKIQTISEQLIEKHPDLSGEIEDEADYIVSLLEALEVDLSSHRELTNANKKTFYDKFVIIGRVDTGTTDYGANPFYGKYINVGTHGVVLDTILSKSFIDCLDNIWKIIFMLILVPLFFLFTDKFAPVLRASLGFGAALFILIISVLIFRLSGFFMGPLGIIAAMVIAIIIREIISYSNSENEKQF

SEQ ID NO: 45959 - DNA, 2406 bp, Unknown
  Obtained from environmental sample
  misc_feature (1)..(2406): n is a, c, g, or t
gtgtctaacggttcggcagacgctcccttcctcgtcgccaacgaagccgatctccgcaaggtcggaaccggcactgacggctggacgctttcggcgcactacaggcagatagcgaacatcgccatgacaaccggcagcttcacgacgattggcgataacaccaacagattcacaggcgtgtatgacgggaacgggtatgccatcaccggcttgaccgtaaccgccgcgacctataatcaaggtttattcggcgttatcgacgcagacggcacggtgaaaaacgtgaaccttagcggtacgataacccaaagcggagacaataatggtgtgggaaccggcggcattgcgggcttaaactatggcacggttgacaactgcgtctttagcggaaccgtcagcggattaaccagtaatcaggttggcggcattgtcggaagtaatcaaagtacgggcattgtaaaaaacagcggaaacaacgcagaggtaaacggcagaaataataccggcggaattgtggggttgaatcaaggcggcactatcgaaaactgttacaacaccggagacgttatcggcgtcagtacggtcggcggtattaccaataacagcagcggcggcacggtgataaacagcagaaacaccgcaacggtaaccggcaatactaatgtcggcggcattgcgggaataaatcaggcgaagattgacaactgttacaacacgggaaccattaacgccgccgaacaagccggcggtatcgcagggggtaataccggaagcggcgtttatataaagaactcttantacacgggcaatgttaccagctccgatagctccaccagcgccggaggcattgccgcagtgaaccaatcaagcgcaacggtagaatactgctacaataccggcaacgttactggcacaagttcggctgtcggcggcatagtgggaaacaacgccaacaattgcacagttcaattttgcgtatcgctcggcgcaagggtaaccggaactagcaatgtcggtcgtgtggcaggaaccgttcccggactcggcaacaacagagcccgtgcggatatgaaaatcggcgcaagcggcgcagaggcgacagtatcgggaaacggaagcagctcaaacggcgcgtctaacagtattggtacggcacagacttccttttacctcagttgggattcctcgatttggaatatcagcggagatatgacaataggcgtcaatttggcaacactcaaaacaaacacgcaaagcccgactcccacgcttccggcagagtaccttgtacccggcacggcggaaaatcccttcctcgtcgccaccgaagccgatctccgcaaagtcggcactgaaacaacaacaggaggctggacgctttcggcgagctacaaacagacggcgaatatcacgctgacaagcgcatttacaaggattggcactttcacagacaccggcaaattctctggcacgtatgacggggacggaaaaactatcaccggcttgaccataaccggctccgcttatcagggagttttcggcgcaaacagcggcacgttgaaaaacatgaccgtaaccggaacggtaacaaataccggaaccggggttaataacagcaccggcggcattgcgggcgtaaatcaaggaacgattgacaactgttcctttagcggaaccgtcagcggcggcacaccaaacgatgatgtcggcggcattgccggacggaacagcggcacgattataaacagcagaaacttcgcaacaattagcggtagaaataacatcggaggcgttaccggatttaataacggcaaaatcgacaacagtttcaacaggaatggaaccgttagcggcaacagtcaagtcggcggtatcgccggtactaattcaggcagtggtaattacataaagaacagctatagcacggtcaatattaccggcacaatgttccccggcggcattgccgggaataaccaaaacgacgcattgatagaatactgctacagtaccggcaacgttatcggcactaccggggctttcggcatagcgggaagcaatccagccggaagcacggtgcgaaactgcgtagcgctcagtcctaaagtaacctccaacaacagcgcgtctgtcagcagaattgcaagcgctaacggcactgtctccaacaacaaagcccgtgaagatatgaaaatcggcataagcggttcagagtcggcagtacttacagctcaaacaggagtaaataacgaacacggcgcaaatgtcgctttgaatgcggttcagaccaccgttttcagcggttgggacacggcgatatggaatataaacacgggcaatttgtctaacggcgcattgcccacgctcaagccaaatccgcaaagttcaaccacgcttccgccatcgtga

SEQ ID NO: 45960 - protein, 801 aa, Unknown
  Obtained from environmental sample
  DOMAIN (536)...(561): The GLUG motif
  misc_feature (1)..(801): Xaa is any amino acid
MSNGSADAPFLVANEADLRKVGTGTDGWTLSAHYRQIANIAMTTGSFTTIGDNTNRFTGVYDGNGYAITGLTVTAATYNQGLFGVIDADGTVKNVNLSGTITQSGDNNGVGTGGIAGLNYGTVDNCVFSGTVSGLTSNQVGGIVGSNQSTGIVKNSGNNAEVNGRNNTGGIVGLNQGGTIENCYNTGDVIGVSTVGGITNNSSGGTVINSRNTATVTGNTNVGGIAGINQAKIDNCYNTGTINAAEQAGGIAGGNTGSGVYIKNSXYTGNVTSSDSSTSAGGIAAVNQSSATVEYCYNTGNVTGTSSAVGGIVGNNANNCTVQFCVSLGARVTGTSNVGRVAGTVPGLGNNRARADMKIGASGAEATVSGNGSSSNGASNSIGTAQTSFYLSWDSSIWNISGDMTIGVNLATLKTNTQSPTPTLPAEYLVPGTAENPFLVATEADLRKVGTETTTGGWTLSASYKQTANITLTSAFTRIGTFTDTGKFSGTYDGDGKTITGLTITGSAYQGVFGANSGTLKNMTVTGTVTNTGTGVNNSTGGIAGVNQGTIDNCSFSGTVSGGTPNDDVGGIAGRNSGTIINSRNFATISGRNNIGGVTGFNNGKIDNSFNRNGTVSGNSQVGGIAGTNSGSGNYIKNSYSTVNITGTMFPGGIAGNNQNDALIEYCYSTGNVIGTTGAFGIAGSNPAGSTVRNCVALSPKVTSNNSASVSRIASANGTVSNNKAREDMKIGISGSESAVLTAQTGVNNEHGANVALNAVQTTVFSGWDTAIWNINTGNLSNGALPTLKPNPQSSTTLPPS

SEQ ID NO: 45961 - DNA, 420 bp, Unknown
  Obtained from environmental sample
  misc_feature (1)..(420): n is a, c, g, or t
atggatgtttcaagaatcgatcatatcggtatagccgtaacaaatctggaggagacgatcaaattttacgaagatgttttgggcgttaaatgcaacggcacggaaacaatcaccgatcaaaaggtaaaggttgctttctttccggtgggagacaccgagcttgagtttttggagtccacgagcgaagacggccccatagccaagtttatcgagtcgaacaagggccgaggcggtattcagcacattgcgttgcgggttgacgatgtccgttcggccataggggaactcaagtcaaagaacgtcggcatgatcgacgaaacaccgcgctacggtgcgggaggcgcttccatcgccttttgccatcccaaatctacaggcggcatactattggaattgtgcgaaagaaaagcaaataattaa

SEQ ID NO: 45962 - protein, 139 aa, Unknown
  Obtained from environmental sample
  DOMAIN (5)...(132): Glyoxalase/Bleomycin resistance protein/Dioxygenase superfamily
  misc_feature (1)..(139): Xaa is any amino acid
MDVSRIDHIGIAVTNLEETIKFYEDVLGVKCNGTETITDQKVKVAFFPVGDTELEFLESTSEDGPIAKFIESNKGRGGIQHIALRVDDVRSAIGELKSKNVGMIDETPRYGAGGASIAFCHPKSTGGILLELCERKANN

SEQ ID NO: 45963 - DNA, 531 bp, Unknown
  Obtained from environmental sample
  misc_feature (1)..(531): n is a, c, g, or t
gtgtcagaaaaacttgaacaactaaaagaaatacggaaaaaactggaagaagccggcgggcaaaagcgcatagacaagcagcatgagtccggcaagctgactgccagggagcgcatcgcccagttgtttgacgcaggcagttttgtcgagctggacgcgtttgtaaagcaccgctgtgttaattttgacatggctacgacggaggctccggctgagggcgtcgttacaggatacggtcaggtgaacgggcggctggtttacgcttacgcccaggagttcacggttatcggcggctcacttgggcaaatgcacgcggcgaaaatctgtcaggtgctggatctttccgcgaaatgggcgcgccggtggtcgggcttaacgattcaggcggggcccgcattcaggaaggcgttgacgcgctgtccggctacggccagatcttttacagaaactcggtcaactcaggggttgtcccccagatttcggttatcatggggccatgcgccggcggcgcggtatattcgcctgcgctga

SEQ ID NO: 45964 - protein, 176 aa, Unknown
  Obtained from environmental sample
  misc_feature (1)..(176): Xaa is any amino acid
MSEKLEQLKEIRKKLEEAGGQKRIDKQHESGKLTARERIAQLFDAGSFVELDAFVKHRCVNFDMATTEAPAEGVVTGYGQVNGRLVYAYAQEFTVIGGSLGQMHAAKICQVLDLSAKWARRWSGLTIQAGPAFRKALTRCPATARSFTETRSTQGLSPRFRLSWGHAPAARYIRLR

SEQ ID NO: 45965 - DNA, 1446 bp, Unknown
  Obtained from environmental sample
  misc_feature (1)..(1446): n is a, c, g, or t
atgagcgaactgttatcacgatactgcccccggattgaatttgaaagctacgaggatttttacgccaattaccgctgtaacgtgccggatgattttaattttgcccgcgacgtggttgacgaatgggcgcggctgcatccggaaaaacccgcccttttgtggacggacgattccggggccatgaaatcttttacctttgccgacattaaacggctgtccgacaaggcggctaacgcgcttatcgcgcttggaataaaaaaaggcgacgtggcgatgctgatactcaaacagcggcctcttgtttgggtgatgatgtgcgcccttgaaaaaatcggagcggtctgcatacccggcacttatcagctgacggcgaaagatttggaataccgctgtaacatcgccgaggttaagctgctggtaacgattgacgacgcgggcctgttagctgacattgcctctgtgcgccccaaatgcgctaaactggaacacgttgccgtcctgcacgatatggaaaagcgtgtaggtacacgcggcgattacatagatctgcaggccgaaatagaaaaagcgggagaaaactttaagtaccttgcgacaaaaaccgaagagcccatgctgatatatttttcctccggcaccaccggaatgccgaagatggttctgcacaaccacagcctccctttggggcatatagttacggcaaaatactggcaatgcgtggaagacggcaaggttcacctgacccagaccgattcgggctgggcaaaattcgcctggggaaaaatttacggccagtggctctgcggcgccgccataggcgcctacgacacggaaaaatttaccccgcagggaatgttggacgcgttacagcggctgaagccaacgactttctgcgcccccgcgacggttttccgttatctgataaaagaggacctttccggttatgacttcagttttatccgccacacttcggtggcgggcgaacccctgagcccggaagtgtacaataaactaaaatcgttaacgggccttgaaatccacgaaggcttcggacagtctgaaacttctgtaatggcggcggcgttcaagtggtttcccgtaaggcccggctccatggggaagcccgcccccctgtttaagcttaatctgctggatgaagacggcggcgcctgcgacgacggcatgatcgggaacatgagcatcaccgcggcgggcaaaaacatgtacgagcttggatgcatggcgcctaacacggggcttcccctaatcggcccctcggaatttcccggccttttcaggggctactggaaagaccaggacagtaccggttcatcctggaacaacggaacttacaaaacaggcgacatggcatggcgcgacggcgacgggtatttgtggtttgtgggcaggaacgacgacgtaataaatgctccggttaccgcatag

SEQ ID NO: 45966 - protein, 481 aa, Unknown
  Obtained from environmental sample
  DOMAIN (65)...(481): AMP-binding enzyme
  misc_feature (1)..(481): Xaa is any amino acid
MSELLSRYCPRIEFESYEDFYANYRCNVPDDFNFARDVVDEWARLHPEKPALLWTDDSGAMKSFTFADIKRLSDKAANALIALGIKKGDVAMLILKQRPLVWVMMCALEKIGAVCIPGTYQLTAKDLEYRCNIAEVKLLVTIDDAGLLADIASVRPKCAKLEHVAVLHDMEKRVGTRGDYIDLQAEIEKAGENFKYLATKTEEPMLIYFSSGTTGMPKMVLHNHSLPLGHIVTAKYWQCVEDGKVHLTQTDSGWAKFAWGKIYGQWLCGAAIGAYDTEKFTPQGMLDALQRLKPTTFCAPATVFRYLIKEDLSGYDFSFIRHTSVAGEPLSPEVYNKLKSLTGLEIHEGFGQSETSVMAAAFKWFPVRPGSMGKPAPLFKLNLLDEDGGACDDGMIGNMSITAAGKNMYELGCMAPNTGLPLIGPSEFPGLFRGYWKDQDSTGSSWNNGTYKTGDMAWRDGDGYLWFVGRNDDVINAPVTA

SEQ ID NO: 45967 - DNA, 306 bp, Unknown
  Obtained from environmental sample
  misc_feature (1)..(306): n is a, c, g, or t
atgctccggttaccgcataggccccttcgagttgaaagcgcgttaatggaacacccgtccgtgcttgagtgcgccgtcaccgccgcccccgatcctatgcgcggtcaggttgtgaaggcaaccatcgttcttgcgcggggttacacagcctcggatgaattaatccgcgaattgcaaaatcatgtaaaacatgtaacagccccctacaaatatccgcgcatcattgaatttgtgcctgaattgccaaagacaatcagcggtaaaattcagcgcaacatgatacgaaaaaaagattttaaagattag

SEQ ID NO: 45968 - protein, 101 aa, Unknown
  Obtained from environmental sample
  misc_feature (1)..(101): Xaa is any amino acid
MLRLPHRPLRVESALMEHPSVLECAVTAAPDPMRGQVVKATIVLARGYTASDELIRELQNHVKHVTAPYKYPRIIEFVPELPKTISGKIQRNMIRKKDFKD

SEQ ID NO: 45969 - DNA, 900 bp, Unknown
  Obtained from environmental sample
  misc_feature (1)..(900): n is a, c, g, or t
atgaacgaaagcaatctgggggatctttcaaccggctcctgtccttcctgcggcgcggagctggtcggcgacaagaacaccattgccacggtctgtccctgctgcggaaacacccagatcatccagaaacggatacagggccttctaaagccggaatacgttattcctttccagctcgataaaaaagccgcaaaagaagccttaatgcgattttacaaggggaaaaagcttcttccgaatttgttcaggaacgaaaaccagatcgacagcatacagggtttgtatgttcccttctggctttttgacgccaaagcccagggcagcgtaagttacaaggcaaccagagtttcagcatggagcgacaatgaatacaactataccagaaccgattattactcggtgcaaagagaaggcagtttaggctttgagaaaatatcggtagacgggtcagaaaaaatgggtgacgactttatggactccattgagccttttgattacggcaagctgacagggtttcaaaccgcgtacctttccggctatattgccgaaaaatacgatgtcagtattgagaccagtaaagaaagggcaataaagagaatcaagaattccgtagagtccaggtttgcgtcatcagtaacaggttattcatcggttgttaaggaacgctccagcattagtgttgaaaacgccagagtggcatattccctctttccggtttgggttcttaacagcaagtataggaatgaacgctaccaattcataatgaacggtcagtccgggcttattgtaggcaagcttccagccgataaaggcaaggtttttaagtatatgatgatttatttgcttggattcggcacggctttttccctgattatcacgttattgcagatattcctgtaa

SEQ ID NO: 45970 - protein, 299 aa, Unknown
  Obtained from environmental sample
  misc_feature (1)..(299): Xaa is any amino acid
MNESNLGDLSTGSCPSCGAELVGDKNTIATVCPCCGNTQIIQKRIQGLLKPEYVIPFQLDKKAAKEALMRFYKGKKLLPNLFRNENQIDSIQGLYVPFWLFDAKAQGSVSYKATRVSAWSDNEYNYTRTDYYSVQREGSLGFEKISVDGSEKMGDDFMDSIEPFDYGKLTGFQTAYLSGYIAEKYDVSIETSKERAIKRIKNSVESRFASSVTGYSSVVKERSSISVENARVAYSLFPVWVLNSKYRNERYQFIMNGQSGLIVGKLPADKGKVFKYMMIYLLGFGTAFSLIITLLQIFL

SEQ ID NO: 45971 - DNA, 372 bp, Unknown
  Obtained from environmental sample
  misc_feature (1)..(372): n is a, c, g, or t
atgaaaatgaaaaataaattttttatgtttttactgaccgcgtcgtttttgttcctgtctttccccctttttgcccagcgccgtattattgacaatgcgggacttttaagcggcagtgaaatttccatgctcgaaagtctcgcggcaggaattgcttcaacctacaacttcgacctggttattgtaaccgaaacaggcattggcagcgcaagtccaatgaattacgcggatgactattttgattacaacggctacggccttggcagagaccgggatggctgtctttttttacaggtgaccggaacccgtgattaccggttcagcacgtctggccgcggcaaaaaagatattgaattccaccgcctattatga

SEQ ID NO: 45972 - protein, 123 aa, Unknown
  Obtained from environmental sample
  SIGNAL (1)...(25)
  misc_feature (1)..(123): Xaa is any amino acid
MKMKNKFFMFLLTASFLFLSFPLFAQRRIIDNAGLLSGSEISMLESLAAGIASTYNFDLVIVTETGIGSASPMNYADDYFDYNGYGLGRDRDGCLFLQVTGTRDYRFSTSGRGKKDIEFHRLL

SEQ ID NO: 45973 - DNA, 861 bp, Unknown
  Obtained from environmental sample
  misc_feature (1)..(861): n is a, c, g, or t
ttgacttgtggcgaggatataggtaattatttttacagggcaaccaatgttaaagaaaacgcgaaaaaaggacttaaccacatagcctccggctcctggaaacggctctacggcctctgggacaccgcccgcggcatggccggcctgctcttcgacaccgtctacgccgctttccgcaaggggcgcacgcccaacctctccctcatgagccagatcaaccgtcagatactatacaccggcgtggaggccttttggcttgtggggtctatcgccgtgctctgcgggagcgccataatactggtcgccatgttcaacatgcccaagatcggcgccggggagcatttcggcaagatactgatcatcaccgtggtgggcgagctcggcccgtttgtcacgtcgcttgtggtcgtggggcgttcgggcgcggcgcttgccacctacatagggacgatgcgcgtttcaagggaggtagacgcgttggaggtgatggggatcgaccccatacaattcatcgtgcagccggccttcgtgggtatcgtggcctccgtagtctgcctaaacctgtacttcatcaccatagcgatctgcggcgggctcgtcgtggcgtggctctcgacaggcgtgccgctggggatatctttcgacagggtgcttgacgcgctgcggttcaaggacgtcgccgtcagcctgctcaagagcgtcgcgtttgggacaattgtcgcgctcacgagttcatattacggtttgggcgtgcgcaacgtgcgcatggtgcctattgcggccataaacgcggtggtggggtctatgttcttcaccatcgcgatcaacctgctcctgagcttcggatactatgtcctctag

SEQ ID NO: 45974 - protein, 286 aa, Unknown
  Obtained from environmental sample
  DOMAIN (37)...(284): Domain of unknown function DUF140
  misc_feature (1)..(286): Xaa is any amino acid
MTCGEDIGNYFYRATNVKENAKKGLNHIASGSWKRLYGLWDTARGMAGLLFDTVYAAFRKGRTPNLSLMSQINRQILYTGVEAFWLVGSIAVLCGSAIILVAMFNMPKIGAGEHFGKILIITVVGELGPFVTSLVVVGRSGAALATYIGTMRVSREVDALEVMGIDPIQFIVQPAFVGIVASVVCLNLYFITIAICGGLVVAWLSTGVPLGISFDRVLDALRFKDVAVSLLKSVAFGTIVALTSSYYGLGVRNVRMVPIAAINAVVGSMFFTIAINLLLSFGYYVL

SEQ ID NO: 45975 - DNA, 729 bp, Unknown
  Obtained from environmental sample
  misc_feature (1)..(729): n is a, c, g, or t
atgtcctctaggctggaattgcgcaaagtgtcatatcggcacggggaaaatactatattggatggtgtggacctgaccctgccgccggggggcgttgccatcttgggcgggcgcagcgggtgcgggaaatcgacgttgcttgagatctgcgccggcttgaccaagccgcgcggcggcgttgttctgtgggacggcgacgatataaccggtatgtcgcgttacgagatgtacggccggcgcaagtctatgggctacgtttttcaggtgcacgcgttgatatcgaaccactccgccttcgacaatatcgcgttgccgctcaagtgcggcgcggcggatctgggttcagtgacgatagaaaagcgggtaaggtcgctgatggacgagctctgtattgcccgcggcattgaaaaaaagtttccagaggcgctctccgcggcgcagctcaagtgcgtagccgtggcgagggcgctgataagcgagccggcgttgctgatactcgacgagccgtttagcggcatagaccccgtcacggcgaaaatgatcgcgggcgtcctgcacggaaggtggaagacgggcggcatgagcgtcctgatggcgtcgcactcgctcgacgcctggcccgagcacggggcgcagcgccttatgctgagcggcgggcgcttggaaccggcggatacgggcgtttaccaaagtacgcaatttgaggcgcatccggagacacggccatga

SEQ ID NO: 45976 - protein, 242 aa, Unknown
  Obtained from environmental sample
  DOMAIN (30)...(219): ABC transporter
  misc_feature (1)..(242): Xaa is any amino acid
MSSRLELRKVSYRHGENTILDGVDLTLPPGGVAILGGRSGCGKSTLLEICAGLTKPRGGVVLWDGDDITGMSRYEMYGRRKSMGYVFQVHALISNHSAFDNIALPLKCGAADLGSVTIEKRVRSLMDELCIARGIEKKFPEALSAAQLKCVAVARALISEPALLILDEPFSGIDPVTAKMIAGVLHGRWKTGGMSVLMASHSLDAWPEHGAQRLMLSGGRLEPADTGVYQSTQFEAHPETRP

SEQ ID NO: 45977 - DNA, 516 bp, Unknown
  Obtained from environmental sample
  misc_feature (1)..(516): n is a, c, g, or t
atgtggaactcgccagccgccttcgaggggcttacgccctttgacgacgacaacgtgatctacagcgtgcatttttacgagccgctgctttttacccaccagaacgctccctggatcgacagtccggaaattaagatggcgaggtcctacccgggcgattacggccccggcattgtccgcaaatacggctttccgcattcagccggcgtctggaacaaggatcggctcgcgaaggaattcgcgccggtgaacgcgttcaggaaaaagtacaaagcgcgtgttatctgtaacgaattcggcgtttacgcgcccgtcgagcttgaatcgcagcttcgctggtatgaggatctcctctctgttctcagggagatggatataggtttttcctactggaactataaaaatctggactttggaataatttccataggggagaagctgcacgaaaaccttctgcagtatgacaacagcgacaggataaaccaccatctgcttaacgtgttaaagaagtattaa

SEQ ID NO: 45978 - protein, 171 aa, Unknown
  Obtained from environmental sample
  misc_feature (1)..(171): Xaa is any amino acid
MWNSPAAFEGLTPFDDDNVIYSVHFYEPLLFTHQNAPWIDSPEIKMARSYPGDYGPGIVRKYGFPHSAGVWNKDRLAKEFAPVNAFRKKYKARVICNEFGVYAPVELESQLRWYEDLLSVLREMDIGFSYWNYKNLDFGIISIGEKLHENLLQYDNSDRINHHLLNVLKKY

SEQ ID NO: 45979 - DNA, 507 bp, Unknown
  Obtained from environmental sample
  misc_feature (1)..(507): n is a, c, g, or t
atggagtttcctaaaaaaaaagtttatatagaaactactatacctagcgttattactgctaggtcaagcagggatattataaacgcctaccgacaagacataacgaaattcttttgggaaaatgaatgccaaaaatacgacttgtatataagtgaatatgtttgggaagaatgcgaaaaaggcgataaagacgcagcgaaaagaagattagaattaattaaagacattccatttctgcctacaagcaaggaagttgaagaacttgcagaagaatattttaaatatttgaacattccgcaaaaggctaaaacagattgtttccatttggcaattagcgtaattaaaaaaatggactatctcataagttggaatatgactcatttgggagaacgttattttaatgaagttacagtattcaactataaaaataatttatggctacctaggatgcatactcctgatgctgtaatggaaattgaaaaagaggaggcacaaaatggagtataa

SEQ ID NO: 45980 - protein, 168 aa, Unknown
  Obtained from environmental sample
  misc_feature (1)..(168): Xaa is any amino acid
MEFPKKKVYIETTIPSVITARSSRDIINAYRQDITKFFWENECQKYDLYISEYVWEECEKGDKDAAKRRLELIKDIPFLPTSKEVEELAEEYFKYLNIPQKAKTDCFHLAISVIKKMDYLISWNMTHLGERYFNEVTVFNYKNNLWLPRMHTPDAVMEIEKEEAQNGV

SEQ ID NO: 45981 - DNA, 1308 bp, Unknown
  Obtained from environmental sample
  misc_feature (1)..(1308): n is a, c, g, or t
ttgacgcagcttatctggaaagcaaacggaaataaaaaaataatttgttgcggttttgtagcgtcctgtttggtaggatataataaaggagttattatgcccgctgaatttcagcccgttacagtacacctgaaaaaagacgcgtatatctttgtggaaggaaaacaacacgctgacaaattttatattatcaaacatggcagcgtgcggattatccgcgaagcgttaaccgatgaaaaagggggcgtgttaggtcccggagaaatgtttggtctgatttccacaatggcggcgcacggttatattgaatcggcgatagccgcgacagatgtcgacttgatggcggttgaacggaaacaatacggaagccttatccgtaaagtcaattccgtcgccgtcaacagcataaagtctttctcacaaaggctgcgggaattggatatcgccctctcacagcggactttaaaaaacacagcgtcagccgatccttcgcacataattcaaataggcgattattataaaaactcaggcaaactgacatcggcgttgtacgcgtacaaccaataccttgcccttcgccctgatgcgccgaatacggacgatattaaggcgaaaatcgccgaaatgaaaaaaaccgctatcggatcaaggacggaatacccgcctgacaaaatgatacagaaatatccgaaagaacacctactttttgccgaaggcgaacccgggcatactatgtatatcattcaggacggctcggtaaaaataacaaaaattgttgacaataaagaaattatcctcgctgttcttggcaaaggcgatattttcggcgaaatggcgctgttggaagacaagccccgcgccgctaccgccgaagtttacgaagacagcacattattggcggtcaacagtgagaatttttcaaacctcataaaggatcagagcgatatggtagtccgcatggcaaccttaatgtctgaacgcatttggctgctctaccgccagcttgacaacacgttcatagaaaatccattagggcgcgtttatgacgccctgcttatccagcttgaaaaaaaccgggttaacattaacagccgcgattcgtatgaatgcggcttcggcattaaggaattaatgggtatggcgggtatgcccgaatccgaaaataaataccttgaacgcacaatcatcaatgacggaaaactgaccgttaaagacgataaaatccagatagacaaaatctcggacatactaaaagaatccgaattctaccgcaaggcgcaaaaattagccgaaaacaggaaaaagtaa

SEQ ID NO: 45982 - protein, 435 aa, Unknown
  Obtained from environmental sample
  DOMAIN (41)...(130): Cyclic nucleotide-binding domain
  misc_feature (1)..(435): Xaa is any amino acid
MTQLIWKANGNKKIICCGFVASCLVGYNKGVIMPAEFQPVTVHLKKDAYIFVEGKQHADKFYIIKHGSVRIIREALTDEKGGVLGPGEMFGLISTMAAHGYIESAIAATDVDLMAVERKQYGSLIRKVNSVAVNSIKSFSQRLRELDIALSQRTLKNTASADPSHIIQIGDYYKNSGKLTSALYAYNQYLALRPDAPNTDDIKAKIAEMKKTAIGSRTEYPPDKMIQKYPKEHLLFAEGEPGHTMYIIQDGSVKITKIVDNKEIILAVLGKGDIFGEMALLEDKPRAATAEVYEDSTLLAVNSENFSNLIKDQSDMVVRMATLMSERIWLLYRQLDNTFIENPLGRVYDALLIQLEKNRVNINSRDSYECGFGIKELMGMAGMPESENKYLERTIINDGKLTVKDDKIQIDKISDILKESEFYRKAQKLAENRKK

SEQ ID NO: 45983 - DNA, 582 bp, Unknown
  Obtained from environmental sample
  misc_feature (1)..(582): n is a, c, g, or t
gtgcgtaatatcctgggttttaccggaacctataagggcaaaaaggtctcggttcaggggaccgggatgggaatcccttccatttcgatttatgtaaatgagctgtttcgggattatggggtaaagcgggcgatacgaatcgggaccgccggttccattcagaaggatgtgaaaattcgggacctggtgcttgccatgtccgcctgcaccgattccggtgccaataacatccgttttggcggcaggaattacgcccccacggcttctttcggcttgctcaaaaccgcgtgggacatagccgtatcaaaaggctggcagccaaaagcgggccctgttgtctctgctgacatgttctataccgaagaccccgaggaatggaaactatgggcgcggttcggctgccttgccctggaaatggaatgtgccgagctgtataccctggccgccaaatacggccgcgaagctctgggtatcatgactgtttccgacagcctgattacccatgaagagaccacctctgaagaacggcaaaccacttttacccgaatgatggaagtggctctggaaacggcgattagttaa

SEQ ID NO: 45984 - protein, 193 aa, Unknown
  Obtained from environmental sample
  DOMAIN (1)...(191): Phosphorylase family
  misc_feature (1)..(193): Xaa is any amino acid
MRNILGFTGTYKGKKVSVQGTGMGIPSISIYVNELFRDYGVKRAIRIGTAGSIQKDVKIRDLVLAMSACTDSGANNIRFGGRNYAPTASFGLLKTAWDIAVSKGWQPKAGPVVSADMFYTEDPEEWKLWARFGCLALEMECAELYTLAAKYGREALGIMTVSDSLITHEETTSEERQTTFTRMMEVALETAIS

SEQ ID NO: 45985 - DNA, 1053 bp, Unknown
  Obtained from environmental sample
  misc_feature (1)..(1053): n is a, c, g, or t
gtgaccgcgtatttagttctggcaaatggaataataatggaaggcatctcctttggcgcccagggcgaagttaccggggaagttgtgttcgccaccggcatgaccggatacctcgaaactctgaccgaccccagttattacgggcaaatcgtccttcagacatttcccctgattggaaattacggcattatcccatctgattttgaaagcaccgtcgtcggggcaagcgcctatattgtaaagtatccgtgccagaacccctccaatttccgaagcgagggcaaccttgatactttcttaaaagagcgcggcattatcggattatgcgggatcgatacgagggcgcttaccagaatcatccgggaaaacggcgtgatgaacggtaaaattaccgcggctcgtccgacagacgctgacatttcagaagtaagggcatattccatcagtaatgccgtgtccgctgtttcttcccgcgctgtcacaaaaattttacccgatcccttgcggacggccaggcgcgtggccctcctagattttggagcgaagcgcggtatagcggaagcgttggctgcgcggggctgcgaggtatggtcgttcccccatgacaccggcgctcaggagttactgcaaatgaagccggatgggatcatgctgagtaacggccccggagacccggcagaaagcgccaacattagaatcatcgaaacgctccgtattctgcaggggagcaatgtgcctattttcggcatttgcctgggccatcaactgctggcgctggcaaacggctattcgacgcanaaactcaaatttggtcaccggggaaccaatcagccagtaatggagctttcaaccgggcgcgtgtacatcaccagccaaaaccacggctatgcggttgtagcagataacggctcatttgtgaacgtaaatgacggtacctgcgagggaatggattancggaattcgttttccgtgcagtttcacccggaagcgcgcggcgggccgctggatacggcttttctgttcgaccggttcatgagagggatgggcaaatga

SEQ ID NO: 45986 - protein, 350 aa, Unknown
  Obtained from environmental sample
  DOMAIN (159)...(329): Peptidase C26
  misc_feature (1)..(350): Xaa is any amino acid
MTAYLVLANGIIMEGISFGAQGEVTGEVVFATGMTGYLETLTDPSYYGQIVLQTFPLIGNYGIIPSDFESTVVGASAYIVKYPCQNPSNFRSEGNLDTFLKERGIIGLCGIDTRALTRIIRENGVMNGKITAARPTDADISEVRAYSISNAVSAVSSRAVTKILPDPLRTARRVALLDFGAKRGIAEALAARGCEVWSFPHDTGAQELLQMKPDGIMLSNGPGDPAESANIRIIETLRILQGSNVPIFGICLGHQLLALANGYSTXKLKFGHRGTNQPVMELSTGRVYITSQNHGYAVVADNGSFVNVNDGTCEGMDXRNSFSVQFHPEARGGPLDTAFLFDRFMRGMGK

SEQ ID NO: 45987 - DNA, 843 bp, Unknown
  Obtained from environmental sample
  misc_feature (1)..(843): n is a, c, g, or t
atgaatttaacgcaagacaatgtcgtcgcttactttcagcctattctttccgccgagacaaccgacatatacgcctatgaggttntgggccgttatctggacgatgacggaaaagcgcagtctttaggccctttttttaccaaccccgatacttcgcatgaagaggctctgagagtggacagaatagtaagaagatacgccatgaaaaaatacgctgaggaaaagcgaaacgaatatctgtttatcaatatcagattggcatggcttttaccctttattgaaaaccccgaagatatggtaactttgcagctggcaaaagaattcggcatcgctcccgagaaactggttatagaaattacagaagaagattttaattcaaaaggggaatatctccgcgccatagtccactataaaaaagcgggctgccgcatcgcgcttgacgattacggaaaggaagccagcaatatagacaggcttgcaaaacttcagcccgacataataaaaatcaatattgattatatccataacggtgaaacatcttatcattatcgcgagtatttacgggctattgccgctttcgccgattccgtaggcatcgaaattttgtgtgaagggatagagacggagcgtcagcttgatatttgcatttcctcaaaaggaaggttttttcaggggtttttatttgccgtccctcaggcgtccatgcgcgatacggataccaacatgtctgttttttccacgtcaatcgcagccgcttattcggcaatacaaaccaacgcggccaatgtggaatccctgaaaaattcttttgatttctgtgagcgtctcggccgtcgtcgataa

SEQ ID NO: 45988 - protein, 280 aa, Unknown
  Obtained from environmental sample
  DOMAIN (2)...(231): EAL domain
  misc_feature (1)..(280): Xaa is any amino acid
MNLTQDNVVAYFQPILSAETTDIYAYEVXGRYLDDDGKAQSLGPFFTNPDTSHEEALRVDRIVRRYAMKKYAEEKRNEYLFINIRLAWLLPFIENPEDMVTLQLAKEFGIAPEKLVIEITEEDFNSKGEYLRAIVHYKKAGCRIALDDYGKEASNIDRLAKLQPDIIKINIDYIHNGETSYHYREYLRAIAAFADSVGIEILCEGIETERQLDICISSKGRFFQGFLFAVPQASMRDTDTNMSVFSTSIAAAYSAIQTNAANVESLKNSFDFCERLGRRR

SEQ ID NO: 45989 - DNA, 1479 bp, Unknown
  Obtained from environmental sample
  misc_feature (1)..(1479): n is a, c, g, or t
atgtcgcctctcgccgcgcagcctgccgccggttcccttcaggccgcggtagacgggctgattaagtcgcgcaagtacaataccgcggggctgggcgttgtggtcaaagacctcacgaacgactccgtcgtcgtcgcggtgaatccggacatgcccatgaatccggcctccgtgcagaagctcatcacgggagcggcggcgttcgaacttttggggcctacttacacgttcgccaccaaaatctacatcgacggcccgtttcaggccgattcggggataatagacggcagcatctacatacggggcgccggcgagccgggaatcaatccggagaagctgtggcttatcgtccagcatctgcgccaccgcggggtgcggaagattacgggcaacatcgtaatcgacgactacttcttcgacgaggtggccgtggggcccggcttctccgaggaggagagccgctcctaccagtcgctgataagcgctctgccggtgagctacagctccatctccatacaccaccgaccgggacatcaggtggggtcgccggtctttgtggacatcttccccaaaatcgaggggatcaagatcaactccacggccaccaccgtcgcgggggcgagggggcacatagaggtctcaacctcgtttcagaacggtgtgacgcaggtgaatataaggggaaccatgggtatagacgagccgcccggatacgcctaccgccgccaatggcaatcgtgggagtcattcgggggggcgttccgcgccatgtgcgcggaaaacggcataaagatagcgggggaagaccgtacggcagaggacgccggacatcctgacgtccaaggcgccgttctacctgtacggcggcgacccgctcacggagttcgtcaacacatgttcaagtggtcgagcaacttcatcgccgagatgctcttcaagacgatgggcgcggagaagatgggcgatccggggacttggcccaagggcgcggcggcggtgggcgcgtggtgggagtctaggaagctgccgggcaaaccgcagataataaacggttcgggcatgggcggcgagcggtcgtcgctgccgcggagcgacatcgccgacgaagattcgtccggcgctccgccgaagaacgataaccgagtcagcccggcgcagatcgtagaactcttggcctatgtgtcaaagcagaagaactactaccccgactacgcggcctcgctctcctcggcgggcgtggacgggacgctacgctcgcgcttccaacgatctaagctcaaggggatagtcagggcgaagacggggacgctcaactcggtgaaggtcagcacgctggccgggtacatgtttcttgataacaagacctacgctttcgcggttttctgcaagaacgtagggcccaatcagtacgataactggataatgcaggagcagatattggaggctgtggcgagaaacacggggtacggcggctggtag

SEQ ID NO: 45990 - protein, 492 aa, Unknown
  Obtained from environmental sample
  DOMAIN (55)...(464): D-Ala-D-Ala carboxypeptidase 3 (S13) family
  misc_feature (1)..(492): Xaa is any amino acid
MSPLAAQPAAGSLQAAVDGLIKSRKYNTAGLGVVVKDLTNDSVVVAVNPDMPMNPASVQKLITGAAAFELLGPTYTFATKIYIDGPFQADSGIIDGSIYIRGAGEPGINPEKLWLIVQHLRHRGVRKITGNIVIDDYFFDEVAVGPGFSEEESRSYQSLISALPVSYSSISIHHRPGHQVGSPVFVDIFPKIEGIKINSTATTVAGARGHIEVSTSFQNGVTQVNIRGTMGIDEPPGYAYRRQWQSWESFGGAFRAMCAENGIKIAGEDRTAEDAGHPDVQGAVLPVRRRPAHGVRQHMFKWSSNFIAEMLFKTMGAEKMGDPGTWPKGAAAVGAWWESRKLPGKPQIINGSGMGGERSSLPRSDIADEDSSGAPPKNDNRVSPAQIVELLAYVSKQKNYYPDYAASLSSAGVDGTLRSRFQRSKLKGIVRAKTGTLNSVKVSTLAGYMFLDNKTYAFAVFCKNVGPNQYDNWIMQEQILEAVARNTGYGGW

SEQ ID NO: 45991 - DNA, 906 bp, Unknown
  Obtained from environmental sample
  misc_feature (1)..(906): n is a, c, g, or t
gtgggttttttctccgacgctgtttccctggtctggcttttctccgggcttcttctcctgcctgttatcgccgctgacggcctggcgcttttcttcttcgccgacactcttgcagtaaagcgcgatgttccgtcctcgctggcacaagggcaaaggttcaccgtaaagctcgaaatcaggcgcggggaaaaaggtttcctccctttcaggattcggctttgggatctgcacccccagtccatggactgcgaagcgtttcccgcgcttgtgagcagaagccttcttataggcgaaaaaagcgaggctccgttaattcttgagtattgccttttgccgaaggaacggggactatggtttttcagggggacagagctgcttttttcgtctgtttgcggattttggcggcttaaagtcttccacccctgcgaaagctcagggcgcacctacccggattttaagatgataaaggccaaagcggggacagacctccggggtctgctggaacgtaacggccaaaaaaatatccgtatgcgcgggcaggggctggaattcaggagccttagggaataccaggaaggcgattcaatccgcgaggtagactggcgggccacgagccggaggagaaaggtaatagtcagggagtaccaggaagagcaggatcagcaggtgctatttctgctggattcgggctaccggctccacaggagcgaagaagacgggcggacgcatgagatgcatacgcagtttgacagcgccctcgaagcggttctgctcctttcgtgggtaagccttaagcacggggacagcgttgcggttgggtgctttggccccatcaagcgctggctggggccgcgaaagggcataagcgcctttccccctgctatgaaacggctgtatgacctgtaa

SEQ ID NO: 45992 - protein, 301 aa, Unknown
  Obtained from environmental sample
  SIGNAL (1)...(24)
  DOMAIN (113)...(218): Protein of unknown function DUF58
  misc_feature (1)..(301): Xaa is any amino acid
MGFFSDAVSLVWLFSGLLLLPVIAADGLALFFFADTLAVKRDVPSSLAQGQRFTVKLEIRRGEKGFLPFRIRLWDLHPQSMDCEAFPALVSRSLLIGEKSEAPLILEYCLLPKERGLWFFRGTELLFSSVCGFWRLKVFHPCESSGRTYPDFKMIKAKAGTDLRGLLERNGQKNIRMRGQGLEFRSLREYQEGDSIREVDWRATSRRRKVIVREYQEEQDQQVLFLLDSGYRLHRSEEDGRTHEMHTQFDSALEAVLLLSWVSLKHGDSVAVGCFGPIKRWLGPRKGISAFPPAMKRLYDL

SEQ ID NO: 45993 - DNA, 354 bp, Unknown
  Obtained from environmental sample
  misc_feature (1)..(354): n is a, c, g, or t
ttggaggacgcgctccttcgcttaaaacggcggacttttatcatccttatcagcaacttccacgaggaggacgaccggtctctctcctggattcttaagcgcgttgaaaagcggcatcttctcttaatggtaagtttaagggaaaaagagtcagaatcccttgctttaaggcatccgaaggggggcgaggaggcgcttgaaaccgccgcagcctttgcgtacctggcgaccagaaggaaattgtacgcttcgtgggaacattcgggccttttaacgctggagacttccgccgcctccctttcagcggcgctggtgaaccgctatcttatggtaaagcgttccgggcggttttag

SEQ ID NO: 45994 - protein, 117 aa, Unknown
  Obtained from environmental sample
  misc_feature (1)..(117): Xaa is any amino acid
MEDALLRLKRRTFIILISNFHEEDDRSLSWILKRVEKRHLLLMVSLREKESESLALRHPKGGEEALETAAAFAYLATRRKLYASWEHSGLLTLETSAASLSAALVNRYLMVKRSGRF

SEQ ID NO: 45995 - DNA, 720 bp, Unknown
  Obtained from environmental sample
  misc_feature (1)..(720): n is a, c, g, or t
atgagttggatcttatactatttcggtctcctgcatgggttaatcgcgctgccgcttgtgtttaagacaaagacctattacgaggacggtaacagacaaaacgggcggcttaagggcggaaccataattatttcaaaccaccgttcctttatggaccctattgttatagcgctcaggtttttctttcataaactgcattttataatcgccgattattataaggacaaacggaaagcggcaaaatttatgatgaaaactttgggaggaattcttgtagatatggagggacaaagccttgattttatcgaaaagagcaggcggataaccgcaaagggcggcgccattttgatgtttcccgagggtgactttaagtttacgtacgagccccaaaagttttccgcgggatacataatgcttgccgtcaagacggaagcgaaaattctcccgattgtcaatgattttaattacgggctttttaggcgggtgcacttaatgatagggaacggtatagatttgtcgcgctacaaaggcgaagagttgactaaagcgaaattaaaagagattaacgacgagataagcgggaaatatatgatgcttttttacaaattaaaaagaaaaaaggcggagaggttttccaataaatacgaatttattcgccgaaaaagtgcgatgttatccgcatttctgccggttctcgctaccattacggcgtatatctaa

SEQ ID NO: 45996 - protein, 239 aa, Unknown
  Obtained from environmental sample
  DOMAIN (23)...(153): Acyltransferase
  misc_feature (1)..(239): Xaa is any amino acid
MSWILYYFGLLHGLIALPLVFKTKTYYEDGNRQNGRLKGGTIIISNHRSFMDPIVIALRFFFHKLHFIIADYYKDKRKAAKFMMKTLGGILVDMEGQSLDFIEKSRRITAKGGAILMFPEGDFKFTYEPQKFSAGYIMLAVKTEAKILPIVNDFNYGLFRRVHLMIGNGIDLSRYKGEELTKAKLKEINDEISGKYMMLFYKLKRKKAERFSNKYEFIRRKSAMLSAFLPVLATITAYI

SEQ ID NO: 45997 - DNA, 825 bp, Unknown
  Obtained from environmental sample
  misc_feature (1)..(825): n is a, c, g, or t
atggcaaaacagttattgtttaacgaagatgcccggcgcaaactgcttgccggcgtagagcaaatttcaaaagccgttaaggtaacgctcggtcccaaggggcgcaatgtccttctggacaaaaaattcggcgcgcccacagtaaccaaagacggcgtttccgtggcgaaagaggtagaacttgccgacccgtacgaaaacatgggagcgcaattactgaaagaagtcgccaccaagacaaacgatgtcgccggagacggaacaacgacagcgacagttctggcgtattcattggtaaaagaggggcttaaatccgtcgccgcagggatgactcccatcgagcttaaacgaggtatcgacaaagcggtggaaatcgccgtcgaggaaatcaagaaaaactccaaagatattaaggataaggaagaaatctctcacgtcgcctcggtttccgccaacaacgacagcgaaatcggaaacacaatcgccgacgcaatggaaaaagtcggcaaagacggagttatcactgttgaagaatccaaaacgatggatacttctatagaattcgtcgaaggtatgcagtttgatcgcggttacatttccgcttatttcgtaaccgaccgtgacacaatgacaagcgtttacgaagatgttttcattcttattcacgacaagaaaatttccagcatgaaggatatgcttcccttactggaaaaagtcgctcagagcggcaagcccttgctcatcatcgccgaagactgcgacggcgaagctcttttcactttggttgtaaacagtctgagaggacattacgcacctgcgccgtaa

SEQ ID NO: 45998 - protein, 274 aa, Unknown
  Obtained from environmental sample
  DOMAIN (22)...(274): TCP-1/cpn60 chaperonin family
  misc_feature (1)..(274): Xaa is any amino acid
MAKQLLFNEDARRKLLAGVEQISKAVKVTLGPKGRNVLLDKKFGAPTVTKDGVSVAKEVELADPYENMGAQLLKEVATKTNDVAGDGTTTATVLAYSLVKEGLKSVAAGMTPIELKRGIDKAVEIAVEEIKKNSKDIKDKEEISHVASVSANNDSEIGNTIADAMEKVGKDGVITVEESKTMDTSIEFVEGMQFDRGYISAYFVTDRDTMTSVYEDVFILIHDKKISSMKDMLPLLEKVAQSGKPLLIIAEDCDGEALFTLVVNSLRGHYAPAP

SEQ ID NO: 45999 - DNA, 786 bp, Unknown
  Obtained from environmental sample
  misc_feature (1)..(786): n is a, c, g, or t
atgctggaagacatcgccattcttacgggcggcgaagttatctccgaagaaatcggacttaaacttgagaacaccgatatttcacagctcggcaaggcgaagaccgtaaaagttgacaaagacaacacaacgattatcaacggttcaggcaagcagaaagacattcaggacagaattgcgcagattaaagcgcagattgaagatacaacgagcgactacgaccgcgaaaaattgcaggaacgtcttgcgaaactcgccggcggcgttgcggtaatcaatgtcggcgcggctacagaagtcgagttaaaagaaaagaaacaccgcgtagaagacgctctttcggcgacacgcgccgctattgaggaaggcattgtccccggcggcgagattgcgctcattcaagcggctcttgcgttagacaaggcggacactgaaactctcaccgacgacgaaaaagtcggctttaaaattgtaaaacgcgctcttgaagagccgcttcgccagattgccgaaaacgccggacttgacggcgctgttatttccgagagagcgaagaacgaaaagaagggcgtaggttttgacgccgccaaaatggaatgggttgatatggtgaaagccggtatcatagaccctgcgaaagtaacacgctcggcgctgcagaacgcggcgtcgattgcgagtttgctcctcaccaccgaatgcgccattacggatattcccgaaaagaaggaagctcccgcaatgcccggcggaggaatgggcggcatgggcggaatggattattag

SEQ ID NO: 46000 - protein, 261 aa, Unknown
  Obtained from environmental sample
  DOMAIN (1)...(240): TCP-1/cpn60 chaperonin family
  misc_feature (1)..(261): Xaa is any amino acid
MLEDIAILTGGEVISEEIGLKLENTDISQLGKAKTVKVDKDNTTIINGSGKQKDIQDRIAQIKAQIEDTTSDYDREKLQERLAKLAGGVAVINVGAATEVELKEKKHRVEDALSATRAAIEEGIVPGGEIALIQAALALDKADTETLTDDEKVGFKIVKRALEEPLRQIAENAGLDGAVISERAKNEKKGVGFDAAKMEWVDMVKAGIIDPAKVTRSALQNAASIASLLLTTECAITDIPEKKEAPAMPGGGMGGMGGMDY

SEQ ID NO: 46001 - DNA, 819 bp, Unknown
  Obtained from environmental sample
  misc_feature (1)..(819): n is a, c, g, or t
ttgtttatatgctgccgttcctgctgtataataataaattcttcaaagccgtctcttaaaatcataatggacccgcttgcgtttccggagaatccgtctcagtttataaccaatattaaattggttcttgaaagctccaacgtccgttatgtgtcatcattcttttcaacgttaataataacggtggtttccgtcggacttcttgtactgatttcttcaatggcggcgtgggtgcttgtacgcacaaaaacaaagctgtcaaacgcggtttttatggtatttgtcgcggctatggtaattccgtttcaggttgtaatgtttccgctgattagctggtttcatcttttggaagtaaaactcgggctttttgaaactcccttccggctgctgcaaaattatccgggaattatttttgcgtacctcggttttggatcgtcgctttccatattcctcttccacgggtttatcaaatccgttccgcttgagcttgaggaagcggctaccattgacggctgtacaaaaccggaaacattttttaagattgttttcccgatactcaccccaatcgccgttacggtaatgatcttaaacggcatgtggatttggaacgattatcttctgcccttgctggtgctcggttccggcaacgcagtgcggacgctgccgctggctgtggctggttttgtcggctcgtttgtcaagaagtgggatttaatccttacagcgacattaatgacgatgctgccgattgttatcgtgttcctgatactgcaaaaacacattattaagggtatggttgaaggatcggttaaaggataa

SEQ ID NO: 46002 - protein, 272 aa, Unknown
  Obtained from environmental sample
  DOMAIN (50)...(267): Binding-protein-dependent transport system inner membrane component
  misc_feature (1)..(272): Xaa is any amino acid
MFICCRSCCIIINSSKPSLKIIMDPLAFPENPSQFITNIKLVLESSNVRYVSSFFSTLIITVVSVGLLVLISSMAAWVLVRTKTKLSNAVFMVFVAAMVIPFQVVMFPLISWFHLLEVKLGLFETPFRLLQNYPGIIFAYLGFGSSLSIFLFHGFIKSVPLELEEAATIDGCTKPETFFKIVFPILTPIAVTVMILNGMWIWNDYLLPLLVLGSGNAVRTLPLAVAGFVGSFVKKWDLILTATLMTMLPIVIVFLILQKHIIKGMVEGSVKG

SEQ ID NO: 46003 - DNA, 711 bp, Unknown
  Obtained from environmental sample
  misc_feature (1)..(711): n is a, c, g, or t
gtgaaggaaagccaaaacatggatctttcaacgcaactcttaatgaagattgcggaagagctatcgtcaataaggagcgaattaagcacgctcaaaaaggagttttcagggctcagaacagttgcgatacctaaagccgaaggcaaagagaaagacttcatcgaagaagaagacgatgaaaaaatttccctcaccggcgatgaattgaataatatcctgaataccgcggattttaccgaagaagccggctcggacgcggcttcggcaatctcagatgaagaagatgattctgaagatctaagccttagcaccgcagatttggatatggaaattgatttaattgatacaaatctggaaaaccttgaaggtgtaacaaaacttggaaactcttcttcagttggcattgcgaacttatcaaactctgcagactctgcaatttctggagaagacatccaaattcaatccgacattgaaataccgtccgacattgccatgtcggatgattccataattgactttagctcagatgcaactgacgagctaaacgaaatccgcgaaaacggcgttgagcccatggtcgtcgctcctcctcctgaggacacaaattatcttgccgaagatccactggcggaaaatatcgatagtgaggatctcccccaggaattgtcggaagaaaacgccgacgaaggcattgatctttccaagcggtaa

SEQ ID NO: 46004 - protein, 236 aa, Unknown
  Obtained from environmental sample
  misc_feature (1)..(236): Xaa is any amino acid
MKESQNMDLSTQLLMKIAEELSSIRSELSTLKKEFSGLRTVAIPKAEGKEKDFIEEEDDEKISLTGDELNNILNTADFTEEAGSDAASAISDEEDDSEDLSLSTADLDMEIDLIDTNLENLEGVTKLGNSSSVGIANLSNSADSAISGEDIQIQSDIEIPSDIAMSDDSIIDFSSDATDELNEIRENGVEPMVVAPPPEDTNYLAEDPLAENIDSEDLPQELSEENADEGIDLSKR

SEQ ID NO: 46005 - DNA, 699 bp, Unknown
  Obtained from environmental sample
  misc_feature (1)..(699): n is a, c, g, or t
ttggcggcaggcgcttcaggaataaccgaggcgcttttttcaggagtaactgcggcactttttttaggtattgatattaacctctcgattccctcaattgcctctacgtcttctgcttttacttttacttcttccggtatttcctcaagcgttgcttccggtatttcctcgatcaattcttctgccagttcttctgcctgtacttcctcgatcggttcttccatcggtatttccgccggtatttcctcaagcgttgcttccggcatttgcgcgactgcttcttccggtatttcttctgctatttcatcgagttcattaagctcatcgaggcttatccctttctcgagaatctcgtcgagctcatcttctttcgcggaaaggtcttcggccgaatccatttctaacgaatttaaatccgaaagatccaaactaacggatatatcttcaagagaaggttcttcaagggggttatcatgtatttccaaagaaagatccggctcgtcaattaccgcttggaaagatcaatgccttcgtcggcgttttcttccgacaattcctgggggagatcctcactatcgatattttccgccagtggatcttcggcaagataatttgtgtcctcaggaggaggagcgacgaccatgggctcaacgccgttttcgcggatttcgtttagctcgtcagttgcatctgagctaa

SEQ ID NO: 46006 - protein, 232 aa, Unknown
  Obtained from environmental sample
  misc_feature (1)..(232): Xaa is any amino acid
MAAGASGITEALFSGVTAALFLGIDINLSIPSIASTSSAFTFTSSGISSSVASGISSINSSASSSACTSSIGSSIGISAGISSSVASGICATASSGISSAISSSSLSSSRLIPFSRISSSSSSFAERSSAESISNEFKSERSKLTDISSREGSSRGLSCISKERSGSSITAWKDQCLRRRFLPTIPGGDPHYRYFPPVDLRQDNLCPQEEERRPWAQRRFRGFRLARQLHLS

SEQ ID NO: 46007 - DNA, 669 bp, Unknown
  Obtained from environmental sample
  misc_feature (1)..(669): n is a, c, g, or t
ttggaaatacatgataacccccttgaagaaccttctcttgaagatatatccgttagtttggatctttcggatttaaattcgttagaaatggattcggccgaagacctttccgcgaaagaagatgagctcgacgagattctcgagaaagggataagcctcgatgagcttaatgaactcgatgaaatagcagaagaaataccggaagaagcagtcgcgcaaatgccggaagcaacgcttgaggaaataccggcggaaataccgatggaagaaccgatcgaggaagtacaggcagaagaactggcagaagaattgatcgaggaaataccggaagcaacgcttgaggaaataccggaagaagtaaaagtaaaagcagaagacgtagaggcaattgagggaatcgagaggttaatatcaatacctaaaaaaagtgccgcagttactcctgaaaaaagcgcctcggttattcctgaagcgcctgccgccaaagatcaaacttccaggcaggaaatttccggaattcctgaaaacctgaaaacagagttaaagactgtgctttcttacatggatcagcttcttgaagcccttcctgacgaaaagatagaagaatttgccaaatccgattactacgatacctataaaaagttattcaaagaattggggcttgcctga

SEQ ID NO: 46008 - protein, 222 aa, Unknown
  Obtained from environmental sample
  misc_feature (1)..(222): Xaa is any amino acid
MEIHDNPLEEPSLEDISVSLDLSDLNSLEMDSAEDLSAKEDELDEILEKGISLDELNELDEIAEEIPEEAVAQMPEATLEEIPAEIPMEEPIEEVQAEELAEELIEEIPEATLEEIPEEVKVKAEDVEAIEGIERLISIPKKSAAVTPEKSASVIPEAPAAKDQTSRQEISGIPENLKTELKTVLSYMDQLLEALPDEKIEEFAKSDYYDTYKKLFKELGLA

SEQ ID NO: 46009 - DNA, 807 bp, Unknown
  Obtained from environmental sample
  misc_feature (1)..(807): n is a, c, g, or t
ttgattaatgactaccgcgaggtaggcttggtgcagaaactttctcctgtcttaagttggtctcatttntgcgaaataatgcgaattaaaaatgaaaaagctcgcatatactatgccaaggaagcaacggaaagacgtttaggcattagagatttacggctgcaaatctctcgcaaagcctatgaacgtcaagaaattgcaaattctcaaataactaaaaattcgcttgtaccttttaatgttttcaaagacccttatttactggatattttcggtttgaaagaaaattttttagaaagtgatttagagcaagcaattttaactgaacttgaaaagtttatattggaatttggaaacggttttgcttttatagaacggcagaaacgaataataatggatgatgatgatttttatttggatttgttgttttatcacagagcattaaagagattagttgcggttgaattgaaattaggaaaatttaagccgcagtataaaggtcaaatggaattttatttaaagtggttaaataaatttgaaaggaaagaagatgagaaaccgccaataggtttaattctttgcacagaggcaagtagaaaacaaattgaacttttggaaatggacaaatctgggattgttgttgctgagtattggactgatattttaccaaaaaaacagttagaacaaaaaataaaagaaatttacaacgaagcgaaggaacgaatagaacggcaaaaatttttgccaaaatcttctgtgaatagagaaattgatttttttatagataagaaagacgataatctttaa

SEQ ID NO: 46010 - protein, 268 aa, Unknown
  Obtained from environmental sample
  DOMAIN (1)...(234): Protein of unknown function (DUF1016)
  misc_feature (1)..(268): Xaa is any amino acid
MINDYREVGLVQKLSPVLSWSHXCEIMRIKNEKARIYYAKEATERRLGIRDLRLQISRKAYERQEIANSQITKNSLVPFNVFKDPYLLDIFGLKENFLESDLEQAILTELEKFILEFGNGFAFIERQKRIIMDDDDFYLDLLFYHRALKRLVAVELKLGKFKPQYKGQMEFYLKWLNKFERKEDEKPPIGLILCTEASRKQIELLEMDKSGIVVAEYWTDILPKKQLEQKIKEIYNEAKERIERQKFLPKSSVNREIDFFIDKKDDNL

SEQ ID NO: 46011 - DNA, 915 bp, Unknown
  Obtained from environmental sample
  misc_feature (1)..(915): n is a, c, g, or t
gtgatgcgggaaaaagattttttgcacgagttgcaaagcgtttctgagccggaaaaaaaacgaaacattataggcgaaacttttttaaaaattaaagacaacgaaatggcaaggctatcactaaacgcaaacgactggataatggctcaaggcaccatttatcccgataccatagagagcggcggcacagagaatgcggattccattaaaacgcatcacaaccgtgtgcaaggcgttttggatttgcaagaaaaaggtttgcttttggaaccgcttgcggatttatataaagacgaggtgcgaattttgggcgaggaactcggcattccaaaagagctcatttggcgacatccttttccgggtcctggtctgggcgttaggcttttgtgtagcaatggaaaagcctctggaaaatccgagattctcgaattgaaaaaagccatagacgaactttctataaaggcaagacttttgccgataaaaagcgttggtgttcagggcgatgcaaggacttatgcgcagcctttgttgatagagggagaactttcttgggaaactttggaaaatatcagcacttctttgattaaccgtttcaaagctataaatcgttccgtatggctagttggtagagtttcagaaaccgcctttgaaaccgcagagcaatactgcacaaaagaggctcttgatacgctcaggctttttgattctatttgctttaactttttgattgaaaataatttatacgacaaaatttggcaaatgccggttgtgcttttgccacttaaaattgcgggcaaaccctgcattgttatgcgccctgtgaacagcgcagaggcaatgactgcgaagttagtcaaaattccccccggtcagatgacggattcgctatggtctcaactaagtgaagctggttag

SEQ ID NO: 46012 - protein, 304 aa, Unknown
  Obtained from environmental sample
  DOMAIN (141)...(304): GMP synthase C terminal domain
  misc_feature (1)..(304): Xaa is any amino acid
MMREKDFLHELQSVSEPEKKRNIIGETFLKIKDNEMARLSLNANDWIMAQGTIYPDTIESGGTENADSIKTHHNRVQGVLDLQEKGLLLEPLADLYKDEVRILGEELGIPKELIWRHPFPGPGLGVRLLCSNGKASGKSEILELKKAIDELSIKARLLPIKSVGVQGDARTYAQPLLIEGELSWETLENISTSLINRFKAINRSVWLVGRVSETAFETAEQYCTKEALDTLRLFDSICFNFLIENNLYDKIWQMPVVLLPLKIAGKPCIVMRPVNSAEAMTAKLVKIPPGQMTDSLWSQLSEAG

SEQ ID NO: 46013 - DNA, 1101 bp, Unknown
  Obtained from environmental sample
  misc_feature (1)..(1101): n is a, c, g, or t
atgaaagttactccaattcctcttaaaaaacgccttggactggagctttttagcctgtggcgtgacagtattgtacgccaacaccctttgcagtatttattgtgggagtgtacccttcgctgtaatctttcctgcgtgcattgcggcagcgattgccgaaaaatagcgcagtcgccggatatgccgctggccgatttcatcaaaaccattcaaactatcatgccttacgttgagccgaataaaaccatgatagtacttacgggcggggaaccattaatgcgaaatgatttggcgcaatgcgggcaagcgttgtacgatctcggttttccatggggaatggttaccaatggcctgctgttaaataaaaaacgtttcatgacgctggaacaggctggcctgcgatcaattaccgtaagtttggatggtttcgaggaatcgcacaatcgtatgcgcggtcacagcgaaagttttaaaaatgcccttactgcaattcagataatcgtgcaatccaatttggatgtggtatttgatgtggtaacatgcgttaaccaatggaattacaacgagttggccaaattaaaggaattgctgatagagacaggcgtaagggcatggcgtctgtttactgtctttccgattggcagggccgccgataataaaaacctgcagctggacgcggaacaattcaaacaactatttgattttatccatgatacgcgtaaggaaggccgcatcagggcggattacggatgcgaaggttttttgggtaattatgaaacagaagtcagggatagttttttcttttgcagagccggcgtcactgtaggatctgtgctggcagacggctcaatttccgcctgtcccaatttacgttcgaattttatacagggaaatatctataacgatgattttatggatatatggaacaatcgttatcaggtttttcgcaaccgcgcatgggcaaaacagggagaatgtgccgcatgtaaatattttaaatactgtaaaggtaacggaatgcatctgcgcgacgaaaacggaaatttacttttttgccacttcaaacgcctgaaagaagccgagagtaaaaaccctaactaa

SEQ ID NO: 46014 - protein, 366 aa, Unknown
  Obtained from environmental sample
  DOMAIN (35)...(197): Radical SAM superfamily
  misc_feature (1)..(366): Xaa is any amino acid
MKVTPIPLKKRLGLELFSLWRDSIVRQHPLQYLLWECTLRCNLSCVHCGSDCRKIAQSPDMPLADFIKTIQTIMPYVEPNKTMIVLTGGEPLMRNDLAQCGQALYDLGFPWGMVTNGLLLNKKRFMTLEQAGLRSITVSLDGFEESHNRMRGHSESFKNALTAIQIIVQSNLDVVFDVVTCVNQWNYNELAKLKELLIETGVRAWRLFTVFPIGRAADNKNLQLDAEQFKQLFDFIHDTRKEGRIRADYGCEGFLGNYETEVRDSFFFCRAGVTVGSVLADGSISACPNLRSNFIQGNIYNDDFMDIWNNRYQVFRNRAWAKQGECAACKYFKYCKGNGMHLRDENGNLLFCHFKRLKEAESKNPN

SEQ ID NO: 46015 - DNA, 432 bp, Unknown
  Obtained from environmental sample
  misc_feature (1)..(432): n is a, c, g, or t
atggcacgcatttcaaaaatatacagaattctaatttccgcgttaatggctttgttgggattttcctgtagaaatcctggtggtgatattgccgaatacggtgtaccgagtgcaacctataaagccaaaggctttgtggtatcagaatcggacaattcccccattgagggaatacaagctgaaataaaaggagattgggaaacagccactgcttacacgaacagcgaaggctttttttccctaaaagtcagttcttttcctggtcaaaaactatatgtggaattaaatgatgttgacggtgaagtcaacggttcatttgttaatatgaaaatagaagcggattatacaaatgcgacttttaccggaagcagcggctggtattatggtgaagctgaaatagatttgggaataagaaagatgaaacctaaatga

SEQ ID NO: 46016 - protein, 143 aa, Unknown
  Obtained from environmental sample
  SIGNAL (1)...(25)
  misc_feature (1)..(143): Xaa is any amino acid
MARISKIYRILISALMALLGFSCRNPGGDIAEYGVPSATYKAKGFVVSESDNSPIEGIQAEIKGDWETATAYTNSEGFFSLKVSSFPGQKLYVELNDVDGEVNGSFVNMKIEADYTNATFTGSSGWYYGEAEIDLGIRKMKPK

SEQ ID NO: 46017 - DNA, 495 bp, Unknown
  Obtained from environmental sample
  misc_feature (1)..(495): n is a, c, g, or t
atgaaactaatccctgattacgcttcaaatgcagagcgaagttttttcactgcgctgctctcgcttgcaggcgcaatggttggactactgttaatcggcactatttttgctcttgtccgctctcccgccgcaggtcccattttaaaactgggaaaaacagaaactgtaacaacaaccaaaacaacagaaaatgacgacatccgggtcttttcaggacttggcaggcttcgaatccccctgactaactcctcaacattgattctttccatagcgtttccctaccttgctaatgatattgcctttacagaagaactggctgcaaaaatagacgatttcaggagaatagcgaccgattatttttcctcacttcctgcggaaaaaacaattcaatttgatgaagaaaccgcaaagacagaaattttatcgctttacaatgccaatctgcggcttggacgcatagaaactcctgtacttcagcgacatgatgataattga

SEQ ID NO: 46018 - protein, 164 aa, Unknown
  Obtained from environmental sample
  misc_feature (1)..(164): Xaa is any amino acid
MKLIPDYASNAERSFFTALLSLAGAMVGLLLIGTIFALVRSPAAGPILKLGKTETVTTTKTTENDDIRVFSGLGRLRIPLTNSSTLILSIAFPYLANDIAFTEELAAKIDDFRRIATDYFSSLPAEKTIQFDEETAKTEILSLYNANLRLGRIETPVLQRHDDN

SEQ ID NO: 46019 - DNA, 786 bp, Unknown
  Obtained from environmental sample
  misc_feature (1)..(786): n is a, c, g, or t
atgtcaaatataagagttgaatatttttctgattctttaatgcgtccggttgaatttgaaatgtatataccaaatgattttcgtactgatatacaaataccgcataatccgtattatgacagaaaatgtaaaacagtttttgtattacacggatttacaggctgggggaaaggctggaataatttatatgaacttgccggaaagtataatttggctttagtatttccttccggagagaacagtttttaccttgatacggaatccagcgccggaaaatatcaaactttcatcggggtagagcttgttgaatatataagaaaaacttttggcctttgcctcgttaaagaagatacgtttataggcgggctttcaatgggcggtttcggagctttgcatacgggactcgcctatcccggcactttcagtaaaattgtcgcgttatcatccgcgttaattatacataaaattgcaggcatgaaacccggcgataataacgaaattgcaaacttttacttttaccgtaattgttttggcgatctggatacattaatcgaaagtgacaataatcctgaaacccttgtcaggaaattaattcaacaaaagataaatattcctgaaatatatatggcttgcggaacagaagactttctgctggaagacaacaggcgcttccataattttttggttgaacataacgttaatcatgaatacattgaaagccgcggcggacatgaaatgcctttttggaacgaatattacgcgaaaggctttgaatggctggcataa

SEQ ID NO: 46020 - protein, 261 aa, Unknown
  Obtained from environmental sample
  DOMAIN (15)...(260): Putative esterase
  misc_feature (1)..(261): Xaa is any amino acid
MSNIRVEYFSDSLMRPVEFEMYIPNDFRTDIQIPHNPYYDRKCKTVFVLHGFTGWGKGWNNLYELAGKYNLALVFPSGENSFYLDTESSAGKYQTFIGVELVEYIRKTFGLCLVKEDTFIGGLSMGGFGALHTGLAYPGTFSKIVALSSALIIHKIAGMKPGDNNEIANFYFYRNCFGDLDTLIESDNNPETLVRKLIQQKINIPEIYMACGTEDFLLEDNRRFHNFLVEHNVNHEYIESRGGHEMPFWNEYYAKGFEWLA

SEQ ID NO: 46021 - DNA, 303 bp, Unknown
  Obtained from environmental sample
  misc_feature (1)..(303): n is a, c, g, or t
gtgcttaccgcagcccagacgatgggttctaccaacttccagatcgtccgcaaggtattgatccccgaagctatgcccgcgctggtttccggcctcgcgctgaccatcatcaatctaataggctattccgctatggccggggccattggcggcaggggccttggcgatcttgccatacgctacggttattaccgctttagaacggacgtaacaatcggcgcggtaattgtcataatgataatggtggaagcggtgcaaatgataggcacggcaatcagcagaaaccttctggcaaaacgctga

SEQ ID NO: 46022 - protein, 100 aa, Unknown
  Obtained from environmental sample
  misc_feature (1)..(100): Xaa is any amino acid
MLTAAQTMGSTNFQIVRKVLIPEAMPALVSGLALTIINLIGYSAMAGAIGGRGLGDLAIRYGYYRFRTDVTIGAVIVIMIMVEAVQMIGTAISRNLLAKR

SEQ ID NO: 46023 - DNA, 573 bp, Unknown
  Obtained from environmental sample
  misc_feature (1)..(573): n is a, c, g, or t
ttgacaaatcctttcagcaaaaacagggacggcataaaccttggcgaaggagcggcattttttttacttgattcttcgccgcaatcagacggtattgaacttctcggttacggagaaagctgcgacgcataccacatgacagctcccggaaatgacggcatagggccggcaaaggcgatgaaggctgcccttgccaatgcaggaattgaaccttcgcaaatcgggtacgttaatctgcatggaaccggaacattgcttaacgacaaggcggaagcccttgccatgaagaatgtcttttccgggttaacgcctctttcaagctccactaagccaattacaggacacacccttggggcggcgggagctcttgaaactgcgatatgctggatgacgctaaacatgaaaaaaggagtccccgtacattgctgggacggcgaaaaagatgaagagcttacgtttcaaccatacacacacggacgcaagcctccgtcaatctgcatgaacaataattttgcttttggcggatataatgtctctttgatacttggaaggagtaagccgcttgatcaataa

SEQ ID NO: 46024 - protein, 190 aa, Unknown
  Obtained from environmental sample
  DOMAIN (31)...(185): Beta-ketoacyl synthase, C-terminal domain
  misc_feature (1)..(190): Xaa is any amino acid
MTNPFSKNRDGINLGEGAAFFLLDSSPQSDGIELLGYGESCDAYHMTAPGNDGIGPAKAMKAALANAGIEPSQIGYVNLHGTGTLLNDKAEALAMKNVFSGLTPLSSSTKPITGHTLGAAGALETAICWMTLNMKKGVPVHCWDGEKDEELTFQPYTHGRKPPSICMNNNFAFGGYNVSLILGRSKPLDQ

SEQ ID NO: 46025 - DNA, 360 bp, Unknown
  Obtained from environmental sample
  misc_feature (1)..(360): n is a, c, g, or t
ttggaaggagtaagccgcttgatcaataataactttccaatcaatcaggaagaacttaaaacacttataccgcacagagggaaaatgctcctccttgacagagtcacggaatacgatgcggcaggaaacatcagggcagaatttgaaattacagaaacctgtctgttttacaatactgaattaaaaggcgtacccggttgggtcggctttgaatttatggcgcagaccatttccgccttttcaggtttacgcagcaggctcacaggcatcaagccgaaaatcggttttatcctcagcgtcccgttaatgcaaatgtatattcccgtttttaaacaggcagtgttgccgatatacgcatga

SEQ ID NO: 46026 - protein, 119 aa, Unknown
  Obtained from environmental sample
  DOMAIN (23)...(118): FabA-like domain
  misc_feature (1)..(119): Xaa is any amino acid
MEGVSRLINNNFPINQEELKTLIPHRGKMLLLDRVTEYDAAGNIRAEFEITETCLFYNTELKGVPGWVGFEFMAQTISAFSGLRSRLTGIKPKIGFILSVPLMQMYIPVFKQAVLPIYA

SEQ ID NO: 46027 - DNA, 483 bp, Unknown
  Obtained from environmental sample
  misc_feature (1)..(483): n is a, c, g, or t
atgatctccgattttggcggcatagcctcaaaaatgcccattttcacgtttttctttatggtggtcacgctgtccagcatcggcctgccgcttaccaacgggttcgtgggcgagttcttgattttgaatggcacctttacttccggctgggcttggggcagggcggcgtccgtcaccgctgctttgggggtgctgttcggagctgtttacatgctctggatggtgaaaagggctttctgggggcctgagaacccagacgcagaaagcggcacggcccatctgaaaaatgatttgggcttgcgcgaagtcgctgtcatggcgcccttggtggccctcatattttggatggggctgcagcacgtttcttttaccaaggtgtcggagccatacgtcatcaagatgctggatgaagcaaatgcgccgccgccaagggcaataacgttaaacgcgcaaaccccgccaagccaggaggcgatgcaatga

SEQ ID NO: 46028 - protein, 160 aa, Unknown
  Obtained from environmental sample
  misc_feature (1)..(160): Xaa is any amino acid
MISDFGGIASKMPIFTFFFMVVTLSSIGLPLTNGFVGEFLILNGTFTSGWAWGRAASVTAALGVLFGAVYMLWMVKRAFWGPENPDAESGTAHLKNDLGLREVAVMAPLVALIFWMGLQHVSFTKVSEPYVIKMLDEANAPPPRAITLNAQTPPSQEAMQ

SEQ ID NO: 46029 - DNA, 1155 bp, Unknown
  Obtained from environmental sample
  misc_feature (1)..(1155): n is a, c, g, or t
atgagcctgacccccaatgaaacggcggccatcctgccattcgccatccctgcggtagccgcctgcattgtccccctggcggcgctggacagagacgcggccacccaaaaatggatacgcgccgccatattctgcatcgccctgctggcgctgtgttcatcttttttgtttacagtcagcctttgggcagggggagcgcagccgtcatacggctacctagcttttgacaggctggcccaatttgccgccatttttgtgctggtttcggctgtgtacgcagttttgcagctatgggatcaccttcaccaagagggctgggcaaagggcgaaattttgtccttgctgcttttttccgcagtgggaatgatgctatttgcctcgacgaccaatctgatcctgctctttttggcgctggagcttttctccattccgctgtatgccctaacagccgcagttcggctgcggcaaaaggcgctggagggcggggcaaagtattttctcactggtgccgttgcctctagttgcttcctcatgggcattgtcctgctatatggcttgacaggcagcctagatattgaactaatcgcctcggaaatggcaaagggtccgcttgacccgctcgccatggcgggcttcgcgctattgctgtttgggctcatattcaaaatcagcgccgtgccattccaccaatggactccagatgcctacgaagccgcgccacatcccatcactggcttcatgtcagtcgcaactaagggggtggccattatcgcgttgataagggtcttcaccgcgccctttgcccaaaatatcgctctaggcgggcggatgcagacttcaatggcctttatcgcagttctcacgcttgcgcttggcaacctttgcgccctgtcccagaccaactataaaaggatgatggcgtattccagcatcagccatgcagggtaccttttgctgggcttcgtcacggggaccagcgaggctttccaggcgatactgttttatttgtgcgcgtacctattgatgaacttgggggcctttggcgcccttagcgctttcggcttggtgggcgacaaaaccgagatccgcaatttcagggggcttggctggaaacgcccaagcgtggcattgcgtgacattgcttttctgcgataa

SEQ ID NO: 46030 - protein, 384 aa, Unknown
  Obtained from environmental sample
  SIGNAL (1)...(28)
  DOMAIN (128)...(384): NADH-Ubiquinone/plastoquinone (complex I), various chains
  misc_feature (1)..(384): Xaa is any amino acid
MSLTPNETAAILPFAIPAVAACIVPLAALDRDAATQKWIRAAIFCIALLALCSSFLFTVSLWAGGAQPSYGYLAFDRLAQFAAIFVLVSAVYAVLQLWDHLHQEGWAKGEILSLLLFSAVGMMLFASTTNLILLFLALELFSIPLYALTAAVRLRQKALEGGAKYFLTGAVASSCFLMGIVLLYGLTGSLDIELIASEMAKGPLDPLAMAGFALLLFGLIFKISAVPFHQWTPDAYEAAPHPITGFMSVATKGVAIIALIRVFTAPFAQNIALGGRMQTSMAFIAVLTLALGNLCALSQTNYKRMMAYSSISHAGYLLLGFVTGTSEAFQAILFYLCAYLLMNLGAFGALSAFGLVGDKTEIRNFRGLGWKRPSVALRDIAFLR

SEQ ID NO: 46031 - DNA, 606 bp, Unknown
  Obtained from environmental sample
  misc_feature (1)..(606): n is a, c, g, or t
atgagttctactcccgaactggttgtggatgaagaaaaaatcaaaaaagccatacagtccggacttccgctgacaattaccacatatacacaccccaaagaaatagaaatttacattgagcaggtcatagattcgtttctaaaacacatgaatcaaacaaaacttaaggattatatcgtctattgtgtacaagaacttgtagtaaatgcaaaaaaagccaacacaaaacgggtatattttgcggaacgcggtttggatatcaataatgacggcgattaccttctgggaatgagggattttaaagaagatacgataggcaacatagcccattatctgcaattacaaaaagaaaaagggttatatataaaaattattttacaggtaaaaagaaatacaattaatatagaaatacgcaacaatgtttccgcaaataaattggaacaactgcgaatccaggataaaatggcgcgttccagacaatttaacactctggaagacgctttgtctcaggttcttgacgattccgaaggcgcgggtcttgggcttgtaattcttgttctcatgctgaaaaaaatgggaattgacgacgaagcttttgaaatttag

SEQ ID NO: 46032 - protein, 201 aa, Unknown
  Obtained from environmental sample
  misc_feature (1)..(201): Xaa is any amino acid
MSSTPELVVDEEKIKKAIQSGLPLTITTYTHPKEIEIYIEQVIDSFLKHMNQTKLKDYIVYCVQELVVNAKKANTKRVYFAERGLDINNDGDYLLGMRDFKEDTIGNIAHYLQLQKEKGLYIKIILQVKRNTINIEIRNNVSANKLEQLRIQDKMARSRQFNTLEDALSQVLDDSEGAGLGLVILVLMLKKMGIDDEAFEI

SEQ ID NO: 46033 - DNA, 618 bp, Unknown
  Obtained from environmental sample
  misc_feature (1)..(618): n is a, c, g, or t
gtgtatggcattttttcggcttcttgggcatccaacaacaaatattcgatgctgtctggcatgcgcggcgcggcccacatggtcagctacgagataggcatgtcgttggcagtcatcgccatctttttgcaggcgggtgcgtacgacccgcatgaaatcataagcgcccagtctgggctatggaacgtggtcaggcagccattgggcttttttgtattctttgtctgcgcctttgccgaaaccaaccgcctgccatttgactttgcagagggcgagtccgaaatcatagctggattcatgaccgaattcggcggaatgaagctggctctgctgtggctgtcggagtacatccacatggtcacagcctcggcccttatggtgacgctttactttgggggatggcaagtgccctttgtttcagacccaggcccgataatctcgctcgtggcctttgccgccaaattgctatttttctgctgggtgtttatttgggtgcgctggacattgccaaggttcaggtacgaccagctaatgttcatcggttggaaggtgatgcttcccatcggcattgcaaacgtagtcctatgcgcctggctggtgcaaagggccttggcttga

SEQ ID NO: 46034 - protein, 205 aa, Unknown
  Obtained from environmental sample
  DOMAIN (2)...(201): NADH dehydrogenase
  misc_feature (1)..(205): Xaa is any amino acid
MYGIFSASWASNNKYSMLSGMRGAAHMVSYEIGMSLAVIAIFLQAGAYDPHEIISAQSGLWNVVRQPLGFFVFFVCAFAETNRLPFDFAEGESEIIAGFMTEFGGMKLALLWLSEYIHMVTASALMVTLYFGGWQVPFVSDPGPIISLVAFAAKLLFFCWVFIWVRWTLPRFRYDQLMFIGWKVMLPIGIANVVLCAWLVQRALA

SEQ ID NO: 46035 - DNA, 555 bp, Unknown
  Obtained from environmental sample
  misc_feature (1)..(555): n is a, c, g, or t
ttgggaaccatagtaaaaaaagttgacctcaattggctggacaggacgtatatatggcccgtgtgcaagggcctgttcatcacggtgaagcacttcatcgtgcaggcgataacgcccaccccgtggcggcgcacggttcagtaccccgaaatgaagcgccaagtcggcgatggctacagggggctgcacgagcttaagcggcacgaggatggctcgataaagtgcgtagcgtgctacatgtgcgcggagagctgcccatcccgctgcataacgatagtcgccgaagagatcggcagccttgccgcgcagcaggggataatagagaagaggccggcatctttccagatagacgttgtgaggtgcattttttgcgggatgtgccaagaggcttgtccaagggacgctatttggctgaggaagaactacgagctttcctgccaggcccgcgaacaggtgcgactgaacaaatacgaccttatgaacacctattgcgaagaagacggcaaggcccccatttcccccgaacctttacacaacgcttcccaaggaaactga

SEQ ID NO: 46036 - protein, 184 aa, Unknown
  Obtained from environmental sample
  DOMAIN (68)...(91): 4Fe-4S binding domain
  misc_feature (1)..(184): Xaa is any amino acid
MGTIVKKVDLNWLDRTYIWPVCKGLFITVKHFIVQAITPTPWRRTVQYPEMKRQVGDGYRGLHELKRHEDGSIKCVACYMCAESCPSRCITIVAEEIGSLAAQQGIIEKRPASFQIDVVRCIFCGMCQEACPRDAIWLRKNYELSCQAREQVRLNKYDLMNTYCEEDGKAPISPEPLHNASQGN

SEQ ID NO: 46037 - DNA, 510 bp, Unknown
  Obtained from environmental sample
  misc_feature (1)..(510): n is a, c, g, or t
atgtttctagctttttccctcataacgcttgggggcgcgatttcgctgctgatgcagcgcaacgccattcttgctggcctgtgcatgctcctttgcttttttggcattgccgggctgtttcttttgatgtccaaccctgtggcagccgccctgcatgtaatcgtctatagcggggccattactatcttggtgctttttgttgtgatgctattgcagtcccacaaggacgaaaaatccagccaccgggcgcggatacacaagagcctttccgccgtccttgttttggcccttgccgccggcgcggtcatgctggtaggcggctcaaagaaattggccgctatggacgccgcgcttccaaagcaaagcgcagggcctgacatggtgacgcttcaacagttgggcgaacagctttttagcgatcatttagtggcgctagaagccgttggcattctgttgctggccgcgatggtggccgccgtgctattggtaaaaaaggagaccaaacaatga

SEQ ID NO: 46038 - protein, 169 aa, Unknown
  Obtained from environmental sample
  SIGNAL (1)...(22)
  DOMAIN (8)...(163): NADH-ubiquinone/plastoquinone oxidoreductase chain 6
  misc_feature (1)..(169): Xaa is any amino acid
MFLAFSLITLGGAISLLMQRNAILAGLCMLLCFFGIAGLFLLMSNPVAAALHVIVYSGAITILVLFVVMLLQSHKDEKSSHRARIHKSLSAVLVLALAAGAVMLVGGSKKLAAMDAALPKQSAGPDMVTLQQLGEQLFSDHLVALEAVGILLLAAMVAAVLLVKKETKQ

SEQ ID NO: 46039 - DNA, 384 bp, Unknown
  Obtained from environmental sample
  misc_feature (1)..(384): n is a, c, g, or t
ttggacgacgcacagggtttttaccatttgccggctgtagatgtccgggaaacggagaagtcctatgtcatggacatggaactgcccggctatgacgagaaggacatcgaaattcacatcgacggcaacagcctttcgattgcctcgaaacacgaagaaacccgcgacgcgaaagacgaaggggataacaaggattccgcaggaaaccaggggacctggattctccgcgaacggagagtgaattctttcagccgatcattcaaactgcccgaaaacgccaaccctgaagatgttaccgctgaattcaaaaacggcatcctcagtatggaaattaaaaaacgcgccgaagcccagaagagaacgattcagattaaggtgaagtaa

SEQ ID NO: 46040 - protein, 127 aa, Unknown
  Obtained from environmental sample
  DOMAIN (14)...(125): Hsp20/alpha crystallin family
  misc_feature (1)..(127): Xaa is any amino acid
MDDAQGFYHLPAVDVRETEKSYVMDMELPGYDEKDIEIHIDGNSLSIASKHEETRDAKDEGDNKDSAGNQGTWILRERRVNSFSRSFKLPENANPEDVTAEFKNGILSMEIKKRAEAQKRTIQIKVK

SEQ ID NO: 46041 - DNA, 642 bp, Unknown
  Obtained from environmental sample
  misc_feature (1)..(642): n is a, c, g, or t
gtgcgcttcagattagacagtcccgacggcgacggcgggtttcccggcaacctgaaagccgccgtcacttacggcctcaccaaatcaaatgaaattatcgcccgttacgaagcaaaggccgacgctcccacgccggtcaatttgaccaaccacgcttattttaatctggcaggggagggcacaggccttatacacgcgcatgaactgtgcctctattcttcgtcatatgttgaaattaatgaaaaccttatccctaccggccgcctgattcccgtccgtgatactccctttgatttcagaaaacgcaaacccgttctgcgggatcggggggagggctacgatcactgttttaccgttgacggcgatccgggaaaactccgcgcctgcgccgaagtttttgaaccggacagtggcagaatcatgaaagtgtttaccacccaacccggcgttcagttttacacaggcaacatgctccccggcatccccggcaaagcgggttcagtatacggcaaacacaccggcttctgtctggaaacccagcacttccccgactccccccatcaacccgatttcccttcctgcatattcggcccggaccgggactaccgcgaaaaaacagtcttcgcgtttgatgttagttga

SEQ ID NO: 46042 - protein, 213 aa, Unknown
  Obtained from environmental sample
  DOMAIN (1)...(209): Aldose 1-epimerase
  misc_feature (1)..(213): Xaa is any amino acid
MRFRLDSPDGDGGFPGNLKAAVTYGLTKSNEIIARYEAKADAPTPVNLTNHAYFNLAGEGTGLIHAHELCLYSSSYVEINENLIPTGRLIPVRDTPFDFRKRKPVLRDRGEGYDHCFTVDGDPGKLRACAEVFEPDSGRIMKVFTTQPGVQFYTGNMLPGIPGKAGSVYGKHTGFCLETQHFPDSPHQPDFPSCIFGPDRDYREKTVFAFDVS

SEQ ID NO: 46043 - DNA, 300 bp, Unknown
  Obtained from environmental sample
  misc_feature (1)..(300): n is a, c, g, or t
atgcccacccatattcatctgctcattacacctaacaacgggacggatctttccagaatcatgcaatggataaaaacacgttcggcaaaacgctggaattgtatcaataactcaaaggaccatctttggggtgagcgtttttttgcccggcaaattattactttaacagattatttattcgttcaaaactatattgaccaaaacccggttaatgccgggcttgtttccaatgccaaagactgggaagcctgcggcgcttactacatcgctaatggtatcagcggttttatcgaaatgtga

SEQ ID NO: 46044 - protein, 99 aa, Unknown
  Obtained from environmental sample
  DOMAIN (1)...(47): Protein of unknown function (DUF1568)
  misc_feature (1)..(99): Xaa is any amino acid
MPTHIHLLITPNNGTDLSRIMQWIKTRSAKRWNCINNSKDHLWGERFFARQIITLTDYLFVQNYIDQNPVNAGLVSNAKDWEACGAYYIANGISGFIEM

SEQ ID NO: 46045 - DNA, 912 bp, Unknown
  Obtained from environmental sample
  misc_feature (1)..(912): n is a, c, g, or t
atgaaaaatgaaaaaggaaaaaataaatttcggattttaagttttacgctattaattatacttgccgctattatttcctgcgaaaacaaatttgtcattgatattctgccggatagaagcaagaaaaaatcggatacggataagacatataaaatagagtttaatataagcaatgatgaatccggcgataaagtaacggcgtctcctgaatcaggcgacgaaggcgatgttattactctgtcttatgttgtcgtgaaaacgaagctaaacaatctgctggacttcggcggcgttacttcgcctatcgatcccgtagacggcgctggaagcgggaccaggacatacacgataaacccgcttgacgcttcagacggagttatcaccattaccgctgtttttttgcataccgatctggaacccgacccaatagcgtttaccgatacagcggggcttataaacaaaacctacggcgacgtgtttaccaacgccataaccggtgagcataaaggaagcgggacaattacatattccagcagcgatacggatgttgccacagtgaataattccggacaggttacgatacacaaggtgggttctgccgtcatttccgccgggaaagaggctgacgctgtgtacgcgcctgcgcaaaaggtttatacattaatggctaatcccaagcctgttaccataaaagggctgtcggtggaaaagatttatgacggagatacatgggcaatagttgaaggaacaccggtaattaacggaataatcaatgacgacaatgtaacggtcaatgaggggattgccgtgttcccaagcgcagatataggcgtccatacagttatattcagcggctggtccctgggcggagcggacgcgggtaattatacctggaggcgcagccgagcgtaa

SEQ ID NO: 46046 - protein, 303 aa, Unknown
  Obtained from environmental sample
  SIGNAL (1)...(22)
  DOMAIN (139)...(214): Bacterial Ig-like domain (group 2)
  misc_feature (1)..(303): Xaa is any amino acid
MKNEKGKNKFRILSFTLLIILAAIISCENKFVIDILPDRSKKKSDTDKTYKIEFNISNDESGDKVTASPESGDEGDVITLSYVVVKTKLNNLLDFGGVTSPIDPVDGAGSGTRTYTINPLDASDGVITITAVFLHTDLEPDPIAFTDTAGLINKTYGDVFTNAITGEHKGSGTITYSSSDTDVATVNNSGQVTIHKVGSAVISAGKEADAVYAPAQKVYTLMANPKPVTIKGLSVEKIYDGDTWAIVEGTPVINGIINDDNVTVNEGIAVFPSADIGVHTVIFSGWSLGGADAGNYTWRRSRA

SEQ ID NO: 46047 - DNA, 798 bp, Unknown
  Obtained from environmental sample
  misc_feature (1)..(798): n is a, c, g, or t
ttgccagtggcacctgagatgataaccaatactgaaggcacatctgatgaaacgaacagtaaaaagcaagattgtgagcggaatgcggccaaaagatggcttataaagcacgcggaggagtataaatggctttcaccgacccttctaggtgacgatttatactcaaattacccgttttgcaagcaagtattggagtacggctatagttttatctttacctgcaaagaagattcccacccctggctcactgagacagttgaaaactcttttcttgaggaaacttccaagcgggaatggaacggtcgccatcaccttgcctatacctaccgatggcttaatggagttgaaatacgtgacaataaagaaaccctcatggtaaattatttttccctttcaatatggaacgaagaaaaaaacaaacaaactttttataacagttggatgaccaataaaactatcacaaaagataacgtttcacatcttgcctcatgcgctcgctcgcgctggaagatagaaaatgagcataacaatgtccttaaaaaccatggttacaatttggaacataattttggacacgggaaaacccatgccagtgaaatgtactgcctgttaaatcttctggcttttcagatgcactcgcttttggacatcaacgatgaagattacaaaaaagcaagagcatatgccggaagaaaggacgaattctttaatgaactgcgtgttctcatgcgccgtaccctctttgagggtacggcagcaactcattgtttcatgtattctgcccctgatacggggtaa

SEQ ID NO: 46048 - protein, 265 aa, Unknown
  Obtained from environmental sample
  misc_feature (1)..(265): Xaa is any amino acid
MPVAPEMITNTEGTSDETNSKKQDCERNAAKRWLIKHAEEYKWLSPTLLGDDLYSNYPFCKQVLEYGYSFIFTCKEDSHPWLTETVENSFLEETSKREWNGRHHLAYTYRWLNGVEIRDNKETLMVNYFSLSIWNEEKNKQTFYNSWMTNKTITKDNVSHLASCARSRWKIENEHNNVLKNHGYNLEHNFGHGKTHASEMYCLLNLLAFQMHSLLDINDEDYKKARAYAGRKDEFFNELRVLMRRTLFEGTAATHCFMYSAPDTG

SEQ ID NO: 46049 - DNA, 831 bp, Unknown
  Obtained from environmental sample
  misc_feature (1)..(831): n is a, c, g, or t
atgcccgaaaccattgaatatctgcccggcggcgtttccggcgattcaaccaattcagcgtctcaaaacaccttcatcgaagtggagcatttccagctttgcaaatacaaccagaacgcaccgggggacgtgtttctttcgcagaaaaaccccagcgacggacgggtgatcaccgcgctttccgacggccttggctccggaataaaagccggggtgcttgctacgcttacagcgactatggccgccaagttcatttcgtttaacattcccatcaagcgcgcttctgaaatcatcatggataccctgcctgtatgcagcgagcgggggatcagttatgcgacattcacgctggtagatattgcccctaacgcttcggtaagaatcatggagtatgacaacccgccctacacgtttataagaaagggaacggtacttgaaccctcgaagagagcaaacccttttgagcggcaagacaaatctaccgggcctaaaaaagataccagcgtactgtactcgcactttaaggcccaaagcggtgaccgcctgatttttttctccgatggtgtaagccaggcgggcatgggaaccaaaccacaccccttcggctggacaaccgccaaagcccgcgagtttgcccttgagagcgtccgggaaaaaccggaaatcagcgcccgcgagttggcccacgccattgtccagcgggcttcgcaaatcgaccttttcaagccgaaggacgacatttcctgcggcgttatttatttccgggagccgagggatatgctggtactcaccggcccgccggtcacccgaaagtaccggagctctcgataa

SEQ ID NO: 46050 - protein, 276 aa, Unknown
  Obtained from environmental sample
  DOMAIN (52)...(255): Stage II sporulation protein E (SpoIIE)
  misc_feature (1)..(276): Xaa is any amino acid
MPETIEYLPGGVSGDSTNSASQNTFIEVEHFQLCKYNQNAPGDVFLSQKNPSDGRVITALSDGLGSGIKAGVLATLTATMAAKFISFNIPIKRASEIIMDTLPVCSERGISYATFTLVDIAPNASVRIMEYDNPPYTFIRKGTVLEPSKRANPFERQDKSTGPKKDTSVLYSHFKAQSGDRLIFFSDGVSQAGMGTKPHPFGWTTAKAREFALESVREKPEISARELAHAIVQRASQIDLFKPKDDISCGVIYFREPRDMLVLTGPPVTRKYRSSR

SEQ ID NO: 46051 - DNA, 816 bp, Unknown
  Obtained from environmental sample
  misc_feature (1)..(816): n is a, c, g, or t
ttgttagatgaatttgatccatctatcccgctggaagttccggtgtttttggaactgcttgcctgtcccggcggctgtctcaacggtcccggagtaaccgacgcgacgtcgggcattatccgccatgtgcgcctgagggattacgccgacagcgccgacaatactctcgacagcggaatgctttcccaatcgcccttaattgacgttgattacccgctggctccgcttccggaattaaaacatacggaacaagaaattaccgaagcgctttggaaggtgggaaaagacagccttgccgacaggctcaactgcgcaagctgcggctataatacctgccgggatttcgcctgcgcgctgctggacggacgggcggaaaaatccatgtgcgcgccgtatatgcgcaaacttgcaaacaaaacagccaacagtcttatcaaatctattccttcaggcgttgtcatcgttgaccgtgacttgaaaattatcgactgcaacgaacgatttgctcaccttctgggcggcgaagccgaagaactgtactcccttatgccgggaatggaaggggcggaactcgctaaaatatcgtcttttacgcagtatttccaaacgattattgatccgtcaggaccggaaaccgcgacttccgatgtgcgcgtaggcagcaaaatatttcacctaactgttttcgccgtggaaaaaggtattgcggcggcgggtgttgtggaagacattaccgcgccgagagtgcaaatagaaacaactgttgaaagggcgagagaactcatcaagaaaaatgtttcaactttcagcaaatag

SEQ ID NO: 46052 - protein, 271 aa, Unknown
  Obtained from environmental sample
  DOMAIN (98)...(132): Putative Fe-S cluster
  misc_feature (1)..(271): Xaa is any amino acid
MLDEFDPSIPLEVPVFLELLACPGGCLNGPGVTDATSGIIRHVRLRDYADSADNTLDSGMLSQSPLIDVDYPLAPLPELKHTEQEITEALWKVGKDSLADRLNCASCGYNTCRDFACALLDGRAEKSMCAPYMRKLANKTANSLIKSIPSGVVIVDRDLKIIDCNERFAHLLGGEAEELYSLMPGMEGAELAKISSFTQYFQTIIDPSGPETATSDVRVGSKIFHLTVFAVEKGIAAAGVVEDITAPRVQIETTVERARELIKKNVSTFSK

SEQ ID NO: 46053 - DNA, 927 bp, Unknown
  Obtained from environmental sample
  misc_feature (1)..(927): n is a, c, g, or t
gtgcggcggaataccacgacggcgaaactgaatttgatcctgtatctggcggtagtattggtttcgctgggaatcgccatcggttttgtcgcgtttatcacgctggatattaacaaatcggtcagaacccttaaaaccctgttcaggggactcaccgaaaacgatttaaccctgtctttaaaaattaattccatggatgaattcggcgaactgatgacggccttcaacggattcctcaatatactccgctccacattcggaagcttcaagcagagcgcgaagcttgtcgccaattccgttttcgatctttcctcatcgtcaaaagaaatttcatccaccgccaacgagcagtccgcgagcgtctccgaaattgtcagcaccatggaaggcagcaagaacctgtccgagcagatcgcctataaaaccaccgaagtggcgaatctcgccaaagaaacgcaggagttaagcagcaagggcgcggaactgcgggaagccaaccagaccatgatggaagacatcaggaatcagaaccagaagatcataagcgagatacgcaatctttcggacatgattatcagaatcagcgaggccatcaggatcatcgacggtatcgccgaccagaccaagctgattgcgtttaacgcatcccttgaggcatcgtcttccggggaagccggtgcgcggttctcggtagtcgcctcggaaataaggcgtttcgcggataacgtggtcgaatcaacacgggagatcaaacagaagatagaagaagtgcagggagcctcgcaggcgcttatcgcggaagccaactcaggctcccggcagatcgagatcggctatgaaaagatgagcgaacaaaaaatcgtgttcgagcacattgttgaaaattcccaaacgtcgcgacccgttcccagcagatatcgaatttga

SEQ ID NO: 46054 - protein, 308 aa, Unknown
  Obtained from environmental sample
  SIGNAL (1)...(26)
  DOMAIN (115)...(308): Methyl-accepting chemotaxis protein (MCP) signaling domain
  misc_feature (1)..(308): Xaa is any amino acid
MRRNTTTAKLNLILYLAVVLVSLGIAIGFVAFITLDINKSVRTLKTLFRGLTENDLTLSLKINSMDEFGELMTAFNGFLNILRSTFGSFKQSAKLVANSVFDLSSSSKEISSTANEQSASVSEIVSTMEGSKNLSEQIAYKTTEVANLAKETQELSSKGAELREANQTMMEDIRNQNQKIISEIRNLSDMIIRISEAIRIIDGIADQTKLIAFNASLEASSSGEAGARFSVVASEIRRFADNVVESTREIKQKIEEVQGASQALIAEANSGSRQIEIGYEKMSEQKIVFEHIVENSQTSRPVPSRYRI

SEQ ID NO: 46055 - DNA, 729 bp, Unknown
  Obtained from environmental sample
  misc_feature (1)..(729): n is a, c, g, or t
atggcggcgcttcaatccctggaaatcatcgcaagaaatatcgcgcgggacacggaagcggtcaacgccgcgaacaggaacttcgcgaagctgctcagctcaagcctgccctggaattcccccataatccaggaattccgcccgatagaactgctgaccggcaaactcggttccgtcgtcagaaattactccctggatgttggcaatcacatccggggcgcttatgacagcataatttctttaaggatgctgcccctttccacggtgcttgacgaatacccccgccaggtttttaccatcgcctccgaattgggcaaaaaagtaaagctccatatcgaaggggctgaaaatgaaattgacaaaaatttaatagaatcattgtccgaagtattccttcacatgatacgcaattcgattgatcacggaatagaaacccccgacgagcggcgcaaggccggaaaagacgagaccggacttttgacaattaactgcgtccgggaaagcgggaacatgaaggtgacaatcgccgatgacggaaagggcattaacatagaaggaatacgcaaaaaaattgttgaaaaaggactggtcgccccggaagccgccgccgcccttggcgaagaagaacttataaattttattttccaaagncggattttcaaccgcgcagaagatttccaatgtttccgggcgcggagtcggaatggacgcggtcaggaacaacattga

SEQ ID NO: 46056 - protein, 242 aa, Unknown
  Obtained from environmental sample
  misc_feature (1)..(242): Xaa is any amino acid
MAALQSLEIIARNIARDTEAVNAANRNFAKLLSSSLPWNSPIIQEFRPIELLTGKLGSVVRNYSLDVGNHIRGAYDSIISLRMLPLSTVLDEYPRQVFTIASELGKKVKLHIEGAENEIDKNLIESLSEVFLHMIRNSIDHGIETPDERRKAGKDETGLLTINCVRESGNMKVTIADDGKGINIEGIRKKIVEKGLVAPEAAAALGEEELINFIFQXRIFNRAEDFQCFRARSRNGRGQEQH

SEQ ID NO: 46057 - DNA, 471 bp, Unknown
  Obtained from environmental sample
  misc_feature (1)..(471): n is a, c, g, or t
atgctcgttatagtcatgatggccctgtttggcggcaaaagcatcttcatcctttttatcgctatcgcaatgatttcgtggctggatcttgccagggtggttcggggccaggtactgtcgctaaaaaattcagagtttatcgaggcggcaagatcagccggcgcaggaacatggcgtattatttggaagcacctgcttcccaacattgtggggctgataattgtctactcatctttggcgttgcccactttcattataaatgaggcttttctttccttcctgggtctgggcgtttccgctcccatgacttcctggggcgttttgattgatgatggaacgaaggttatggcgctatacccctggctccttgtgataccggctttaaccatgtcgtttttcatcttttgcatgaatttcctcggcgacggcctaagggacgccttcgatccccaggctaagaacaggctgtag

SEQ ID NO: 46058 - protein, 156 aa, Unknown
  Obtained from environmental sample
  DOMAIN (1)...(154): Binding-protein-dependent transport system inner membrane component
  misc_feature (1)..(156): Xaa is any amino acid
MLVIVMMALFGGKSIFILFIAIAMISWLDLARVVRGQVLSLKNSEFIEAARSAGAGTWRIIWKHLLPNIVGLIIVYSSLALPTFIINEAFLSFLGLGVSAPMTSWGVLIDDGTKVMALYPWLLVIPALTMSFFIFCMNFLGDGLRDAFDPQAKNRL

SEQ ID NO: 46059 - DNA, 873 bp, Unknown
  Obtained from environmental sample
  misc_feature (1)..(873): n is a, c, g, or t
gtggaggaaaaacagatgccaaatgatacgaacaatgaagcgattcttgaagtaaaaaacctccgcacctatttttatacagacgagggggtcgtaaaagcagtagacgatgtttcattttccctgcacaagggcgaagtgattggcatagttggagaatccggttcgggcaaatcggtagcaaacctttcagtaatgaacctgattctttcgccgcccggaaagatcgtaggcggcgaagttctttttcatggcgaagatattttaaaattgaaggaaaagcagctccagaagatacgcggggcaaaaatttccatgattttccaggacccgatgacaagcctgaatccgtttttaagaatttctacccagttgatcgagaccataatgctgcaccagaacctggacaaaaagcaggcccgcgaaaaagccatcgagatgctgaacatggtaggaatccccgccgcagcggagagggtcgattcttatccccaccagttttcaggcggaatgtgccaacgggttatgatagcgatggcgctctcgtgcaacccggaaatcctaatcgcggacgaacccaccactgcgctggacgtaacgattcaggcgcagatccttgatttgatcagggatttgacccacaagctcggcacggcggtgatccttatcacccactccctcggagtagtggcgggaatgtgcgacaatatctacgtcatgtacgcggggcgtgttgtagagttcggcactgcggagcagatttttgaaacgccgcagcacccgtacacccgcggcctcatcaagtcagtgccgcgcctggacaggcggaaccgggacaggcttttttcattccagggcagccgcccaacgtga

SEQ ID NO: 46060 - protein, 290 aa, Unknown
  Obtained from environmental sample
  DOMAIN (246)...(289): Oligopeptide/dipeptide transporter, C-terminal region
  misc_feature (1)..(290): Xaa is any amino acid
MEEKQMPNDTNNEAILEVKNLRTYFYTDEGVVKAVDDVSFSLHKGEVIGIVGESGSGKSVANLSVMNLILSPPGKIVGGEVLFHGEDILKLKEKQLQKIRGAKISMIFQDPMTSLNPFLRISTQLIETIMLHQNLDKKQAREKAIEMLNMVGIPAAAERVDSYPHQFSGGMCQRVMIAMALSCNPEILIADEPTTALDVTIQAQILDLIRDLTHKLGTAVILITHSLGVVAGMCDNIYVMYAGRVVEFGTAEQIFETPQHPYTRGLIKSVPRLDRRNRDRLFSFQGSRPT

SEQ ID NO: 46061 - DNA, 720 bp, Unknown
  Obtained from environmental sample
  misc_feature (1)..(720): n is a, c, g, or t
atgagcgatcaatttaatgctaacaatttgcttgaagtaaaagacctgcgaatgtattttcacacgggaacgaaaggattattcaaccgcgaaaaacgttatacctacgccgtggacggggtttctttcaacataaagaaaggcgaaactctcggtctcgttggggaatccggctgcggcaagtcaacggtcgtccgcgcggtatcgcaccttcacacgccgacttccggcgaagtctaccttgacgggaagaatgtaacgacgatgaagagccgcgagcttttggaagcgcgcaggaatatgcagctcgtctttcagaacccctacggctttttgaatccaagaatgactaccggcgacatcatcgccgagcctatgaggatatacaagcagcgcgggcttttggaaatgaccgagaatgaaatcatccagcgtgtcgaagacctcatggaaatggtcggccttttgaagtattaccgcaaccgttatccgcacgaattttcaggcggccagaggcagcgcatcggcatcgcccgcgccctggcgttaaagccccagttgatcttagccgatgagccgatttccgcccttgacgtttccattcaggcgcagattttgaacctttttaaggacatacaaaaagaaatggggctttcgtatctctttatcgcccatgatctcgccgttatcgaatatatttccgaccgcgtcgcgnngtga

SEQ ID NO: 46062 - protein, 239 aa, Unknown
  Obtained from environmental sample
  DOMAIN (48)...(239): ABC transporter
  misc_feature (1)..(239): Xaa is any amino acid
MSDQFNANNLLEVKDLRMYFHTGTKGLFNREKRYTYAVDGVSFNIKKGETLGLVGESGCGKSTVVRAVSHLHTPTSGEVYLDGKNVTTMKSRELLEARRNMQLVFQNPYGFLNPRMTTGDIIAEPMRIYKQRGLLEMTENEIIQRVEDLMEMVGLLKYYRNRYPHEFSGGQRQRIGIARALALKPQLILADEPISALDVSIQAQILNLFKDIQKEMGLSYLFIAHDLAVIEYISDRVAX

SEQ ID NO: 46063 - DNA, 1701 bp, Unknown
  Obtained from environmental sample
  misc_feature (1)..(1701): n is a, c, g, or t
atggcagattccggtgcgcgtggttcaagggagcagattaagcagctttctggtatgcgcggtttgatgcaaaagccaactagaaaaataggcgaacacgaggttatagaaaacccaattaccagctgtttccgcgatggcttgaattccttggaatactttatctccactcacggtgcacgtaaaggtctatccgatacggctttaaaaaccgcagatgctggttatttaacacgccgtttggttgatgttgcgcaaaacttggtgattaccgaagaggattgctgtgaaataaaaatcaccgcagagcgaatatccgttgagcattacgaaaacataaaagacacctccgaggctcttagcttgttcactaaaaggttgagcggatatgtggcagcaaacgatatttcgcaccccgaaaccaaagaggttttggcaaaaagaggcgacttcttggaaaaagaaattttgcgcaaattgatgttcatagaattgaagctcatacacgcaataaactacgaacacctccgcaaaaaaatgctcggaaccactttggaaaaagccgttcacggtgaagacggaaaaacagtggtttctgcaaattccattataaacgattcaaaactgatggaaatgataaaagcgggtgttaaagctcctatacatttggctgtaaaaggcattgtccgttctgcatccaaagacggcgataacattgttcaagctcttggcgagcgtattttagggcgtttctcccttaaagacattaaacaccctgtatccgatgccttgattgtttccaaaggtgaaatgatagaggaaaaacacattccaaaaattttggatgcgggcatagaagaagttgcggttcgttctgttttaacttgcaattcacccattggggtttgcgcaaaatgttatggcagaatgcttgcatctggccgtttggtggacttgggcgaagccgttggcgttttggcagctcagtccattggcgaacctggtacgcagctgacacttagaaccttccacattggaggtgcttctagccgcataactgtggaaaacagcaaaaaagctacggtagatggaaaggtcttcttagaaaacagcgatgaaatagaatataaaggttctcaaatagaaattggccgcatggcagagcttgtgttgctagataccaatggcataaacaaaggccgctggcaaattccttatggcgcaacgctcaaagtggaaaatggcaaagatgttaaaaaaggcgagatgctttatgaatgggatccatataacaatccaataataagcactgtggctggtaaaatacagcttttggattttgcagaaaaaacaacatatatgtcggaagttgacgaaacaacaggcatagagacttggacaataataaacgatagacgaggcaaaaaacgcgcttctataaatgttatgaataatggcgagcgcgttggtcatttctttttgccaaatggagctattttaactgttcgcgatggtgatacaataatcagcggccaaacaatagcaaaattgccacgttccgttgaaaaacaaaagacatcacaggtggtttgccacgagttgcagaattgtttgaagctcgcgagccaaagaactcggcaatacttgctccaaccaatggtgtggttgcctttggcgcagaaaagaattctggacaaatag

SEQ ID NO: 46064 - protein, 566 aa, Unknown
  Obtained from environmental sample
  DOMAIN (47)...(561): RNA polymerase Rpb1, domain 5
  misc_feature (1)..(566): Xaa is any amino acid
MADSGARGSREQIKQLSGMRGLMQKPTRKIGEHEVIENPITSCFRDGLNSLEYFISTHGARKGLSDTALKTADAGYLTRRLVDVAQNLVITEEDCCEIKITAERISVEHYENIKDTSEALSLFTKRLSGYVAANDISHPETKEVLAKRGDFLEKEILRKLMFIELKLIHAINYEHLRKKMLGTTLEKAVHGEDGKTVVSANSIINDSKLMEMIKAGVKAPIHLAVKGIVRSASKDGDNIVQALGERILGRFSLKDIKHPVSDALIVSKGEMIEEKHIPKILDAGIEEVAVRSVLTCNSPIGVCAKCYGRMLASGRLVDLGEAVGVLAAQSIGEPGTQLTLRTFHIGGASSRITVENSKKATVDGKVFLENSDEIEYKGSQIEIGRMAELVLLDTNGINKGRWQIPYGATLKVENGKDVKKGEMLYEWDPYNNPIISTVAGKIQLLDFAEKTTYMSEVDETTGIETWTIINDRRGKKRASINVMNNGERVGHFFLPNGAILTVRDGDTIISGQTIAKLPRSVEKQKTSQVVCHELQNCLKLASQRTRQYLLQPMVWLPLAQKRILDK

SEQ ID NO: 46065 - DNA, 762 bp, Unknown
  Obtained from environmental sample
  misc_feature (1)..(762): n is a, c, g, or t
ttgccacgagttgcagaattgtttgaagctcgcgagccaaagaactcggcaatacttgctccaaccaatggtgtggttgcctttggcgcagaaaagaattctggacaaatagtgctcattaaaaactcagacacagaagaagaaattgttgttccgcacggaaaacatctttccgttcacgatggcgatagagttcgcaaagggcaggcaatagccgagggttctgtgaacttgatggatattctccgcattttgggcgaagaggaattgcaaaggcatttggttgacgaaattcaagcggtttatcgcttgcaggctgttaccatttccgataagcacatagagtgcattgttcgccaaatgatgagaaaggtagttataacagaaccaggcgattccaaattcctaacaggcgaagatgtttctagaatagagcttcgcttggaaaacgtgcgtttgcaagaagaaggcaagcaaatagctcaatttgccccgctacttctcggaataacaaaagctgctcttgcaatggatagctttatagccgccgcttctttccaagaaaccacaaaagtactaaccagagctactatatcgggttccaaagacaagttgctaggtttaaaggaaaatgtgattatgggtcgtttaataccatctggtacaggttctagacacttgcgccagctcgaaataaaagattccgatgtaaaagacgaaattgtggaaaatccccgccagtttgtcttattcagaagatga

SEQ ID NO: 46066 - protein, 253 aa, Unknown
  Obtained from environmental sample
  DOMAIN (15)...(90): Apocytochrome F, C-terminal
  misc_feature (1)..(253): Xaa is any amino acid
MPRVAELFEAREPKNSAILAPTNGVVAFGAEKNSGQIVLIKNSDTEEEIVVPHGKHLSVHDGDRVRKGQAIAEGSVNLMDILRILGEEELQRHLVDEIQAVYRLQAVTISDKHIECIVRQMMRKVVITEPGDSKFLTGEDVSRIELRLENVRLQEEGKQIAQFAPLLLGITKAALAMDSFIAAASFQETTKVLTRATISGSKDKLLGLKENVIMGRLIPSGTGSRHLRQLEIKDSDVKDEIVENPRQFVLFRR

SEQ ID NO: 46067 - DNA, 813 bp, Unknown
  Obtained from environmental sample
  misc_feature (1)..(813): n is a, c, g, or t
atgctctattccataggcaaagatagttcggttatgcttcatatagctatgaaagccttttatcccgaaaaacctcctttcccttttttgcatatagacaccagctggaaatttcgtgatatgattacctttcgtgaccaacgggcgcaggaactcggtattaccatgctggttcaccgcaatgaagaagcaatcgctcagggaatcaatccctttgaccatgacgcagcttatacggacattatgaaaactcaagctcttaaagatgcgcttacaaaatacggtttcacagcggcttttggcggcggtcgcagagacgaggaaaaatcccgcgccaaagagagaattttttccttccgcaacgctcatcacgcatgggatccaaaaaatcagcgaccggaaatgtggaaactctacaacacaaaaatcaacaaaggcgagagcattcgagtttttccaatttccaattggacggaaaaagatatttggcagtatatcagcagcgaaaatattcccattgtgccgctttattttgctgctccgcgtttggtggtattccgtagtggaaatatcattatggtggacgatgagcgtatgcgccttttgccaggtgaaaaaccagaaattaaaaaagtacgcttccgtacccttggctgttatcctctaactggcggagtggaatcagaggcagacacgctagacacagtgataaatgaaattttgggagccgccacatccgagcgcaccagccgaataatagacaaagaggctgctggcagcatggaacgccgcaagcgagaggggtatttctaa

SEQ ID NO: 46068 - protein, 270 aa, Unknown
  Obtained from environmental sample
  DOMAIN (1)...(225): Phosphoadenosine phosphosulfate reductase family
  misc_feature (1)..(270): Xaa is any amino acid
MLYSIGKDSSVMLHIAMKAFYPEKPPFPFLHIDTSWKFRDMITFRDQRAQELGITMLVHRNEEAIAQGINPFDHDAAYTDIMKTQALKDALTKYGFTAAFGGGRRDEEKSRAKERIFSFRNAHHAWDPKNQRPEMWKLYNTKINKGESIRVFPISNWTEKDIWQYISSENIPIVPLYFAAPRLVVFRSGNIIMVDDERMRLLPGEKPEIKKVRFRTLGCYPLTGGVESEADTLDTVINEILGAATSERTSRIIDKEAAGSMERRKREGYF

SEQ ID NO: 46069 - DNA, 609 bp, Unknown
  Obtained from environmental sample
  misc_feature (1)..(609): n is a, c, g, or t
atggataatgcaaaaaacggacttttgaaattcattgcctgcggcagcgtggacgatggtaaatcaactttaatagggcatattttgtacagttccaaactgctatatgccgaccaggaacaagcattgattttggacagccaagttggttcccgtagcggaaaaattgactactcgcttcttttggatggattgatggcagagagggagcaaggcataactatagatgttgcctatcgttactttaccacagaaaaacgcagttttatagtagcagacactccggggcacgaagaatatacccgcaatatggcagtaggtgcttcttttgctgacttggccattattctggtggatgctaaacaaggcgtattgtctcaaacacgccgtcatgcgcgaatttgctccctgatgggtatccgttattttgtgttctccgtaaataaaatggatttggtggctcacagcanagagcgttttgagggtattgcaaaagaaatagaaaaattggcagacgaattaaaattaggaaatatcattataattccgggtttctgccacagagggagacaacgtaaccagcctcagcaaaaatatgccttggtataa

SEQ ID NO: 46070 - protein, 202 aa, Unknown
  Obtained from environmental sample
  DOMAIN (9)...(151): GTPase of unknown function
  misc_feature (1)..(202): Xaa is any amino acid
MDNAKNGLLKFIACGSVDDGKSTLIGHILYSSKLLYADQEQALILDSQVGSRSGKIDYSLLLDGLMAEREQGITIDVAYRYFTTEKRSFIVADTPGHEEYTRNMAVGASFADLAIILVDAKQGVLSQTRRHARICSLMGIRYFVFSVNKMDLVAHSXERFEGIAKEIEKLADELKLGNIIIIPGFCHRGRQRNQPQQKYALV

SEQ ID NO: 46071 - DNA, 837 bp, Unknown
  Obtained from environmental sample
  misc_feature (1)..(837): n is a, c, g, or t
atgccttggtataacggtcccattctgctctcctatttggaaagtgtgaatataagcggaggcgaacctgagcagggtttctgtatgcccatacaacgggtttgccgtccagaccatacttttcgcggttttcagggacagatagaatccgggacattatcgttaaacgacactataacagccctacctagcggagaaatggtaattgtaaaatccatttacgtagcgaatgtttcagttgaatccgctaccacaggcgaacctgtcaccattcaatttgaccgagaagtggatgtgtccagaggctgtgtgttgatgcgaaaagcggagctgaaaatcgccaaagaatttgaagctactttgctgtggatggacgatgataaactgattcccggcaatgattactggataaaaatcggaacaaagctgctacctgccatcgtcaccggcataaagcataaggtggatatcaacacgggtgcgtatcttccagcaacttctgttggcaagaacgaaattatccgctgtgaaatggtgttatctgaaccagcagttttagacgaattccgtttgcacaaaactttgggtgagctgattctcatcgataggattagccacgctaccgccgcctgcggcgtaatagaagcggcaggaaaaacgatggaaaacggggttttgctaaaagatggcaaaaaccaactcgctgttggactgtttgacattttttattatcatcccgaaattcacactgtactcaggcacagcccatctccaaggaaatacagcccggcgatactttgcgctgcaggcaccggatataatatcacccgattttga

SEQ ID NO: 46072 - protein, 278 aa, Unknown
  Obtained from environmental sample
  misc_feature (1)..(278): Xaa is any amino acid
MPWYNGPILLSYLESVNISGGEPEQGFCMPIQRVCRPDHTFRGFQGQIESGTLSLNDTITALPSGEMVIVKSIYVANVSVESATTGEPVTIQFDREVDVSRGCVLMRKAELKIAKEFEATLLWMDDDKLIPGNDYWIKIGTKLLPAIVTGIKHKVDINTGAYLPATSVGKNEIIRCEMVLSEPAVLDEFRLHKTLGELILIDRISHATAACGVIEAAGKTMENGVLLKDGKNQLAVGLFDIFYYHPEIHTVLRHSPSPRKYSPAILCAAGTGYNITRF

SEQ ID NO: 46073 - DNA, 303 bp, Unknown
  Obtained from environmental sample
  misc_feature (1)..(303): n is a, c, g, or t
gtgctggttgggacaattttaaaaaagaaatggaggatatttgcaatggctgattatactattgatgaaacagtagatattaccgatgtggtttgtccggtgacttttgtgaaagccaaagtcgcgttggaagaacttgaagacgggcaggttttgtccattcgcctaaacgatggtgaaccggtgcagaatgttccccgtagcatcaaggaagaagggcatcaaattctaaaattgatagataacggagacggtacttacaacctgattgtaaaaaaaataactttggaggatcaaacatga

SEQ ID NO: 46074 - protein, 100 aa, Unknown
  Obtained from environmental sample
  DOMAIN (21)...(93): SirA-like protein
  misc_feature (1)..(100): Xaa is any amino acid
MLVGTILKKKWRIFAMADYTIDETVDITDVVCPVTFVKAKVALEELEDGQVLSIRLNDGEPVQNVPRSIKEEGHQILKLIDNGDGTYNLIVKKITLEDQT

SEQ ID NO: 46075 - DNA, 822 bp, Unknown
  Obtained from environmental sample
  misc_feature (1)..(822): n is a, c, g, or t
atgcggcaaacgcagaagaataatttttccctgcggctcaaagtagtaggcggaaacttaaccgcagagcaattggtcgctattgctgaaatcagcaaaaagtacggggacgggtatgttcacctaacttcacggcaaggtgtggagattccattcataaaattggcagatgtggaagcgataaaaactgaattggaaacgggtggagtgaataccggagtttgcggtccaagagtgcgcactgtaacagcctgccaaggcagtgcgatatgcccatctggttgcatagatacatatcctttggctgtagaaatttccaaccgttattttgggcaggaactgcctcataaattcaaattcggaattactggctgtatgaataactgcctcaaagcggaggaaaatgaccttggcataaaaggcggttatagcgttgaattggttaaggaaaaatgtaccttatgcggcgtgtgtgtaaaggcttgccgtgagggtgcaattaccaaaaccagcgaagggcttgcaattgataaatccaaatgcaattactgcggacgttgtgctaaatcttgcccctttgatgcgtggaaaggagaatctggatatattctctcatttggcggaacatttggcaacctgattgcaaagggcgagcagtttttgcctattattcgcaacaaggaagttttgtttaagattactgatgctgcactgaatttttttgctaaatatgcaaagccaagtgagcggttccgcgtgtgcatagaccgtgctggttgggacaattttaaaaaagaaatggaggatatttgcaatggctga

SEQ ID NO: 46076 - protein, 273 aa, Unknown
  Obtained from environmental sample
  DOMAIN (145)...(168): 4Fe-4S binding domain
  misc_feature (1)..(273): Xaa is any amino acid
MRQTQKNNFSLRLKVVGGNLTAEQLVAIAEISKKYGDGYVHLTSRQGVEIPFIKLADVEAIKTELETGGVNTGVCGPRVRTVTACQGSAICPSGCIDTYPLAVEISNRYFGQELPHKFKFGITGCMNNCLKAEENDLGIKGGYSVELVKEKCTLCGVCVKACREGAITKTSEGLAIDKSKCNYCGRCAKSCPFDAWKGESGYILSFGGTFGNLIAKGEQFLPIIRNKEVLFKITDAALNFFAKYAKPSERFRVCIDRAGWDNFKKEMEDICNG

SEQ ID NO: 46077 - DNA, 840 bp, Unknown
  Obtained from environmental sample
  misc_feature (1)..(840): n is a, c, g, or t
atgcccagcggagaaatggtaattgcaaaatccatttacgtagcgaatgttcnagttgaatccgctaccgcaggtgatccggtaaccattcaatttgaccgtgaagtggatgtgtccagaggctgtgtgttgatgcgaaaagcggaactgaaaatcgccaaggaatttgaagccacattgctgtggatggacgatgataaactgattcctggcaatgattattggataaaaattggaacaaaactactgcccgccattgtcaccggaatacaacataaggttgatatcaatacgggagcacatcttccagcgacctctgttggcaagaacgaaattatccgctgtgaaattgtgctatctgaaccgattgtcctagacgaattccgtttgcacaaaactttgggcgaactgatactcatagataggattagccacgccaccgccgcttgcggtgtaatagaagtagctggaaagacgatggaaaacggggttctgctaaaagacggcaaaaaccaactcgcagttggactatttgacagtttttattatcatcccgaaattcacactgtgctaaggcacagcccgcctccaaaggaatacaagcccagcgatactttgccgctgcaaggcactggatataattatccaccagattttgatattcctgccgaagctgataattacgccaacattcgtaatggaatttttacaggttttggtgaacgtgaaccaaaatttgcgttgttgaatgcaaatggatttgaattggataaaaaacctccacgtgattttggaaaatatcgcaaagtgatgttatgggaaaaggattttgagatttag

SEQ ID NO: 46078 - protein, 279 aa, Unknown
  Obtained from environmental sample
  misc_feature (1)..(279): Xaa is any amino acid
MPSGEMVIAKSIYVANVXVESATAGDPVTIQFDREVDVSRGCVLMRKAELKIAKEFEATLLWMDDDKLIPGNDYWIKIGTKLLPAIVTGIQHKVDINTGAHLPATSVGKNEIIRCEIVLSEPIVLDEFRLHKTLGELILIDRISHATAACGVIEVAGKTMENGVLLKDGKNQLAVGLFDSFYYHPEIHTVLRHSPPPKEYKPSDTLPLQGTGYNYPPDFDIPAEADNYANIRNGIFTGFGEREPKFALLNANGFELDKKPPRDFGKYRKVMLWEKDFEI

SEQ ID NO: 46079 - DNA, 846 bp, Unknown
  Obtained from environmental sample
  misc_feature (1)..(846): n is a, c, g, or t
ttgctttgttcctgcacgccgaagacagggacacaagcaaaacaaggtacgattcccgacgctttgggacgaaccccggtgttaagcgaaaatcctggccggatcgtgagccttgtgcctgcggttactgaaatcctctttgcgataggcgcgggcgaaaaagttgtcggcgttaccgaatactgtgattatccaatagaagcgaagacccgcacagttgtaggcggcttttcgggggcaaccgtcagcatggagatagtccgctcccttgagcccgatttcgtgatcgtttctgcggaaatgcacgccagggttgtgtcccttttggatgaacttggcatctcttcattcgccgttgaaccggggaatttctcccaagcctatgacacaatagccattttggggaaaatttgcggatgctctgacggcgctgtgaaagtgatcgcggaaatgcagggaaaaattagcgctgttgagcagaggattcaagggcgggaaagaccggcagtattctggctgcttaacctggatccgattatgacagcaggtcaggatactttcgttgccgaagtcataacccttgcgggcggcaaaaacgtctttgaagacataagcgaaaagtggccgcttgtaagcccggaacaaatttttttgcgtaaaattgactggattttttatggaaacgatatgggggaaatttcgctttcttcaaatgacttttggaaattaattcctgcggtcagcgatggccgtcttgcctcaattaacggagatcttctttaccgctacgggccgcgtctggctgacggggtggaactaatttcgagaatacttcatggcgaatag

SEQ ID NO: 46080 - protein, 281 aa, Unknown
  Obtained from environmental sample
  DOMAIN (32)...(259): Periplasmic binding protein
  misc_feature (1)..(281): Xaa is any amino acid
MLCSCTPKTGTQAKQGTIPDALGRTPVLSENPGRIVSLVPAVTEILFAIGAGEKVVGVTEYCDYPIEAKTRTVVGGFSGATVSMEIVRSLEPDFVIVSAEMHARVVSLLDELGISSFAVEPGNFSQAYDTIAILGKICGCSDGAVKVIAEMQGKISAVEQRIQGRERPAVFWLLNLDPIMTAGQDTFVAEVITLAGGKNVFEDISEKWPLVSPEQIFLRKIDWIFYGNDMGEISLSSNDFWKLIPAVSDGRLASINGDLLYRYGPRLADGVELISRILHGE

SEQ ID NO: 46081 - DNA, 867 bp, Unknown
  Obtained from environmental sample
  misc_feature (1)..(867): n is a, c, g, or t
atgatgaaccttatgggccaaagccttaattcggcgcaaagcaatatcgcgaaacagcttgacaattccaaccgcataatcggcgacatacacacaaaactcggttccctggaaacgacggccaaaaacatccaggacatcgggaaagacatttcttccctgcaaaatattctacaagcgccgaagctccgtggaaacctcggcgaattatttctggaagaccttttaaaacaaatactcccggaagcaaattacaaatataaacacagctttaaaaacggcacgcaggtagacgccatcattatactgggaggaaatatagttcctgttgactcaaaattcccgcttgaaagtttcaggcgtcttatagccgcagatagcgaggaaagcaaaaaaacattcaagaaagagtttgtttccagcgtaaaaaagcgcattgacgagattgcgaccaaatacattaacccggcggaaggaacctttgattttgccatgatgtatatccccgccgaaaatgttttttatgagaccatcatcaacgattcttcaactaacaaggactacgagcttttttattatgccatgtccaagcatgttattcctgtttcgcctaacagtttctacgcttacctaatggcattggtttacggcttaaagggatttaagattgagcaggaagccaaaacaatacttggagagctttcgcaggttcaggacaaattcggaaaattctttagcgattacagccttgtgggaaaacacctttccagcgcgataggcaggtacaacgacacggaaaagcaagcggaaaagctaaacgaccaaataaacaaaattacagggcaaagaacagaactcctcgattaa

SEQ ID NO: 46082 - protein, 288 aa, Unknown
  Obtained from environmental sample
  DOMAIN (6)...(288): RmuC family
  misc_feature (1)..(288): Xaa is any amino acid
MMNLMGQSLNSAQSNIAKQLDNSNRIIGDIHTKLGSLETTAKNIQDIGKDISSLQNILQAPKLRGNLGELFLEDLLKQILPEANYKYKHSFKNGTQVDAIIILGGNIVPVDSKFPLESFRRLIAADSEESKKTFKKEFVSSVKKRIDEIATKYINPAEGTFDFAMMYIPAENVFYETIINDSSTNKDYELFYYAMSKHVIPVSPNSFYAYLMALVYGLKGFKIEQEAKTILGELSQVQDKFGKFFSDYSLVGKHLSSAIGRYNDTEKQAEKLNDQINKITGQRTELLD

SEQ ID NO: 46083 - DNA, 687 bp, Unknown
  Obtained from environmental sample
  misc_feature (1)..(687): n is a, c, g, or t
gtggtacaggaacaaatcgccatccccatagaagtagaattcagaaacgtaaaaaccctgcggctaacggtttatccgcctgacggcagggtcaaggttatcgctcctgtcggcgcaagccgggaagacataagaaagtttgccgcttccaaaattgcctggatacaaaaacatcgcgagaaatttcttaatcactcaaaactgattgtttccctgaaaagccattccaccctttttgtctggggagaaccctgggaactggaaataattgagcgcaagggaaacccaaaaatcgtaatggaaaacggaagcatgaaaatgtatgtccgtcccgattccacaaatgcaaaaaggcaggaattccttgataaatggtacagtaaaatcctaaaagcccaggcccttccgcttattgcagaatgggaagggcggataggcgtagaagtaaaaaaactctttataaggaaaatgaaaacctgttgggggagctgtaatggcacaaggcagactttaaggctgaattcagaattggcaaaaagaaagcgtgaatgtcttgaatacgtgattgttcacgagatgcttcacattattgaaaaaagccacgaccgcagattttacagccttctgaacaagtatttgcccgcgtggaanattattctcaagaagatgaatgccggggagctataa

SEQ ID NO: 46084 - protein, 228 aa, Unknown
  Obtained from environmental sample
  DOMAIN (20)...(226): Protein of unknown function DUF45
  misc_feature (1)..(228): Xaa is any amino acid
MVQEQIAIPIEVEFRNVKTLRLTVYPPDGRVKVIAPVGASREDIRKFAASKIAWIQKHREKFLNHSKLIVSLKSHSTLFVWGEPWELEIIERKGNPKIVMENGSMKMYVRPDSTNAKRQEFLDKWYSKILKAQALPLIAEWEGRIGVEVKKLFIRKMKTCWGSCNGTRQTLRLNSELAKRKRECLEYVIVHEMLHIIEKSHDRRFYSLLNKYLPAWXIILKKMNAGEL

SEQ ID NO: 46085 - DNA, 819 bp, Unknown
  Obtained from environmental sample
  misc_feature (1)..(819): n is a, c, g, or t
ttggcggatgagagggctttttccgtggattttgacgtcaggacaaacagcaaccgtgttgtggaagctgcggatattctggtccgcaaacggagccagagccagcaggtttacttcagggaagtttctgtagagccgggggaatctttttcctttgtcgaggatctgaataattacgccgccctgacccaaagcggcagttatgtggttcaggcaaagatatacccggatctttaccatactgtcaggtctgagccttcaggcgtatggtcttccggggccagcggcatcagtccgggcgcaactttggctgccgcaggcaagcctctggaatccaaccgccttgcgctcaacgtaaggccaaggctcatccgcggcccggacggtatcccccttgaactggacgtggaaaccaacgcgattcttgtccgcgagaaactccctcctgacgaggttattcgttacctgctgacagccaggcaaaaaagtcagtgggagaaattcttcctttaccttgacctggaagccatgctctcccgcgacgcgtatcggaggcggcagtacaacgccgaatccgaagaaggccgccaaaggatgatcgcccggtaccggcaggatctgcaaaattcagtgatagacggggatatttcgcttattcccatgaattttatcattgagcgtactacccataacgggcagacggggacggtaatcgtgctggaatatttcaggataggagattataccgagaaaaagcgctatacctggtatctgaaaaaagagatgatatatggactgttgtcgattatcaggttgtaa

SEQ ID NO: 46086 - protein, 272 aa, Unknown
  Obtained from environmental sample
  misc_feature (1)..(272): Xaa is any amino acid
MADERAFSVDFDVRTNSNRVVEAADILVRKRSQSQQVYFREVSVEPGESFSFVEDLNNYAALTQSGSYVVQAKIYPDLYHTVRSEPSGVWSSGASGISPGATLAAAGKPLESNRLALNVRPRLIRGPDGIPLELDVETNAILVREKLPPDEVIRYLLTARQKSQWEKFFLYLDLEAMLSRDAYRRRQYNAESEEGRQRMIARYRQDLQNSVIDGDISLIPMNFIIERTTHNGQTGTVIVLEYFRIGDYTEKKRYTWYLKKEMIYGLLSIIRL

SEQ ID NO: 46087 - DNA, 753 bp, Unknown
  Obtained from environmental sample
  misc_feature (1)..(753): n is a, c, g, or t
ttgcgccgccgccaaccgttgttttttcttgattacatcgcctgcggaaaaaatatcccgcaaaaaatagaacaaattgtaagcggcgtcgctgacggttgcgtgcaggcaggctgcgctcttgtcggcggcgaaacagctgaacaccccggactaatggaaattgacgagtacgacatagcgggtttttccgtaggcattgttgagaaatcaaaaatacccgataaaaacagcgtaaaaaacggcgacgcggttatagcgattgcgtcatcgggagtacactcaaacgctttttcacttacgcgtaaagtttttgggatagacaaaaaacctaaaattctgcaaaaacattttcccgaactcggtaaaacgttaggtgaagaacttttaataccgacaaaaatttatgtaaaatcaattcttactctccttgaaaaaacgcccgtccgctcaataagccacataacaggcggcggcttccacgaaaatataccccgcgccttcggcgaaaatgtaggcgctgtaattaaaaaaagcgctgtggaaatccctcctgtcttcaagctaatcgccgcgcaaggtaaaatcccggaaagggatatgtttaacacttacaacatgggtgttggaatgtgcgtaatcacccccgcggcaaacgcggacgaggcggtcagcgttttacgttcctgcggagagaaagcgtatatcatcggcgagataaaagacggcgtaagcggagtattacttgactaa

SEQ ID NO: 46088 - protein, 250 aa, Unknown
  Obtained from environmental sample
  DOMAIN (80)...(250): AIR synthase related protein, C-terminal domain
  misc_feature (1)..(250): Xaa is any amino acid
MRRRQPLFFLDYIACGKNIPQKIEQIVSGVADGCVQAGCALVGGETAEHPGLMEIDEYDIAGFSVGIVEKSKIPDKNSVKNGDAVIAIASSGVHSNAFSLTRKVFGIDKKPKILQKHFPELGKTLGEELLIPTKIYVKSILTLLEKTPVRSISHITGGGFHENIPRAFGENVGAVIKKSAVEIPPVFKLIAAQGKIPERDMFNTYNMGVGMCVITPAANADEAVSVLRSCGEKAYIIGEIKDGVSGVLLD

SEQ ID NO: 46089 - DNA, 534 bp, Unknown
  Obtained from environmental sample
  misc_feature (1)..(534): n is a, c, g, or t
gtggaagagcggctgtcttggaggcggggagttatcccttgtcatttcgtccaacccggcgtttacgctcttgaacgcgcgcaaaaagcgggaataaaatccgtaacagtcgaaagaaaaaaatacgcggcgcctgaagactttgacgccgctgtctgcgccgcgttatccgaagaagagatagatcttgtagttctcgcgggatttttatccgtcattggtacgcaagtcctgcaaaaatatgagaacaaaataataaacgttcaccccgcgctgataccgtcattttgcggcaagggattttacggtcttcgtgttcatgaggctgtccttgaacgcggcgtaaaaataacaggcgcgacagtccatcttgtaaacgaagaagtagacggcggaaaaatcattctgcaaaaagcggtggacgttctcccagaagacacgcctgagtctctgcaacagagagtaatgcgcgaagcggagtgggtaattcttccgaaggcggtagaaatgttttgcaaaggagagataaattaa

SEQ ID NO: 46090 - protein, 177 aa, Unknown
  Obtained from environmental sample
  DOMAIN (7)...(168): Formyl transferase
  misc_feature (1)..(177): Xaa is any amino acid
MEERLSWRRGVIPCHFVQPGVYALERAQKAGIKSVTVERKKYAAPEDFDAAVCAALSEEEIDLVVLAGFLSVIGTQVLQKYENKIINVHPALIPSFCGKGFYGLRVHEAVLERGVKITGATVHLVNEEVDGGKIILQKAVDVLPEDTPESLQQRVMREAEWVILPKAVEMFCKGEIN

SEQ ID NO: 46091 - DNA, 828 bp, Unknown
  Obtained from environmental sample
  misc_feature (1)..(828): n is a, c, g, or t
atgaaagtattagtaattggttcaggcggcagagagcattcgataatcaaggcgttaaagaaaagcgaaaagatcaacaaaatattttgcgcccccggcaacggaggcatcagttttgaagcggaatgtgtaaaaataaaagcaatcgatattcccgccgttacggattttgccgttcaacaaaaaattgactacgttgtagtcgctcccgatgatcctctcgctatcggaatggtagacgctctggaagcaaaagggatacgctgtttcggaccgaataaagcggcggcaagaattgagagcagtaaagtcttttccaaaaatctgatgaaaaaatacggtatccctaccgccgcttatgaatctttctctgactcaggagacgctttaaactatgtaaactcaaataccgtctcttttcccctcgtgataaaagccgacgggcttgcgttagggaagggagtaattatcgctgaaaccaaagaacaggcggttgaggcggttacctcaatcatggttgaaaaaaagttcggcgattccggctgtaatatcgtcatagaggaatttttaacgggaccggaagtttcagtcctttcattcacagacggaaaaacagtcgtcccaatggtttcatcaatggatcataaacgcgcttttgacgggaacacgggacccaacacgggaggcatgggagtaatcgcgccaaacccgcactacacaaaggaaattgccgccgtttgcgaaaagacaatttttactccaacaatccgcgccatgaaagaagaaggctgtccgttcaagggctgtctgtatttcggtcttatgtaa

SEQ ID NO: 46092 - protein, 275 aa, Unknown
  Obtained from environmental sample
  DOMAIN (1)...(100): Phosphoribosylglycinamide synthetase, N domain
  misc_feature (1)..(275): Xaa is any amino acid
MKVLVIGSGGREHSIIKALKKSEKINKIFCAPGNGGISFEAECVKIKAIDIPAVTDFAVQQKIDYVVVAPDDPLAIGMVDALEAKGIRCFGPNKAAARIESSKVFSKNLMKKYGIPTAAYESFSDSGDALNYVNSNTVSFPLVIKADGLALGKGVIIAETKEQAVEAVTSIMVEKKFGDSGCNIVIEEFLTGPEVSVLSFTDGKTVVPMVSSMDHKRAFDGNTGPNTGGMGVIAPNPHYTKEIAAVCEKTIFTPTIRAMKEEGCPFKGCLYFGLM

SEQ ID NO: 46093 - DNA, 549 bp, Unknown
  Obtained from environmental sample
  misc_feature (1)..(549): n is a, c, g, or t
ttggccgagttagtatctctgttacagtcagaccatggaggtgcgcacatggccagaccgaagccggcggacatgcgggagctcgcggagcgggcgcagagggacctcgacgccatagacggcaagcgcctggcggtcaagctgaagtcgatcagggcggcggcgagcagccccgtcgccctggtggcggacgtgatggaggtgacggtgcagagcatactgcgctggatcgccgagtacaggggaggcggcctcgacgccctgcgccccgcgccgaaggcgcccaggcgctccaagctgggcgacgcccagaaggaggccgtgctctcgtggctgcggtcgtgcaggacggcccggggcgaggagacccgctggacgctggacggcctgcgcgccgccatcgcggaggagttcggggtcacgctcgccaggaacaccatctgggtgtggataaggaaggagggccagaggcagatggtccccaggccgaggcaccaccaggcggacacggcggcgcaggaggacttcaaaaaaaaacggcggagctga

SEQ ID NO: 46094 - protein, 182 aa, Unknown
  Obtained from environmental sample
  misc_feature (1)..(182): Xaa is any amino acid
MAELVSLLQSDHGGAHMARPKPADMRELAERAQRDLDAIDGKRLAVKLKSIRAAASSPVALVADVMEVTVQSILRWIAEYRGGGLDALRPAPKAPRRSKLGDAQKEAVLSWLRSCRTARGEETRWTLDGLRAAIAEEFGVTLARNTIWVWIRKEGQRQMVPRPRHHQADTAAQEDFKKKRRS

SEQ ID NO: 46095 - DNA, 807 bp, Unknown
  Obtained from environmental sample
  misc_feature (1)..(807): n is a, c, g, or t
gtggggcatgaattcaacctttcttccacaaagcagcttcaggaagtgctgtttgttgagcgcaaacttactccgactaaaaaaacaaagacaggcttttctacggacgcggcggcgatggaagaccttgcgcggcaggaccccgtccccgcccttatcctgcgccaccgcactctttccaaattaaaatcaacttatgtcgataccttaggtgatatggcggacgacgaagggcgcgtgcataccaactttgtgcagacgggaaccgctacaggccgcctttccagcagggaacccaatctgcagaatattccggtgcgcgcggaagaaggccggcgcatacgcgaagcgtttatcgcgaaacccggaagcctcctcatttccgcagactacagccagatagagcttgtcgtgctggcacatctttccgaagataaaaatttaatttccgcgtttcttgaaaataaagacgttcacgcgcgcaccgcgtcgttgatcttcggcattgatgaaagtgaaataaacggtgagcaacgaagaatggcaaaagtaataaacttcggcgtgatatacggaatgagcgccttccgccttgccaacgagttgaacatcagccgtacggacgcaacgaattttatcaatgcgtattttaccacctattcgggcgtcagtaattttattgagaatataatcaaaaaaaccgaaaatgcggctatgttacaacaatttcaggacaccgccgttatattccaacgattaattcgcggaacaaaaccgaaaaagcggccgccgaacgcgtcgccgtaa

SEQ ID NO: 46096 - protein, 268 aa, Unknown
  Obtained from environmental sample
  DOMAIN (2)...(266): DNA polymerase family A
  misc_feature (1)..(268): Xaa is any amino acid
MGHEFNLSSTKQLQEVLFVERKLTPTKKTKTGFSTDAAAMEDLARQDPVPALILRHRTLSKLKSTYVDTLGDMADDEGRVHTNFVQTGTATGRLSSREPNLQNIPVRAEEGRRIREAFIAKPGSLLISADYSQIELVVLAHLSEDKNLISAFLENKDVHARTASLIFGIDESEINGEQRRMAKVINFGVIYGMSAFRLANELNISRTDATNFINAYFTTYSGVSNFIENIIKKTENAAMLQQFQDTAVIFQRLIRGTKPKKRPPNASP

SEQ ID NO: 46097 - DNA, 837 bp, Unknown
  Obtained from environmental sample
  misc_feature (1)..(837): n is a, c, g, or t
atgtacccaaacctaggagaccgtatgcaggtaaagaagaaagccgcgaaaaagacctataagtcgtcggccaagaaaaagaccgttccgagcctcaacaaggttacgatggacgaattgaaagccattgtagccgaagcatcaaagacaatggccgaaaaccacgccaaaacagaggccgctatacaagaactatccgccgaaaaccggaagttatctgccgatctcgctaaaggccacgccaaaacagaggccgcgattgatagactgactgcccaaaacgataggacagcagacgagattcggaaactatccgccgaaaaccggaaaacctcagacgaggttcggaaaaccgccgctcttgtccacgagttgaccagaaacataggcggtcttaataacagttacggtactcttgtcgagatcgtcctcatacccaaaatacgccacgacataaacgctatcggtaagcacacttttaacagggtactggtagacaaaaaggtcagcgccctcgtcgccggtgaaaagaacaccatcggcgagatagacttgtttttattcagcgacgccgacgccgaagcaacggtagtcgagataaaggcgcaattcaacataaaccaagtgaaagatcgtttggagcggttacagaaattccgcgactacgaagaagacgctgagatcaaaggcaagaaacttttcggagcgatagccggtatatacattgatccgagggccaaagccttcgccttagaaaacggcctatacgtcatagagatacacgaggaagtggaaaaaatagacataaccaaacccgaaacctgccggaagtggtaa

SEQ ID NO: 46098 - protein, 278 aa, Unknown
  Obtained from environmental sample
  misc_feature (1)..(278): Xaa is any amino acid
MYPNLGDRMQVKKKAAKKTYKSSAKKKTVPSLNKVTMDELKAIVAEASKTMAENHAKTEAAIQELSAENRKLSADLAKGHAKTEAAIDRLTAQNDRTADEIRKLSAENRKTSDEVRKTAALVHELTRNIGGLNNSYGTLVEIVLIPKIRHDINAIGKHTFNRVLVDKKVSALVAGEKNTIGEIDLFLFSDADAEATVVEIKAQFNINQVKDRLERLQKFRDYEEDAEIKGKKLFGAIAGIYIDPRAKAFALENGLYVIEIHEEVEKIDITKPETCRKW

SEQ ID NO: 46099 - DNA, 489 bp, Unknown
  Obtained from environmental sample
  misc_feature (1)..(489): n is a, c, g, or t
atgtacaaaagctgtttgcccagcgtaccggggaaacaggccagagaagagatgattcttgccagggagacacaccttgattcccttgctgtcagaataaaggaacctgtcattcgaaaggtgatggagagccttataacaggaacacctgacccggagcttaccgcaagcgaaggttttcgtatatgcatggatttgggacttgtaaaaaaagagggtggtacgctaatggttgcaaatcccatatacaaagaaacacttgcaaggcaattgacctattctacgcaggacgccattcccgaacctgaatggcaatgggaaaagccggacggttctcttgacatggatgctctgctgcgggagtttcagatattctggcgggaaaattccgaagtgtgggaagaaaagatgagttataccgaagcttttccccatttattactgatggcgtttttacagcgggtgcttaactgccgggggccgtattga

SEQ ID NO: 46100 - protein, 162 aa, Unknown
  Obtained from environmental sample
  misc_feature (1)..(162): Xaa is any amino acid
MYKSCLPSVPGKQAREEMILARETHLDSLAVRIKEPVIRKVMESLITGTPDPELTASEGFRICMDLGLVKKEGGTLMVANPIYKETLARQLTYSTQDAIPEPEWQWEKPDGSLDMDALLREFQIFWRENSEVWEEKMSYTEAFPHLLLMAFLQRVLNCRGPY

SEQ ID NO: 46101 - DNA, 849 bp, Unknown
  Obtained from environmental sample
  misc_feature (1)..(849): n is a, c, g, or t
atggctattattaccatttcacgcgaattggcaactctgggcgatgaaacagccagggaacttgcaaaacaactggggtacaatcttgttgacaagaacacgctgtcggaacggataaagtcctatggaattgaagacagcaagctaatgaaatacgacgagcgcaaaccgtcacttattgcctcgttgtcgcatgacagggacgattacctgcattaccttagaacagcgattcttgcggaagcggaacacggaagctgtatttttatcggcaggggagccggcgctatttttaaaaatatacccgcccatatttccatgtttttggctgccccgcttgaaatccgcatagagcgcgttaagagttatttccattgcgatgaacacagggcgcggcagatcattgaacgcagcgaccaggaccgccttgggtttcatcgatatttttttgatattgagtggaggaatccggaaaattaccacatatccctgaacacgggaattaccccccccgcgctctgcgccgaaattgtcatgctgtttaaaaaccggacttttactccggaggcggaggaacaatataaaatccgcctgaaggagttaatccttgaacagaggataaagcataatattatatatgagcaggggatacccgttcatttccttgaagtatccgcggccggcgtattcgccgccagcggcgccgttaaactgtacggcgtggtaaattctcaaagcttgtcagatgccgcaatgaaagcggctcaggaaacagctgccgcaattgaaagccccgtaaccatacgcaatgaaattcagattgtgcatgaatacacggttatgccttaa

SEQ ID NO: 46102 - protein, 282 aa, Unknown
  Obtained from environmental sample
  misc_feature (1)..(282): Xaa is any amino acid
MAIITISRELATLGDETARELAKQLGYNLVDKNTLSERIKSYGIEDSKLMKYDERKPSLIASLSHDRDDYLHYLRTAILAEAEHGSCIFIGRGAGAIFKNIPAHISMFLAAPLEIRIERVKSYFHCDEHRARQIIERSDQDRLGFHRYFFDIEWRNPENYHISLNTGITPPALCAEIVMLFKNRTFTPEAEEQYKIRLKELILEQRIKHNIIYEQGIPVHFLEVSAAGVFAASGAVKLYGVVNSQSLSDAAMKAAQETAAAIESPVTIRNEIQIVHEYTVMP

SEQ ID NO: 46103 - DNA, 1113 bp, Unknown
  Obtained from environmental sample
  misc_feature (1)..(1113): n is a, c, g, or t
atggtatccttaactattccggcggctgccggtacaacttacgatttattagcgctgggggctctggtaaccccgctggatccggggattattccctttgctgaggcaaacgaatatttattgcatgtttcaggcggcgagtataatgtagcgaccaatctttcaacttgttttggcttaaagaccgctatcgcaagcgctatggtaaattacccaatagggcgtaaaattgagtacgccgtacaaaaagcgggagttaccccttattataagcgttttgaacatgacggagtgcgcggcccgaacatggctatcgtgtggagcgaccgggggcagggagtacgcgctcctgtggtgttttacaaccgttccaacgaagcggcgcaaaggctcgcccccggaagtttcgactgggacgcgatttttaagaagggcgtacgctggtttcactcgggcggaattttcagcgctctttcgcccactacgccggaacttgtcatagaagcgatgcaggcggcaaaaaaagccggagcggttgtatctttcgatttaaactaccgcgcgaaactttgggcagtcgccgccgccgagcagggcaagaccgcggcgcaggcaagcgaggaagcggctaaaacattacgcagaatagcaagtaatgttgacgtgcttgtcggcaacgaggaagatctgcaaaaagggcttggtttaaaagggcaggatgttgaaacaaagggaaagcttgatccttccgctttcttcggcatgatggaaagcgttacgaaagatttcccgaatattaaagcggtagcgactactttacgcgaagttcattccactaaccgccattcatggagcgcggtattgtggctggacgcaaaaattacccaggcgcccgccgcggaacttgacgtatatgaccgggtaggcggcggtgacggttttgccgcgggcctgttctacggtctgttaagcggcaagagtcccgaagaggcgctgcggctgggctgggcgcacggagcgttactgactaccactccgggcgacacttccatggtgagtctggatcaggtggaagcttttgccaaaggcggttccgccaggattcagcgttaa

SEQ ID NO: 46104 - protein, 370 aa, Unknown
  Obtained from environmental sample
  DOMAIN (13)...(355): pfkB family carbohydrate kinase
  misc_feature (1)..(370): Xaa is any amino acid
MVSLTIPAAAGTTYDLLALGALVTPLDPGIIPFAEANEYLLHVSGGEYNVATNLSTCFGLKTAIASAMVNYPIGRKIEYAVQKAGVTPYYKRFEHDGVRGPNMAIVWSDRGQGVRAPVVFYNRSNEAAQRLAPGSFDWDAIFKKGVRWFHSGGIFSALSPTTPELVIEAMQAAKKAGAVVSFDLNYRAKLWAVAAAEQGKTAAQASEEAAKTLRRIASNVDVLVGNEEDLQKGLGLKGQDVETKGKLDPSAFFGMMESVTKDFPNIKAVATTLREVHSTNRHSWSAVLWLDAKITQAPAAELDVYDRVGGGDGFAAGLFYGLLSGKSPEEALRLGWAHGALLTTTPGDTSMVSLDQVEAFAKGGSARIQR

SEQ ID NO: 46105 - DNA, 339 bp, Unknown
  Obtained from environmental sample
  misc_feature (1)..(339): n is a, c, g, or t
atgacagaaacagaaacagaactgcataaaatcttcagccaaaacctcaggaaataccgccacgattttggcctgactcaaattgcgcttgccaaaaagaccggtgtttccaccaattttgtaaacgacatcgaatcgggaaaaaaatgggcttcactgacaactatggtaaaaatcgcgaaggtcttcaatattcatatctatgaacttttgaaaccgcccaacctgcttcccgacaatttgagcagtatcctgaaaaaatacaccgaggatgttgaggcagccattgaccgtattaaccatgctcttttggagaatgaaaaaacaatccctcattga

SEQ ID NO: 46106 - protein, 112 aa, Unknown
  Obtained from environmental sample
  DOMAIN (16)...(70): Helix-turn-helix
  misc_feature (1)..(112): Xaa is any amino acid
MTETETELHKIFSQNLRKYRHDFGLTQIALAKKTGVSTNFVNDIESGKKWASLTTMVKIAKVFNIHIYELLKPPNLLPDNLSSILKKYTEDVEAAIDRINHALLENEKTIPH

SEQ ID NO: 46107 - DNA, 840 bp, Unknown
  Obtained from environmental sample
  misc_feature (1)..(840): n is a, c, g, or t
ttggatattgcggtgcatagaggtgcgggggcttatgtctgtggcgaagagactgctttgataaacagcttggaagggcaaaaagggcagccacgcttaaagccgcctttccctgcggtgaacggtgcgtggaatatgcctacctgcgtcaataacgttgaaacaataatggcactgccttggattttggaaaaaggtcccgaagaatatcagaaattggggacacccaaagcgggcggcacaaaagtattctgcatttctggcgatgtgaaaaaaagaggggtatatgaggcgaggcttggcatccctttaatggaacttctggaaagcgaagagtattgcggcggcatagttggcaatttaaaaggttgcataccaggcggttcatcaactcaggtcttaaccgttgaagaatgtaaaaaagcgaatatggattacgaaagccttgctgcgatgggaaccatgttcggttctggtgcggttatgccctttaacgatacccacagcattgttcaaatgctgaacacacttggcaaattttactcgcacgaatcttgcgggcaatgtaccccttgccgcgaaggaacgggttatgttcagcggataatatcttgcattgcaaacggcaaaggcaaagacggggatatagaacttttagacagcctttgcactggcttcaccggcacaacggtttgcccgctcgcagccgcccttgctgctcccgtgcaaagctacttgcaaaaattccgcagtgaatttgaagaggcaattttaaagaatccagaacacgcaagcccaaggctaaacgcgaattatcgtccgcagggatggtggggatga

SEQ ID NO: 46108 - protein, 279 aa, Unknown
  Obtained from environmental sample
  DOMAIN (1)...(129): Respiratory-chain NADH dehydrogenase 51 Kd subunit
  misc_feature (1)..(279): Xaa is any amino acid
MDIAVHRGAGAYVCGEETALINSLEGQKGQPRLKPPFPAVNGAWNMPTCVNNVETIMALPWILEKGPEEYQKLGTPKAGGTKVFCISGDVKKRGVYEARLGIPLMELLESEEYCGGIVGNLKGCIPGGSSTQVLTVEECKKANMDYESLAAMGTMFGSGAVMPFNDTHSIVQMLNTLGKFYSHESCGQCTPCREGTGYVQRIISCIANGKGKDGDIELLDSLCTGFTGTTVCPLAAALAAPVQSYLQKFRSEFEEAILKNPEHASPRLNANYRPQGWWG

SEQ ID NO: 46109 - DNA, 1014 bp, Unknown
  Obtained from environmental sample
  misc_feature (1)..(1014): n is a, c, g, or t
atggtggggatgaacatgataaccattactgttgacaacaaagaagttcaggttccagagggcaagaacctcatagaagccctcaaagcggttggcatagaaactccgcatttgtgctaccacccagacttgcccgttagcgggaattgccgccagtgcttagttgaagtggacggtcctagaggaatggcactcaccatcggttgttatacgcctgtccgtgcgggtatgaaggttgcaactcctgcaagtagcccaaaggttgccgaagcgcgcaaagcggttttggaatttttgctcgtgaaccatccgctggactgccctatctgcgacaaggctggcgaatgccttttgcaggaaaactatatattggcaggagcctcgaatagcagattgaaccccgatgttggcaagcaataccacgggaaccccgaacactcctcaacagatggcaaagggcaacacagaggcgggaaacgaattgatttagggccaagagttgtgctggacgaagaacgttgtattcaatgtagcagatgcgtccgatttatgcggagtgtcgcaggcgatgagcagttgcagttggcggcaagaggcgggcacacttatatcacaaccttccccggcgaaaaactagaccatccttacgacagatgcgtaaccgacatctgccccgttggagctttgacagacaaaacattccgtttcagaaagcgggtttgggctatgaacagagtcccaaccgtatctatggacgattcccttggcgcaaatatatgggcagaccaagcagatggagttgtgtacagggttatgccacgttgcaacccggaagtgaaccgcagttggctttcaaacgcggcaaaggacgtagctcaaaaaatccatgagaacagattgctgggggggaatgtttccgaagcagcaaaaataataaaagaaacaagaggaaaaaaagccatagttcttggcggttcttgcacaatggaagacattgcggcattcaaaaaatag

SEQ ID NO: 46110 - protein, 337 aa, Unknown
  Obtained from environmental sample
  DOMAIN (9)...(75): 2Fe-2S iron-sulfur cluster binding domain
  misc_feature (1)..(337): Xaa is any amino acid
MVGMNMITITVDNKEVQVPEGKNLIEALKAVGIETPHLCYHPDLPVSGNCRQCLVEVDGPRGMALTIGCYTPVRAGMKVATPASSPKVAEARKAVLEFLLVNHPLDCPICDKAGECLLQENYILAGASNSRLNPDVGKQYHGNPEHSSTDGKGQHRGGKRIDLGPRVVLDEERCIQCSRCVRFMRSVAGDEQLQLAARGGHTYITTFPGEKLDHPYDRCVTDICPVGALTDKTFRFRKRVWAMNRVPTVSMDDSLGANIWADQADGVVYRVMPRCNPEVNRSWLSNAAKDVAQKIHENRLLGGNVSEAAKIIKETRGKKAIVLGGSCTMEDIAAFKK

SEQ ID NO: 46111 - DNA, 1824 bp, Unknown
  Obtained from environmental sample
  misc_feature (1)..(1824): n is a, c, g, or t
ttgatagattggccgagttacaacggttttgatcatccgcaggcggtttttgaagggaaggcaagaaagtctgtcgcgtcaggctgggcgcctataggctcgcaccatataaaagcggaacttgggcccggcgaatcaaaaacctttgtgtttgtcctcggttactgcgaaaatcccgaagatcaaaaatgggagaaccagggaattatcaacaaaaagcccgcgaatactctccttgcgaaatacggtacggctgaggcggcggacaaggcctttgccgcgcttaacgaatattggaaaaaccttctcggtcgctttaccgttgaagcggaagacaagaaaatggcgcgtatggcgggcgtttggaaccagtaccagtgtatggttacgtttaacatgtcgcgcagcgcgtcctattttgaatccgggatagggcgcggcatgggtttccgcgattcaaaccaggatttgctgggctttgttcatcttgttcccgagcgcgcccgaggccgtattctggacatcgcggcgacgcagttcccggacggaagcgcgtatcatcagtaccagccgcttacaaagagaggcaataacgaaatcggctcagggtttaacgatgatccattgtggctcatttgcggagtcgcggcgtacattaaagagacgggcgattacagcatacttgacgagaaagtgccgtttgacaacgacgaatcgttagccgacaccctgtttgtccacttaaagcgttcttttgattacaccgtaacgcataaaggcccgcacggccttcccttaatcggacgcgccgactggaacgactgtcttaacctcaactgcttttccaaaacgcccggcgaatcttttcagaccacggccaactttgatagcggtgtagcggaatcggtgttaatagccgcgattttcgcgtttaccggccccgattatgttgaaatttgccgccgtaccggacgtgccgaagaagcagaatacgcggaaaaagaaatggccaagatgattgaggctgtcgatcatcacggctgggacggagactggtttgtccgcgcctatgacgcgtacggcaagaaaatcggaagccgcgagtgtgatgacggaaaaatatttatcgaatcaaacggcttcgcggtaatggccggcataggcgttaaagacgggcgcgcgcaaaaggcgctcgactccgtaaaggaacatcttgattccaaatacggcattgttttgttacagccggcctataaggattatcatgttgagttaggcgaagtttcatcatacccgccgggatacaaggaaaacgcggggattttctgccacaacaacccctgggttacgatagcggaaaccgcgctgggcaggggaaatagggcttttgagacatacacgaaaatctgccccgcctaccgcgaggacgacagcgatctccggcggctggagccttatgtgtacgcgcagatggtagcgggaaaagacgcggttaaccacggcgaggcaaaaaattcatggcttacgggaaccgcggcctggacctttgtcagcatttcccagtacattctcggggtgcgcccttgttttgacggccttatgatagacccgtgtattccttcaaccatgaaaggtttttccgttacacgccattttaggagcgcggattatcacatctcggtggacaacagcgcaggtgtggaaaagggaataaaatccattatgattgacggtaatcctttagacggtgaagcgttgaaaaaattaacgttgcctgcattcggagacggtaaagttcataaaattgacgttgttatgggctga

SEQ ID NO: 46112 - protein, 607 aa, Unknown
  Obtained from environmental sample
  DOMAIN (1)...(61): Glycosyltransferase 36 associated family
  misc_feature (1)..(607): Xaa is any amino acid
MIDWPSYNGFDHPQAVFEGKARKSVASGWAPIGSHHIKAELGPGESKTFVFVLGYCENPEDQKWENQGIINKKPANTLLAKYGTAEAADKAFAALNEYWKNLLGRFTVEAEDKKMARMAGVWNQYQCMVTFNMSRSASYFESGIGRGMGFRDSNQDLLGFVHLVPERARGRILDIAATQFPDGSAYHQYQPLTKRGNNEIGSGFNDDPLWLICGVAAYIKETGDYSILDEKVPFDNDESLADTLFVHLKRSFDYTVTHKGPHGLPLIGRADWNDCLNLNCFSKTPGESFQTTANFDSGVAESVLIAAIFAFTGPDYVEICRRTGRAEEAEYAEKEMAKMIEAVDHHGWDGDWFVRAYDAYGKKIGSRECDDGKIFIESNGFAVMAGIGVKDGRAQKALDSVKEHLDSKYGIVLLQPAYKDYHVELGEVSSYPPGYKENAGIFCHNNPWVTIAETALGRGNRAFETYTKICPAYREDDSDLRRLEPYVYAQMVAGKDAVNHGEAKNSWLTGTAAWTFVSISQYILGVRPCFDGLMIDPCIPSTMKGFSVTRHFRSADYHISVDNSAGVEKGIKSIMIDGNPLDGEALKKLTLPAFGDGKVHKIDVVMG

SEQ ID NO: 46113 - DNA, 705 bp, Unknown
  Obtained from environmental sample
  misc_feature (1)..(705): n is a, c, g, or t
atgtcaaaaaaaatacccactcgtatatatcttgcagaagatgaaatgcctaaattctggtacaaccttagagctgacatgaaagaaaagccggctcctatcctgcatccgggaactttgcagccggtaaccgccgcggacatggagcagatattctgcaaagagcctgttaaacaggaacttgatgagactaccaaacttatcccaattccggatggtatcaggaatttttatctggcataccgtccctcgccgttaatccgcgcgtattatctggaaaaagatttggaaacaccggcggaaatatattacaagtttgaaggaaccaacacttccggttcacataaactcaattcagccggagcgcaggcgtattacgccaaagaagaaggacttacatctcttaccacagaaacaggcgcgggacaatggggttctgcaatggcaatggcctgcgctttttatgacctaaaattaacggtttatatggtgaaaatcagctctgaacaaaaaccttaccgtaaagcccttatggaagcttatggagcttccgtgatcccgtctccgtcaaatacgacagaaagcggaagaaaaattcttgagagtgatcccaaatacagcggttcgcttggctgtgccatttccgaagcaatgaaaccgcggttaagtcgaaaagtgcccgtatgtgcttggcagtgtatttaa

SEQ ID NO: 46114 - protein, 234 aa, Unknown
  Obtained from environmental sample
  misc_feature (1)..(234): Xaa is any amino acid
MSKKIPTRIYLAEDEMPKFWYNLRADMKEKPAPILHPGTLQPVTAADMEQIFCKEPVKQELDETTKLIPIPDGIRNFYLAYRPSPLIRAYYLEKDLETPAEIYYKFEGTNTSGSHKLNSAGAQAYYAKEEGLTSLTTETGAGQWGSAMAMACAFYDLKLTVYMVKISSEQKPYRKALMEAYGASVIPSPSNTTESGRKILESDPKYSGSLGCAISEAMKPRLSRKVPVCAWQCI

SEQ ID NO: 46115 - DNA, 552 bp, Unknown
  Obtained from environmental sample
  misc_feature (1)..(552): n is a, c, g, or t
ttggccttatacttcagaggaagcacggcaaaaaccattaaactggcggaaattgtcggctcgtattgcgtggggattcgtctttttgttatcggctttacgccgatacaggcgaggataaaagaaaaagccccggaaccgtggaggacgattcttcttagaatggcaatgatggactgcgccgagaaattggcgataagtgaaagggacaaatgccttattagcggggagagcctttcgcaggtggcaagtcagacgatagaaaatattacctgcgtccagcacaggctgaaactgccggttctgcggcccctgattggcaccaacaaggaagatatcatcgccatgggagaagccatagggacctacaaaacatcaatccttccctacgaagactgttgcgttcttttcagcccgcctcacccggtactcaggggagacccgatagaagcgggaaaactttacgagggtctgagcgcggagccgctgatcgaagaagccctaaaagcgcggaaattgtcaaatgttagtttttttcataaaacctcttga

SEQ ID NO: 46116 - protein, 183 aa, Unknown
  Obtained from environmental sample
  DOMAIN (1)...(160): Thiamine biosynthesis protein (ThiI)
  misc_feature (1)..(183): Xaa is any amino acid
MALYFRGSTAKTIKLAEIVGSYCVGIRLFVIGFTPIQARIKEKAPEPWRTILLRMAMMDCAEKLAISERDKCLISGESLSQVASQTIENITCVQHRLKLPVLRPLIGTNKEDIIAMGEAIGTYKTSILPYEDCCVLFSPPHPVLRGDPIEAGKLYEGLSAEPLIEEALKARKLSNVSFFHKTS

SEQ ID NO: 46117 - DNA, 744 bp, Unknown
  Obtained from environmental sample
  misc_feature (1)..(744): n is a, c, g, or t
atgacgacttatcttttaaaacccggagagcttacccttaagggaggcaaccgaaaattatttgaaaatgttctccgaagaaacctggcttcccttctcaaaggctcaaatgccaaaattatttctagcaacgggcgcctttttgtccgctgccaggacggcacggaaagcgaagtagaggattcccttggccggctgatggggatttcaggctgggctaaaacaagggttgcggaaaaaaccccggaagaggttattgccgcttgcgttgaggaagggaaactgctttgtgaaaaggggaaaaaaactttcaaaatcgaggcccgccgcacggacaagagttttcccctggattcctacgggatccgttgcgctgcgggagaagcggtgcgccgggaagttccggggcttaaggtggatgtgaagaacccccagggcgtcatcgatgtggagatccgcgaaaaagcctacatttacggaaacgcccaggaagggctccgtgggctgcccgtgggtagcgcgggccggggcctcctcctcctttccgggggcattgattcccctgtagcgggctatatgatggcgtcccggggcatggccctggaagcggtttattttcacgcttggccttatacttcagaggaagcacggcaaaaaccattaaactggcggaaattgtcggctcgtattgcgtggggattcgtctttttgttatcggctttacgccgatacaggcgaggataa

SEQ ID NO: 46118 - protein, 247 aa, Unknown
  Obtained from environmental sample
  DOMAIN (172)...(238): Thiamine biosynthesis protein (ThiI)
  misc_feature (1)..(247): Xaa is any amino acid
MTTYLLKPGELTLKGGNRKLFENVLRRNLASLLKGSNAKIISSNGRLFVRCQDGTESEVEDSLGRLMGISGWAKTRVAEKTPEEVIAACVEEGKLLCEKGKKTFKIEARRTDKSFPLDSYGIRCAAGEAVRREVPGLKVDVKNPQGVIDVEIREKAYIYGNAQEGLRGLPVGSAGRGLLLLSGGIDSPVAGYMMASRGMALEAVYFHAWPYTSEEARQKPLNWRKLSARIAWGFVFLLSALRRYRRG

SEQ ID NO: 46119 - DNA, 570 bp, Unknown
  Obtained from environmental sample
  misc_feature (1)..(570): n is a, c, g, or t
atgaccgaggctgatttttcggctgttattcaatatccgccttccccgcttttatataaagttgcctgccgtattacgaattccagcgaagcggcagaggatctttgccaggaggcattcttccgcctgcacgagaaaaacatggtttttccaaaccaggaagaagccaagtactggctgatccgcgtggttaaaaatgccgctctgaattacgcaaaacgaaaacagcgtgagcgcagggcttaccagcgtgcgttcaaggaaaacgcaaggaaggaagagacaggggaagaacagattgtcaaaaaagaaaccagggaagaagttttggaagctttaaataaattaccggaaaacctgcgtaccgtgctgattttaaaggaatactccgagatgaactatagagaaatagggcgcgtgcttggtgtaaatgaaggaaatgtcaaagttcgggttttcagagccagggaacggcttgccgctttactgcgcggaattgccgatggtaatgacaatggaattgccgcggcggctgtttcaggaacggaaaatcaagggagggcaaaatga

SEQ ID NO: 46120 - protein, 189 aa, Unknown
  Obtained from environmental sample
  DOMAIN (8)...(78): Sigma-70 region 2
  misc_feature (1)..(189): Xaa is any amino acid
MTEADFSAVIQYPPSPLLYKVACRITNSSEAAEDLCQEAFFRLHEKNMVFPNQEEAKYWLIRVVKNAALNYAKRKQRERRAYQRAFKENARKEETGEEQIVKKETREEVLEALNKLPENLRTVLILKEYSEMNYREIGRVLGVNEGNVKVRVFRARERLAALLRGIADGNDNGIAAAAVSGTENQGRAK

SEQ ID NO: 46121 - DNA, 663 bp, Unknown
  Obtained from environmental sample
  misc_feature (1)..(663): n is a, c, g, or t
atgaagaaaaataataacgacttacctttattattttttatttattttttattatttattatcagctgtcagcaaaaatcgccgattatttattccatccatcctcaaatcggcaatataagtgaaccgcttattataaaagggactaatttcggcaaggtaagagacgtatcctatatcactattgccggggcccaaccaaccggtacatcgtaccttgactggcaggacaacgaaataacaatcaaagttcctgaattcaacgagaccggtcttgtttatgtccatgtcaagggcagaaaaagcaatggaatgctatatgtgaaccgggcaatgcttccagtacagacgattgaaacattgaacggacaggggccgagaatcgcatcaataacgccgcagacaggggcaatcggcacgctgatcagcattaccggtaccggttttggcaacacgcgcgggaatggaggcgtttttttttcatggaacgcgcaaaagccggtttcagcccccgccgaagcaatcttccaggaatatattgaagcatcggagtccgattttggcattgagttgtggacagaacngggaaatttcgggcgcatatacccgatggagcagtcagcgggaatgggaaatcagaaccagcagactcggccgatctga

SEQ ID NO: 46122 - protein, 220 aa, Unknown
  Obtained from environmental sample
  SIGNAL (1)...(25)
  misc_feature (1)..(220): Xaa is any amino acid
MKKNNNDLPLLFFIYFLLFIISCQQKSPIIYSIHPQIGNISEPLIIKGTNFGKVRDVSYITIAGAQPTGTSYLDWQDNEITIKVPEFNETGLVYVHVKGRKSNGMLYVNRAMLPVQTIETLNGQGPRIASITPQTGAIGTLISITGTGFGNTRGNGGVFFSWNAQKPVSAPAEAIFQEYIEASESDFGIELWTEXGNFGRIYPMEQSAGMGNQNQQTRPI

SEQ ID NO: 46123 - DNA, 738 bp, Unknown
  Obtained from environmental sample
  misc_feature (1)..(738): n is a, c, g, or t
atgaaaatccaaagcctatccacgcataatatgcgtaacgatgcacatttccagttccacaccgagttccgcgacttggtagtgcaacataaccccctaaccctcaaagtcaaaccccagtttgacggctatctgcccctttacaacagggaagacgaagccctcaaaaagatagtaaaaagcgaatttaccgccaaaatccacgaagcggacaaggcgagagacgaaatctatctaggaatggcagaaaccgtaaccgccacgcttaggcacttcaacccaaatgtaaggcaagccgcagaaaggctaaaaatcctttttgatacttacggaaatgtagccaacaaacctctcaacgaggaaacatcggctatctacaacatattgcaggaattgaaaggcaaatacaccgccgatgtagcgagcgtgggcttaacccaatgggtagccgaactagaaaccagaaatcaaacatttgagggcttggtaaaagaacgctttgacgaaaccgcagctagaacaacggatatagttatgaaacaggcgagggcacagcttgacgaggtgtataaaactatcgtggagcgtgtcaatgcccttgcgatagtagagggcgtggcggcttacgaagcctttatcaaaacaatgaacgccgtaatagccaaatatgccgtaaagcatcaccaccacaagcataatcaccaaaccccagccgaggaaacacccaatgctcaataa

SEQ ID NO: 46124 - protein, 245 aa, Unknown
  Obtained from environmental sample
  misc_feature (1)..(245): Xaa is any amino acid
MKIQSLSTHNMRNDAHFQFHTEFRDLVVQHNPLTLKVKPQFDGYLPLYNREDEALKKIVKSEFTAKIHEADKARDEIYLGMAETVTATLRHFNPNVRQAAERLKILFDTYGNVANKPLNEETSAIYNILQELKGKYTADVASVGLTQWVAELETRNQTFEGLVKERFDETAARTTDIVMKQARAQLDEVYKTIVERVNALAIVEGVAAYEAFIKTMNAVIAKYAVKHHHHKHNHQTPAEETPNAQ

SEQ ID NO: 46125 - DNA, 1008 bp, Unknown
  Obtained from environmental sample
  misc_feature (1)..(1008): n is a, c, g, or t
ttggaagccgaatccacagttgctgattccgcggaatccgtgactgtcacggatgaacagcctgacctttccgtagacgcgttggatgataatatcgaaataaacattgatgcggaaaaagatcatgaagaacttgaagcgctgcgcgaaaatggcgctaccccggtaaccttcccccctgaaaacagctcctatcttgaggaagacgatcacatcaatttagatctttccgaagcggtaattgacgagcctgagttatcaaccgaaggcattgatgaaccgcctataacagaaccttctttggacatagattctcttgatgatctcaatatttccattgatgactcagacgtgacgtctgaagacttagcgtctgaagacttggcgtctgatgatttatcatctgcggatgtaccctctgaagatgtttcggctgatgattcctcaatagatgatgtggacattgacgtcgctatgccgctgggtgatgtaaaagatgatgagcaggacttgtcgcttgacagcggatttcaaagcggcggcgatatatctattgacgatcaaatgcccgaaggttttgaagatgaacttcaggacgcttctgttccgcttgaagaagcagcagacacctcagacttagcgtcttcagacttaacgtcttcagacttaacatctgttgaagatgccgaacccgcggaaattacagccggcgatgaatcagccgaagatattgataaaatagaagaaataggcgagatagacgacgttgacgaaattgctgacatagatgaaaaacccgcaaaagcggcaagtgcgccctcaagtgcgcttgatcaaaaaggcggaaatttccagcttccttcggacttaaaaaaggaactcaaaaatattctcagttacatggatcagctccttgaatccctgccggaagaaaagatcgaagaattcgcaaagtcggaatattttgattcctacaagaaactctttaaagatttggggctggtataa

SEQ ID NO: 46126 - protein, 335 aa, Unknown
  Obtained from environmental sample
  misc_feature (1)..(335): Xaa is any amino acid
MEAESTVADSAESVTVTDEQPDLSVDALDDNIEINIDAEKDHEELEALRENGATPVTFPPENSSYLEEDDHINLDLSEAVIDEPELSTEGIDEPPITEPSLDIDSLDDLNISIDDSDVTSEDLASEDLASDDLSSADVPSEDVSADDSSIDDVDIDVAMPLGDVKDDEQDLSLDSGFQSGGDISIDDQMPEGFEDELQDASVPLEEAADTSDLASSDLTSSDLTSVEDAEPAEITAGDESAEDIDKIEEIGEIDDVDEIADIDEKPAKAASAPSSALDQKGGNFQLPSDLKKELKNILSYMDQLLESLPEEKIEEFAKSEYFDSYKKLFKDLGLV

SEQ ID NO: 46127 - DNA, 723 bp, Unknown
  Obtained from environmental sample
  misc_feature (1)..(723): n is a, c, g, or t
ttgatgaaaagaattatatatctggacggacgaaaagttgtatatgaacttgtgtggaaaaatgtaagaaatattaatctgcgaattcgttttgattgttcggtacatgtttcggcaaatgacaacactctcatcaaaacgatagaagattttttacatgacaaatcggtttatattctttccgctttggataaatacgcaaagatttcaaagaacgcggagagtaaacataattatgttacaggtgaaaattttagatacttgggggagaacttgcggcttgttgttaaaagagggaaaagaggcataagctctgaaggcgaatgtcttatattaagcgtgagaaatgttaaagatactacgcttaaggagaggttgattaaaaagtggtattatgcgcaatgctgggaagtttctgtggaaataatggaagagatatatccggtttttaagaaatataattttgcaatgccgaagctgacattgcgtaatatggtttctcgctggggaagctgcaggcctaagaggggcttaattacgcttaacaaacgattaattgaggcgccgcgtaatgcttttgaatatgttgttatgcatgagtttattcattttttgtatcctaatcattcgagggatttttatgggatgttatccaggcttatgccggattggaaggagcggaagaaattgcttgaggaggcggtggttttggcgggggagtga

SEQ ID NO: 46128 - protein, 240 aa, Unknown
  Obtained from environmental sample
  DOMAIN (23)...(234): Protein of unknown function DUF45
  misc_feature (1)..(240): Xaa is any amino acid
MMKRIIYLDGRKVVYELVWKNVRNINLRIRFDCSVHVSANDNTLIKTIEDFLHDKSVYILSALDKYAKISKNAESKHNYVTGENFRYLGENLRLVVKRGKRGISSEGECLILSVRNVKDTTLKERLIKKWYYAQCWEVSVEIMEEIYPVFKKYNFAMPKLTLRNMVSRWGSCRPKRGLITLNKRLIEAPRNAFEYVVMHEFIHFLYPNHSRDFYGMLSRLMPDWKERKKLLEEAVVLAGE

SEQ ID NO: 46129 - DNA, 624 bp, Unknown
  Obtained from environmental sample
  misc_feature (1)..(624): n is a, c, g, or t
atgggaaaacaagccacacgttgttttgattataggcgtgaatggagctggcaaaaccactaccattggcaaacttgcgcaccgcttaaagcaagagggaaaatccgttttgctcgccgcaggcgataccttcagagctgccgccatgagcagctagaaacctgggcgcagcgttccggtgcggattttgtgcgacaccaagaaaattcagacccaagcgcggtagcctacgattcctgcaaagcggcaacagcaagaggaaacgatattgtgtttatagacacagcggggcgtttgcacaacaaagaccatttgatggaagaactccgcaaaaccattagggttgtgaaaaaaatagatgaaaatttcccgcacgatatatggctggttatagatggcaacactgggcaaaacgtgattaaacaggttaaggtttttcacgagagttttaaacttacaggcttaatagtcacaaaactcgatggaacggcaaaaggcggttccgtactttccatagcgagcgaactcaaaatcccaatactgtggattggcgttggcgagcacattgagcaacttgttccctttaacaaagcggaatacattgaggggttattttctgtatga

SEQ ID NO: 46130 - protein, 207 aa, Unknown
  Obtained from environmental sample
  DOMAIN (39)...(206): SRP54-type protein, GTPase domain
  misc_feature (1)..(207): Xaa is any amino acid
MGKQATRCFDYRREWSWQNHYHWQTCAPLKARGKIRFARRRRYLQSCRHEQLETWAQRSGADFVRHQENSDPSAVAYDSCKAATARGNDIVFIDTAGRLHNKDHLMEELRKTIRVVKKIDENFPHDIWLVIDGNTGQNVIKQVKVFHESFKLTGLIVTKLDGTAKGGSVLSIASELKIPILWIGVGEHIEQLVPFNKAEYIEGLFSV

SEQ ID NO: 46131 - DNA, 435 bp, Unknown
  Obtained from environmental sample
  misc_feature (1)..(435): n is a, c, g, or t
atgggattattttctgcaataaaagcggggctttcaaaaacacgcgagaccttactgggtgaattcaagtccatagctggagttggaaaaatcacagacgagatgcttgagcatttggaagagcatttaatcaaagccgatgttggagtggaagctgcatttttactaaccgatgctttgagagaacacgggcttggcaaaagtttaacgcaaaatgagataaattcaattttgcgaaacgaagcacagcgtttgctgatagaccctcccgagctcaaatgggaaaacaagccacacgttgttttgattataggcgtgaatggagctggcaaaaccactaccattggcaaacttgcgcaccgcttaaagcaagagggaaaatccgttttgctcgccgcaggcgataccttcagagctgccgccatgagcagctag

SEQ ID NO: 46132 - protein, 144 aa, Unknown
  Obtained from environmental sample
  DOMAIN (7)...(87): SRP54-type protein, helical bundle domain
  misc_feature (1)..(144): Xaa is any amino acid
MGLFSAIKAGLSKTRETLLGEFKSIAGVGKITDEMLEHLEEHLIKADVGVEAAFLLTDALREHGLGKSLTQNEINSILRNEAQRLLIDPPELKWENKPHVVLIIGVNGAGKTTTIGKLAHRLKQEGKSVLLAAGDTFRAAAMSS

SEQ ID NO: 46133 - DNA, 579 bp, Unknown
  Obtained from environmental sample
  misc_feature (1)..(579): n is a, c, g, or t
atggcttgcagtgaagagcaaaaagatgaaaagaaggattttctcnaagaagcggaatatgcgcttgcaaagaataggcgtgtgtttttgtggggacctgtggaagattccagtgcggaaaaactggttaagcagtttctctatttggattccatttcaaacgaggatatttatttctttatcaacagccctggaggtgcaatttccagcgggctttccatttacgattgcattaaggccataaaaagccctgtggttactatatgtgcggggcaggctgcttcttttggggcggtgcttttatgtgcgggtgcaaaaggcaaacgttatgcttggccaaatgccaggataatgattcaccaaccgcttatatctggagaattcgtggcaccagcgagcgaccttgcaatacaagcagaagagatgctacgcattcgcgatgtgctcaatggaattttcagcgaacacacaggcaaatccaaagaagagcttgaacacgataccgaccgcgataactttatgagcgcggaacaggcaaaaaattacggcattgttgacgaagtgaaaaccatacattaa

SEQ ID NO: 46134 - protein, 192 aa, Unknown
  Obtained from environmental sample
  DOMAIN (16)...(192): Clp protease
  misc_feature (1)..(192): Xaa is any amino acid
MACSEEQKDEKKDFLXEAEYALAKNRRVFLWGPVEDSSAEKLVKQFLYLDSISNEDIYFFINSPGGAISSGLSIYDCIKAIKSPVVTICAGQAASFGAVLLCAGAKGKRYAWPNARIMIHQPLISGEFVAPASDLAIQAEEMLRIRDVLNGIFSEHTGKSKEELEHDTDRDNFMSAEQAKNYGIVDEVKTIH

SEQ ID NO: 46135 - DNA, 516 bp, Unknown
  Obtained from environmental sample
  misc_feature (1)..(516): n is a, c, g, or t
atgaattggctatctgatcctgacaaaaatgacattgtattggatccgttttgcggtaatggctctattcccttaaaacgggctttaaatttccctacaaaacaaattattgtttttgattttgataataatatgattagcacagtaaagaagaaaatagccttaaaaaaatctttatccaatatgaggaatatcgttataaaaaaagttgacataaaacaattggataaagaattattacgggaaagtatagataaaatagttacagatccaccctggggttcatatgaaaaaatgaatgttgaaattgaggaattttatggaataatgctgtcaaaaatggaaagggtattgaaaaataacggaattattgtacttttaataggcagaaataatgatatagaaaaaatgatagaaacaataccaaatttatctattgagcaaaattataatgtgttaatttcaggaaaaaaagccaatttggttaagcttaaaaaacagacaaagaaattatag

SEQ ID NO: 46136 - protein, 171 aa, Unknown
  Obtained from environmental sample
  DOMAIN (1)...(160): Putative RNA methylase family UPF0020
  misc_feature (1)..(171): Xaa is any amino acid
MNWLSDPDKNDIVLDPFCGNGSIPLKRALNFPTKQIIVFDFDNNMISTVKKKIALKKSLSNMRNIVIKKVDIKQLDKELLRESIDKIVTDPPWGSYEKMNVEIEEFYGIMLSKMERVLKNNGIIVLLIGRNNDIEKMIETIPNLSIEQNYNVLISGKKANLVKLKKQTKKL

SEQ ID NO: 46137 - DNA, 492 bp, Unknown
  Obtained from environmental sample
  misc_feature (1)..(492): n is a, c, g, or t
atgaacgataaatttattcttgaagacggttcagtctacgaaggcggttttgctgacggattatttcacggcaaaggaaaagtaacgtggacagacggatcagtgtacgaaggcgatttcacaaaaggcagattaaccggcaaagggaaaatgacctgcgccaacggcgacatatacgaaggcgatgttgttgaaagcaattaccacggcaaagggaaaaaaacattcgcgtccggcagtgtatacgaaggtgattgggatgacaacctgccccacggcaaagggaaatttacatctgcggacggctatacatacgaaggcgattgggtagacggcaaatccaccgataaaggaaaaagcgcctcaccggacggctccgtttacgaaggcgattttgttgaggacaaaatgcacggtaaaggcaagatgacataccctgacggcagggttaaagaaggcgaatggaaacacggcgtgtttttaggacagtga

SEQ ID NO: 46138 - protein, 163 aa, Unknown
  Obtained from environmental sample
  DOMAIN (59)...(81): MORN repeat
  misc_feature (1)..(163): Xaa is any amino acid
MNDKFILEDGSVYEGGFADGLFHGKGKVTWTDGSVYEGDFTKGRLTGKGKMTCANGDIYEGDVVESNYHGKGKKTFASGSVYEGDWDDNLPHGKGKFTSADGYTYEGDWVDGKSTDKGKSASPDGSVYEGDFVEDKMHGKGKMTYPDGRVKEGEWKHGVFLGQ

SEQ ID NO: 46139 - DNA, 1011 bp, Unknown
  Obtained from environmental sample
  misc_feature (1)..(1011): n is a, c, g, or t
ttgggcagggaactcgaaggcggccagatagtgaagctgaagtggcccggcatctcgcccaaagtaaccgccgccttaaacatcaccgccggattccgcgccctccacgccaaagggtacagctatcaggacttgaacgacggcaacttcttcatcaacctcagcgaccccgccaaactgggcgacgtgctaatctgcgacaacgacaacgtgtccgagttcggctacgcctcgggaatagccggaaaagcaaggtacatggctcccgaagtcgtgctgggcaatgccgaccccaatcccaagaccgataccttttccctcgccatagtgctgttcatgctctttgtaaccaaccacccccttgagggaaaagccgtgctggcccagccctgcatgaccgacgtatgggaaaagaaattttacggcgaaaaccccgtgttcatgctcgaccccaacgacaagtccaacgagccggtgcccgacaaacaccagggcgcggtaaaacgctggcccttcctgcccccgtacctgcgggatacctttataaaagccttcagcaaggaagccatgaaagaccccgctcacagggttctggaaaaagactgggtaaaagtctttgtccgcatgaggtcggaaacatggaagtgcccctcctgcggcgaggtatacttcgccgatcccgtaacgcctaacccctgcccctcatgcgggaagccccacgcctttcccttctatataaaaacatccagcggctataacgtgcccgcccatcagcggacagtcctctaccagtgccatacaaccaccgacgccgccggagaagactttgacattaaaaccggggaaatgatggtcaaaggcgacgagatcggattaaagaacatttccaacgagcgctggtcgcgtatcaaggacggcgtacaggctcccgtagaacccggacgcgccgcaaggctggaaaaaggcgtaaaactggattttggcagaggcgcctctgcggagattatatga

SEQ ID NO: 46140 - protein, 336 aa, Unknown
  Obtained from environmental sample
  misc_feature (1)..(336): Xaa is any amino acid
MGRELEGGQIVKLKWPGISPKVTAALNITAGFRALHAKGYSYQDLNDGNFFINLSDPAKLGDVLICDNDNVSEFGYASGIAGKARYMAPEVVLGNADPNPKTDTFSLAIVLFMLFVTNHPLEGKAVLAQPCMTDVWEKKFYGENPVFMLDPNDKSNEPVPDKHQGAVKRWPFLPPYLRDTFIKAFSKEAMKDPAHRVLEKDWVKVFVRMRSETWKCPSCGEVYFADPVTPNPCPSCGKPHAFPFYIKTSSGYNVPAHQRTVLYQCHTTTDAAGEDFDIKTGEMMVKGDEIGLKNISNERWSRIKDGVQAPVEPGRAARLEKGVKLDFGRGASAEII

SEQ ID NO: 46141 - DNA, 348 bp, Unknown
  Obtained from environmental sample
  misc_feature (1)..(348): n is a, c, g, or t
atggtgttcaaggacgccctggacggcgcgaccttcgccgtctacgtcagggacgtcctggcccccgtcctgggggagggcgacatcgtggtcatggacaatctggcggtccacaaggtgaagggcgcgttggagccgatatacggggtgggcgcgtcggttctgttcctgccgccctacagccccgacttcaacccgatagagctgtgccggtttaagatgaaggcgtccctcaggcgcctgaaggcgcgcacgtacggcggtctggtggcggccatgaagacggcgctggaggaagtcgatgcctcggacatatctggctggtttagtcacggaggatactgctaa

SEQ ID NO: 46142 - protein, 115 aa, Unknown
  Obtained from environmental sample
  misc_feature (1)..(115): Xaa is any amino acid
MVFKDALDGATFAVYVRDVLAPVLGEGDIVVMDNLAVHKVKGALEPIYGVGASVLFLPPYSPDFNPIELCRFKMKASLRRLKARTYGGLVAAMKTALEEVDASDISGWFSHGGYC

SEQ ID NO: 46143 - DNA, 396 bp, Unknown
  Obtained from environmental sample
  misc_feature (1)..(396): n is a, c, g, or t
atggacgtaaccaaaaacgtctccgccgtcagcgccgaccccgcggtgagggaggcccttgtgggcatccagcgggcgatgggggcgctnggcgaatgggtcattgatggccgcgacattgggactgtggttntcccgcaagcgaagtgcaaaatatttttggtggcgactcccgaagcgagggcccagaggcggctgctagaactgcgggccaagggcattgacgcagtatttgaggaagtgctggccgatcaggctaggcgcgaccatctggactccactagggcagtgagccccctgcgaaaagccgatgacgcagttgaattggattccagcaacctcagcataggcgacgtcgtagaaaaaataatcgaaatatacaaggcgaaatcatag

SEQ ID NO: 46144 - protein, 131 aa, Unknown
  Obtained from environmental sample
  DOMAIN (1)...(125): Cytidylate kinase
  misc_feature (1)..(131): Xaa is any amino acid
MDVTKNVSAVSADPAVREALVGIQRAMGALGEWVIDGRDIGTVVXPQAKCKIFLVATPEARAQRRLLELRAKGIDAVFEEVLADQARRDHLDSTRAVSPLRKADDAVELDSSNLSIGDVVEKIIEIYKAKS

SEQ ID NO: 46145 - DNA, 1914 bp, Unknown
  Obtained from environmental sample
  misc_feature (1)..(1914): n is a, c, g, or t
ttgcagcgtcttacggtaagcacgttccatgcttttggggtaaaaattctgcggggagaaattgaaatccttggataccggaataatttttcgatctacgatgagacagaccggacggaactgatcaaggaaaccctgcgggaatgcaggatgggcagcgataaaaccaacctatacagcctgggacagcttttttccaacatcaagacgggccgttatacctggcgtaacgctccgggcattgcgggaatcgcgggagaatcgcagcaggcggcgaactacgaacgggtctacagggaataccagagcagcctggccatttttaacgcgctggactttgacgatctgctggttcttcccataactatttttgaaaaccatccggaaatcctcgaaaagtaccgccgccgttaccgctatattatggtggatgagttccaggacacgagccttatccagtaccggctgctgcggctcctggccctgggttcggaagacgcaaagaatacgaaggatgcggcgcatacagaggatgcggcgaatgtgccgccagcgcaagcgaatgtctgcgttgtgggggatgatgatcaatccatctattcatggcggggggcaaactatgagaacatcctcatgttcgagagggattttcccggcgcaaaagaaatcaaactggaacaaaactaccgttctaccaccacgattctcgaagcggccaacggagtaatttcccataacatcaaccgcaaagaaaaaagcctctggtcgggcaacaccggaggccggcccgttgaactgtgttatcccgaagacgaaaacgccgaaggggagtttattgccgaaaaaatccgggaacacatggtacgcgagggccttggctacgacgatttcggcgtactgctgcggacaaattttcttacccgatccattgaagaagcttttttggcagcgaatatcccctacaaggtatccgggggacagagtttctttcagcgcaaagagatcaaggatattctttcgtacctccatgtcattgccaacaccaatgatgatgtaaacctgctgcgaatcatcaataccccccgtcggggaatcgggaaaaacacaatccaaaccgtttcggagtttgcccgccggaacaaaacctttttctgggacgccatggacaggctgtgcaggtttccttccggaggaaattttctaatggaaaacgcctctccgcttccttcaaaaatcagggcggaaatcgaagcttttatgaatatgatcgaaagctttcgggatcgtatgctcggcaggcaggccaaacccggccttgccgaagaggtacggaccatggtggagcatatcaactactggccctacctggtggcggaattcagcaagaacgaaaaaattgcccgctggcgttnttccaacattgagtattttatccaatccatcgatacctgggagaaagaccctgataactttgataccgggctctacgcctggctccaccgggtaagtcttatcaattccagcgacgacggagaggacgacaacaagggcaaggtaaacctttctacaattcacgccgccaaggggcttgagtttccggttgtttttatcgcgggcgtagaaaagggattaattccgcacgagaagagcattggcgaggacgaagacgaggcaggaagcattgaagaagagcggcgtcttttctatgtggcgattacaagggcgcgtgaaaaattgtacataacaagctgccgtcagcgccgccgtttgcaaacggcaagcgagtgctccccttccccatttcttgaagaaataccgcctgaactggttaaataccacgagaaagagcctgatgttattgacgaggcgcaggcggataaatatatggcgcagatgaaggctttactaaaataa

SEQ ID NO: 46146 - protein, 637 aa, Unknown
  Obtained from environmental sample
  DOMAIN (1)...(452): UvrD/REP helicase
  misc_feature (1)..(637): Xaa is any amino acid
MQRLTVSTFHAFGVKILRGEIEILGYRNNFSIYDETDRTELIKETLRECRMGSDKTNLYSLGQLFSNIKTGRYTWRNAPGIAGIAGESQQAANYERVYREYQSSLAIFNALDFDDLLVLPITIFENHPEILEKYRRRYRYIMVDEFQDTSLIQYRLLRLLALGSEDAKNTKDAAHTEDAANVPPAQANVCVVGDDDQSIYSWRGANYENILMFERDFPGAKEIKLEQNYRSTTTILEAANGVISHNINRKEKSLWSGNTGGRPVELCYPEDENAEGEFIAEKIREHMVREGLGYDDFGVLLRTNFLTRSIEEAFLAANIPYKVSGGQSFFQRKEIKDILSYLHVIANTNDDVNLLRIINTPRRGIGKNTIQTVSEFARRNKTFFWDAMDRLCRFPSGGNFLMENASPLPSKIRAEIEAFMNMIESFRDRMLGRQAKPGLAEEVRTMVEHINYWPYLVAEFSKNEKIARWRXSNIEYFIQSIDTWEKDPDNFDTGLYAWLHRVSLINSSDDGEDDNKGKVNLSTIHAAKGLEFPVVFIAGVEKGLIPHEKSIGEDEDEAGSIEEERRLFYVAITRAREKLYITSCRQRRRLQTASECSPSPFLEEIPPELVKYHEKEPDVIDEAQADKYMAQMKALLK

SEQ ID NO: 46147 - DNA, 816 bp, Unknown
  Obtained from environmental sample
  misc_feature (1)..(816): n is a, c, g, or t
gtgcggtgggggaagcgagtaaataatgaattgggaaaggatacaatgagaaataaaattagattgtttntgagctcatctatgcatgatgatgaattcaaaatagaaagagaaattttgcctataataataaatagcaaggaacctctttcttcaatatttactcttaataaaatagaagaccaagccgctccagttcctgtccgtgaacagtatttatctcttgtaagacaagctcgagctatgattttattaattgattcaactgctagagaaggagtcaaaaatgaagttgaagaagcaaaaaaaaataacataccaatttatgcatttattaaaattcctaaaacagaaagaaatcctgaagtagaagcatatataaattacataagagattttgtttacactgcagattattacgatactgaagatttggttagaaaggttgaagattcattactttccgtttataatgaaaaattcccaccaattgataaattagtcgataataataaaaatttagaatttgatattatagaaccggaattggaaaaatttgtatgtgatgcaatcattattggatcttggtatgatctatcagaggatgataaggcaataataatagaatttacaggagaaaacatcaataattgggaatttaatataaaaaagttaatgcactatcataacaaaatattttattttaataatagacattggaaaataaataatagaaaacaaatgtttctcaaatatgcagacagattcttagattctgatttagacaaattaaaatccattgctgttaaagtgtga

SEQ ID NO: 46148 - protein, 271 aa, Unknown
  Obtained from environmental sample
  misc_feature (1)..(271): Xaa is any amino acid
MRWGKRVNNELGKDTMRNKIRLFXSSSMHDDEFKIEREILPIIINSKEPLSSIFTLNKIEDQAAPVPVREQYLSLVRQARAMILLIDSTAREGVKNEVEEAKKNNIPIYAFIKIPKTERNPEVEAYINYIRDFVYTADYYDTEDLVRKVEDSLLSVYNEKFPPIDKLVDNNKNLEFDIIEPELEKFVCDAIIIGSWYDLSEDDKAIIIEFTGENINNWEFNIKKLMHYHNKIFYFNNRHWKINNRKQMFLKYADRFLDSDLDKLKSIAVKV

SEQ ID NO: 46149 - DNA, 1497 bp, Unknown
  Obtained from environmental sample
  misc_feature (1)..(1497): n is a, c, g, or t
atgtccgtcattgtaagccgcgccctgcccgatgtccgggacgggctgaaacctgtgcacaggcgcctgctctacgcgatggataccctgggcttgcgccccggaggcgggacgaagaagagcgccctcatcgtcggcgagactatgggtaaataccacccgcacggcgacctttcgctttatgacgctcttgtgcgcatggcgcaggatttttccctccgctaccctcttgtgaaaggacagggaaacttcggctcaattgacaacgatccgccggcggccatgcgctataccgaggcgaaaatctccaaaatcggcgacgagatgctgcaggatctccaaaaggagaccgtggattttatccccaactacgatgaatctttcatggagccggcggttctgccctccgccattcccgaccttttggttaacggctccagcggaatcgccgtcggcatggcgacaaatatggcgccccacaacctcggcgaaatcagcgacgcaatctgcgcctatatcgacgatcccaaccttaacaacgacgacctgatgcgctttgttcacggccccgattttcccacaggcgggataattctgggcagacaggggataattgacgcttacaagacaggaaggggaagactccttgtccggggcaaattcaatgttgaaaccaccaagcagggcaaagaaaaaatcatctttaccgaaattccctacaatgtaaacaaagcccagttgttggaaaaaatcggccaactgatgcgcgacaaggaaatcgacagcattgcgaacgcgaacgacgagtccgaccgcgacggtatacgcatagttatcgagttgaaaaagggcgcgatagtcaaagttgttcttaaccagcttttttcaaatactcagcttcaaacttcattcagtataattaatctggcgctcgttaagggaaagccacagttgctcacattgagagaattaatacaccactttgtcgagcatcgcgtcgaagttgttacgcgccgcacccgtttcgatttgcgcaaggctgaggaacgcgcccatatcctggaagggctggttatcgccctcgcgaacattgacgaagttatcgccatcatcaaggcgagcaaagatgtggcgacggcgcggctgaaactgcagcagcggttcaagctgtccgaggcgcagtctgaggcaatcgttgagatgcgtctgggccgccttacgagccttgaaatcgaaaagattgagaaagagcttgcggaactgaaagttcaaatcgcctacttcaaatccctgttagccgatgaaaagaaactgcgcggagttatcaagaccgagacaagggagattgccgacaaatacggggacaagcggcgcacggaaataatcgcgggcgaagtggaaaatatcaatatcgaagacctgatcaagaaagaggaaatgatgattctcatttccaatcttggttatgtaaagcgggtaccagtatccgctttataa

SEQ ID NO: 46150 - protein, 498 aa, Unknown
  Obtained from environmental sample
  DOMAIN (7)...(454): DNA gyrase/topoisomerase IV, subunit A
  misc_feature (1)..(498): Xaa is any amino acid
MSVIVSRALPDVRDGLKPVHRRLLYAMDTLGLRPGGGTKKSALIVGETMGKYHPHGDLSLYDALVRMAQDFSLRYPLVKGQGNFGSIDNDPPAAMRYTEAKISKIGDEMLQDLQKETVDFIPNYDESFMEPAVLPSAIPDLLVNGSSGIAVGMATNMAPHNLGEISDAICAYIDDPNLNNDDLMRFVHGPDFPTGGIILGRQGIIDAYKTGRGRLLVRGKFNVETTKQGKEKIIFTEIPYNVNKAQLLEKIGQLMRDKEIDSIANANDESDRDGIRIVIELKKGAIVKVVLNQLFSNTQLQTSFSIINLALVKGKPQLLTLRELIHHFVEHRVEVVTRRTRFDLRKAEERAHILEGLVIALANIDEVIAIIKASKDVATARLKLQQRFKLSEAQSEAIVEMRLGRLTSLEIEKIEKELAELKVQIAYFKSLLADEKKLRGVIKTETREIADKYGDKRRTEIIAGEVENINIEDLIKKEEMMILISNLGYVKRVPVSAL

SEQ ID NO: 46151 - DNA, 504 bp, Unknown
  Obtained from environmental sample
  misc_feature (1)..(504): n is a, c, g, or t
ttggccgattttttccaacaactgggctttgtttacattgtagggaatttcggtaaagatgattttttctttgccctgcttggtggtttcaacattgaatttgccccggacaaggagtcttccccttcctgtcttgtaagcgtcaattatcccctgtctgcccagaattatcccgcctgtgggaaaatcggggccgtgaacaaagcgcatcaggtcgtcgttgttaaggttgggatcgtcgatataggcgcagattgcgtcgctgatttcgccgaggttgtggggcgccatatttgtcgccatgccgacggcgattccgctggagccgttaaccaaaaggtcgggaatggcggagggcagaaccgccggctccatgaaagattcatcgtagttggggataaaatccacggtctccttttggagatcctgcagcatctcgtcgccgattttggagattttcgcctcggtatagcgcatggccgccggcggatcgttgtcaattga

SEQ ID NO: 46152 - protein, 167 aa, Unknown
  Obtained from environmental sample
  misc_feature (1)..(167): Xaa is any amino acid
MADFFQQLGFVYIVGNFGKDDFFFALLGGFNIEFAPDKESSPSCLVSVNYPLSAQNYPACGKIGAVNKAHQVVVVKVGIVDIGADCVADFAEVVGRHICRHADGDSAGAVNQKVGNGGGQNRRLHERFIVVGDKIHGLLLEILQHLVADFGDFRLGIAHGRRRIVVN

SEQ ID NO: 46153 - DNA, 570 bp, Unknown
  Obtained from environmental sample
  misc_feature (1)..(570): n is a, c, g, or t
atggtattgttaatcgacaactacgacagtttttcctacaacctgtaccagttaatcggcgcgattgagagcgacataaaagttgtacgcaacgatgaaagaagcgttgacgaaataaagcacctcgcgccgggccgtttggtaatctcgcctggacccggaaaaccttccgacgctggaatatgtattgaggccataaagcggctttattcatcaataccgattctgggtatctgccttggccatcaggcaatatatgaggcctttggcggcacagtatcctacgcaagcaggctgatgcacgggaaatcatcgcaggtaaatctcgatttagaaaacgccctttttaaggggcttccgcctgtcattagcgcggcgcgctatcattccttggccggcattgaatcaaccctgcccgatgcgttgaaaatcaccgcaaggacagatgtcggtgaaattatggctgtatgccacaaggagtaccctgtctacggtttgcagttccatccggaatcaatacttacgccggatggggggattatcataaagaattttttatctaaaaagtga

SEQ ID NO: 46154 - protein, 189 aa, Unknown
  Obtained from environmental sample
  DOMAIN (21)...(171): Peptidase C26
  misc_feature (1)..(189): Xaa is any amino acid
MVLLIDNYDSFSYNLYQLIGAIESDIKVVRNDERSVDEIKHLAPGRLVISPGPGKPSDAGICIEAIKRLYSSIPILGICLGHQAIYEAFGGTVSYASRLMHGKSSQVNLDLENALFKGLPPVISAARYHSLAGIESTLPDALKITARTDVGEIMAVCHKEYPVYGLQFHPESILTPDGGIIIKNFLSKK

SEQ ID NO: 46155 - DNA, 804 bp, Unknown
  Obtained from environmental sample
  misc_feature (1)..(804): n is a, c, g, or t
ttggcaccccatggacaccctgcacgacaaaaatatgttgacggggatgtggaccggcgcaaaagccccgtgggcgctttgggagaagcaaaaatgatagagttctacagcggcaagcgggtattcgttacagggcacacgggtttcaagggggcgtggctatgccgcgttctcgcgaaggcggaggcggaggtggtcggctacgcccttgagcctcccacgaacccgtcgctattcgagcagatagggatcgcgcgcggactctaccactacgctgtttgcgacatcggaagttttgacacgcttcgcagagttgtgagggacacgaggccggagatcgtcattcacatggccgcccaaccgctcgtgcgcgcctcctacggcgacccgcgcaaaacgtacgaaaccaacgtcatggggacggtcaacgtcttagaggccgctcgggactcaggcgccgtcagatcgcttgtcaacgttaccacagacaaggtctacgaaaacaaggagtggttctggggctatagggaagacgaaaacctatgcggcggcgacccctactcgaacagcaagtcttgcagcgaattggtgatgaatagtgacagtcgctctcttttgcgcggcgctgcagaaggcgcgccgacaatctcctccgccggttctcgcaacatagtcggcgggagcgattacgctcaggataggatcatccccgactgcgtgagggcggcgaccgagtcaagagaggcggtgataagaaacccgcactgtacaagcccgtaccagcacgtgctcgagcgtttgtga

SEQ ID NO: 46156 - protein, 267 aa, Unknown
  Obtained from environmental sample
  DOMAIN (42)...(267): 3-beta hydroxysteroid dehydrogenase/isomerase family
  misc_feature (1)..(267): Xaa is any amino acid
MAPHGHPARQKYVDGDVDRRKSPVGALGEAKMIEFYSGKRVFVTGHTGFKGAWLCRVLAKAEAEVVGYALEPPTNPSLFEQIGIARGLYHYAVCDIGSFDTLRRVVRDTRPEIVIHMAAQPLVRASYGDPRKTYETNVMGTVNVLEAARDSGAVRSLVNVTTDKVYENKEWFWGYREDENLCGGDPYSNSKSCSELVMNSDSRSLLRGAAEGAPTISSAGSRNIVGGSDYAQDRIIPDCVRAATESREAVIRNPHCTSPYQHVLERL

SEQ ID NO: 46157 - DNA, 306 bp, Unknown
  Obtained from environmental sample
  misc_feature (1)..(306): n is a, c, g, or t
gtggagggggcgtacaatctcggcccggaggaggagagctgcgcgacgaattgggagctggctaacctcttttgcggcgcgtacgggcacggcgagtcgtggcgcaccgaggcggacggcgacggtccgcacgagcagaatttcttgaacctggacagttcaaagtcaaagaccgtggtgggttggaaaccgcgttggggtatcaacacagcggttgagaaggttgctgagttcgcgaaggcctccgccgacggggcgaggggggagtgcgtggacaggcaaatagacgcgtcctttaaaggataa

SEQ ID NO: 46158 - protein, 101 aa, Unknown
  Obtained from environmental sample
  misc_feature (1)..(101): Xaa is any amino acid
MEGAYNLGPEEESCATNWELANLFCGAYGHGESWRTEADGDGPHEQNFLNLDSSKSKTVVGWKPRWGINTAVEKVAEFAKASADGARGECVDRQIDASFKG

SEQ ID NO: 46159 - DNA, 1344 bp, Unknown
  Obtained from environmental sample
  misc_feature (1)..(1344): n is a, c, g, or t
atgacgggagttgttttcgccattgacatttcgcgcagcatggacatccgtgatgtgcaaacaggctcccagacaaggacgcgcgccgcttttcaatcccgtcttgagcgcggtatttcaatcgcaagggagagcgtcatatccgtttccggagcgcgttttgccgccgcaataggccgtggaaggggatatttggcagtcccattaacctacgacagcgaggccgcgttaattttccttgaatcgttggatgcttcttccatgacagggagaggcacaaatcttgaatcgttagttgacgcggcggctgacgcttttcaggactcttccccggcgcggaaggtaattgtccttatttcggacggcgagtctcatgccggcattcttagaaatgcggttaaccgatgcgttcgtgacggtattatactaaataccgcggcggtcggcagtgacgaaggccggcagataacggcgcaaattaacaaccctgattctccgtccgttgttagccgcagggattcttttgtaatgagagcggcagccgaaagaacgggcggcatttacattgacggaggccgtgaagattcaggcgcgacgctttcttctcaccttctttcacttgcgcaggaaatgggtagcggaaacagaaaacaggagccaaaacaaagaagaccgctatttatcatacttgccattatttcctacggagcgtctaaatttattacacgtcaatcgcaaagaaagcctatgcgccgtttatccgccgcttcgatgatcgcgctttttttactcgcttcctgttccgagggcaaacttcttcttctgcaagccaactatttaaatacgataggcagatatgacgaagcgcttgtcccgtatttaaaagcgataaaccatgaagattccgctccttatgcggaatacggtcttgggctgacattttatcagcttgacgaaggaaaagcggcgttaaaacgttacggcgattctcataaattacttgaaaaatattcgagtaacgaacacaaggaacttaggtacagaaaccactacaattcaggcgtaatattttttgaagaaggggattaccattccgcagccgattcttttaaagaggcgttaagaacggatccaaaaagacttgatgcgaaacgcaatttagaattaagcctgatgtcaatatcaatggaaacaaacactgagagtagcgcgaaaaatcgcgaagaaagcagagaagttctttttgagtatttaaaacaggatgaacaacaaanatggaaaagccgcgaatgggaacctgaagaaattttacgggaccggattattaatcattttttagcgtaa

SEQ ID NO: 46160 - protein, 447 aa, Unknown
  Obtained from environmental sample
  DOMAIN (3)...(204): von Willebrand factor type A domain
  misc_feature (1)..(447): Xaa is any amino acid
MTGVVFAIDISRSMDIRDVQTGSQTRTRAAFQSRLERGISIARESVISVSGARFAAAIGRGRGYLAVPLTYDSEAALIFLESLDASSMTGRGTNLESLVDAAADAFQDSSPARKVIVLISDGESHAGILRNAVNRCVRDGIILNTAAVGSDEGRQITAQINNPDSPSVVSRRDSFVMRAAAERTGGIYIDGGREDSGATLSSHLLSLAQEMGSGNRKQEPKQRRPLFIILAIISYGASKFITRQSQRKPMRRLSAASMIALFLLASCSEGKLLLLQANYLNTIGRYDEALVPYLKAINHEDSAPYAEYGLGLTFYQLDEGKAALKRYGDSHKLLEKYSSNEHKELRYRNHYNSGVIFFEEGDYHSAADSFKEALRTDPKRLDAKRNLELSLMSISMETNTESSAKNREESREVLFEYLKQDEQQXWKSREWEPEEILRDRIINHFLA

SEQ ID NO: 46161 - DNA, 411 bp, Unknown
  Obtained from environmental sample
  misc_feature (1)..(411): n is a, c, g, or t
gtgcgcaatatccctcttgaagaaaataatttctctgatagcagtttcgatgtaatactcgcctcccatttgattgaacacctgaacgagccaaaaacttttctggaagaaacataccgtattttaaaaaataacggttctatatttattacaactcccgatatcagcggctttcaatcccgtcttttcgggagccgctggcgttccgctatttttgaccacctttatttattttcccggcgcacattgtcaaaaatgttaaaaaccgtcggctttaaagtcgttagctgtcattcatggggcggtcttgcggcgggtgttgcgccgaggacggtaaaaaaggcagcggactttttagcaaagaggctgaactgcggcgatgttatgattattacgctaaaaaatgattaa

SEQ ID NO: 46162 - protein, 136 aa, Unknown
  Obtained from environmental sample
  misc_feature (1)..(136): Xaa is any amino acid
MRNIPLEENNFSDSSFDVILASHLIEHLNEPKTFLEETYRILKNNGSIFITTPDISGFQSRLFGSRWRSAIFDHLYLFSRRTLSKMLKTVGFKVVSCHSWGGLAAGVAPRTVKKAADFLAKRLNCGDVMIITLKND

SEQ ID NO: 46163 - DNA, 882 bp, Unknown
  Obtained from environmental sample
  misc_feature (1)..(882): n is a, c, g, or t
atgaaaacatggtcaatgcctataggcgccggaaaaagcaaaacgcgtccctgcgccctttgcggcagtctcatttttaagccagcgcttgaatgtgagggtttttcatttgtaaagtgcaaaaattgcggacttgtacagagaaacccgcaacccgataaaaatgaaatattgacacggtatagcgacacttacggaaatgattatctttcttacgaattggaaaacgaagccgccttccttaaacttcaacagcttgcgttaaaagacgctggtttttccaaactggaaaaaacaatttttgcctccgcagaaaaattacgcgccgaaagtccttcaatccttgacatcggctgcgccacgggagcgcttcttgcatctctccgcgacaaaggatggcgcgtaacaggcgtagaaatctctcccagcgcaatttacgctaaaaatgaacgcagactggacgtgcgcaatattccccttgaagaaaataatttccccgataacagtttcgacgttatactcgcatcccacttgattgagcacctgaacgaaccaaaaacatttctggaagaaacttaccgtattttaaaaaataacggttctttgtttataacaactcccgacatcagcggctttcaatcccttcttttcggcagccgctggcgttccgccatttttgatcacctttatttattttcaaggcgcacattgtcaaaaatgttaaaaaccgttggttttaaagtaattagttgccattcgtggggcggactggcggcgggggttgcgccaaagacggtgaaaaaagtaacggactttttggcaaagaggctgaactgtggtgatgttatgattatttacgctaagaagattaccacacgctaa

SEQ ID NO: 46164 - protein, 293 aa, Unknown
  Obtained from environmental sample
  DOMAIN (85)...(264): ubiE/COQ5 methyltransferase family
  misc_feature (1)..(293): Xaa is any amino acid
MKTWSMPIGAGKSKTRPCALCGSLIFKPALECEGFSFVKCKNCGLVQRNPQPDKNEILTRYSDTYGNDYLSYELENEAAFLKLQQLALKDAGFSKLEKTIFASAEKLRAESPSILDIGCATGALLASLRDKGWRVTGVEISPSAIYAKNERRLDVRNIPLEENNFPDNSFDVILASHLIEHLNEPKTFLEETYRILKNNGSLFITTPDISGFQSLLFGSRWRSAIFDHLYLFSRRTLSKMLKTVGFKVISCHSWGGLAAGVAPKTVKKVTDFLAKRLNCGDVMIIYAKKITTR

SEQ ID NO: 46165 - DNA, 939 bp, Unknown
  Obtained from environmental sample
  misc_feature (1)..(939): n is a, c, g, or t
atgcttgaggtgcgtgggctgaacaagcggtttgggcaggtgagagccgtgagcgacctgagtttcgaggtgcgccgcggcgaggtcttcggcttcctggggccaaacggcgccgggaagagtacgaccatgcgcataatcacgtgcttcatcccgcccacctccggttcggtgcatgtggacgggctaagcacggcggatcaagaccttgccgtgcgcgccaagatcgggtacctgccggagagcacgcccctatacagcgacatgaccgtaaaggagtacttggcctttgtgggtcagattaggggcctgcggggggcggcgctcaagtcgcggacggacgagatgttttccgtgtgcgccatcaccaagatggccgaccggcagatcggcaagctctccaagggatatcggcagcgcgtcgggctggctcaggccatgatacacgacccggacctgctgatcttggacgagcctatgtctgggcttgaccccaaccaaatcattgagatccgcaacctcataaagaagttcggcgaggagaagacggtcatatactgctcgcacatcctatctgaggtctccgcgacatgcgaccgtatacttattataaaggacgggcgcgtagtggccacggggacgccgagcgacctgacctcggggcataggggcggctcgcggtacacggtgacggttaaaggcgacgccgaggcggtgaagcgggacctaacctccgtggtcggggtgtctggcgtcgagacggaaggaaccgcgccggaggggtgggtttgcgtccgcgtcaacgcggacggcaaagaggacatcggcgaggggatattcagatgtatagtcgataacgggctcagtctatcggagcttcgccgcgaccaaacgagccttgaagaggtatttacggaattgacagggggtggcaaatga

SEQ ID NO: 46166 - protein, 312 aa, Unknown
  Obtained from environmental sample
  DOMAIN (27)...(207): ABC transporter
  misc_feature (1)..(312): Xaa is any amino acid
MLEVRGLNKRFGQVRAVSDLSFEVRRGEVFGFLGPNGAGKSTTMRIITCFIPPTSGSVHVDGLSTADQDLAVRAKIGYLPESTPLYSDMTVKEYLAFVGQIRGLRGAALKSRTDEMFSVCAITKMADRQIGKLSKGYRQRVGLAQAMIHDPDLLILDEPMSGLDPNQIIEIRNLIKKFGEEKTVIYCSHILSEVSATCDRILIIKDGRVVATGTPSDLTSGHRGGSRYTVTVKGDAEAVKRDLTSVVGVSGVETEGTAPEGWVCVRVNADGKEDIGEGIFRCIVDNGLSLSELRRDQTSLEEVFTELTGGGK

SEQ ID NO: 46167 - DNA, 486 bp, Unknown
  Obtained from environmental sample
  misc_feature (1)..(486): n is a, c, g, or t
ttgacggggagcatcggcgtgatcttctctatgcccatgtatcaggagttggccaagaaggtgggcgttgacttccgcacgatgaaggcgggcgagatgaaggacgcggggagcccgttccgccagatgactgaaaaggagacgaagtactttcaggcgctgttagacgacgttcacgagcagttcatagcggacgtggcggcggggcgcgatattgacacggggaaggtgcgggcgctggccgacgggcgcgtgcttaccgggaagcaggcggtggcgagcggtttggtcgacacgctcggcggctttgcggaggcgttgcgttacttgggcgagatatgcgacgtgccggagtcctcgaagcctatagagaggcgtcccgccgtgggctggcgcgagtttttgttcgagtcggcgcagaggcgcgttccgggtctcggcgcgctttcgcggcgggcggggctttactacctgcttgatatgtga

SEQ ID NO: 46168 - protein, 161 aa, Unknown
  Obtained from environmental sample
  DOMAIN (1)...(117): Peptidase family S49
  misc_feature (1)..(161): Xaa is any amino acid
MTGSIGVIFSMPMYQELAKKVGVDFRTMKAGEMKDAGSPFRQMTEKETKYFQALLDDVHEQFIADVAAGRDIDTGKVRALADGRVLTGKQAVASGLVDTLGGFAEALRYLGEICDVPESSKPIERRPAVGWREFLFESAQRRVPGLGALSRRAGLYYLLDM

SEQ ID NO: 46169 - DNA, 414 bp, Unknown
  Obtained from environmental sample
  misc_feature (1)..(414): n is a, c, g, or t
atgttaaattccatcctgattgacgcgggtccccttatctgtctctttgactcaagcgagaggcggcataagccaatgaaggccttcctcaaaaaacacccgtaccgttacgtgagcacccttgcggtttttaccgaagtttcccatatgctggatttcaacgtaaacgcccagcgggacttttacgagtgggtaatgtgcaagggtgtaattatcagcgacatcaatcagaacgacatgccccggctgatagaactaaccggcaaataccgtgatcttcccatggacttcgccgacgcgacccttgtcattacagcggaaaaaaccggcataaaggaaataatcagcctggacaaagactttgacatttaccgtctgcccggcagggagaagatacggaacatttacaaataa

SEQ ID NO: 46170 - protein, 137 aa, Unknown
  Obtained from environmental sample
  misc_feature (1)..(137): Xaa is any amino acid
MLNSILIDAGPLICLFDSSERRHKPMKAFLKKHPYRYVSTLAVFTEVSHMLDFNVNAQRDFYEWVMCKGVIISDINQNDMPRLIELTGKYRDLPMDFADATLVITAEKTGIKEIISLDKDFDIYRLPGREKIRNIYK

SEQ ID NO: 46171 - DNA, 882 bp, Unknown
  Obtained from environmental sample
  misc_feature (1)..(882): n is a, c, g, or t
gtggcgcttatggacgcccgctccatagccgctaccgcgcttaacaagggcaggataaccgccgctacggaactgcaagttccttttggcaagtacaagtttttctttgacaagggcgtatacgacaagcgggtttttaacggaacttcaaagcccctgcctcaaactgatcttgtcctgggccccaatatcagggactggcccgcgatgcccgcccttgcggaaaacctccttgttaagatcgcttgttttatcacagacccggtaaccaccaccgacgagttgatcccctcgggcgagacctcctcataccggtcaaatcccttaaggcttgcggaattcactttaagccgcaaagaccccgcttatgtgcagagggcgaaagacatacacgcccttgaggaagcgcgtcaaagcaataagcaggacccggagcccgccgcgctcctcaagaagctccggactatacaaggctgcgccaatatcggcctttctgaaactatcattggcagcggtatttttgcccgcaaacccggcgacggttccgcccgcgagcaggccgcttcctgccagcgcgtgctgggcggatcggcgaattttgccctggaatacgccaccaagcgctaccggtccaacctgattaactggggaatactcccctttattatcaccgacgaaacggcccttagccttgacagctgggttttcttcccgaacattcaaaaacaggtacgggaaaaagcccggatgatcaaagcctatgtgttaggcgacaaaccggttgaaatagccgtcactctgggcgagctgacagataccgaacggcagatattgttggacgggtgcttgattaaccactaccaaataacaaataacaaataa

SEQ ID NO: 46172 - protein, 293 aa, Unknown
  Obtained from environmental sample
  misc_feature (1)..(293): Xaa is any amino acid
MALMDARSIAATALNKGRITAATELQVPFGKYKFFFDKGVYDKRVFNGTSKPLPQTDLVLGPNIRDWPAMPALAENLLVKIACFITDPVTTTDELIPSGETSSYRSNPLRLAEFTLSRKDPAYVQRAKDIHALEEARQSNKQDPEPAALLKKLRTIQGCANIGLSETIIGSGIFARKPGDGSAREQAASCQRVLGGSANFALEYATKRYRSNLINWGILPFIITDETALSLDSWVFFPNIQKQVREKARMIKAYVLGDKPVEIAVTLGELTDTERQILLDGCLINHYQITNNK

SEQ ID NO: 46173 - DNA, 651 bp, Unknown
  Obtained from environmental sample
  misc_feature (1)..(651): n is a, c, g, or t
ttgacaatttacataagcggaggatttatggtttacggttacgttagggtaagtacagacaggcagacagttgataatcagcgttttgaaatagaacggttttgtttaaaaaacagcattatcattgatcactggattgaggaaacaataagcgggacgcagttgcctgaaaaatgccttttgggatcgctgcttgcaggagctaaaacgggcgatttaatagtatgttccgaattgtcaaggctgggcagaaatatgtttatgattatgtccatattgaacaatttgatgataaacggcgtaaaaatacgaacaattatggataattaccagttgggagacagtattcaggctaaaattctcgcatttgcctttggattgaccgctgaaatagagcgcgaattaatttcgcaaagaacaaaagaggctcttgcccgtaggcgagcggaaggcattaaacttggcagaccgttggggagaaagtccacccgtctaaaacttacggaacatgaagcggaaatacagttgttgttaagccaaaatgtctccaaaagcgctattgctcgaaggttcggcgtgtgccgaaaaacggttatttcgtttctaaagaagcggcaaaaaccgcctttaaacaatgaaattacttgttaa

SEQ ID NO: 46174 - protein, 216 aa, Unknown
  Obtained from environmental sample
  DOMAIN (11)...(153): Resolvase, N terminal domain
  misc_feature (1)..(216): Xaa is any amino acid
MTIYISGGFMVYGYVRVSTDRQTVDNQRFEIERFCLKNSIIIDHWIEETISGTQLPEKCLLGSLLAGAKTGDLIVCSELSRLGRNMFMIMSILNNLMINGVKIRTIMDNYQLGDSIQAKILAFAFGLTAEIERELISQRTKEALARRRAEGIKLGRPLGRKSTRLKLTEHEAEIQLLLSQNVSKSAIARRFGVCRKTVISFLKKRQKPPLNNEITC

SEQ ID NO: 46175 - DNA, 1329 bp, Unknown
  Obtained from environmental sample
  misc_feature (1)..(1329): n is a, c, g, or t
atggttacgctcttgttccgtgtgagcgacacagggcagggcatgacgcatgaacagttagataaactgtttgacgagtatacccgctttaatcttgaagcgaaccgcgcaaccgagggagccgggcttgggatgaatattacaaggcggcttgtggagttgatgaacggcgagattttggtggaaagcgtgtacggcaaaggctcgttgttcactgtgcgtctgcctcagggaaaagttgacgatggtgtactgggcaaagcggtagttgaaaacctcatgcagttccgtcttggcagaatgtcgcagatgaaaaaagcgccgcaggttgtaagggagtatatgccttacggaaaagtccttatagtggacgacgtagaaacaaatctgtatgtggctaaggggcttatggctccttacggattgacaatagatacagccatgagcgggattgagtcgatagaaataatcaaaagcggcgcggtatacgacataatcttcatggatcactttatgcctaagatggacggaatagaagcggcaagaataatacgagacttggggtatacgcagcccattgtagcgctgacagctaacgcactgacaggacagacggaagtatttatggcgaacgggtttgacggatttatttccaagccgatagacatacaccagttgaacgccgtgttaaacaaactggtacgcgacaagtatcctgaggaaacggttgaagccgcaaggcagaacaataacagtaataaaaagaatgcaggctcaaaccggccggcaaataccgagttaataaaaatatttacgagggacgctgaanaagcatttgcggtactggggatcatatgcgaaaaacgtagtaaatacgcggacgaggatatacagtcgtatattgtcaacgttcacgcgatgaaaagcgcgcttgcgaatatcggtgaaaccgggctgtccgctgctgcgcttaaattggaactggcagggaaggcaaatgatatagagctaatgacggccgaaactccggcatttctggaaacgctgcgcgagacgattgaaaaaaacaagcctaaaggagatgacggtgacgacggtgcagaatattccgacagcgaccgtacgtatttgaaagaaagattgctcattatacaaaaggcgtgcgctgagtatgatgaaataagcgccaataaagctctatctgaattgggacaaagaaaatgtccgcgctctgtcaaaggactcttggacactatcgccttgcacttattgcaaagtgattttgaggatgtcgtggaacttgtgaataattatactgacgttctctaa

SEQ ID NO: 46176 - protein, 442 aa, Unknown
  Obtained from environmental sample
  DOMAIN (1)...(78): Histidine kinase-, DNA gyrase B-, and HSP90-like ATPase
  misc_feature (1)..(442): Xaa is any amino acid
MVTLLFRVSDTGQGMTHEQLDKLFDEYTRFNLEANRATEGAGLGMNITRRLVELMNGEILVESVYGKGSLFTVRLPQGKVDDGVLGKAVVENLMQFRLGRMSQMKKAPQVVREYMPYGKVLIVDDVETNLYVAKGLMAPYGLTIDTAMSGIESIEIIKSGAVYDIIFMDHFMPKMDGIEAARIIRDLGYTQPIVALTANALTGQTEVFMANGFDGFISKPIDIHQLNAVLNKLVRDKYPEETVEAARQNNNSNKKNAGSNRPANTELIKIFTRDAEXAFAVLGIICEKRSKYADEDIQSYIVNVHAMKSALANIGETGLSAAALKLELAGKANDIELMTAETPAFLETLRETIEKNKPKGDDGDDGAEYSDSDRTYLKERLLIIQKACAEYDEISANKALSELGQRKCPRSVKGLLDTIALHLLQSDFEDVVELVNNYTDVL

SEQ ID NO: 46177 - DNA, 318 bp, Unknown
  Obtained from environmental sample
  misc_feature (1)..(318): n is a, c, g, or t
atgcattcacctctaaccagatacggcttgcctcaggttgcggtttttccccttattgtttttttggcaatggcagcctgttttttatttatcaaagacgcgcgtattttagctccggttgaaattgtactttttcttgtatttctgtggatgctttcttttttccgcgacccggcaagaacaattaacactgacgaaactgtccttctttcacctgccgatggcactattaccgacatagcgcttgtcgatgacagcgttcttggaaaaggcgctttaagaatagggatgttttttagcatttttatgttcatataa

SEQ ID NO: 46178 - protein, 105 aa, Unknown
  Obtained from environmental sample
  misc_feature (1)..(105): Xaa is any amino acid
MHSPLTRYGLPQVAVFPLIVFLAMAACFLFIKDARILAPVEIVLFLVFLWMLSFFRDPARTINTDETVLLSPADGTITDIALVDDSVLGKGALRIGMFFSIFMFI

SEQ ID NO: 46179 - DNA, 342 bp, Unknown
  Obtained from environmental sample
  misc_feature (1)..(342): n is a, c, g, or t
gtgcgtatagaaaatgtttcttataaaaaaggccaatttaaaaacgcatttgctgccgaagccggtaaggttaacgaatcaaacgatattttaatggttcgccttgcggagccaaaggacaggcttttggtaaggcagataagcggcgctattgccaggcatatagtctgcgaagcttcagatggaaaagagtacaaacagggcgaacaattcggaatgataaagttcggctccaggacggagctttacattgccgctggaagcggttgcgaagcggccgttaaaattggcgacaaggttcgctctgggttatcgccgattgccagatacaggaataattga

SEQ ID NO: 46180 - protein, 113 aa, Unknown
  Obtained from environmental sample
  misc_feature (1)..(113): Xaa is any amino acid
MRIENVSYKKGQFKNAFAAEAGKVNESNDILMVRLAEPKDRLLVRQISGAIARHIVCEASDGKEYKQGEQFGMIKFGSRTELYIAAGSGCEAAVKIGDKVRSGLSPIARYRNN

SEQ ID NO: 46181 - DNA, 315 bp, Unknown
  Obtained from environmental sample
  misc_feature (1)..(315): n is a, c, g, or t
atgcgatttgggataaaagcaataatagccgaaagctacagcgaaattttctttggaaattgcgtttctattggtattccctgttttgctgcaaacaccgaaacaaccgaagaaattttagcgcacatagagaaaaaccctgatgctgaattttctgttagcgttaaggaactaagtgccaagtttggcgaaaaatcttatgagcttaagttagcagatggtccacgcgggcagtttttagacggctcctggcacgctaggagtgttctgcttttgaacaaagaaaaaattgaaaccttggcaaagtcgttatga

SEQ ID NO: 46182 - protein, 104 aa, Unknown
  Obtained from environmental sample
  misc_feature (1)..(104): Xaa is any amino acid
MRFGIKAIIAESYSEIFFGNCVSIGIPCFAANTETTEEILAHIEKNPDAEFSVSVKELSAKFGEKSYELKLADGPRGQFLDGSWHARSVLLLNKEKIETLAKSL

SEQ ID NO: 46183 - DNA, 564 bp, Unknown
  Obtained from environmental sample
  misc_feature (1)..(564): n is a, c, g, or t
gtggacttaaaaaagattgaagatggatttagacttgttttagaaggtttgggagaaaacccgaatagagaaggtttgctgaaaacgcctgagcgcgtggcaaaaatgtattcggaacttttaagcggtttggattccaaagaaaatgagaaagatattttggcgactcagtttgttgaaaaatacgatgagatgattttgttaaaagatattccggtgacaagtatatgcgagcatcactttttgccattcacaggtgttgcgcacgtggcttatgtgccgggcaatagaatcgcagggctttcaaagctggcacgagcagttgatttttatgcgcaccgcccacaagtgcaagaaagattaaccacgcaaatagccgagcttattcaccgctctcttgagccgctgggtgttggcgttgttatggaatgcgttcacacttgcatgacaattagaggcataaaaaaaacaggttcaataatgttcacaagcaaactcattggcacattcaaaagcaatgctaccaccagagcagagtttatgtcgctgataggaaagaggtaa

SEQ ID NO: 46184 - protein, 187 aa, Unknown
  Obtained from environmental sample
  DOMAIN (64)...(168): GTP cyclohydrolase I
  misc_feature (1)..(187): Xaa is any amino acid
MDLKKIEDGFRLVLEGLGENPNREGLLKTPERVAKMYSELLSGLDSKENEKDILATQFVEKYDEMILLKDIPVTSICEHHFLPFTGVAHVAYVPGNRIAGLSKLARAVDFYAHRPQVQERLTTQIAELIHRSLEPLGVGVVMECVHTCMTIRGIKKTGSIMFTSKLIGTFKSNATTRAEFMSLIGKR

SEQ ID NO: 46185 - DNA, 759 bp, Unknown
  Obtained from environmental sample
  misc_feature (1)..(759): n is a, c, g, or t
gtgccagttctttctgtttctcacttaaaagcaggctatgggaaaaaaatagttttgcacaatatttccttttcgcaggaacaaggagaaataagagctattttgggtacatccggttgcggaaaatccacgcttttgaataatattcttgggctggaaaaagcgatggctggtgaaatagaaattttaggcacaagattaaaagccggcaaagaacaagttccgctttctgtgcaaaaacgcatgggggttttatttcaaaatggagcgctactgagttcgctaacggtttttcaaaacgttgccctgccaattcgcctgcaccgcccaaacactccgccagcggaggttagggatatggtggcaagccgcctagaaaaagtgaatatgctccacgccatagacaaattgcccagcgaactcagcggcggaatgaaaaagcgagcggcactagcccgagcaatagccctagaccctgaactccttttttgcgatgagccaagcgcaggacttgaccctgttacgagccgtgccttagacgaccttttgctgtttttgagagagaatttaaaactctctgttctaatagttacgcacgaacttgattccattaaaacaatagcaaataaaattctatttttgaaaaccggaaatgttcttttggattccgatttaaaaaccggattggaaagcgatatagaggaagtgagggaattcttcacaagaggagagagcaatagtggacttaaaaaagattga

SEQ ID NO: 46186 - protein, 252 aa, Unknown
  Obtained from environmental sample
  DOMAIN (29)...(217): ABC transporter
  misc_feature (1)..(252): Xaa is any amino acid
MPVLSVSHLKAGYGKKIVLHNISFSQEQGEIRAILGTSGCGKSTLLNNILGLEKAMAGEIEILGTRLKAGKEQVPLSVQKRMGVLFQNGALLSSLTVFQNVALPIRLHRPNTPPAEVRDMVASRLEKVNMLHAIDKLPSELSGGMKKRAALARAIALDPELLFCDEPSAGLDPVTSRALDDLLLFLRENLKLSVLIVTHELDSIKTIANKILFLKTGNVLLDSDLKTGLESDIEEVREFFTRGESNSGLKKD

SEQ ID NO: 46187 - DNA, 897 bp, Unknown
  Obtained from environmental sample
  misc_feature (1)..(897): n is a, c, g, or t
gtgctctttttgcagggcggcgcgtcccttcaatttcaattgattccccttaaccttgcggctggcgacgcgcccggacaaggtaaaaaagcctcatatgtcgatacaggcatttggtcggataaagcgataaaagaagcctcaaaatacgccaaggtggaagtaaaggcaacctccaaggacaaggcttacacatacattcccgacgctcccgctccttcctcggacgacgcctattatcacataactttgaacaatacgattgtcggaaccaagtgggacaaactccccaatacaggctccgtgcctcttgttacggacgcttcaagctgcatcctctcagagccgcttgacgtaagcaagtttgcgttaatctacgcgggcgctcagaaaaacttaggtcccgccggaactacccttgttatcatccgcgaagatttggtaaaaaagacgcctgattggattcccgtcatgctcaggtatgacacccacgtcggcgaaggctcaatgtacaatactccgccgtgctacggcatttacatcatcgggctggtgctggaatggttaaaaaacttaggcggcgttgaggctatcggaaaattaaaccgcgaaaaagccaaactcttttatgactatcttgattcatcggagctgttttattcgccggtacaaaaagaattccgcagtttgatgaacattccgtttgtaacaacagagcaggacgaagccaagaaaacagaaattgagacccgttttgtaaaagaagcggcggcggctggacttataaatcttgcgggacacaggcttgtaggcggcatgagagcaagtatttacaatgcaatgccgattgaaggcgtaaaagcgttgataagtttcatggacaaattcaagaaataa

SEQ ID NO: 46188 - protein, 298 aa, Unknown
  Obtained from environmental sample
  DOMAIN (1)...(289): Aminotransferase class-V
  misc_feature (1)..(298): Xaa is any amino acid
MLFLQGGASLQFQLIPLNLAAGDAPGQGKKASYVDTGIWSDKAIKEASKYAKVEVKATSKDKAYTYIPDAPAPSSDDAYYHITLNNTIVGTKWDKLPNTGSVPLVTDASSCILSEPLDVSKFALIYAGAQKNLGPAGTTLVIIREDLVKKTPDWIPVMLRYDTHVGEGSMYNTPPCYGIYIIGLVLEWLKNLGGVEAIGKLNREKAKLFYDYLDSSELFYSPVQKEFRSLMNIPFVTTEQDEAKKTEIETRFVKEAAAAGLINLAGHRLVGGMRASIYNAMPIEGVKALISFMDKFKK

SEQ ID NO: 46189 - DNA, 447 bp, Unknown
  Obtained from environmental sample
  misc_feature (1)..(447): n is a, c, g, or t
atgaatctcaaaactgtaatttcaacggaaaccatcgaccttaacttaaaaggcaccaccaagaaagaaataattaacgaattgcttgatattcttgtcagaacgggaaaaatcaaagacaaaggagctgcattagcggcagtaatggaaagagaagaaaaaatgtctaccggtatgaagcatggaatcgccattccgcacggcaaatgcgcctctacggaggatttggtcgcctgtatcggcatttccaaaaaccctgttgactttgattctctggataaacagccgtgcagaatcttcatcatgacgctttctccggtggaaaaaacaggaccccatttgcaattcctggcggaagtaagtttattatttaaaagcgcggaaaaacgcgaagaaattataaacgcaaaatctcccgaagaagttctggaaatacttgccgaataa

SEQ ID NO: 46190 - protein, 148 aa, Unknown
  Obtained from environmental sample
  DOMAIN (5)...(148): Phosphoenolpyruvate-dependent sugar phosphotransferase system, EIIA 2
  misc_feature (1)..(148): Xaa is any amino acid
MNLKTVISTETIDLNLKGTTKKEIINELLDILVRTGKIKDKGAALAAVMEREEKMSTGMKHGIAIPHGKCASTEDLVACIGISKNPVDFDSLDKQPCRIFIMTLSPVEKTGPHLQFLAEVSLLFKSAEKREEIINAKSPEEVLEILAE

SEQ ID NO: 46191 - DNA, 372 bp, Unknown
  Obtained from environmental sample
  misc_feature (1)..(372): n is a, c, g, or t
atgacaatgcagaatcaaaataatatttcgtttataggaaacccttttcccctcgaagaagccgaggaacgtttacgcgaacttaaaaaagccggaaatacttcttttaaactgactatcccatgggcggcgattgaacatgagggagcgggaatctacgacgaagcgtatttagcgtacctgcgaaaaattttaatagcggcggataaagaggggatttctgtttttatcgaactaagtaaggatttacagagcgttcccgcctgggctgcgaaagatgaaaacaaagaacattacattgccgcgtataagcacgcgcagcgccgtttaaaaaattgcaaagcaatcgcgggctggggagacgttaattaa

SEQ ID NO: 46192 - protein, 123 aa, Unknown
  Obtained from environmental sample
  misc_feature (1)..(123): Xaa is any amino acid
MTMQNQNNISFIGNPFPLEEAEERLRELKKAGNTSFKLTIPWAAIEHEGAGIYDEAYLAYLRKILIAADKEGISVFIELSKDLQSVPAWAAKDENKEHYIAAYKHAQRRLKNCKAIAGWGDVN

SEQ ID NO: 46193 - DNA, 546 bp, Unknown
  Obtained from environmental sample
  misc_feature (1)..(546): n is a, c, g, or t
ttggaatactaccggaaatttgaatacaaagaatgggttattgatttttttaccgctatatgcaaaaacagggaaattgcatggtctattttgaacagttccgatgaatttgatgttccgcccgcgttggcttntgcgttatgctgggaagaaagcagatttaacccgaacgcgataaacaggcaaaaccgcgacggaagcatagatcgcggattatttcagttaaataacaaatcttttccttatctggatatttcaactttttacggtattaattccaacgcgcgttacggagtcggtcatcttaggtattgcctgaatgtaggcggcagtgaaattgccgctcttgccatgtacaatgccggcgcgggaagagtgagatcgacaggtgcgcctgaaattactcttaattatgtaaacagaattttagaaaaccgcagaaaaatagagagccgtttccataccaagttaattaaagaagaagaaaacagacttgccgaaaacgccgaaggttcttcaaacggattattcagccgcgtattttaa

SEQ ID NO: 46194 - protein, 181 aa, Unknown
  Obtained from environmental sample
  DOMAIN (28)...(142): Transglycosylase SLT domain
  misc_feature (1)..(181): Xaa is any amino acid
MEYYRKFEYKEWVIDFFTAICKNREIAWSILNSSDEFDVPPALAXALCWEESRFNPNAINRQNRDGSIDRGLFQLNNKSFPYLDISTFYGINSNARYGVGHLRYCLNVGGSEIAALAMYNAGAGRVRSTGAPEITLNYVNRILENRRKIESRFHTKLIKEEENRLAENAEGSSNGLFSRVF

SEQ ID NO: 46195 - DNA, 837 bp, Unknown
  Obtained from environmental sample
  misc_feature (1)..(837): n is a, c, g, or t
ttggggatctcatggatagaggcgggaaatccgggaagcaatccgaaggatatggaattcttccgtcttgccggaaacctcaatcttaaacacgcgaaactctgcgccttcggctctacccgtaaaaagggagtcaaggcaagcgaggattccggcgtgttaagcttgctcgacgcgcagactcaggcggtggtgatcttcggcaagagctgggatcttcatgtgacggaagtgcttcgtgtcagccatgaggaaaaccttgcaatgattgccgagacaatcgcgtttttaaaagaaaaggggcggcaggttttttacgacgcggagcatttctttgacggttggaaagcaaatcccgagtacgcgcttacaactctgaagacggcagtaaccgccggggcggaacgcatagtactgtgcgacacgaacgggggcgcgtttcccaacatgatagagaaggcggttaaagaagccgcgttaattgccgacgaaaccggcggcgtttcctgcgctctcggcattcacgcgcacaacgacgcggacatggctagcgctaacactataaccgctgtccttgccggctgccgtcatattcagggaacccttgtcggcttcggagagaggtgcggcaatacaagcctcgcggcggttatgcccagccttgaactcaagcttggtttccgttgtctgcctgagggcaagatggaaaagatttccgagataacgcanattgtcgcggagacggcaaatgtcgccgtgccgggcagtatgccttatgtgggaagccacgcttttacacacaaggcgggaatgcacgcggacgggattttaaattga

SEQ ID NO: 46196 - protein, 278 aa, Unknown
  Obtained from environmental sample
  DOMAIN (1)...(251): HMGL-like
  misc_feature (1)..(278): Xaa is any amino acid
MGISWIEAGNPGSNPKDMEFFRLAGNLNLKHAKLCAFGSTRKKGVKASEDSGVLSLLDAQTQAVVIFGKSWDLHVTEVLRVSHEENLAMIAETIAFLKEKGRQVFYDAEHFFDGWKANPEYALTTLKTAVTAGAERIVLCDTNGGAFPNMIEKAVKEAALIADETGGVSCALGIHAHNDADMASANTITAVLAGCRHIQGTLVGFGERCGNTSLAAVMPSLELKLGFRCLPEGKMEKISEITXIVAETANVAVPGSMPYVGSHAFTHKAGMHADGILN

SEQ ID NO: 46197 - DNA, 666 bp, Unknown
  Obtained from environmental sample
  misc_feature (1)..(666): n is a, c, g, or t
ttgagcaaatcctttgaacatatcgatcctttctctgtagggaacgacaggcatatttgtatgagcgaagtcggcggacgctctgcgatagccgagagggtgaaaaagatcgatccttccattacaagggatcaccctgtgacagccgcgcttgcgcaaaagctgaaaactctcgaagcggaaggctggcagtttgaaggggcggacggcagttttgatcttatggttcgcagagagcttggacgttacaagccgttgtttaacatcgaggcttaccgcgttgtaagcgaacatcccacgggagagacaattgcctgttcccacgcgtgggttaaagtgcatgttgacggtcaggaagagatcgccgccgctgagggagacggacctgtcaacgcgatggacggcgcgcttcgcagggcgttaaaacatttttacccggaactgcaggaagtgcgtcttaccgactataaagtcagggtaatcgacggaaccgcggcgacggcggcaaaggtgcgcgtacttatcacttcttccgacggcaaacaaaactggacaacggttggagtttcggaagacatcatagatgccagccgtgccgcccttgttgattctattgaatacaaattaattgatgatattgaacgccgattcaaggcgtacttatag

SEQ ID NO: 46198 - protein, 221 aa, Unknown
  Obtained from environmental sample
  DOMAIN (66)...(209): LeuA allosteric (dimerisation) domain
  misc_feature (1)..(221): Xaa is any amino acid
MSKSFEHIDPFSVGNDRHICMSEVGGRSAIAERVKKIDPSITRDHPVTAALAQKLKTLEAEGWQFEGADGSFDLMVRRELGRYKPLFNIEAYRVVSEHPTGETIACSHAWVKVHVDGQEEIAAAEGDGPVNAMDGALRRALKHFYPELQEVRLTDYKVRVIDGTAATAAKVRVLITSSDGKQNWTTVGVSEDIIDASRAALVDSIEYKLIDDIERRFKAYL

SEQ ID NO: 46199 - DNA, 966 bp, Unknown
  Obtained from environmental sample
  misc_feature (1)..(966): n is a, c, g, or t
atgaaattttctgttgcggttattcccggagatggaatcgggcctgaggtgatagcgccgactcttgaagttcttgacgttgttggcgacaagtacggtcatatattcaattacgttgagttgttggcgggcggacaggctatcgatcaaacaggagagccgctcccacagaaaactcttgaaaccgcgaaacagtgcgacgcgcttctcttgggcgctgtcggcggtccaaagtgggatacgcttccggggcatctgcgtcccgagagggcgctgttgggtcttcgcgccgggcttggcgtttttgccaaccttcgtccggcggctttgctcccccaattaaaatccgcttgccctgttaaggatgaggtgctaatcgcaagcaacagcgagaaaaaagccgcttttgatttattgattgtaagagagctgacgggcggactctacttcggcaaacgcggaagattggacgagccttcaaacggccacagtcccggttcggcttttgataccgaaacatattcgtggatggaaattgagcgcgtgcttcgcgccggttatgaagcggcgggagtgcggcgtaaaaaactctgcgtggtggacaaggccaatgtgcttgagtcttcccgcttttggcgggaagtcgccgctgtggtttcaaaagactatcccgacatagaaacaagtttcctctatgttgacaatgccgccatgcagttgatccgcgctccggggcaattcgacgttattgtaacgtccaatctctttggggacatactttccgatgaggcttccgtacttacaggttcaatcggaatgcttgcctcggcaagtttgggagacaaagtgcagggcggaacaagaccgggaatgtacgagcctattcacggctccgcgccggacatcgcggggaaggacattgccaatcctcttgcgacaatctttcggcggcctcggccgatctga

SEQ ID NO: 46200 - protein, 321 aa, Unknown
  Obtained from environmental sample
  DOMAIN (4)...(321): Isocitrate/isopropylmalate dehydrogenase
  misc_feature (1)..(321): Xaa is any amino acid
MKFSVAVIPGDGIGPEVIAPTLEVLDVVGDKYGHIFNYVELLAGGQAIDQTGEPLPQKTLETAKQCDALLLGAVGGPKWDTLPGHLRPERALLGLRAGLGVFANLRPAALLPQLKSACPVKDEVLIASNSEKKAAFDLLIVRELTGGLYFGKRGRLDEPSNGHSPGSAFDTETYSWMEIERVLRAGYEAAGVRRKKLCVVDKANVLESSRFWREVAAVVSKDYPDIETSFLYVDNAAMQLIRAPGQFDVIVTSNLFGDILSDEASVLTGSIGMLASASLGDKVQGGTRPGMYEPIHGSAPDIAGKDIANPLATIFRRPRPI

SEQ ID NO: 46201 - DNA, 771 bp, Unknown
  Obtained from environmental sample
  misc_feature (1)..(771): n is a, c, g, or t
atgacaaaccgctggggttatttttttgttgcgcctttcataattgtattttgcgtttttaacctgtggcctactttatacactttcattcttagttttaccgatctggaaggtttacggacagattttaaatttaatggttttgtaaattatataaaattggttaaagaccagtatttttggggcgctttgggaaatacctttattatctggacttttaactttatcccgcagttaggtcttgccttgatactttccatctggctttccgatatccggcttaacctgacaggcaaaagtttattccgggcggttgtttatatgcctaacctgcttacagccgtatctgtagctttgcttttccgcagtattttcggctttaacgcgtttgccacctctccggcgaatcaatttttaagttcattgggaatcagagcgacaaaaattgacccgattaccggagaattaataaaagacgcttttgactttttccgaagcgtcgcgttttcgcggggactggttgcgtttattcaatggtggatgtggtatggttatacgatgatcatactcatggccggtattactactatcccgatatctctgtacgaatccgcgtccattgacggcgctaacagcagccaaactaccttctacataactctgccgcttttgcgcccaataatgctttacatactcattacttcaatgatcggcggtatgcaaatgtttgatattcctttccctgcttaccgatatgatgggcggtcctaa

SEQ ID NO: 46202 - protein, 256 aa, Unknown
  Obtained from environmental sample
  misc_feature (1)..(256): Xaa is any amino acid
MTNRWGYFFVAPFIIVFCVFNLWPTLYTFILSFTDLEGLRTDFKFNGFVNYIKLVKDQYFWGALGNTFIIWTFNFIPQLGLALILSIWLSDIRLNLTGKSLFRAVVYMPNLLTAVSVALLFRSIFGFNAFATSPANQFLSSLGIRATKIDPITGELIKDAFDFFRSVAFSRGLVAFIQWWMWYGYTMIILMAGITTIPISLYESASIDGANSSQTTFYITLPLLRPIMLYILITSMIGGMQMFDIPFPAYRYDGRS

SEQ ID NO: 46203 - DNA, 564 bp, Unknown
  Obtained from environmental sample
  misc_feature (1)..(564): n is a, c, g, or t
atgactgcttacggcttacaggtttaccggtttaagggaaggcttctgttgtggacggtaatccttattgtaataatgctgcccagttcgctttccattatcggtttttatcaatttatgtccacgttaaagatgcgcgacagttatattccgcttattattccgggcatagccgcggcgggaacggttctgttcttgcggcagtacatgacgtctgttctaagcaccgatcttattgacgcggcgcgtattgacggcgcgaacgagtaccgtatcttcaacattattattcttcctattatgcttcccgctcttgccgctcagtcgatatttacctttgtaggctcttggaacaactttattactccgtttattctgctttccagcgagaaaaagtatacattgccaatgcttgttcaaaacctgcgcggcaacatttaccgcgccgaatacggagcgatttatcttggaatagccgtttctcttttaccgataattatcttctattcattcatgtcccggtttatcatatccggccttacaatgggcggcctcaaggaatag

SEQ ID NO: 46204 - protein, 187 aa, Unknown
  Obtained from environmental sample
  misc_feature (1)..(187): Xaa is any amino acid
MTAYGLQVYRFKGRLLLWTVILIVIMLPSSLSIIGFYQFMSTLKMRDSYIPLIIPGIAAAGTVLFLRQYMTSVLSTDLIDAARIDGANEYRIFNIIILPIMLPALAAQSIFTFVGSWNNFITPFILLSSEKKYTLPMLVQNLRGNIYRAEYGAIYLGIAVSLLPIIIFYSFMSRFIISGLTMGGLKE

SEQ ID NO: 46205 - DNA, 681 bp, Unknown
  Obtained from environmental sample
  misc_feature (1)..(681): n is a, c, g, or t
ttgaaatgcgatatgaagacgaaaantatttggctgacacaaaaaatgatggcggtattgtacgatgtaggagtcaatacaatcaattatcatttaaagcaaatatttgaggatgcggaacttttggaaggagcaactattcgaaattttcgaatagttcaaaccgagggcgaacgtacagttgaacgagatatagaccattataatctgcaagccattatcgccgttggcttcaaagtcaataatgagcgagccgtacaattccgtaaatgggcaaataggatagtcaaggattatacaattcaaggttgggtgatggatgaagaacgcctgaaacatggcggaacaatacttaccgaagattattttgaaaaacagcttgaaaaaatacgggagatacgcctgtctgaacgccggttctatcagaaaataaccgatatttactcaaccgcccttgattggaaggcggggttcataccccgccagtataataaatttcctttccaacgacgataccccgtccgctctgcggcggggttcgtcattacgataaaacggcaaagaccaccagagacttctttgccaaagtgcagaataaactgcattttgccgttcatgacaatactgccgccgaacttatctataaccgcgctgatgcgcaaaagcaatatatgggcttga

SEQ ID NO: 46206 - protein, 226 aa, Unknown
  Obtained from environmental sample
  misc_feature (1)..(226): Xaa is any amino acid
MKCDMKTKXIWLTQKMMAVLYDVGVNTINYHLKQIFEDAELLEGATIRNFRIVQTEGERTVERDIDHYNLQAIIAVGFKVNNERAVQFRKWANRIVKDYTIQGWVMDEERLKHGGTILTEDYFEKQLEKIREIRLSERRFYQKITDIYSTALDWKAGFIPRQYNKFPFQRRYPVRSAAGFVITIKRQRPPETSLPKCRINCILPFMTILPPNLSITALMRKSNIWA

SEQ ID NO: 46207 - DNA, 516 bp, Unknown
  Obtained from environmental sample
  misc_feature (1)..(516): n is a, c, g, or t
atgcacaaggaaggggccgctttccggagcctccttaacagttttgccattgccgtttccctggggcttcaatacggcgtgcctttggaagaatacgtggacgcctttaccttcagccgctttgaaccgaacggcatggttcagggccacgactatgtcaaaatgtccaccagcgtcattgattatatcttccgtgatttggcaatcagctaccttaaacgaaccgatctgggccaggtaaaaccggaagacctccttgccaccggaacccaggatccgggcggaagcgcgaaacattacggcggtaaaagccgggcaaagacggaaagcccccccacggcgaaagaaacggaagaaaagcaggaagtgcgaaaggataagggcacccaaacgcgcatcgcccggatgaaaggctatgagggggatccctgcccaggctgcggttcctttaccctggtacggaacggaacctgcatgaagtgcgatacctgtggagaaactacgggctgctcctaa

SEQ ID NO: 46208 - protein, 171 aa, Unknown
  Obtained from environmental sample
  misc_feature (1)..(171): Xaa is any amino acid
MHKEGAAFRSLLNSFAIAVSLGLQYGVPLEEYVDAFTFSRFEPNGMVQGHDYVKMSTSVIDYIFRDLAISYLKRTDLGQVKPEDLLATGTQDPGGSAKHYGGKSRAKTESPPTAKETEEKQEVRKDKGTQTRIARMKGYEGDPCPGCGSFTLVRNGTCMKCDTCGETTGCS

SEQ ID NO: 46209 - DNA, 831 bp, Unknown
  Obtained from environmental sample
  misc_feature (1)..(831): n is a, c, g, or t
atggccgcaactgtaccgcgatttttgacgcgttcgctgcggagaaccgctctgtacaaaaccctgggaaaccacgacgaagaccttgtctttgaaaaaaattatccctatccgctgtacaatgttctacggatagaaagcagtacgattcccctctatgtgtaccacgggcaccagtcttccgaggcgtacggcaggtacaacaaactgatccgaggcatggtacggtatatattaaagccctttgggatcaggaacatttccgctgcccgtaatcctcaccgccgtttcgttgtggaaagaagggcctacgctttttcgatggaaaacaactgtatctcgatcatcggtcatacccaccgggcgctttttgaatcccttggccgttttgattttatcaagtttgagattgagcggctgtgccgggattatcccgccctgaagcacccggaagaaaagaaactcgccgtggacgaagtgtcgaacctccgccttgagctcagtaaactgagacgttctgagcggcgggacgtactgcgccaaagcctgtacggggatgagcttcccgtaccctgcctttttaattccggcagcgctatcagccgccggggcatcaacgcccttgagttaaacaacgagaatatcgccttggtgtactggtacagggaagggacggaacggaaatttgtcacccggggaaattaccggatagacaagctggagggaactccgtactgtaggacggctcttaaccaggacaggctggactatatcaaagcccggatggaactcttggggccccgtcagcatcaacaaagcggcactgaatag

SEQ ID NO: 46210 - protein, 276 aa, Unknown
  Obtained from environmental sample
  misc_feature (1)..(276): Xaa is any amino acid
MAATVPRFLTRSLRRTALYKTLGNHDEDLVFEKNYPYPLYNVLRIESSTIPLYVYHGHQSSEAYGRYNKLIRGMVRYILKPFGIRNISAARNPHRRFVVERRAYAFSMENNCISIIGHTHRALFESLGRFDFIKFEIERLCRDYPALKHPEEKKLAVDEVSNLRLELSKLRRSERRDVLRQSLYGDELPVPCLFNSGSAISRRGINALELNNENIALVYWYREGTERKFVTRGNYRIDKLEGTPYCRTALNQDRLDYIKARMELLGPRQHQQSGTE

SEQ ID NO: 46211 - DNA, 1518 bp, Unknown
  Obtained from environmental sample
  misc_feature (1)..(1518): n is a, c, g, or t
ttgatcacagccgcgcgtgaacttcccgggggggaaagccggagtttcatctacgataaaaagatatatctattagactccatcccggagatggaatggtatctgacggtgagttatccgataccgggttttctggcgctgaataaggccatgaataccgtatttttcagcatgctgtcccttattctgttcctgttcatcgttattaatgttttcattgcccgcctggaaagcgcaatggcggagcataacctgcagctgcttgaggcaaacaagaaggcggaatccgcttcacgggcaaaaagtgattttctcgcgaagatgagccacgagatccgcacccccatgaacgccattaccggcatggcggaactgctgttgagggaagaactctccgatgacgctctcggctatgcccaggacatcaaacaggcggggaataatcttgtctcaataattaacgatattctggacttttcaaaaatcgaggccggtaaactggaaatcatccccgtcaactacatgctttcatccctgattaatgatacggtgaacattattcgtacgcggattatggaaaagccgatacggttttttaccaatatcgacgggactattcccaacaaccttatcggagacgaagtgcggctccgccagatactccttaacctcctgtccaatgcggtaaaatactcggataaaggccatgttggtttgactattaccgcagacaagcgggacgataaacagatctggctcaggatagccgtgtccgataccggaaaagggataaaaccggaggatcaggaaaaactcttcgatgagtttgtcaaggtggacgtaaagaaaaaccagggtatagaaggaacggggctgggcctggcaattaccaaaaacctctgtgccgctatgggcggatatataagcatggaaagcgaatacggcaagggcagcgtgttcactgcagtcatcccgcagggcattggaaaagaagcccccttcgccgtagtagaggagccggaaaagaaaaaggtgctggtctatgaaggcaggatcaactacgccaaatcggtgtgctggactctggaaaatatgaaagttccttataccatggtgacaaatcaggatgattttgcctcggcgttataccgtgaagaatggttctatgtgttttccagctacggcctttatgaaaagatcgaaccgcttatgggacagagcgatacggctttccgcaaaggaaagaagcctcctctggccctgatggtagaatggggaaccgaagcctacatacccggcgcccgctttgtatccataccggtgcagtccctgtcaattgccaatgtgcttaacggcagggaggataacaaaggttatatcaaaagttcaggcatggtccgtttcactttcccccgcgcgcggattcttgtagtggatgacatttcaactaacctcaaggtagtcgagggccttcttgccccctaccaggctgcggtggacacctgcctgaacggttaa

SEQ ID NO: 46212 - protein, 505 aa, Unknown
  Obtained from environmental sample
  DOMAIN (100)...(165): His Kinase A (phosphoacceptor) domain
  misc_feature (1)..(505): Xaa is any amino acid
MITAARELPGGESRSFIYDKKIYLLDSIPEMEWYLTVSYPIPGFLALNKAMNTVFFSMLSLILFLFIVINVFIARLESAMAEHNLQLLEANKKAESASRAKSDFLAKMSHEIRTPMNAITGMAELLLREELSDDALGYAQDIKQAGNNLVSIINDILDFSKIEAGKLEIIPVNYMLSSLINDTVNIIRTRIMEKPIRFFTNIDGTIPNNLIGDEVRLRQILLNLLSNAVKYSDKGHVGLTITADKRDDKQIWLRIAVSDTGKGIKPEDQEKLFDEFVKVDVKKNQGIEGTGLGLAITKNLCAAMGGYISMESEYGKGSVFTAVIPQGIGKEAPFAVVEEPEKKKVLVYEGRINYAKSVCWTLENMKVPYTMVTNQDDFASALYREEWFYVFSSYGLYEKIEPLMGQSDTAFRKGKKPPLALMVEWGTEAYIPGARFVSIPVQSLSIANVLNGREDNKGYIKSSGMVRFTFPRARILVVDDISTNLKVVEGLLAPYQAAVDTCLNG

SEQ ID NO: 46213 - DNA, 1689 bp, Unknown
  Obtained from environmental sample
  misc_feature (1)..(1689): n is a, c, g, or t
atgtcggacaggatgatatgggacaggctgattagagaaacgcccgtgtattccaatgacattatccgcgttggagataattccgaaatcgaccttcatgtagccggcaacggccttgcgataaatgaaaatacgcttctccgcctccgccaggacaaagataccggcgaattccacattgatcttacatcgggcagtataggggttgttacgtctgacgtaggcggcggcattgttttgaatatcatgggcaaacagatgaaggcgaatccgggaaccgtttttaacgccgccgccggaggcgacggcgtgtccctgcaagtcagcaaaggctcggcgttcattgaagatggcgtgttcgaaattggcgcgggagcggcgattacaatggacagggaaggttcgctccgcactgaaccatccgtgtatgtcgttcagcccagacctaacgccctttaccgtaaaggaaccgatgatccgctgaacgtcgtttttgcgtggaacagaatcaatcttgagcctgatgaaacgctgcgccttgaaatagccgaagacatgaattttagccgttccgtccgtaccattaacgggcttaacgattcggcgcaggcggctctgaacgcaggtctttggaactggcggctgtcttataacggcgcaattcttaattcggggcgtttcaccgtaagggaggctgagagatttgaattagtaagccccgcaaaaaaccggcagtttgtttatgaggccgaacctccgaccgtgtatttccagtggtctcaaattgaagatgtttcatattacattgcggaagtggatgtaacgtccgaattcagaaatcccattatcaaaaagaacatgacggctgcgtctttctccgattcaagccttggagaaggaatctggtactggcgtgtaacgcctgtattttctcaaatcggagagaacccccatgccgatggcggcacctacggtgttattaattcgccttcgtccgctttccgtatagttaaaagcaacgaaccgcagtctctcgtttttcttgaagagcaggttccaatgcctgagcccgctccaacaccggtgtccgcgccaaagccctcgcccgctccgccgccaaagcccgtagcgctggaatcgccgtccaataatacaacattaccgggactgaccgctcttcgccagcaaactgtattccgctggagcagtaatgaagcggtggcgaaatcaaggttcgttctttcacgtaaccctaatcccctctcgggacaggctgtgatagaaataccagatccaaacaggacgctccgcattgaccgtcttgatgaagggatctggtattggacagtggaagcgcaaactccagaaggcgtaaatattaccgctcaaactccacgccaactgcgggttctgtccgttccgcttcttccgtcgccctcagaccgccagcctgtcgaagggtaccgcattggcatcgaagaattaaaacaaattaatataaatttcaggtggtcgcaggtacagggggcaaatagttatatttttaccctgtatcaggaaaccaacagcgggcggcggcaaatcgcgcagatagggccggagaaccgtacctcatggtcaacggatataaaaaatctcggacggggaaattttatctggcgtgcagaagcggtacagcgtgggacataa

SEQ ID NO: 46214 - protein, 562 aa, Unknown
  Obtained from environmental sample
  misc_feature (1)..(562): Xaa is any amino acid
MSDRMIWDRLIRETPVYSNDIIRVGDNSEIDLHVAGNGLAINENTLLRLRQDKDTGEFHIDLTSGSIGVVTSDVGGGIVLNIMGKQMKANPGTVFNAAAGGDGVSLQVSKGSAFIEDGVFEIGAGAAITMDREGSLRTEPSVYVVQPRPNALYRKGTDDPLNVVFAWNRINLEPDETLRLEIAEDMNFSRSVRTINGLNDSAQAALNAGLWNWRLSYNGAILNSGRFTVREAERFELVSPAKNRQFVYEAEPPTVYFQWSQIEDVSYYIAEVDVTSEFRNPIIKKNMTAASFSDSSLGEGIWYWRVTPVFSQIGENPHADGGTYGVINSPSSAFRIVKSNEPQSLVFLEEQVPMPEPAPTPVSAPKPSPAPPPKPVALESPSNNTTLPGLTALRQQTVFRWSSNEAVAKSRFVLSRNPNPLSGQAVIEIPDPNRTLRIDRLDEGIWYWTVEAQTPEGVNITAQTPRQLRVLSVPLLPSPSDRQPVEGYRIGIEELKQININFRWSQVQGANSYIFTLYQETNSGRRQIAQIGPENRTSWSTDIKNLGRGNFIWRAEAVQRGT

SEQ ID NO: 46215 - DNA, 945 bp, Unknown
  Obtained from environmental sample
  misc_feature (1)..(945): n is a, c, g, or t
atggctggaaacaggggttttcacgtccatatttcaaaaggtgagtttcaaactatacttgggctgataggcgatacaagcaaaattgatactgaactgcttgaaagccttgaaatggtagagtctgtcaagcgtataaccgagccttttaagagcgcaaaccgcaaattccacccggacgacaccattgtggacgtcagcggggtaaaaataggcggttccaatttccagataatagccggcccctgctcggtggagtcaccggagcagattcttgccatagcggaaaaagtgtccgccgccggagcgtcaatgttaagaggaggcgcatttaagccgcgcacttccccctacgattttcagggactcggcacggagggaattgacctccttattgaggcgagaaaacgcaccggaatgcccatcgttacggaaattatgaacactaaccacctgccgttatttgaaaatatcgatgttattcaggtaggcgcgcgaaatatgcagaattttgaacttttaaaagaactgggcatgacaaaaaaaccaattctgttaaaacgcggactggctaatacaatgaaagaacttcttatgagcgccgaatatatcatggctgggggaaaccgcaacatcatcctttgcgagcgcggaatccgcacctttgaaacttatacaagaaacaccctggacgtttccgcgattccaatgcttcgtgagctgacacatctgccggtaatcgtagacccaagccacgcttcgggaatcgcgcgccttgtcgagcctatgtctctggcggcggcggctgccggcgcggacggccttatgatcgaggtacacaatgatcccgccaacgccctttgcgacggggctcagtcgcaaacgcctgaacaatttgccgtaacggcggctaaggtgcgccgcgtaagagaggcgataaaataa

SEQ ID NO: 46216 - protein, 314 aa, Unknown
  Obtained from environmental sample
  DOMAIN (61)...(312): DAHP synthetase I family
  misc_feature (1)..(314): Xaa is any amino acid
MAGNRGFHVHISKGEFQTILGLIGDTSKIDTELLESLEMVESVKRITEPFKSANRKFHPDDTIVDVSGVKIGGSNFQIIAGPCSVESPEQILAIAEKVSAAGASMLRGGAFKPRTSPYDFQGLGTEGIDLLIEARKRTGMPIVTEIMNTNHLPLFENIDVIQVGARNMQNFELLKELGMTKKPILLKRGLANTMKELLMSAEYIMAGGNRNIILCERGIRTFETYTRNTLDVSAIPMLRELTHLPVIVDPSHASGIARLVEPMSLAAAAAGADGLMIEVHNDPANALCDGAQSQTPEQFAVTAAKVRRVREAIK

SEQ ID NO: 46217 - DNA, 636 bp, Unknown
  Obtained from environmental sample
  misc_feature (1)..(636): n is a, c, g, or t
gtggaaaaaatttccggagatgtttattccgtctccgcgtttcatgaaaaaccagactgtaaaaccgcagaacaatttataactaccaaaaattatttttggaattcgggaatgtttgcatttcgctgtgattttttggcggaagaataccaccgtctgtcgtcagaagtaattggcccctttgaaaatcttaaatctcccggaaaaaagtcatacacaaaaaaaaaagacttgcttatcctggatcactggacaggattggataaagcttataaccagacaaagctaatttcttttgattatgccatagccgaaaaatgcgctcaaaccgttatgcttcgcgcgtcctttgactggactgatattggcagttgggacgattatgcctgtcttctttcgggtaatttctctgttaacaataccggtaatgatgttttttctgtcgggacaaacggttgttttgtagattcggacattcctgttgcccttgccggagttgaaaaccttattgttgtaattcgttcaggtaaagacggttccccgccttcggcgttgattacccaaaaaggtaaaagccagctcgtacgtgatattgtcgaaaaaataaaacagtctgacagaagggatattatataa

SEQ ID NO: 46218 - protein, 211 aa, Unknown
  Obtained from environmental sample
  misc_feature (1)..(211): Xaa is any amino acid
MEKISGDVYSVSAFHEKPDCKTAEQFITTKNYFWNSGMFAFRCDFLAEEYHRLSSEVIGPFENLKSPGKKSYTKKKDLLILDHWTGLDKAYNQTKLISFDYAIAEKCAQTVMLRASFDWTDIGSWDDYACLLSGNFSVNNTGNDVFSVGTNGCFVDSDIPVALAGVENLIVVIRSGKDGSPPSALITQKGKSQLVRDIVEKIKQSDRRDII

SEQ ID NO: 46219 - DNA, 1032 bp, Unknown
  Obtained from environmental sample
  misc_feature (1)..(1032): n is a, c, g, or t
ttgaaatttttccggacgctgatattttcacccatgtttacgaccaaaaagtggtttcttctctataaaaacaggcgcgtaatcacttcgcgtataaaccgcctgcctttcgcgaaaaaaatctaccagctttatatgccgcttatgcccaatgccctgaatgatttcaacctgcaatcctactatcttgtcatctccagtgagtcaggtccggccaagggagtaatacctaatccaaacgcctatcacttatgttattgccacagtcccatgcgctatttatgggatatgtaccacgactatttcaggggagcaaatcctctggtacgcgtttttatgaaacgcctcattcctaaactcagggtctgggatgctgtttccgcaaaccaggttgatttttttattgccaattcaagttatgtggcgcaacgaataaggcgttgttacaaccgggaggcggaagtagtttatccgccggttgacattgaaaagtttctatccgttgaacgtcaatccggagaacattatcttttttttgggcaacttacagggtacaaacgggctgaccttgccatcgaagcctgcgtcgcttccggtcggcatcttgtggtcgcgggggcaggtaaaataaacaagaaatggcgggagtatgagaaaaccggtcttattaccttcatgggcagggtttctgatgaagacacgctgaaactttactcgtcagccaaggcgctgctttttcccggtattgaggattttggaattattccggttgaagcccaggccgcaggttgtcccgtgatcgcgtaccgccgcggaggcgcacttgatacagttattgagggtgtaacgggcattttctttgatgagcaaactcccgcatcccttatggaagcaatgaatcgctttgagtcaatgaaagcggaaggtacctttaatgacaggcaagcattttccaaccatgtacggcaattcgcgccggaagtgttcaaggaaaaagttcagaaaattattgaggaacgaaaacgcgtatag

SEQ ID NO: 46220 - protein, 343 aa, Unknown
  Obtained from environmental sample
  DOMAIN (160)...(324): Glycosyl transferases group 1
  misc_feature (1)..(343): Xaa is any amino acid
MKFFRTLIFSPMFTTKKWFLLYKNRRVITSRINRLPFAKKIYQLYMPLMPNALNDFNLQSYYLVISSESGPAKGVIPNPNAYHLCYCHSPMRYLWDMYHDYFRGANPLVRVFMKRLIPKLRVWDAVSANQVDFFIANSSYVAQRIRRCYNREAEVVYPPVDIEKFLSVERQSGEHYLFFGQLTGYKRADLAIEACVASGRHLVVAGAGKINKKWREYEKTGLITFMGRVSDEDTLKLYSSAKALLFPGIEDFGIIPVEAQAAGCPVIAYRRGGALDTVIEGVTGIFFDEQTPASLMEAMNRFESMKAEGTFNDRQAFSNHVRQFAPEVFKEKVQKIIEERKRV

SEQ ID NO: 46221 - DNA, 630 bp, Unknown
  Obtained from environmental sample
  misc_feature (1)..(630): n is a, c, g, or t
atgaataaagtaaaaattggcattttaattatttttgatattataattatacattcatgcgctacatccgttatattgcccagggaaaccgttcaaaattcaaatttcactcctgcccgtcatttatttttttttgggtttgacggttggggagcattatacttaaaaaaagcggatatgccgacagtaaaacgaatgatttcggatggaacatcaagtgctaagacacgttctgtaatgccaagcgttagttggccaaattggacttctctttttatgggaactccgcctgaaaaacaggaaaataatactccttcaattttttcagttattaatgaatcattttcaacagttaaggtggattcagaaactcaacctgttcttttttatgaatggaaagacttatacgatatttgccccgatggaacagccgaaaaatttgaaatttcgtctgattatgtttccgcctataaaatcgcatcttatattttgagtaaaaagcctgtattcaccgcgattgtatttggcgagccggatactaccggtcatgcaaaaggctggggatcaaaagcttattataataagcttactcttttagataattttgtcgctattatgaacaagcagtaa

SEQ ID NO: 46222 - protein, 209 aa, Unknown
  Obtained from environmental sample
  misc_feature (1)..(209): Xaa is any amino acid
MNKVKIGILIIFDIIIIHSCATSVILPRETVQNSNFTPARHLFFFGFDGWGALYLKKADMPTVKRMISDGTSSAKTRSVMPSVSWPNWTSLFMGTPPEKQENNTPSIFSVINESFSTVKVDSETQPVLFYEWKDLYDICPDGTAEKFEISSDYVSAYKIASYILSKKPVFTAIVFGEPDTTGHAKGWGSKAYYNKLTLLDNFVAIMNKQ

SEQ ID NO: 46223 - DNA, 378 bp, Unknown
  Obtained from environmental sample
  misc_feature (1)..(378): n is a, c, g, or t
atgggcgtattacagcaattactgctcgatcacggttattccctgccgcatcaccgcgactatacccattcaggttttgacagggggcacatggcgccaaacgcggattttaacgacacctacgaaaacgcgctgatgactttttttatcgcgaacatctggccgcaaacgccgaatgtaaacagggtcgaatggctaaaaacggaaaacgaaacaagaaggcttgcgtcggagtatttatttgtaagggtaattatcattgtggatgaattttatacggataaagtcggaaacataaatattccagtctgctttaaaagacgcgtctatgatttatatccaggcgttctgatctaccaaattgatgtttatcagtaa

SEQ ID NO: 46224 - protein, 125 aa, Unknown
  Obtained from environmental sample
  DOMAIN (3)...(119): DNA/RNA non-specific endonuclease
  misc_feature (1)..(125): Xaa is any amino acid
MGVLQQLLLDHGYSLPHHRDYTHSGFDRGHMAPNADFNDTYENALMTFFIANIWPQTPNVNRVEWLKTENETRRLASEYLFVRVIIIVDEFYTDKVGNINIPVCFKRRVYDLYPGVLIYQIDVYQ

SEQ ID NO: 46225 - DNA, 399 bp, Unknown
  Obtained from environmental sample
  misc_feature (1)..(399): n is a, c, g, or t
atggcgagtggcggcaaacgccccatcgctgttgtcagccgtgaagaaggttcgggaacaagaggcgcttttgaagagcttgcaggtttccaaggcaaacttctcgcaaaagcaaatcagcttacaagcacgggagcgattcttgccaatattgcgcaaaaccccaacgctatcggctatatctcgcttggatcggttaacgattcaatcaaggcggtttctgtcgacggagtagcggcaactaacgcaaatgttgtaagcggcgcttacaaaatcgcccgtccttttatcgtccttacgggaaaaaatgtccatgctgaaagcaacgcttttattcaatggatactcggcgctgatggacaaaaagtagttagcaaaagctggattcccgtaaaataa

SEQ ID NO: 46226 - protein, 132 aa, Unknown
  Obtained from environmental sample
  misc_feature (1)..(132): Xaa is any amino acid
MASGGKRPIAVVSREEGSGTRGAFEELAGFQGKLLAKANQLTSTGAILANIAQNPNAIGYISLGSVNDSIKAVSVDGVAATNANVVSGAYKIARPFIVLTGKNVHAESNAFIQWILGADGQKVVSKSWIPVK

SEQ ID NO: 46227 - DNA, 648 bp, Unknown
  Obtained from environmental sample
  misc_feature (1)..(648): n is a, c, g, or t
atgttacaggaaggatgtgtttcaaaagggcttttagcgctggttcgaaaactgggaaaagaagctgttttcaaggattattttttagttggcggaacagcactttctttacagataggacaccgaaaatctgatgatattgatttatttacccaaaaagagctgcagataccggaaatagctaaatatttgaaacagaattacggcggaaaataccagctcattaatagtcaaaaaatgatatatcaggtaatgatagaagggataaaagttgattttgtgcatcatccctttgaacttgtagaagctgtgtaccatgaaggtgatgtggtttatcttggtaaaaaagatatagctgccatgaaactacacgccatagaaactgatggaagcagggcaaaagactttgtggatatatttttcttgttaaaagaaattcccctagagaaaatgtttaattattacaggaaaaaattttctaccgataatatttttaacgcaaagaggagcctgggtttcttcgatgatgtgccggaagaaagctggaaggaagtacgcctaatcgatcgaaaggtaacggcaaatctggtgaaaaagactattactgatgcaatacgcggatataacgacactcagatgagcaaataa

SEQ ID NO: 46228 - protein, 215 aa, Unknown
  Obtained from environmental sample
  misc_feature (1)..(215): Xaa is any amino acid
MLQEGCVSKGLLALVRKLGKEAVFKDYFLVGGTALSLQIGHRKSDDIDLFTQKELQIPEIAKYLKQNYGGKYQLINSQKMIYQVMIEGIKVDFVHHPFELVEAVYHEGDVVYLGKKDIAAMKLHAIETDGSRAKDFVDIFFLLKEIPLEKMFNYYRKKFSTDNIFNAKRSLGFFDDVPEESWKEVRLIDRKVTANLVKKTITDAIRGYNDTQMSK

SEQ ID NO: 46229 - DNA, 618 bp, Unknown
  Obtained from environmental sample
  misc_feature (1)..(618): n is a, c, g, or t
atgaacttctggaataataaccacgggagcatcgtagagataaaaggcaaatggtatgttttttaccacaggcacacaaacggaaaaccgttcagccgccaggcctgcatggagccgattaaaatagaaaaagacggaaaaataccccaggttgagataacatcctgcggatcaaacggaaagccgcttgacgggcgcggcgaatatcccgcctacatcgcgtgcaacctgttttgtatggattatggcccactgtccgaggagcaatactggtcgcagcaagatattcaccttccctttatcacgcaggacggaagggacggagacgaggaaaacggttttgtaaccaatataaacaataattacggtgttggttttaaatattttgactgtaagggaataaccagggtaactattaaaacacgcggatacaaccacggcgtctttgaggtaaaaacaaaatgggacggggaaccgcttggaaatattgaaattgtttacactaatgtatggaaagaattttcatcaaacatttccattcctgacggaatacagtcattgtactttgtttacagaggcacaggaaacgcgactttgggggcttttagtttggagtga

SEQ ID NO: 46230 - protein, 205 aa, Unknown
  Obtained from environmental sample
  misc_feature (1)..(205): Xaa is any amino acid
MNFWNNNHGSIVEIKGKWYVFYHRHTNGKPFSRQACMEPIKIEKDGKIPQVEITSCGSNGKPLDGRGEYPAYIACNLFCMDYGPLSEEQYWSQQDIHLPFITQDGRDGDEENGFVTNINNNYGVGFKYFDCKGITRVTIKTRGYNHGVFEVKTKWDGEPLGNIEIVYTNVWKEFSSNISIPDGIQSLYFVYRGTGNATLGAFSLE

SEQ ID NO: 46231 - DNA, 1578 bp, Unknown
  Obtained from environmental sample
  misc_feature (1)..(1578): n is a, c, g, or t
atgaaaacattacagctgcggcggccgctgtttatttttatttgcttcattttaatttgcaaaggtatttacgcgcaggaagaacaacaagaacaacaagaacaacaagagcaacaagagcaacaagagcagaatcagaaaaaacccggccgcgaatataaaccgcgggaacaaaaactatacatagatattccgctggctttcggcgaagttttttttgtcaattttttcgggaacgcgtactggaggctttgggggcctgactcggaagtggcgtattttactcccgattcaatacgctgcaacttaaatcccaaatcctgggagtttgagatggggcaggaaggcgataccttccttgtgaatcagtttcttcatccttatgccggggcgaattatttcgcttccgcccgttccaataacataaatttttactggtcaatactttattcaacttttggcagttttacatgggaagtgtttggcgaaaccgatacgcccgccataaacgatgcaattaatactatttttggaggcatggtcatgggcgaggtactgcacaggctttacatcgaagtggacaaaggcgggatagccggaaaaataatgtcaacaattgtaagccctgccgaccggttaaccgctttaatcaggggttatggaccggaagagggcttgagtaaaataagcggttcttcattcgctttcggcttttcgtatatcaacgccaaattttttgacgataaaaatgaaataacttcatgggatactcccgccgcctttattaactttgatattgtttacgacaacccatatacggcgcatggcaatacgccgtttgcgcaatttgatcttaatacgtcgcttacggtgtccatacagcctttctataacttaaccataattatcgacggatatttggcgtcatggcttcttgccgataatgacacgaatcaggcaagcaacggaattacccttcacttggacgattatattacggacaaaggatttatggatctcaacaacggcagggaaaacttaagtttttacgcccaatctcttgattattccgtaaaatggctccgccggaatcgcaatatccataataagtcctttgatttttccctaaaaacacacttaggtttttctccctgggcgataactgattataacggcggggaggtaaaccccggaaccggagagaaagacgattataatttgtatttattcggcggcaacatcaaactctttatggaactgcgggagataaacgaagaaggcagcgctttaacaagcggcgctttatcaagcggcgcggacaaggggcaagttctgtcgttaagcctgtgtttgtatgacactttgaatctcccctatactcccagttttgacgtaaatacaattttcttcttttcaaagcttgcgtattctctccctcttaccaaaagactttccctctacgccgcggacagcttcatgctcctatactgccgtcttacccgggatgccggcgcggaattccccgacataacccgctggtacaacagcgcccaactgggattaaaaatatctttttaa

SEQ ID NO: 46232 - protein, 525 aa, Unknown
  Obtained from environmental sample
  SIGNAL (1)...(25)
  misc_feature (1)..(525): Xaa is any amino acid
MKTLQLRRPLFIFICFILICKGIYAQEEQQEQQEQQEQQEQQEQNQKKPGREYKPREQKLYIDIPLAFGEVFFVNFFGNAYWRLWGPDSEVAYFTPDSIRCNLNPKSWEFEMGQEGDTFLVNQFLHPYAGANYFASARSNNINFYWSILYSTFGSFTWEVFGETDTPAINDAINTIFGGMVMGEVLHRLYIEVDKGGIAGKIMSTIVSPADRLTALIRGYGPEEGLSKISGSSFAFGFSYINAKFFDDKNEITSWDTPAAFINFDIVYDNPYTAHGNTPFAQFDLNTSLTVSIQPFYNLTIIIDGYLASWLLADNDTNQASNGITLHLDDYITDKGFMDLNNGRENLSFYAQSLDYSVKWLRRNRNIHNKSFDFSLKTHLGFSPWAITDYNGGEVNPGTGEKDDYNLYLFGGNIKLFMELREINEEGSALTSGALSSGADKGQVLSLSLCLYDTLNLPYTPSFDVNTIFFFSKLAYSLPLTKRLSLYAADSFMLLYCRLTRDAGAEFPDITRWYNSAQLGLKISF

SEQ ID NO: 46233 - DNA, 474 bp, Unknown
  Obtained from environmental sample
  misc_feature (1)..(474): n is a, c, g, or t
ttggagaaactcaaaaacagaataccgcaaagcggttttttgtacggcatggaagccgcggcgcataatccgtcgttgacggagcgccgaaaaagccaaaggagtgagtatatgattatcaatcacaacttaagtgcaatgtttgccgacaggtccctcaaggttacccaggtatacctggataaaaacatggagaaattgtcgagcgggctgcgcatcaatcgcgccggtgatgatgcttctggattagcagtatcagaaaaaatgcgctctcagattcgcggtttgaatcaggcgtcaactaacgcccagaatggtatttcattcattcagaccactgagggttacctccaggaatcccaggacattatccagcgtcttcgtgaattggcagttcaggcatcaaacggaatttattccgaggaagatcgcttgtacatccaggttgaagtttcatccctggtgcagaagtga

SEQ ID NO: 46234 - protein, 157 aa, Unknown
  Obtained from environmental sample
  DOMAIN (64)...(157): Bacterial flagellin N-terminus
  misc_feature (1)..(157): Xaa is any amino acid
MEKLKNRIPQSGFLYGMEAAAHNPSLTERRKSQRSEYMIINHNLSAMFADRSLKVTQVYLDKNMEKLSSGLRINRAGDDASGLAVSEKMRSQIRGLNQASTNAQNGISFIQTTEGYLQESQDIIQRLRELAVQASNGIYSEEDRLYIQVEVSSLVQK

SEQ ID NO: 46235 - DNA, 1143 bp, Unknown
  Obtained from environmental sample
  misc_feature (1)..(1143): n is a, c, g, or t
atggcggccctgaaaaaagccgggttccgggaagcccttaaaggggagtttaccttccgcgcctttatgaacggaaagcttgatcttactcgggcggaatcggtgatggagctggtggcggcgaagaccggctacggccgcgagcaggcggtaaggcggctcagcggggttttggaaagggaaatctcggcaattaaagagacgctggtggaggttttggcagctacagagatttaccttgactacagcgaggatgagtttttgtcgcctgacgaagaaagcgatgggacgctcccaaataaagccctggcggaaaaggcggctgaaaggctcaagctactttcggagctttggagtcgtgaacggatctacgtcgaaggggctttggctgttttagctggcatgcctaacgcgggaaaatccagcctttttaattatctaatccgcgaggagcgatctatcgttaccgatgtccccggcactaccagggactggattgaagccgtcatctccctggataacattccgctccgtttcgcggacacagcgggcttgaggaagatggacgcacttggctcgaaggaagttgacgaagcggaaagaatcggcgtggagcggagcatggagcttctggaaaaagccgaccttgttctttatgttgttgacggcgttaaaggctttactgacgaggacagggattttatagcgaagcgcaacgaaacacaaaacgagaagccgcttgtaatcatctggaataaagcggatttagtaaaaccttctgattttcccggtgaaaaaacgcaattttttccggtcagcgcgaaaaccggcgagggtattcctgagctgttgcgcctaatggccgaccttctggagaaaagctctcaatcgtcgttatcatcttcaaccgaagaccaattgcttcaggcggcagggccgggcagtttaaggcagaaagagcttattgactcggccctgagtgaagtagaggaagtcctggccctggcagaccggggagaaagccttgaccttatcgcccctcttattcgttcggctgttaatgccctgggagaaattacaggcgaagtttcaaacgcagatattttaaaggttatgttcagccgtttctgcgtggggaagtaa

SEQ ID NO: 46236 - protein, 380 aa, Unknown
  Obtained from environmental sample
  DOMAIN (128)...(255): GTPase of unknown function
  misc_feature (1)..(380): Xaa is any amino acid
MAALKKAGFREALKGEFTFRAFMNGKLDLTRAESVMELVAAKTGYGREQAVRRLSGVLEREISAIKETLVEVLAATEIYLDYSEDEFLSPDEESDGTLPNKALAEKAAERLKLLSELWSRERIYVEGALAVLAGMPNAGKSSLFNYLIREERSIVTDVPGTTRDWIEAVISLDNIPLRFADTAGLRKMDALGSKEVDEAERIGVERSMELLEKADLVLYVVDGVKGFTDEDRDFIAKRNETQNEKPLVIIWNKADLVKPSDFPGEKTQFFPVSAKTGEGIPELLRLMADLLEKSSQSSLSSSTEDQLLQAAGPGSLRQKELIDSALSEVEEVLALADRGESLDLIAPLIRSAVNALGEITGEVSNADILKVMFSRFCVGK

SEQ ID NO: 46237 - DNA, 534 bp, Unknown
  Obtained from environmental sample
  misc_feature (1)..(534): n is a, c, g, or t
atgtcgcgcatcggaaaagtaccggtcaaggttcccaaaggggtaaaggtgtcattcacgaacgacacgatgacagtcgaggggcccaagggaaaactgacgcagaaataccatcccgtcatttcctttgagaacaagggcgaggagatcatcgtgagccggtccagcgaggaaaaacaggttaaggctttccacggcctgtaccgcaacctccttaacaacatggtggtgggggtttcctccggtttcagcaaaacgctgatcataaccggcgtaggctaccgcgccgaggtgcagggcaaattgctcgtcatgaacctcggtttctcaaacgatatttttgtcggcattcccgaagggcttaccattaccgcggaaggcggaacaaaagtggttatcagcgggaataacaagcagagggtgggggagcttgccgcccagatacggaaactcaggccgcccgaaccctacaagggcaagggcatccgctatgaggatgaaaaatccgccgcaaggtcgggaagtctggcgtaa

SEQ ID NO: 46238 - protein, 177 aa, Unknown
  Obtained from environmental sample
  DOMAIN (11)...(82): Ribosomal protein L6
  misc_feature (1)..(177): Xaa is any amino acid
MSRIGKVPVKVPKGVKVSFTNDTMTVEGPKGKLTQKYHPVISFENKGEEIIVSRSSEEKQVKAFHGLYRNLLNNMVVGVSSGFSKTLIITGVGYRAEVQGKLLVMNLGFSNDIFVGIPEGLTITAEGGTKVVISGNNKQRVGELAAQIRKLRPPEPYKGKGIRYEDEKSAARSGSLA

SEQ ID NO: 46239 - DNA, 399 bp, Unknown
  Obtained from environmental sample
  misc_feature (1)..(399): n is a, c, g, or t
atgagcgtaactgatcccgttgctgatatgctgacaaagatccggaatgccggaatgtcaaagcatgaaaaggttgatatacccacctccagactgaaacttgagattgtaaaaatcatgaagaccgaagggtatataaaaaatttcaaaaaggttaaccaggacggcgtgaacgtgatccgggttttccttaaatatgacgacacgacggccccgattatccatggcattgaaaaggtgtcaaaaccgggacgccgcgtgtatatgggctataaaaatatgccgagaatttttaacggctacggaaccctgatcgtttccacgtcccagggggtaacaaccggcaagaaagccgccgagaaaaaagtcggcggcgaaatcatctgttcggtgtggtga

SEQ ID NO: 46240 - protein, 132 aa, Unknown
  Obtained from environmental sample
  DOMAIN (5)...(132): Ribosomal protein S8
  misc_feature (1)..(132): Xaa is any amino acid
MSVTDPVADMLTKIRNAGMSKHEKVDIPTSRLKLEIVKIMKTEGYIKNFKKVNQDGVNVIRVFLKYDDTTAPIIHGIEKVSKPGRRVYMGYKNMPRIFNGYGTLIVSTSQGVTTGKKAAEKKVGGEIICSVW

SEQ ID NO: 46241 - DNA, 609 bp, Unknown
  Obtained from environmental sample
  misc_feature (1)..(609): n is a, c, g, or t
atgcggggaggcgttgtaatggctgagaaagataaggctgtaacggctgaaaaagccgccaataaatacgtgccccggctgaaaaagatatacaaggaacagatcgcgcccgagcttttcaaggagttcaactacaagtcgccgatgcagatccccaagctggacaagatcgtggtgagcatgggcgtgggcgaggcgctggtgaacaagaaactccttgacgaggcaatcaccactctgacccagataaccggccagaaggcggtcaagaccaaggccaagaagagcatcgcgaatttcaagatcagggccgggcaggaaataggggcgaaggtgacgctccggggcgcgataatgtacgagttcttcgaccggctggtgaacgtcgcgcttccccgcgtcaaggacttccggggcatcagccagaacgcctttgacgggcacgggaattattcaatggggctggaggagcagatcatcttccctgaaattgattttgataaaatagaaaaagtggccggattgaatatttgcattgtaacaacggcgaggaccgatgaggaagcgaaagccttcctgagcaaattcgggatgccgttcagaaaataa

SEQ ID NO: 46242 - protein, 202 aa, Unknown
  Obtained from environmental sample
  DOMAIN (47)...(103): Ribosomal protein L5
  misc_feature (1)..(202): Xaa is any amino acid
MRGGVVMAEKDKAVTAEKAANKYVPRLKKIYKEQIAPELFKEFNYKSPMQIPKLDKIVVSMGVGEALVNKKLLDEAITTLTQITGQKAVKTKAKKSIANFKIRAGQEIGAKVTLRGAIMYEFFDRLVNVALPRVKDFRGISQNAFDGHGNYSMGLEEQIIFPEIDFDKIEKVAGLNICIVTTARTDEEAKAFLSKFGMPFRK

SEQ ID NO: 46243 - DNA, 321 bp, Unknown
  Obtained from environmental sample
  misc_feature (1)..(321): n is a, c, g, or t
atggcagaagcgcataaatttaaactgaaaaaagaagacaccgttgagatcattgccggcaaggacaaggggaagcggggcaggatactcaaaatactccgcgagaaggaccgcgtcatagtggaaggcgccaacattgtcaagaaggcgaagaagcgcaggaaccagcaggaccgcggcggcattgtcgagatagaagcggcgatacacagctcgaacttaatgattgtctgcaagaaatgcggccccacgcgcataggatataaaattaacggcgacgttaaaacaagggtctgtagaaaatgcggggaggcgttgtaa

SEQ ID NO: 46244 - protein, 106 aa, Unknown
  Obtained from environmental sample
  DOMAIN (9)...(42): KOW motif
  misc_feature (1)..(106): Xaa is any amino acid
MAEAHKFKLKKEDTVEIIAGKDKGKRGRILKILREKDRVIVEGANIVKKAKKRRNQQDRGGIVEIEAAIHSSNLMIVCKKCGPTRIGYKINGDVKTRVCRKCGEAL

SEQ ID NO: 46245 - DNA, 774 bp, Unknown
  Obtained from environmental sample
  misc_feature (1)..(774): n is a, c, g, or t
ttggccgaggtttcggttattcgggatctgccgccgggcagaaagccggtgaagactcatctggcaaaagaatccagcgaggcccgtgtgtatgattttgtgcgcaaaaaacttgaggccggctgtcaggcgtattttgtgtatcccttaattgaaggcggcgatgaagcaaaccttaaagccgcagtttccatggctgagaggcttgcccaggaaatttttccgcgttttaccgtggcgctgattcattcaaaacttgatgatgaagaaaagcggcagacaatggaacgctttcgcaatggtgaaataacggtgttagttgcaaccagcgttgtcgaggtgggggtagacgtgcctaacgcaaactgcatggtgatagaacacgcggaacggtttgggctttccgccctgcatcaattacgcggcagagttggccgcgggcaggatcaggcgtactgtttcttggtgtactccgatgatctcaccgatgacggcaaggcgcgcctgaaggtgatgctggaaaacgccgacggctttatcattgccgaagaagatttaaaactgcgcggcccgggccaaatcgccggaattgaacaatccggataccttaatctgggaatcgccaatcccatccgcgacatagacgaacttgcccgcgccagaaccgacgcttttttcattctgaaaaacgatcccggccttgttctggacagccaccgcattattgcccgcgtcctaaaagaagccccgctgtttgatgaggttgtgttgtag

SEQ ID NO: 46246 - protein, 257 aa, Unknown
  Obtained from environmental sample
  DOMAIN (71)...(148): Helicase conserved C-terminal domain
  misc_feature (1)..(257): Xaa is any amino acid
MAEVSVIRDLPPGRKPVKTHLAKESSEARVYDFVRKKLEAGCQAYFVYPLIEGGDEANLKAAVSMAERLAQEIFPRFTVALIHSKLDDEEKRQTMERFRNGEITVLVATSVVEVGVDVPNANCMVIEHAERFGLSALHQLRGRVGRGQDQAYCFLVYSDDLTDDGKARLKVMLENADGFIIAEEDLKLRGPGQIAGIEQSGYLNLGIANPIRDIDELARARTDAFFILKNDPGLVLDSHRIIARVLKEAPLFDEVVL

SEQ ID NO: 46247 - DNA, 1008 bp, Unknown
  Obtained from environmental sample
  misc_feature (1)..(1008): n is a, c, g, or t
gtgttctgggcggctccttattcattcatgatcatggtaattatcatatacgcgatgttgataactgaagaaaattttatacaaggcgcgttttcccgctaccttgcgcctgagattatttccgaaattatcaaagatcccaacaagctgaatctgggcggtgaaaagcgggaaatgaccgcaatatttactgatattcagggtttctccgctatttccgaacagcttgatcccgcccatctggtgcggctcttaaacaaataccttactgaaatgagcaacatcataatggaacaccttggaactatagataaatattggggagacgcgattatcgcattcttcggagctcctttgttcaatgccgatcatggcgcccttgcctgccgcagcgcccttgcgattaaagcggcggagaaggaacttaataaaacattaattagtgagaagatgatccctgcgcctatttttactcgcatcggaataaataccggtgaaatggtcgtgggaaatatgggcgcggaaaaaaagatggattataccatcatgggaaacgcggtaaaccttgcgtcgcgtattgaaggagtaaacaagtattaccataccggcggcatattgataagtgaatacacccgggcaaaaatcggcgatgagtttctgctgcgccgtattgaccgtgttcgggtggtggggataaacacgccgctgcgtctgtatgaattgttaccaacggatactgaacagggtgcagtggaaatttgggaaaaggcgattgatttgtatgaagacagggattttagaaaggcttttaacttgtttgtttcgctcataaaacgttatccacatgacaatgtgccaaaagtttacgcgcaatggtgcaaagcgtttatagaaacccccgccgccggaaaattgggatgccgtgaaaaacctgacaaagaaatagcgcccttctctacaacacaacctcatcaaacagcggggcttcttttaggacgcgggcaataa

SEQ ID NO: 46248 - protein, 335 aa, Unknown
  Obtained from environmental sample
  DOMAIN (54)...(243): Adenylate and Guanylate cyclase catalytic domain
  misc_feature (1)..(335): Xaa is any amino acid
MFWAAPYSFMIMVIIIYAMLITEENFIQGAFSRYLAPEIISEIIKDPNKLNLGGEKREMTAIFTDIQGFSAISEQLDPAHLVRLLNKYLTEMSNIIMEHLGTIDKYWGDAIIAFFGAPLFNADHGALACRSALAIKAAEKELNKTLISEKMIPAPIFTRIGINTGEMVVGNMGAEKKMDYTIMGNAVNLASRIEGVNKYYHTGGILISEYTRAKIGDEFLLRRIDRVRVVGINTPLRLYELLPTDTEQGAVEIWEKAIDLYEDRDFRKAFNLFVSLIKRYPHDNVPKVYAQWCKAFIETPAAGKLGCREKPDKEIAPFSTTQPHQTAGLLLGRGQ

SEQ ID NO: 46249 - DNA, 1320 bp, Unknown
  Obtained from environmental sample
  misc_feature (1)..(1320): n is a, c, g, or t
gtgaaaataatccaggctggggaatttgattctttttggaaacacagagcggtgcggaatgatgatgagaccgaatctgctgtaaagggaataattgcggcagtaagggccgagggggacacggcgcttcgccgcttcgcttctcgctttgacaagagctctccggcacaactggaagttccgatttctgtggcgtttgaggcgcgggaagaaatgcgcctgggcgatccccgactgtattctgcgattgagctttcggcatcgcacataaaacgcttttgccagaaacagagggaacaattttttgattttgaatatgaaatggaaaagggcattgtaacaggccagcgggtaattccggtacaaagggcggcggtttacgttccgggtgggcgtttcccattgttctcgactgtaatgatgtgccttctccccgcgttctgcgccggtgtggaagaggtgtttttggcatcaccgcccttggaggacgggattcccgacagaaaaatacttgctgccaccgtaattacaacggaaatagccgccggaaagctgcgtgtttttgccgttggcggggcacaggctatagccgctctggcgctggggacagaatccattcccagttctgatgtagttgtcggtcctggcaacaagtacgttgcggcggccaaacggcttttgttcggcgaggtggggattgattttatcgctgggccgtccgatgtgcttgtcgtcagcgatgattccgtaacggcagacagttcgcgaaacgcgaatttaattgcggctgatatgatagcgcaagcggagcacgatcccgatgcgcgtgcaagggcgttggttccgtccagagagcttgcggaaaaaattgctggtgctattgaaaaacagcttgctaatcttccgacagccgaaaccgcccgatcatctcttgaattaggcggccttattattgtttacggagaaaaaaaagaagccattcgcattgcaaacatcattgcccctgaacatctggagcttcatgtaacagaccctgaaagctggatcccgaaattaaaaaattacggttcgctttttataggcgctctttcggcagaagttctgggggactattcagccggaatcaaccatacgcttcctacgtcttgcagtgcccgttttacaggcggactttctgtcaggcatttcttaaaaaccgttacgacactgcgctgtacaagagatgaggggtttgaaaaaaaccgtcaggcggcggaaattctcgccaacgccgagggtctggcaggccatgcccaaagcgccgcgttgagaaaagattga

SEQ ID NO: 46250 - protein, 439 aa, Unknown
  Obtained from environmental sample
  DOMAIN (9)...(439): Histidinol dehydrogenase
  misc_feature (1)..(439): Xaa is any amino acid
MKIIQAGEFDSFWKHRAVRNDDETESAVKGIIAAVRAEGDTALRRFASRFDKSSPAQLEVPISVAFEAREEMRLGDPRLYSAIELSASHIKRFCQKQREQFFDFEYEMEKGIVTGQRVIPVQRAAVYVPGGRFPLFSTVMMCLLPAFCAGVEEVFLASPPLEDGIPDRKILAATVITTEIAAGKLRVFAVGGAQAIAALALGTESIPSSDVVVGPGNKYVAAAKRLLFGEVGIDFIAGPSDVLVVSDDSVTADSSRNANLIAADMIAQAEHDPDARARALVPSRELAEKIAGAIEKQLANLPTAETARSSLELGGLIIVYGEKKEAIRIANIIAPEHLELHVTDPESWIPKLKNYGSLFIGALSAEVLGDYSAGINHTLPTSCSARFTGGLSVRHFLKTVTTLRCTRDEGFEKNRQAAEILANAEGLAGHAQSAALRKD

SEQ ID NO: 46251 - DNA, 831 bp, Unknown
  Obtained from environmental sample
  misc_feature (1)..(831): n is a, c, g, or t
atgaacgtaattttagccggctacgggaaaatgggacgcctccttgaaaccaagctcacagaaaggggacacaatgtcctttcggtggttgatcccttgcttgcaggaagcggcgccattgcctcttccaccgcgttttacccttccctcaaagacgccctggacggaaagcccggaaaaagcctgaaagacgccgatgtggttatagagttttccgtgccccctgtcgcgccgattaatcttcgtttccttatcaatgaaagaatccccgtggtaaccggtaccacaggctggtacaacaacctgcctgaaatcagcaatgcggtggtatccgccggctcttccctgctctggtcatccaatttttcacttggcgtaaatcttttttaccgccttgcctgttacgccgcgaaattgatggacccctttaaggagtatgatgtggctggctttgaagcccaccacaataaaaaggcggacagcccttcaggtaccgcgaaaactctggtcgatctggtgcttggccaaatgaccagaaaaaagaaagctgtgtaccagacgctggaaagaaaaccggaagaggatgagcttcattttgccagcatgcgcatcggctcagtgccgggaacacacagccttgtttttgattcaaatgccgataccatcgagataacacacacagcccgtaaccgcgaaggctttgcggcgggcgctgttttggctgcggaatggcttaccgccgaaaaacggacaggaatttttacnatggacgatgtattaaacacatctaaaagaacatgtcttaaaggaactgcaataatgaaaacttaa

SEQ ID NO: 46252 - protein, 276 aa, Unknown
  Obtained from environmental sample
  DOMAIN (1)...(122): Dihydrodipicolinate reductase, N-terminus
  misc_feature (1)..(276): Xaa is any amino acid
MNVILAGYGKMGRLLETKLTERGHNVLSVVDPLLAGSGAIASSTAFYPSLKDALDGKPGKSLKDADVVIEFSVPPVAPINLRFLINERIPVVTGTTGWYNNLPEISNAVVSAGSSLLWSSNFSLGVNLFYRLACYAAKLMDPFKEYDVAGFEAHHNKKADSPSGTAKTLVDLVLGQMTRKKKAVYQTLERKPEEDELHFASMRIGSVPGTHSLVFDSNADTIEITHTARNREGFAAGAVLAAEWLTAEKRTGIFTMDDVLNTSKRTCLKGTAIMKT

SEQ ID NO: 46253 - DNA, 543 bp, Unknown
  Obtained from environmental sample
  misc_feature (1)..(543): n is a, c, g, or t
ttgcagaacatcccccatctggctcaggtcgccggacgcttccttaacgcccacaatgccgtttatggtggcaattttttccatgaggggggtagggatgttccgccccgttcgcgatgcgatattgtagaccacaatgggaatgcccacagcggcggccgcttcaaaatgcctgtaaaggccgtcatcgttgggcttgttgtaatagggagttaccaccagggcggcgtctgcccccatgtctttggctctttttgtatatataaccatgtgttttgtatcgttggatcctgttccgacaattattggaacagtacccttaacttcgtcaacgatgatacggatgagcttttcttcttcgtcctcatccagcgtgggggtttccccggtagtgccaagaggaacaaggccgtctattccctgttccagctggaaatttatcagcctcctgaagccgtcgtaatccacgtctccgttttctttcatcggggaacaagggctgtatatgcgccagttaagttttcattattgcagttcctttaa

SEQ ID NO: 46254 - protein, 180 aa, Unknown
  Obtained from environmental sample
  misc_feature (1)..(180): Xaa is any amino acid
MQNIPHLAQVAGRFLNAHNAVYGGNFFHEGGRDVPPRSRCDIVDHNGNAHSGGRFKMPVKAVIVGLVVIGSYHQGGVCPHVFGSFCIYNHVFCIVGSCSDNYWNSTLNFVNDDTDELFFFVLIQRGGFPGSAKRNKAVYSLFQLEIYQPPEAVVIHVSVFFHRGTRAVYAPVKFSLLQFL

SEQ ID NO: 46255 - DNA, 864 bp, Unknown
  Obtained from environmental sample
  misc_feature (1)..(864): n is a, c, g, or t
atgaaagaaaacggagacgtggattacgacggcttcaggaggctgataaatttccagctggaacagggaatagacggccttgttcctcttggcactaccggggaaacccccacgctggatgaggacgaagaagaaaagctcatccgtatcatcgttgacgaagttaagggtactgttccaataattgtcggaacaggatccaacgatacaaaacacatggttatatatacaaaaagagccaaagacatgggggcagacgccgccctggtggtaactccctattacaacaagcccaacgatgacggcctttacaggcattttgaagcggccgccgctgtgggcattcccattgtggtctacaatatcgcatcgcgaacggggcggaacatccctacccccctcatggaaaaaattgccaccataaacggcattgtgggcgttaaggaagcgtccggcgacctgagccagatgggggatgttctgcaaagcatcgccttgccgcgcaagggcacggtaaaccccttctacgttgtctcaggggacgacggctttaccttgccgctcatcgctctgggcggcgacggcatcatctcggttatttcaaacctggtaccagccagggtaaaagccctgacaaaagcgtgccttgcggggaattttgaagaagggcagaagattcactttgagcttctcccgctgataaaagcggcgttcatcgaaacaaacccgattcccatgaaagcggccatgtcgtgggcagggctgccagcgggtcccgcgaggcttcccctgggaaaactggaaagtaaaaacgaagctatactaaggaaggctatagaaaaactgggaataaaaaccacataa

SEQ ID NO: 46256 - protein, 287 aa, Unknown
  Obtained from environmental sample
  DOMAIN (1)...(283): Dihydrodipicolinate synthetase family
  misc_feature (1)..(287): Xaa is any amino acid
MKENGDVDYDGFRRLINFQLEQGIDGLVPLGTTGETPTLDEDEEEKLIRIIVDEVKGTVPIIVGTGSNDTKHMVIYTKRAKDMGADAALVVTPYYNKPNDDGLYRHFEAAAAVGIPIVVYNIASRTGRNIPTPLMEKIATINGIVGVKEASGDLSQMGDVLQSIALPRKGTVNPFYVVSGDDGFTLPLIALGGDGIISVISNLVPARVKALTKACLAGNFEEGQKIHFELLPLIKAAFIETNPIPMKAAMSWAGLPAGPARLPLGKLESKNEAILRKAIEKLGIKTT

SEQ ID NO: 46257 - DNA, 1458 bp, Unknown
  Obtained from environmental sample
  misc_feature (1)..(1458): n is a, c, g, or t
ttgtttgcgaggttccctgccgcgcctgtgacgccgtgcgcaaacgaggcgcacgaataccttgccgaaacggacaaaatggccaccagcgaaacaaagtgcgtaaactgccaccgctgcgttacgctctgtcccacccgtgccctgaaggttgtacaaagcggcaacacatacaagcataattccaactggaacgccaagaccatcgacgaaattttcaagcaggcggattcaggcggcgtacttttgtcaagcatgggcaatcctgaaaactacccggtttactttgataaaatgatcataaacgcttcgcaggttacaaacccgtcaatagaccctttgcgggagccaatggagacaaagatatatctgggcgcaaggccaaaaacaatagaacgcgacagtaaaggccggattaggaacaatctgacgccccagcttaaactgtccatgccggtaatgttctcggcgatgagctacggttccataagctacaacgcgcacgaaagcctggcgcgcgccgcggaagaactcggcatattttacaacactggcgaaggcggcctgcatcaggatttttaccgttacggcaaaaacaccgtcgtgcaggttgcgtcggggcgtttcggcgtccatccggattacctgaacgcgggcgcggctattgagataaaaatcggccagggcgccaagcctggtatcggcgggcatcttcctggcgtgaaaattgtcggcgacatttcccgaaccagaatgattcctgaaggcacagacgccatttctccggcgccgcaccacgatatttattcaatagaagatttgcgtcagcttgtttattccttaaaagaagctacgaattatcaaaaaccggtaattgtcaaaatcgccgcagtccacaacgtaaccgcgattgcaagcggcatagccagaagcggcgcggacataatagccattgacggcttccgtggcggaacgggcgcggctcccacacgcatacgcgatcatgtcggcatcccaatagagcttgcccttgccggcgttgacaaacggttacgcgatgagggcatacgcgacaacgtgtccatcgtcgttgggggcagtatccgatcaagcgccgacattataaaagcaatcgcccttggtgcggattgcgtttacatagcgacatcggcgctgatcgcgcttggctgtcatttgtgcagaagctgtcacgcgggaaaatgcaattggggtatcgccacgcaggttccagaactggtcaagcgcttgaatcccgacatagggtacagacgtcttatcaatcttttaacggcgtggcagcatgaaattaaagaaatgatgggcggcatggggattaactcaattgacggattaaaaggaaataggttaatgcttcgcggagtcggattaaatgaaaaagagttagaaattttaggcattaaacacgctggagaataa

SEQ ID NO: 46258 - protein, 485 aa, Unknown
  Obtained from environmental sample
  DOMAIN (27)...(50): 4Fe-4S binding domain
  misc_feature (1)..(485): Xaa is any amino acid
MFARFPAAPVTPCANEAHEYLAETDKMATSETKCVNCHRCVTLCPTRALKVVQSGNTYKHNSNWNAKTIDEIFKQADSGGVLLSSMGNPENYPVYFDKMIINASQVTNPSIDPLREPMETKIYLGARPKTIERDSKGRIRNNLTPQLKLSMPVMFSAMSYGSISYNAHESLARAAEELGIFYNTGEGGLHQDFYRYGKNTVVQVASGRFGVHPDYLNAGAAIEIKIGQGAKPGIGGHLPGVKIVGDISRTRMIPEGTDAISPAPHHDIYSIEDLRQLVYSLKEATNYQKPVIVKIAAVHNVTAIASGIARSGADIIAIDGFRGGTGAAPTRIRDHVGIPIELALAGVDKRLRDEGIRDNVSIVVGGSIRSSADIIKAIALGADCVYIATSALIALGCHLCRSCHAGKCNWGIATQVPELVKRLNPDIGYRRLINLLTAWQHEIKEMMGGMGINSIDGLKGNRLMLRGVGLNEKELEILGIKHAGE

SEQ ID NO: 46259 - DNA, 846 bp, Unknown
  Obtained from environmental sample
  misc_feature (1)..(846): n is a, c, g, or t
atgaagagaataataagtggaaaagtaagggaagtatacgagatctcagacgacaggcttgtcatcgttacgacggacaggatttcagcgtttgacgttatcctgtcaaaacccgtacttaataaaggaaaagttttaacagccgtttctttattttggtttaattatacaaaagacatcattcccaatcattttatttcaagtgacttaanagatatgcctgaatattttcagaatagcgaatttgagggcagaacgattttagttaaaaaactgaaaatactgccgtttgaatttatcgttaggggatatatgttcggtaatatgtgggaagcgtactccaggggaagagatttttgcggtcataaaatagaaggcaattacaaacaggctgaaaagcttgacatccctctttttaccccttcgacaaaagcgcatgtaggtcatgacgaatatatttcgattcaatatgtcgcggataagcttggcccccatctgacaaaaagaatagaaaaaatttcctttgaactttataacacatgctacaattacgctcatagcaaagacattataatcgccgacactaaatttgaattcggacttgatgaaaacaacgacctctttcttgcggacgagatatttacccccgattcaagcagattctggagcctttccgattatcaggtaggaacttcgccaaagagttacgataaacaatttgtacgtgactggcttcttaacaacaaaaaagacggcgagatgcaatttgacaatgtaccggatgaagtgttaaacaaaacgtctgaaatttacgccgaatgcctgcggaggctggttaatgcctga

SEQ ID NO: 46260 - protein, 281 aa, Unknown
  Obtained from environmental sample
  DOMAIN (1)...(263): SAICAR synthetase
  misc_feature (1)..(281): Xaa is any amino acid
MKRIISGKVREVYEISDDRLVIVTTDRISAFDVILSKPVLNKGKVLTAVSLFWFNYTKDIIPNHFISSDLXDMPEYFQNSEFEGRTILVKKLKILPFEFIVRGYMFGNMWEAYSRGRDFCGHKIEGNYKQAEKLDIPLFTPSTKAHVGHDEYISIQYVADKLGPHLTKRIEKISFELYNTCYNYAHSKDIIIADTKFEFGLDENNDLFLADEIFTPDSSRFWSLSDYQVGTSPKSYDKQFVRDWLLNNKKDGEMQFDNVPDEVLNKTSEIYAECLRRLVNA

SEQ ID NO: 46261 - DNA, 975 bp, Unknown
  Obtained from environmental sample
  misc_feature (1)..(975): n is a, c, g, or t
gtgggacgggatgccctgttctctgtcattcaaaaagatattaacgcttttgatattgaaaccgaaatttccccggttgacctgcgctgccaccgcctgaacctctgcgccgattcccggcggaacctgctcctgctgcggcgctttgcggactgcgcggcagggaagataccggatactgccgcggttgaacgcattatcgccgaaaaaccggaaatcctgagaacactgcccgctttttatccggtgcaggtctacggcggctgcccccaaaactgcgcctggtgcccctggccgcaggctgccggagcaagcggcgctgttacagagcgacgggactatatggaggcacagcaatttgaatccctgctggaaaaaatcatcgcgttttccggcgacgcggttatcgatctttctctctggggggagatttccctgcatcctgataaaatgacattgatcgaaatggtattgcgccgtcctgaacttgccctggtaatcgaaacttccggcatcggatggaaaaataatgaactggaacagagcgcgcagcttgcccagacagccgcatccgttaggcgtaaatcaaccctcgttcgaaagaacgagatgccgccgctttcgtggattgtctcgttggataccgccgatccggcgcggtataaagagattcggggggcgggttttgccgaggcgaatgagtgcgccaaaacgctcctgtccctttttccgcgggacgcgtacgtgcaggcggtaagaactacgggggcggaaaatgacattgagcaattctaccgctcatggaaagagacggcccccgccgcggcaaacatcatcattcaaaaatatgatgatgtttgcggtatgctgccccgcagacaggcgtcggatctttccccggtaatcagacggccctgctggcatctcatgcgggatatgcccatactccttgacggtacggctcggccgatctga

SEQ ID NO: 46262 - protein, 324 aa, Unknown
  Obtained from environmental sample
  DOMAIN (83)...(268): Radical SAM superfamily
  misc_feature (1)..(324): Xaa is any amino acid
MGRDALFSVIQKDINAFDIETEISPVDLRCHRLNLCADSRRNLLLLRRFADCAAGKIPDTAAVERIIAEKPEILRTLPAFYPVQVYGGCPQNCAWCPWPQAAGASGAVTERRDYMEAQQFESLLEKIIAFSGDAVIDLSLWGEISLHPDKMTLIEMVLRRPELALVIETSGIGWKNNELEQSAQLAQTAASVRRKSTLVRKNEMPPLSWIVSLDTADPARYKEIRGAGFAEANECAKTLLSLFPRDAYVQAVRTTGAENDIEQFYRSWKETAPAAANIIIQKYDDVCGMLPRRQASDLSPVIRRPCWHLMRDMPILLDGTARPI

SEQ ID NO: 46263 - DNA, 828 bp, Unknown
  Obtained from environmental sample
  misc_feature (1)..(828): n is a, c, g, or t
atgaaggacggggtaatcgccgacttcgacctcgtcgagcagatgctcaagtacttcatacgcaaggtgcagaagcaccgtttctacttccggccgcgggcggtgataggcgtccccgccggcatcacagaggtagagaagcgcgccgtaatagactccgccgagagcgccggcgtccgcgaggtctacctcgtgacggagaccatggcctcggccataggcatgggcatcccggttgaggaaccctccggcaacatggtcatagacatcggcggcggtaccgccgaaatagcagtgctcgccctaaacggcatggtttgcgacatgtccgtccgcaccggcggcgacgaaatggacgaaaccatcgtctcgtacctcaaaaaggcgtacaacctgctcataggcgaaagcaccgccgagcagatcaaaatacaaatcggctccgccttcccgctggaagacgaactcgaaatggaggtaaagggccgcgacctggtggccggcatacccaaaacgctccgcatcacctccaccgaaatacgcgacgctctcaacgagccgatatccgtcatagtcgaagccgtcaaacaagccctcgagcagacgccgccggagctgtccgccgatatcctcgacaagggtataataatgaccggcggcagttcgcagctgcgcgggttggacgaaagaatccgccaagagacaaacctgccggtaaacgtgattgacgacccgctgacctgcgtggcccgaggggcgctgaaaattatcgaggagttcgagaagtaccaccccgtgctgatgcccacgggcaagcacggcagatag

SEQ ID NO: 46264 - protein, 275 aa, Unknown
  Obtained from environmental sample
  DOMAIN (1)...(265): MreB/Mbl protein
  misc_feature (1)..(275): Xaa is any amino acid
MKDGVIADFDLVEQMLKYFIRKVQKHRFYFRPRAVIGVPAGITEVEKRAVIDSAESAGVREVYLVTETMASAIGMGIPVEEPSGNMVIDIGGGTAEIAVLALNGMVCDMSVRTGGDEMDETIVSYLKKAYNLLIGESTAEQIKIQIGSAFPLEDELEMEVKGRDLVAGIPKTLRITSTEIRDALNEPISVIVEAVKQALEQTPPELSADILDKGIIMTGGSSQLRGLDERIRQETNLPVNVIDDPLTCVARGALKIIEEFEKYHPVLMPTGKHGR

SEQ ID NO: 46265 - DNA, 771 bp, Unknown
  Obtained from environmental sample
  misc_feature (1)..(771): n is a, c, g, or t
ttggcctgcgcctccggccgcacggctatcatcaccacgctgagcacaacggtgagcagcaacgaacaaacgttacggtggcggacgattagggctatgagtaatcgcatgttatgccgcccgcagccctatctgccgtgcttgcccgtgggcatcagcacggggtggtacttctcgaactcctcgataattttcagcgcccctcgggccacgcaggtcagcgggtcgtcaatcacgtttaccggcaggtttgtctcttggcggattctttcgtccaacccgcgcagctgcgaactgccgccggtcattattatacccttgtcgaggatatcggcggacagctccggcggcgtctgctcgagggcttgtttgacggcttcgactatgacggatatcggctcgttgagagcgtcgcgtatttcggtggaggtgatgcggagcgttttgggtatgccggccaccaggtcgcggccctttacctccatttcgagttcgtcttccagcgggaaggcggagccgatttgtattttgatctgctcggcggtgctttcgcctatgagcaggttgtacgcctttttgaggtacgagacgatggtttcgtccatttcgtcgccgccggtgcggacggacatgtcgcaaaccatgccgtttagggcgagcactgctatttcggcggtaccgccgccgatgtctatgaccatgttgccggagggttcctcaaccgggatgcccatgcctatggccgaggccatggtctccgtcacgaggtag

SEQ ID NO: 46266 - protein, 256 aa, Unknown
  Obtained from environmental sample
  misc_feature (1)..(256): Xaa is any amino acid
MACASGRTAIITTLSTTVSSNEQTLRWRTIRAMSNRMLCRPQPYLPCLPVGISTGWYFSNSSIIFSAPRATQVSGSSITFTGRFVSWRILSSNPRSCELPPVIIIPLSRISADSSGGVCSRACLTASTMTDIGSLRASRISVEVMRSVLGMPATRSRPFTSISSSSSSGKAEPICILICSAVLSPMSRLYAFLRYETMVSSISSPPVRTDMSQTMPFRASTAISAVPPPMSMTMLPEGSSTGMPMPMAEAMVSVTR

SEQ ID NO: 46267 - DNA, 831 bp, Unknown
  Obtained from environmental sample
  misc_feature (1)..(831): n is a, c, g, or t
atgcgattactcatagccctaatcgtccgccaccgtaacgtttgttcgttgctgctcaccgttgtgctcagcgtggtgatgatagccgtgcggccggaggcgcaggccaagattgcccgcgcgctctctatgagtttgttttaccccgcttacgtagcggtctctcaggtgccggcgttcaccggactgtactccgaaaataagcgcctccgcaaagagcttgccgagattggcacgcaagcgcagctttttcgtgaacagactgccgagaacgtgcgtctgcgcgggctggtcgggttcgccgagaataccttatacactctaatacccgccagagtcgtcgcccgcgacccctcgccgcagtaccgcagcgtgattgtcagcggcggccatacgcagggcgtggatcagtacatgccggtggtgggcgaacgcggcgcggcgggcaaaatcgtgcaggtgctggagaacatggccatggtgcagctgctacgcgacccgtccagccgcacgagcgtcatggtcagcaggtcgcgggcggtggggatactgcagaccgaaaacgggcgcgacttcttcgtccgcctgcgcagccatgaggacgctggagccggcgacaccatagtcacctccggcctcggcggcatatacccgaaaggcctcactgtcggcttcgtgaaaaaaattgacgacgggaaccctctcttcaagcgcgcctatatcgacttctccgttaatttcgaaaagctggaggaggtttttgtaatgcgtctgccgccgctgtgggcggcgcaacgcgccgaactcgaaacggtgccggtggaaaaatga

SEQ ID NO: 46268 - protein, 276 aa, Unknown
  Obtained from environmental sample
  DOMAIN (111)...(260): rod shape-determining protein MreC
  misc_feature (1)..(276): Xaa is any amino acid
MRLLIALIVRHRNVCSLLLTVVLSVVMIAVRPEAQAKIARALSMSLFYPAYVAVSQVPAFTGLYSENKRLRKELAEIGTQAQLFREQTAENVRLRGLVGFAENTLYTLIPARVVARDPSPQYRSVIVSGGHTQGVDQYMPVVGERGAAGKIVQVLENMAMVQLLRDPSSRTSVMVSRSRAVGILQTENGRDFFVRLRSHEDAGAGDTIVTSGLGGIYPKGLTVGFVKKIDDGNPLFKRAYIDFSVNFEKLEEVFVMRLPPLWAAQRAELETVPVEK

SEQ ID NO: 46269 - DNA, 1266 bp, Unknown
  Obtained from environmental sample
  misc_feature (1)..(1266): n is a, c, g, or t
atgcgaagaatatcgactgatatgccccacattgacacgcagtatcaattaaggcggcaggaagaacggattgcgaaactgcaatcacaaattacatccgagaacaggatacgcgaactgcgcgacgatcccatcgcggcctcccacacggtgcgctatgaatcatacctcgcgcggcttgagcgtttcgagaaaaacaccttgtacgcgaaggatcattacaatctcgtttatggatacatgaatgaggctcttggcattatgcagcgggtgcgggagcttgcggtacagggcgcgaacggaacctacacggaagatgatcaaaaactcatgggcatggaagtaaacgagctgatcaaggagcttgcgtccctttccaatacggtggggcctgacggcaagcaggtgtttgccggcgacaaggcgtttaccgagcctttccgcattgtcgaaggctcagtccccggcggcggcgaaagcatggtcgtcagggttgagtaccgcggcgcgggcgcatcgcggaggacggaaatcagcgacaatacctatgttgatcttgacataggcggcggcgaggcgttctgggcggaaaagatgcagattttttccaatgtaaacgcttccaattacagggtaagcggccccggttccttcttcattgacgggaacgagattcgggtggccgccggagacacgctgccggctattgtggcaaagatcaacgattcccccgcgccggtcaaggcttatattgatcctgaaaccagagggcttgtgctggaggggaccaatccccacctgatccgcgccgaagacgcggtttctccaaacggcgaagggccgacggtgctgaaagacctcgggattatccgcggaaacatggaaaataacgctccaaattgggacactacccgatcccttgtttcgggcggctcaatgtttgatatgctcgtacggctgcgcgacgcgctgtaccggggcgatcatgaatttatcggcagccaggggattgccggcatggatcttgcgataggcaatttgaccacgcgcattgcggacgtcggcagccgccaggagagggcagagaccgtctggcagcggcttaacagggaaatcccggatgttacagctaacatttcccgcgagtcctccgtcgatatgactgacgccgcgacggacctcaagttcctggacttcgcccacaaggcaagccttcagaccgcggcgcgccttctgccggtgtcgcttcttgactttttaagatag

SEQ ID NO: 46270 - protein, 421 aa, Unknown
  Obtained from environmental sample
  DOMAIN (217)...(264): Flagellin hook IN motif
  misc_feature (1)..(421): Xaa is any amino acid
MRRISTDMPHIDTQYQLRRQEERIAKLQSQITSENRIRELRDDPIAASHTVRYESYLARLERFEKNTLYAKDHYNLVYGYMNEALGIMQRVRELAVQGANGTYTEDDQKLMGMEVNELIKELASLSNTVGPDGKQVFAGDKAFTEPFRIVEGSVPGGGESMVVRVEYRGAGASRRTEISDNTYVDLDIGGGEAFWAEKMQIFSNVNASNYRVSGPGSFFIDGNEIRVAAGDTLPAIVAKINDSPAPVKAYIDPETRGLVLEGTNPHLIRAEDAVSPNGEGPTVLKDLGIIRGNMENNAPNWDTTRSLVSGGSMFDMLVRLRDALYRGDHEFIGSQGIAGMDLAIGNLTTRIADVGSRQERAETVWQRLNREIPDVTANISRESSVDMTDAATDLKFLDFAHKASLQTAARLLPVSLLDFLR

SEQ ID NO: 46271 - DNA, 864 bp, Unknown
  Obtained from environmental sample
  misc_feature (1)..(864): n is a, c, g, or t
atgttaacggaaattaccaccgatccggncacgggcgcttttgattccagttacatataccggataaacggggcgaatgtgctggaagcgcaggcgcagccgggctttgagggagtgataacccttgccgggccggacggcaatatccaggtgccttattattccaccgacacggttgcggatattatcagcaggattaacaattcgggcgcggaggttgtggcgcggcttaaccgcgacggcaggctttcgatcaaaggtacgccggcacagcccatagacggcgtgcatgagaaccctgattttgttatacgccatgtggaagacagcgggcatttccttacaggttacgccggccttttgggccaggacggggtctttgactggggaatcgccgatgccatcgcgaacctgcgaaacggcgctgattattcggtcgcgcccatcgcccatccttcaggctggattgaagtgaatcccgcccttgcgaaagatcccacgtcggtggcttcgggcttcgggttcaacggcaatgccgccaatccgggtaacggcggcgcggcggcggcaatcgcgtcaatcaggaacagccccgttatggtgggccagcttgccacttttgacgattacttcgccgattctgtcggacgcatggggcttctgggcgagcagagcgaaagggctttggcgactgaaaaccttatcatgaaggaactaaaggacatgaggcagtcaatttccggagtgaacattgacgaggaactcgcgaatatgatccgctaccagcacggctacaacgcggcggcccgttttgtttccacggtcaattccatgctggacgtattaatgaggcttggcgcttaa

SEQ ID NO: 46272 - protein, 287 aa, Unknown
  Obtained from environmental sample
  DOMAIN (39)...(89): Flagellin hook IN motif
  misc_feature (1)..(287): Xaa is any amino acid
MLTEITTDPXTGAFDSSYIYRINGANVLEAQAQPGFEGVITLAGPDGNIQVPYYSTDTVADIISRINNSGAEVVARLNRDGRLSIKGTPAQPIDGVHENPDFVIRHVEDSGHFLTGYAGLLGQDGVFDWGIADAIANLRNGADYSVAPIAHPSGWIEVNPALAKDPTSVASGFGFNGNAANPGNGGAAAAIASIRNSPVMVGQLATFDDYFADSVGRMGLLGEQSERALATENLIMKELKDMRQSISGVNIDEELANMIRYQHGYNAAARFVSTVNSMLDVLMRLGA

SEQ ID NO: 46273 - DNA, 1188 bp, Unknown
  Obtained from environmental sample
  misc_feature (1)..(1188): n is a, c, g, or t
atgcgtatggaggccgcgcaggacaaactgtttgatatggccttccgctctaagtacgccatagacagtctgaagcgcttgggtcagaaattggataacggagaggtggagtgcgccgatgtcatctgtatagacgaggtccaaggagagggcgcggattcggtggacatagagaaaaaacgcgtcgaatttctcagaacgctatccatagtaaaagataaatacgccgtcataacagatatggaacggacgggcgagacgggaaatgagttaaaccgtctatgggacgagaccatccttctatgcaggggtatggggctgaacgccaagcacgttgaagacattttagataggtacaaagaggagttggaatccgataaccgctacgacgacatcgagaaattcgcgcagttggaagagatccgcaaccaagcgaagtgcgccgttatagaggccaacgtacgccttgtcgtcagtatcgccaagaggtacatgacgcgcggtatggagatcatagacctgatacaagagggcaaccgcggcctgataaaggcggtggaaaatttcgactaccgcaaaggctacaagttctccacctacgccacgtggtggatccgccaaaccatactgcgggcgataaacgacaaatcgaaagcgatccgcatccccgccaacacgatggagttggtcaacaaagtgttgcgcgtaacgcgaaagtgggtcatagagtacggttacgaaccgtcgtaccaagagatcgccgtagtgctcggctgtcccgaggtaaaagtccagcaagccatggagtactcgctggacccaatatcgctggatatgcagataagcggcgacagcggcgcgacggtgggcgagtacatagaggatttgaccgtagtagaccccacgcaaaaaatatcgttgcttcaccttagagaacagatcaacgaggtgttaagctcgctcgcgcccaaagagaaagagatactgatgatgcgcttcggtttggacgacggaagaatcaaaacgcttaaagaaataggggaaatattcaacataagccgggagcgcgtacgtcaaatagagacaaaggcgctctccaaactgaaacatccgagccgtgtgaggttactgtcggcatggcgtgaagagagatcggaaacgttagccgatgttccgtatgaggagtga

SEQ ID NO: 46274 - protein, 395 aa, Unknown
  Obtained from environmental sample
  DOMAIN (311)...(368): Sigma-70, region 4
  misc_feature (1)..(395): Xaa is any amino acid
MRMEAAQDKLFDMAFRSKYAIDSLKRLGQKLDNGEVECADVICIDEVQGEGADSVDIEKKRVEFLRTLSIVKDKYAVITDMERTGETGNELNRLWDETILLCRGMGLNAKHVEDILDRYKEELESDNRYDDIEKFAQLEEIRNQAKCAVIEANVRLVVSIAKRYMTRGMEIIDLIQEGNRGLIKAVENFDYRKGYKFSTYATWWIRQTILRAINDKSKAIRIPANTMELVNKVLRVTRKWVIEYGYEPSYQEIAVVLGCPEVKVQQAMEYSLDPISLDMQISGDSGATVGEYIEDLTVVDPTQKISLLHLREQINEVLSSLAPKEKEILMMRFGLDDGRIKTLKEIGEIFNISRERVRQIETKALSKLKHPSRVRLLSAWREERSETLADVPYEE

SEQ ID NO: 46275 - DNA, 582 bp, Unknown
  Obtained from environmental sample
  misc_feature (1)..(582): n is a, c, g, or t
gtgaagcaacgatattttttgcgtggggtctactacggtcaaatcctctatgtactcgcccaccgtcgcgccgctgtcgccgcttatctgcatatccagcgatattgggtccagcgagtactccatggcttgctggacttttacctcgggacagccgagcactacggcgatctcttggtacgacggttcgtaaccgtactctatgacccactttcgcgttacgcgcaacactttgttgaccaactccatcgtgttggcggggatgcggatcgctttcgatttgtcgtttatcgcccgcagtatggtttggcggatccaccacgtggcgtaggtggagaacttgtagcctttgcggtagtcgaaattttccaccgcctttatcaggccgcggttgccctcttgtatcaggtctatgatctccataccgcgcgtcatgtacctcttggcgatactgacgacaaggcgtacgttggcctctataacggcgcacttcgcttggttgcggatctcttccaactgcgcgaatttctcgatgtcgtcgtagcggttatcggattccaactcctctttgtacctatctaa

SEQ ID NO: 46276 - protein, 193 aa, Unknown
  Obtained from environmental sample
  misc_feature (1)..(193): Xaa is any amino acid
MKQRYFLRGVYYGQILYVLAHRRAAVAAYLHIQRYWVQRVLHGLLDFYLGTAEHYGDLLVRRFVTVLYDPLSRYAQHFVDQLHRVGGDADRFRFVVYRPQYGLADPPRGVGGELVAFAVVEIFHRLYQAAVALLYQVYDLHTARHVPLGDTDDKAYVGLYNGALRLVADLFQLREFLDVVVAVIGFQLLFVPI

SEQ ID NO: 46277 - DNA, 423 bp, Unknown
  Obtained from environmental sample
  misc_feature (1)..(423): n is a, c, g, or t
atgtccgcgacgcaatcgaaaaatcctctagtaggaataataatgggttccgcatcagactgggagacgatgcaaaacgccgccgatatattggacgggctgtctatcccgtacgaggctgaggttgtctccgcccaccgcactcccgacaagctcttccgctacgcggagtcggcgcaaagccgcggcatagaggcgataatcgccggcgccggcggcgccgctcacttgccggggatgaccgccgccaaaacgtcgctgccggttatcggcgttcccgtccagtcaaaagcgttgagcggcatggattccctcctgtcaatcgttcaaatgcccgccggcgtcccggtggccgccatgtccataggccgcgccggagcggtaaacgcgggccaaggggcgcgtatgggaaaatccgcataa

SEQ ID NO: 46278 - protein, 140 aa, Unknown
  Obtained from environmental sample
  DOMAIN (9)...(140): AIR carboxylase
  misc_feature (1)..(140): Xaa is any amino acid
MSATQSKNPLVGIIMGSASDWETMQNAADILDGLSIPYEAEVVSAHRTPDKLFRYAESAQSRGIEAIIAGAGGAAHLPGMTAAKTSLPVIGVPVQSKALSGMDSLLSIVQMPAGVPVAAMSIGRAGAVNAGQGARMGKSA

SEQ ID NO: 46279 - DNA, 450 bp, Unknown
  Obtained from environmental sample
  misc_feature (1)..(450): n is a, c, g, or t
atgagggtaaacgtaggggtggatttacacaagacgcaatttacgatttgcgtgaaaggtttagggggaaaccagttcgcagtgtacccgacgacgggggaaggatatgaagccttcctgaaaagagccgtaatctggcaggaatgcggaatggaagtgagagtgggggtggaatcgacgggaaacacgaggtacttcaagaaccggttggaagaagcggggatagtcgtgatagtaatcaacacgctgaagttcaaagtggtaaacgagtcggtgaaaaagacggacaaacacgacgcggagacgatagcggaatttctggaaaaggacatgctgccgcagtcgcacttgtgcggccaggagagcgaacagatgaggcggctgttgaaagcgcgcacgacgcttgtccgcgcgcaggttgtaatgaagaaccagatacacgcgctatga

SEQ ID NO: 46280 - protein, 149 aa, Unknown
  Obtained from environmental sample
  misc_feature (1)..(149): Xaa is any amino acid
MRVNVGVDLHKTQFTICVKGLGGNQFAVYPTTGEGYEAFLKRAVIWQECGMEVRVGVESTGNTRYFKNRLEEAGIVVIVINTLKFKVVNESVKKTDKHDAETIAEFLEKDMLPQSHLCGQESEQMRRLLKARTTLVRAQVVMKNQIHAL

SEQ ID NO: 46281 - DNA, 300 bp, Unknown
  Obtained from environmental sample
  misc_feature (1)..(300): n is a, c, g, or t
atgcttgacgccccgctcccctgccttgttacggtagtaaaagaaatcgccgtgccgaggctccctaccctaaaaggaaaaattcgttccagggaaatggatattcctgttttttccgccgacgacctggacgcaaatcaggattatcttggtcttaaaggctctcccaccagggttgtaaaaattgacaccccttccgtttcaaggggaggtaaaaccattaaagcctcggacgaagaatccgtggcccaggcggcaggcgaactggcggctctgctacgcgaaaagggctttctatga

SEQ ID NO: 46282 - protein, 99 aa, Unknown
  Obtained from environmental sample
  misc_feature (1)..(99): Xaa is any amino acid
MLDAPLPCLVTVVKEIAVPRLPTLKGKIRSREMDIPVFSADDLDANQDYLGLKGSPTRVVKIDTPSVSRGGKTIKASDEESVAQAAGELAALLREKGFL

SEQ ID NO: 46283 - DNA, 654 bp, Unknown
  Obtained from environmental sample
  misc_feature (1)..(654): n is a, c, g, or t
atgaaaggcggcgtgtggacactggcggaacagcacgaaggaaaactaaaagccgtttcctttgagctcctctcaaggggcagaagccttgcggacaagttaggcgttaatctatgctcggttcttatcggcccggctttggaagaagaaacattaaaggagctcatctaccatggcggcgacaaagtcatcgcagttgaggatgacgctcttaggtacttcgattcggtttcccattcggcggtttttgaaacacttataagggcgtatgcgcctgagatcattctggccgcggcgacttccaccggccgtacccttatgccctataccgccgtaaaagtccatgcggggcttactgcggactgtacgggtctggacatagaggagggaacgggctgtcttttacagaccagaccggccatcggcggcaatatcatggctacgattaagactccggaacacagaccccagatggcaactgtccgcccccgctcttcccgcccgctggaaagagatgcaaaacgaaacggaaagattatccgcctctcgctaggcgacacccttcccggcggcggccggctttcctgtgtaaaggagggccggacaagggtttcaggataccccgccgatgaaacgggctttgcgaacccttga

SEQ ID NO: 46284 - protein, 217 aa, Unknown
  Obtained from environmental sample
  DOMAIN (4)...(199): Electron transfer flavoprotein domain
  misc_feature (1)..(217): Xaa is any amino acid
MKGGVWTLAEQHEGKLKAVSFELLSRGRSLADKLGVNLCSVLIGPALEEETLKELIYHGGDKVIAVEDDALRYFDSVSHSAVFETLIRAYAPEIILAAATSTGRTLMPYTAVKVHAGLTADCTGLDIEEGTGCLLQTRPAIGGNIMATIKTPEHRPQMATVRPRSSRPLERDAKRNGKIIRLSLGDTLPGGGRLSCVKEGRTRVSGYPADETGFANP

SEQ ID NO: 46285 - DNA, 303 bp, Unknown
  Obtained from environmental sample
  misc_feature (1)..(303): n is a, c, g, or t
atgaagcgtcttgtttttgttctggcactggtctttattgcctcagcttttatttttgcccaggaggctcaggaagcggaaaactcatcggcgtcaatgtggaagtacattgccgccgcggcggctgtcgggatttcctgcatagcaggcggtatggcggtaggccggattggggccgcggcgatgggcgccatgagcgaaaatcctgagctttcaggaaaggccataccgtacgtcggccttgccgaaggaatctgtctttggggcttccttgtggctctgcttattctggtgattaactag

SEQ ID NO: 46286 - protein, 100 aa, Unknown
  Obtained from environmental sample
  SIGNAL (1)...(20)
  DOMAIN (34)...(99): ATP synthase subunit C
  misc_feature (1)..(100): Xaa is any amino acid
MKRLVFVLALVFIASAFIFAQEAQEAENSSASMWKYIAAAAAVGISCIAGGMAVGRIGAAAMGAMSENPELSGKAIPYVGLAEGICLWGFLVALLILVIN

SEQ ID NO: 46287 - DNA, 1977 bp, Unknown
  Obtained from environmental sample
  misc_feature (1)..(1977): n is a, c, g, or t
atgcaccttacttccgaaaacagcggccaggatctgcctgaaaaggcggcttccaggcacatacaggaaaacatagaaaagctttcctccgcttccacctggctgggtgtgccgctgccaaccgagccttgggaatcgagccatttcccgggggaggcggaagaacgcctgaccgataccattaccggcgcggtttcatcccttataagcgccgagaatgagcagcgcgaagaaaagcgcaaaatagaagaagccctgaacgaagcgaaggctttcgcgaacttgaacgccccattttcggatttggatcagttgtcctaccttaccctgagggtaggccgccttgatgtccggcagcaggatgaactcagggagaatcttgaaggaagggcggtgatcattcccttgggttcgggcaacagggtattggcggcggcttcgagaaagggccgttttgccctggattcggaactaaaaaagatggattttattcccattgatattccggaagggttcaagggcataccgtcggagctgcttgtgggccttgaagaaaggctaaatggagtggcaaatgaacttgaaagaataagcgacagtaaaagaaaactccgtgacgaatacgctttgagccttcaatctcttgtcgcttcatacctgatggccggcattgccgaanagctaaagaccagccttagagctacaaagaacgtgtacctcctttcgggctgggtgccggctgatacggttggccgccttgtcacggagctggaagagcttacggagggcaggattgccatacgctcgtataaccccgatgaggtgaaaggggtaaaagagggcagggaaaaggttcctgtttcccttgaccacggcgcttttgtcaaaggctttgaaagcgtggtgttttcttacggcgctcccctttacgggactatcgatcctacaccgcttgtggcagttttttttacaattcttttcgggatcatgtttggggatctcggccagggttttgtgcttttcttgctcggcatccttaccggcaagcgcggctcgcgcctgcttgcggggttcaggaaattttcagtcccccttatggccgtcggggtctcctcgatggtcatgggcgctttgaacggagggatcttcaccaacgagaatattctcattggccccacaagggctgttacggcttttcttacaggccatccatccgacaggatacttaccatcatgccccttccggagaaaggtggaagcgtggttaagctcttttactttttcggttttaccatcggcgtgggggcgctgctgaattccgcgggcatgatcgtaaatgttgcaaaccagttttttctgagaaaatacgaaaaagccctttttggcaaaacaggcctggcggggcttttccttttctggtacgccatctttattgcgatacgttttgccgccgcgctgataaaaccggaggtttatgctttcagctttggctggtttgacgcggcgggattgcttgttccgcttgtcgggatattcttcggttccgctatatggcggctcctntccggaaaaaggccggtgttcgcggaaggcgtaatggtattcgtcatggaagggtttgtagagctaatagaaaccgtttccacctatgtttccaatacggtcagctttctcagggtgggggcctttgccctgtctcacgccgtgcttgcctatatcgtgttcaggttttcggaggaggttgccactattcccgccggaaccgccttcagcgttttaattctggttttcggcaatttggtaattattcttttggaaggcctcattgtggcaatacaggttgtacgccttcagtactacgaatttttcagcaagttttttaccgatatgggggttgaattttccccctttcggttccgcaaaggcactgaacaacaaggttcagaggctaaaagtcttaagatagggagtaagtaa

SEQ ID NO: 46288 - protein, 658 aa, Unknown
  Obtained from environmental sample
  DOMAIN (10)...(640): V-type ATPase 116kDa subunit family
  misc_feature (1)..(658): Xaa is any amino acid
MHLTSENSGQDLPEKAASRHIQENIEKLSSASTWLGVPLPTEPWESSHFPGEAEERLTDTITGAVSSLISAENEQREEKRKIEEALNEAKAFANLNAPFSDLDQLSYLTLRVGRLDVRQQDELRENLEGRAVIIPLGSGNRVLAAASRKGRFALDSELKKMDFIPIDIPEGFKGIPSELLVGLEERLNGVANELERISDSKRKLRDEYALSLQSLVASYLMAGIAEXLKTSLRATKNVYLLSGWVPADTVGRLVTELEELTEGRIAIRSYNPDEVKGVKEGREKVPVSLDHGAFVKGFESVVFSYGAPLYGTIDPTPLVAVFFTILFGIMFGDLGQGFVLFLLGILTGKRGSRLLAGFRKFSVPLMAVGVSSMVMGALNGGIFTNENILIGPTRAVTAFLTGHPSDRILTIMPLPEKGGSVVKLFYFFGFTIGVGALLNSAGMIVNVANQFFLRKYEKALFGKTGLAGLFLFWYAIFIAIRFAAALIKPEVYAFSFGWFDAAGLLVPLVGIFFGSAIWRLLSGKRPVFAEGVMVFVMEGFVELIETVSTYVSNTVSFLRVGAFALSHAVLAYIVFRFSEEVATIPAGTAFSVLILVFGNLVIILLEGLIVAIQVVRLQYYEFFSKFFTDMGVEFSPFRFRKGTEQQGSEAKSLKIGSK

SEQ ID NO: 46289 - DNA, 861 bp, Unknown
  Obtained from environmental sample
  misc_feature (1)..(861): n is a, c, g, or t
atggatgagaaccagcggctggctctgtggcggcaggtacaggaagacattatcaaagatcattaccatgccgatgtaaccggactgctcaaaccggccgcggaagcggagtttatcagtaaaatggcagccgcccagcggagttttgacatgacggttttttcggtggacgcttatcctgaagccgaatacgaggcatatatccgggaacattccgatctgttccgctctgtccacctttcagtgataacggttaattcaaatgaacgggaagcgcggaagatacttgattcaatcaagaacggtgaaactacttttgaagacgccgcaaaatcttattccaaagacggctatgcggagagaggcggggacatgggaataaaaatggtttatgagttgagtatggatatttccgaagaaacagaacgcgaaaaggttattgcccttgcaaggaacgagtacagtgatattgtgaagacagattccggttggtctttcttccgcgccgaggagtctgttcaggaagcggatgcttctgacgcggcagttttggaaaaagtccgttcatacgtgcgcaattttgagcggggacgtatggaggattgggcaatagcgcaggcggacaagtttatagcgctggtgaatgagacaggctttgaaaacgctgtggcccaacagggaattgaaaagcgcagtttcggccccgttccgcttaactatggtaatgtcgatattattaccacccttgcgtcgcagtctgttcccgaaatttccgcttccgcatcaaatgaagatttctggaaggtcgccttttccactccgattaaaaccccgtcgcggcccgtgggtgcagggaagtaa

SEQ ID NO: 46290 - protein, 286 aa, Unknown
  Obtained from environmental sample
  DOMAIN (79)...(171): PPIC-type PPIASE domain
  misc_feature (1)..(286): Xaa is any amino acid
MDENQRLALWRQVQEDIIKDHYHADVTGLLKPAAEAEFISKMAAAQRSFDMTVFSVDAYPEAEYEAYIREHSDLFRSVHLSVITVNSNEREARKILDSIKNGETTFEDAAKSYSKDGYAERGGDMGIKMVYELSMDISEETEREKVIALARNEYSDIVKTDSGWSFFRAEESVQEADASDAAVLEKVRSYVRNFERGRMEDWAIAQADKFIALVNETGFENAVAQQGIEKRSFGPVPLNYGNVDIITTLASQSVPEISASASNEDFWKVAFSTPIKTPSRPVGAGK

SEQ ID NO: 46291 - DNA, 666 bp, Unknown
  Obtained from environmental sample
  misc_feature (1)..(666): n is a, c, g, or t
atggcagatcgcattcgtatgaataccttatgcttagcgttggtgacattatcacaagctgtctcgttctggcatgcgggtactgatctattgcgttccaagtcgctagatcgaaatagttttgattcaggtgactggttcaatttcctcgactggactggccaggaatcgggctttgggcgcgggttacctccggctgatgacaataaggaacgttgggatttcgaacgtccgctcttagcagatccatccttgaaacccacccctgatgatataaaagctgcccataaccaagcgttagatttattgcgattaagattctactctcggttattcagactcggcgatgcggagttgataaagcagaaagtgtcatttccattatcgggagctgctgccttgcctggagttatcgcgatgctaattgacgatactattggacccgatatcgacgaatcgtgcaagggtatcctaattgtatttaatgcacgtcctgatactgttattttcgaattacctgacctaaaaagccgatacttcatgttgtccaaggtgcaacaagagggctgggatgatgtggtgcgcgattccagctttgatcgacaaaccggaactgtctgtgtacccgctcggactgtcgccatcttcaccgatgaaactgcctaa

SEQ ID NO: 46292 - protein, 221 aa, Unknown
  Obtained from environmental sample
  SIGNAL (1)...(20)
  misc_feature (1)..(221): Xaa is any amino acid
MADRIRMNTLCLALVTLSQAVSFWHAGTDLLRSKSLDRNSFDSGDWFNFLDWTGQESGFGRGLPPADDNKERWDFERPLLADPSLKPTPDDIKAAHNQALDLLRLRFYSRLFRLGDAELIKQKVSFPLSGAAALPGVIAMLIDDTIGPDIDESCKGILIVFNARPDTVIFELPDLKSRYFMLSKVQQEGWDDVVRDSSFDRQTGTVCVPARTVAIFTDETA

SEQ ID NO: 46293 - DNA, 447 bp, Unknown
  Obtained from environmental sample
  misc_feature (1)..(447): n is a, c, g, or t
atgtctatgaagataggaatacttacaagcggtggagattgcgctggtctaaatgccgttatatacgcatttgaaaaagcaattaccgcaatggatccaaaagttgatatttatggaattcttggaggctataccgggcttataaaccgcgaatacaagcttctaaagcatgaagatttttcgaatatattcaacactggcggaaccatactcggcacttctcgccaaccctataaaaaattgattcagggtgaaggaattcataaagtcgcttcaatgaaagaaaattaccacaaaatggatttagatgccttaattattttgggcgggcaaggtactcacaaaaccgccgcgcttttatccagcgaagggggtaatgtgatagatatgccaaaaactatagacaaggatgtttggggaacagatttcacgtttggttttcattga

SEQ ID NO: 46294 - protein, 148 aa, Unknown
  Obtained from environmental sample
  DOMAIN (4)...(148): Phosphofructokinase
  misc_feature (1)..(148): Xaa is any amino acid
MSMKIGILTSGGDCAGLNAVIYAFEKAITAMDPKVDIYGILGGYTGLINREYKLLKHEDFSNIFNTGGTILGTSRQPYKKLIQGEGIHKVASMKENYHKMDLDALIILGGQGTHKTAALLSSEGGNVIDMPKTIDKDVWGTDFTFGFH

SEQ ID NO: 46295 - DNA, 492 bp, Unknown
  Obtained from environmental sample
  misc_feature (1)..(492): n is a, c, g, or t
ttggagaatatgccacctnggcaaggcggcggcgaaatgatagataatgtttcttttaaaggcacaacatttgccgctccacctgctcgctttgaagcaggcacacctcccatagctgaggttctaggtctttccgccgcaatagattggataaccgaaaccggaatggataacatagtagccaacgaaaagcaagtaacggaatacgccctaaccgaacttaaaaaaatagaagggatacgaataatcggcaaccccaaaaatcgaggttcaataatctcactaactagccacattcacccccacgatattgccatgatactagacgaagaaggcatagccgtgcgctccggtcatcactgtgcccagcccacaatggagcgttttggcatagtcgctaccctcagggcgagttttgccgcctatacagagccttgggagatagaccgcttgtgctcatgtttaaaaagggctgtgttaatattttcttaa

SEQ ID NO: 46296 - protein, 163 aa, Unknown
  Obtained from environmental sample
  DOMAIN (1)...(151): Aminotransferase class-V
  misc_feature (1)..(163): Xaa is any amino acid
MENMPPXQGGGEMIDNVSFKGTTFAAPPARFEAGTPPIAEVLGLSAAIDWITETGMDNIVANEKQVTEYALTELKKIEGIRIIGNPKNRGSIISLTSHIHPHDIAMILDEEGIAVRSGHHCAQPTMERFGIVATLRASFAAYTEPWEIDRLCSCLKRAVLIFS

SEQ ID NO: 46297 - DNA, 693 bp, Unknown
  Obtained from environmental sample
  misc_feature (1)..(693): n is a, c, g, or t
ttgatttcttttgatccggtcgacagcgaaaccgaagcctccgcttcgtctgtgggagttactgttctgtactatgccagccttgtcgcgatgggacaaaaacgcgaaaacttaaaacccggcacggcggaagccgagatggacaaaggcggcagcgaagataccgcctccatcattttcacttccggcacaacgggcgagccgaaaggtgtaatgctgtgtcacagaaactttttgtgccaactgccggcttttataaaattttttgaattaaagcccggtgatatttggatttccatgctgcccgtctggcatgtttacgagcgtttaatcgaatatgttattttttattacagtacgagcatcgcttattcaaaacctatggctcctatattgatggcggattttcttgccattcgtcctaattggatggtcagcgttccgcgtgtttgggaagcgatcatggacggcattaaccgcaacataaaagccaaaggcagctttagaaaaaaaatgttcgatctggcgtcctcatattccatgttatacacctattttaaagatttaactttcggtcttctgccgaattttcacggacgtttccgcgctttggattcgttactgggatttttcccgtggctcttgcttcttctttggaggggcttcttcgcgctgttgcctttaaccggataa

SEQ ID NO: 46298 - protein, 230 aa, Unknown
  Obtained from environmental sample
  misc_feature (1)..(230): Xaa is any amino acid
MISFDPVDSETEASASSVGVTVLYYASLVAMGQKRENLKPGTAEAEMDKGGSEDTASIIFTSGTTGEPKGVMLCHRNFLCQLPAFIKFFELKPGDIWISMLPVWHVYERLIEYVIFYYSTSIAYSKPMAPILMADFLAIRPNWMVSVPRVWEAIMDGINRNIKAKGSFRKKMFDLASSYSMLYTYFKDLTFGLLPNFHGRFRALDSLLGFFPWLLLLLWRGFFALLPLTG

SEQ ID NO: 46299 - DNA, 876 bp, Unknown
  Obtained from environmental sample
  misc_feature (1)..(876): n is a, c, g, or t
gtggctcttgcttcttctttggaggggcttcttcgcgctgttgcctttaaccggataaaaaaagaattcggcggtcattttaggcggggaatttccggaggcggctctcttcccgcgaaagtagatttattttttaactcattaggcattcgtctgcaggaaggttacggtcttacggaaaccgccccgctgctttcggtacgtcagtacaaacgctcgcgccgcggaaccataggccagttaatgccgaacacgtcggcaaggattgtagacggcagcggcaagctgatgccgccggggcgcaacgggattatttttgtcaaaggcgaccaggtaatgaaaggctactatcaaaaacccgcggtaaccgccgccgttttaagcgaagacggctggtttaacacaggcgatataggcatgctcacctacgacaaagaattgcgcataacaggcagggcgaaggacacgattgttctgcgcggcggcgaaaacgtggagcccgtccccatcgagtgcaggctgagggagagtccgtatattcagcagtgtatcgttgttgggcaggaccagaaatctcttgcggctcttattgttccgtggcagcagactattatggattttgcggaagagaactccattcccgttgttgattacgagttgttgctgcagcagccggagattaatgagattatcgcttctgatatttccgagcgcataaatctcaagacaggttttaaaccatacgaacgaatttttaagtttgttcttttgccgaagccttttgagcccgggaaggaattgtcggggaagggggagcttctgcggcataatatcacggcgctgtatgcgaaagagatttataagttgtttaagtag

SEQ ID NO: 46300 - protein, 291 aa, Unknown
  Obtained from environmental sample
  misc_feature (1)..(291): Xaa is any amino acid
MALASSLEGLLRAVAFNRIKKEFGGHFRRGISGGGSLPAKVDLFFNSLGIRLQEGYGLTETAPLLSVRQYKRSRRGTIGQLMPNTSARIVDGSGKLMPPGRNGIIFVKGDQVMKGYYQKPAVTAAVLSEDGWFNTGDIGMLTYDKELRITGRAKDTIVLRGGENVEPVPIECRLRESPYIQQCIVVGQDQKSLAALIVPWQQTIMDFAEENSIPVVDYELLLQQPEINEIIASDISERINLKTGFKPYERIFKFVLLPKPFEPGKELSGKGELLRHNITALYAKEIYKLFK

SEQ ID NO: 46301 - DNA, 684 bp, Unknown
  Obtained from environmental sample
  misc_feature (1)..(684): n is a, c, g, or t
gtgtacgtttcgccgttttctcgcttgcagaaaaccggaactgaaagcgacaacaagtactaccatcttgtcctcttggccaagaacagggaaggctacctcaacctggttaagctctgctcgtttgcctataccgaaggcttttactacaggccgaggatcgacgatgagcttcttgaaaaataccacggagggctaattgcgctctcggcctgcgtttcaggcgagataccgcgccttatccaggccgggaaaatggacgaggctgaaaagaaggcctgctattacaggaatcttttcggaaaagacgaaaatggagagccagactttttccttgagatacaggatcacggcattcctgccgcgaaacttaggggaagcctttcgcaaagggacataaacaaagccgtcgttgaaattgccaggcggaaaggcatcccgctggtagcgactaatgacgttcactacctggacagggaagataatgttgcccatgacacactcctctgcgtagggacaggcaaagtcagaaccgaagaaaaacgtaagaagtaccacggagatcagttttatttaaaaagccgcgaaaagatggcggttcttttccctgactcaggcgaagcgatgcaaacaccgtgcgcattgccgcccgctgcaaaccgatgtcccggatatcagcgttaa

SEQ ID NO: 46302 - protein, 227 aa, Unknown
  Obtained from environmental sample
  DOMAIN (4)...(158): PHP domain
  misc_feature (1)..(227): Xaa is any amino acid
MYVSPFSRLQKTGTESDNKYYHLVLLAKNREGYLNLVKLCSFAYTEGFYYRPRIDDELLEKYHGGLIALSACVSGEIPRLIQAGKMDEAEKKACYYRNLFGKDENGEPDFFLEIQDHGIPAAKLRGSLSQRDINKAVVEIARRKGIPLVATNDVHYLDREDNVAHDTLLCVGTGKVRTEEKRKKYHGDQFYLKSREKMAVLFPDSGEAMQTPCALPPAANRCPGYQR

SEQ ID NO: 46303 - DNA, 1092 bp, Unknown
  Obtained from environmental sample
  misc_feature (1)..(1092): n is a, c, g, or t
atgggttttaccggctactttctcattgttgcggactttaccaactgggcaagggaaaacaatatttccgtagggccgggccgcggctcaggcgcaggttcaatagtcgcttacgtattgcgtataacggacgtagaacctctaaagtacggtcttttgtttgagcgtttccttaatccagagcgcatctccatgccggactttgacgtagactttgccaacgagggccgcgatgacgtgataaaatacgttaccgaaaaatacggccaggacaaggtggggcagatcatcaccttcgggacgcttggggcaaaagcggtgatcaaggacgtagcgcgtaccttgggaatatcaattcccgattcggacatgatcacaaagctcatcccaagggatccaaagatcactttgcagaaggcaattgacggggaaccgaagctgaaggaactggcgcaggacgcaaggtacacagagcttttcacactggccgagaaactggaaggccttaaccggcactcaagtatccacgcttccggcgtggtgattggcaagactgccttgtataatcacgcgcctcttttcaaagatccgaaaacaggagctgtttctacccagtacgccatgggccatcttgaaagatgcggtcttgtaaaaatggaccttttgggacttaaaaccctggatgtgattaggcacaccgaggaattgatccgcaacaagggaggagagcttgccgatttcagcgtagaaaccgttgatgaaaacgatgcggcaacattcaggatgcttggcgagggtttgagttttgaggtcttccagtttgaatcagacggcatgcaggataccctgaaaagggcaaagccggataagattgaagatcttatcgccctaaacgccctttaccgccctggcccaatggcaaatatccccagatatataagctcaaaaaacggccagcaggcgatcacttaccctgataaaagtctggaagaagctttgaaagaaacttacggtgttattgtttatcaggaacaggtcatgcaagtggcgcggatcattgccggttacagcatggggcaggccgacctttaa

SEQ ID NO: 46304 - protein, 363 aa, Unknown
  Obtained from environmental sample
  DOMAIN (1)...(363): Bacterial DNA polymerase III alpha subunit
  misc_feature (1)..(363): Xaa is any amino acid
MGFTGYFLIVADFTNWARENNISVGPGRGSGAGSIVAYVLRITDVEPLKYGLLFERFLNPERISMPDFDVDFANEGRDDVIKYVTEKYGQDKVGQIITFGTLGAKAVIKDVARTLGISIPDSDMITKLIPRDPKITLQKAIDGEPKLKELAQDARYTELFTLAEKLEGLNRHSSIHASGVVIGKTALYNHAPLFKDPKTGAVSTQYAMGHLERCGLVKMDLLGLKTLDVIRHTEELIRNKGGELADFSVETVDENDAATFRMLGEGLSFEVFQFESDGMQDTLKRAKPDKIEDLIALNALYRPGPMANIPRYISSKNGQQAITYPDKSLEEALKETYGVIVYQEQVMQVARIIAGYSMGQADL

SEQ ID NO: 46305 - DNA, 588 bp, Unknown
  Obtained from environmental sample
  misc_feature (1)..(588): n is a, c, g, or t
atggcacaactgtgnggttttttaagtctattgctgaatatctacatgctgataattcttttcagaattatccttacatggtttccgggctttgggaacagcggcataattgattttctttccgcgataaccgatccctacctgaactggttccggcgcttttcgtttcttcgccttggttttctggatctttctccgatagtagccctgggcattctttcgcttgtcaaccgaatcctggcaatgctcgccagttacggaagaatttcccttggcattgtgttggtactggcgctccaggctgtatggggtgcggtttcttttatccttggttttttaattcttattctcatcctgcgccttattgcttttctatttaggcagagcggcgcaaatcccttttggaacattattgaaacaatttcccagcccgtgctttacagaataaaccgcattttttttcgcggcaggatagtaaagctttctacggctctgattgtgtcaatcgcgagcctggcgatcatctacatggccttgaggtttctattcgcgttaatttccgtaacgctgctcagactgccgttctga

SEQ ID NO: 46306 - protein, 195 aa, Unknown
  Obtained from environmental sample
  DOMAIN (1)...(83): YGGT family
  misc_feature (1)..(195): Xaa is any amino acid
MAQLXGFLSLLLNIYMLIILFRIILTWFPGFGNSGIIDFLSAITDPYLNWFRRFSFLRLGFLDLSPIVALGILSLVNRILAMLASYGRISLGIVLVLALQAVWGAVSFILGFLILILILRLIAFLFRQSGANPFWNIIETISQPVLYRINRIFFRGRIVKLSTALIVSIASLAIIYMALRFLFALISVTLLRLPF

SEQ ID NO: 46307 - DNA, 1278 bp, Unknown
  Obtained from environmental sample
  misc_feature (1)..(1278): n is a, c, g, or t
ttgggaaggcgggcgggaatcccttttgggaaatcctggaaacaggaggggggagttcgttcagaaaaattaaaggagggaaaggaattcggcccggttgagccttttgatgggatagaggggaaaaggaatttcttgatttttaagtttggggagtttcctgaaatttccagtgcagataaacttaaatcggaaaaagaacttatcggttgttacttttccgcccatccaatggacgaatatcaggctgtctggaaggatcttgttaaagccgatttgggccgcccggaagctctggttttgggtaatcacatccttgtagggcttgtaaagaacgttaaggtaattaccacaagcaagggagatcgaatggccttcgctacgctggaagattacaacggcgaaattgagctaacttttttccctggggcctggactcaatgcaaggaaaaaattgaaaacgataaagtagctattcttaaaggtaaaatagaataccagcagaacagggacaaacgcagttttacagtggatgaatatttggaaccggacgatattgctaatgccgaaatagccaataaagaagatacgcggcagtgggacaggttcgcgaatatacgcaagcatgccaaagatatggagataaacctgttggatttgagcagggggaaagcggaggccggaacctacatcgccataggcatgctgaaatcaataagaacccatgttgataaaaagggcaaggaaatggcctttgggtctttgcaagtacaaagcggtgaaattgatgttttattttttgccaagacctgggagaattgcaaggctaaggcggtagtcggtgagatcctggctcttaaaggaaccatcgaagcgcagagagatcgatataacgggaaagatacccttcttgtaaccagtattcaggatgtcaataagttagtcagggacgcggataaaaaagaaacgggcaaaaaaactacgcaggcttcagagactaaaatgccttgcagggaaatgcacatacgtctggctgccggcgcggcggaaaaccatgagatgctcaattttcttaagagctgcatagaggaaaaccccggctcctgtccggtgtttatacatgttcccgttttcgccttggacaaagaaagtgagacggataaagattcaagagagacaataatccgcgcgccgggtcttattgatgcggaggctcctgtttcgcttggctcactggaaagatgcccccccgtagcggatgtgtggcgcgcggggtaa

SEQ ID NO: 46308 - protein, 425 aa, Unknown
  Obtained from environmental sample
  DOMAIN (230)...(311): OB-fold nucleic acid binding domain
  misc_feature (1)..(425): Xaa is any amino acid
MGRRAGIPFGKSWKQEGGVRSEKLKEGKEFGPVEPFDGIEGKRNFLIFKFGEFPEISSADKLKSEKELIGCYFSAHPMDEYQAVWKDLVKADLGRPEALVLGNHILVGLVKNVKVITTSKGDRMAFATLEDYNGEIELTFFPGAWTQCKEKIENDKVAILKGKIEYQQNRDKRSFTVDEYLEPDDIANAEIANKEDTRQWDRFANIRKHAKDMEINLLDLSRGKAEAGTYIAIGMLKSIRTHVDKKGKEMAFGSLQVQSGEIDVLFFAKTWENCKAKAVVGEILALKGTIEAQRDRYNGKDTLLVTSIQDVNKLVRDADKKETGKKTTQASETKMPCREMHIRLAAGAAENHEMLNFLKSCIEENPGSCPVFIHVPVFALDKESETDKDSRETIIRAPGLIDAEAPVSLGSLERCPPVADVWRAG

SEQ ID NO: 46309 - DNA, 333 bp, Unknown
  Obtained from environmental sample
  misc_feature (1)..(333): n is a, c, g, or t
atgaccttttttactttcgcgaacctttcttcctgtgatttttcttcgggggatttgcagtttttgtcaatggcaggggcaaccatccgcgattgttcctttgagggatcggaactggtaaacatcaactttggggggacgatcataaccgattcgactttcaacaagaccaatttgtacaacagccgttttatcggcgcaaatatcgcgcggacgaatttcatggactgcaacctgaagcataccagttttttgagaacacgccgggaagatatttccttcaaggcgtccaatacggcggaagccatttttgagacagaggagcttaagtga

SEQ ID NO: 46310 - protein, 110 aa, Unknown
  Obtained from environmental sample
  misc_feature (1)..(110): Xaa is any amino acid
MTFFTFANLSSCDFSSGDLQFLSMAGATIRDCSFEGSELVNINFGGTIITDSTFNKTNLYNSRFIGANIARTNFMDCNLKHTSFLRTRREDISFKASNTAEAIFETEELK

SEQ ID NO: 46311 - DNA, 639 bp, Unknown
  Obtained from environmental sample
  misc_feature (1)..(639): n is a, c, g, or t
gtgaagctttatttccattactgcccttccaacttcagcaacacatatttgctgggcacggattttacatccgctgaatcctccaaaaaaaacgcctctcccagagaggctattatagtagatccgggcctaatggacgcaagccttcttaacatgattgaagaaaacaactattcgcttaaaggagttctgattacccatgatcatcatcatcatgttcaggggctcagatcaattctgcgaatctacgaaacggaggttttcgcgattagcccggttgtcggggaacaccatacgaccctggtaagggacggacagctttttaacataggcgctttcaaggtcgaggtgttttccattccgggacactccgccgattccgccgtgttcagggttgaccgcttccttttcacgggcgatgcaataagcgcatgccgtttgggaaacaccgcgagctcgtattctgctgcaacacagacaagtgccataataagaaaaattctttcactgccaggggagtataccattcttccgggacacggccccccttcgtcgcttgaagtcgaacgccgtttcaacattgaactacattcatttgagcaaaagaaccgccgccccgctttcaggtttgagtcgtag

SEQ ID NO: 46312 - protein, 212 aa, Unknown
  Obtained from environmental sample
  DOMAIN (12)...(180): Metallo-beta-lactamase superfamily
  misc_feature (1)..(212): Xaa is any amino acid
MKLYFHYCPSNFSNTYLLGTDFTSAESSKKNASPREAIIVDPGLMDASLLNMIEENNYSLKGVLITHDHHHHVQGLRSILRIYETEVFAISPVVGEHHTTLVRDGQLFNIGAFKVEVFSIPGHSADSAVFRVDRFLFTGDAISACRLGNTASSYSAATQTSAIIRKILSLPGEYTILPGHGPPSSLEVERRFNIELHSFEQKNRRPAFRFES

SEQ ID NO: 46313 - DNA, 696 bp, Unknown
  Obtained from environmental sample
  misc_feature (1)..(696): n is a, c, g, or t
atggttggtaccatgaaaatttctgttatggtaaacggtatgccgggcaaaatggctcagatagttgccgaagtttgcggcaaaagagaattaaatgtaattccattttcgctcacaggcgaagcccttacggaattcaacggctttgctttgctcggtgtgaaggaaagagaaaataaaatagggcagattttaaaagaatatccaaatttaatagccgttgattacacgcatccaagtgcggtgaatgtcaatgccgagttttatgtcaggcacaaaatcccctttgttatgggaaccacaggcggagatagagaggctttaatgaccttggtgaaaaacgcaaacctcccttgcgtaatagctcccaatatggcaaagcagatagttgcgctccaagctatgcttgaatggactgcgaaaaattttcagggagtgttcagcggttatgatttaaaagttgttgaaagccaccaaaaaaccaaagccgacactagcggtaccgcaaaggctttggttaaaagttttttagaaatgggagcaaatggagtagaacccataatagaaatggtgcgcgaagaaaatgcccaaatttccaaaatggctgttccgcctgagcatttgggcggtcacgcctttcacacatactctttggacagcaaggataaatccgtgcattttgaatttcgcccataa

SEQ ID NO: 46314 - protein, 231 aa, Unknown
  Obtained from environmental sample
  DOMAIN (7)...(125): Dihydrodipicolinate reductase, N-terminus
  misc_feature (1)..(231): Xaa is any amino acid
MVGTMKISVMVNGMPGKMAQIVAEVCGKRELNVIPFSLTGEALTEFNGFALLGVKERENKIGQILKEYPNLIAVDYTHPSAVNVNAEFYVRHKIPFVMGTTGGDREALMTLVKNANLPCVIAPNMAKQIVALQAMLEWTAKNFQGVFSGYDLKVVESHQKTKADTSGTAKALVKSFLEMGANGVEPIIEMVREENAQISKMAVPPEHLGGHAFHTYSLDSKDKSVHFEFRP

SEQ ID NO: 46315 - DNA, 975 bp, Unknown
  Obtained from environmental sample
  misc_feature (1)..(975): n is a, c, g, or t
atgaccgcatattttgtgaatttgccacgcaataaagtggaattgtttttgtggctagaagcagacagaatgcaaaacgctgttatgcgcgaattttactccgaacgcgatgttgttatggaagaacgccgcatgcgctacgacgaccctccaaagggacgctaccgcgaaaccctgagaacgatgatttacgaagcccacccataccgaatcccaaccataggctggccgtcttccattgcaaacctaagccaagagcaggcagaggagcattacaaaaagtattacaagccgcgcaacgccattctggtttttgcaggcgatttttccgcagacacgcttttgccaaaaatccacacatatttcggaaacatacctacaggtgagcctttcccagaaattcatttgaaagaacctacccaagccggagaaaaacggcttatagttcgccgtagcgatgcaaccccaggcatagacataattttcaaaacacccggcgttggcgattctgcggtttacgctttggatattgcagagggcgttttgaacgggcgtagcggcaggctctacaaaagacttgtggaagaagaaaaactcgccacaagcgcaagcgcaagcaatagcccaaataaatacatatccacctttgcggtgtctgtttctttaaaaccaggtgccagcgcagaaaaagcagaggccattgtttgggaagaacttgaaaaactgaaaaaagaattggtaaacgaaagagagtttaaaaaggtgataaacaacgcctacgcaggccaagttcgcagcctaacagatatggcaggagtcgccacaaatctcgcttggtntgaaatgtatggttcctataacttatatttgaattgggctgcgtccttggaaactgttagccgtagtgccgtgcaaaatgcggcttcaaattatttttcgagaaacaacgctgttgtgggatggttggtaccatga

SEQ ID NO: 46316 - protein, 324 aa, Unknown
  Obtained from environmental sample
  DOMAIN (82)...(259): Peptidase M16 inactive domain
  misc_feature (1)..(324): Xaa is any amino acid
MTAYFVNLPRNKVELFLWLEADRMQNAVMREFYSERDVVMEERRMRYDDPPKGRYRETLRTMIYEAHPYRIPTIGWPSSIANLSQEQAEEHYKKYYKPRNAILVFAGDFSADTLLPKIHTYFGNIPTGEPFPEIHLKEPTQAGEKRLIVRRSDATPGIDIIFKTPGVGDSAVYALDIAEGVLNGRSGRLYKRLVEEEKLATSASASNSPNKYISTFAVSVSLKPGASAEKAEAIVWEELEKLKKELVNEREFKKVINNAYAGQVRSLTDMAGVATNLAWXEMYGSYNLYLNWAASLETVSRSAVQNAASNYFSRNNAVVGWLVP

SEQ ID NO: 46317 - DNA, 513 bp, Unknown
  Obtained from environmental sample
  misc_feature (1)..(513): n is a, c, g, or t
ttggaagcgaaacaaaaagttatccaactcgcgcaaattacaggcgaatattgcatgggaataaatctgtatattataaatttcaccaaagcgcagatgagaataaaagaacgcgcgccctctccgtggactaccgtcctgttacgaatggcgatgatggaaaccgccgaaaaagccgcgcgtaaaataaagtgcaaatgcctgattacgggcgaaagtttgtcgcaggtggcaagtcagacaatagaaaacatgacttgcacacaaagcaggattaagcttcccgttattcgccctttgattggctttagtaaagaagagattataaaaaaagcaagacaaatcgacacttatgatatttctatacaaccatatcaggactgctgtacgcttttcagtcctcagcatcctgtgttgcacggcgatgttacagaggcgaatgagttgtatgaaaagctggaacttggatcgctaattgatgaggcgcttgaagaatatgaattggttaaataa

SEQ ID NO: 46318 - protein, 170 aa, Unknown
  Obtained from environmental sample
  DOMAIN (1)...(155): Thiamine biosynthesis protein (ThiI)
  misc_feature (1)..(170): Xaa is any amino acid
MEAKQKVIQLAQITGEYCMGINLYIINFTKAQMRIKERAPSPWTTVLLRMAMMETAEKAARKIKCKCLITGESLSQVASQTIENMTCTQSRIKLPVIRPLIGFSKEEIIKKARQIDTYDISIQPYQDCCTLFSPQHPVLHGDVTEANELYEKLELGSLIDEALEEYELVK

SEQ ID NO: 46319 - DNA, 558 bp, Unknown
  Obtained from environmental sample
  misc_feature (1)..(558): n is a, c, g, or t
atgaaagctcccgaagaaaaaacacaggaagtagaaaacgtactttcccatttaattggaatttcaggctgggcgaaaattacctactgcgaaaaaactcccgccgccgttcttgccgcctgcgttgaggaagggaaaaaactttccgagaaaggcgtaaaaacttttaagattgacgcccgaagaacggacaaaagtttcccccttacttcctacgagctatgctgtaacgcgggtgaagcggttacaaacgcgtttaatgaattgaaagtagatattcacaaccccgacgatgtaataaaaattgaaatccgcgaaagagcgttagtctactccggcggcaaaaggggattcggcggtcttcctgtgggaaccgccggaaggggaatgttgttattatccggcggcatcgactcccctgtcgccggatttatgatggcatctcgcggaatgactatagacgcgattcattttcactcctatccttacacttcttggaagcgaaacaaaaagttatccaactcgcgcaaattacaggcgaatattgcatgggaataa

SEQ ID NO: 46320 - protein, 185 aa, Unknown
  Obtained from environmental sample
  DOMAIN (124)...(183): Thiamine biosynthesis protein (ThiI)
  misc_feature (1)..(185): Xaa is any amino acid
MKAPEEKTQEVENVLSHLIGISGWAKITYCEKTPAAVLAACVEEGKKLSEKGVKTFKIDARRTDKSFPLTSYELCCNAGEAVTNAFNELKVDIHNPDDVIKIEIRERALVYSGGKRGFGGLPVGTAGRGMLLLSGGIDSPVAGFMMASRGMTIDAIHFHSYPYTSWKRNKKLSNSRKLQANIAWE

SEQ ID NO: 46321 - DNA, 843 bp, Unknown
  Obtained from environmental sample
  misc_feature (1)..(843): n is a, c, g, or t
atggaaaccttggaaaaaatgggaaaactcacgggaagcgttacggttgattccgcgggaatggtaacgcctgaaacatttacaaaagcgcttgataaatacggcgacgtgcgttttgcggcaattatgtcggtaaataacgagacgggagcggtaacagatattgcttctttaagagatgttatcaaaaaaaggaaagaaacagcgcccatacattttcactgcgatcttgttcaggcaatcgggaaaataccgattgatatttcaaattgggaaatcgattccgcttccataagcgcccataaaatttcaggaccgcgagggattggacttttgtacctgcgaaaacctttggaagcgttttacacgggcggcggtcaggaaaaagggataaggggcggaaccgagaacacacagggagcggtagaactcgcgaattgccttgctcaatacgcggacgcaaagacagtgcggcttgagtacgagcgcgcaaaatcccgctggaaaaaactgataacctctcttgcggcaatggaacgctgtacgctcattccctcctgccgcgctcctgaagacggcagattttctccctatattttacaagccgcgtttaaagacattcccggtgaagttatggctcgcgcgcttgacgacatcggtttcgccgtttccactggctcggcttgttcatcatcgtcccccgaacgtcccgtccttacagcaatgggcgtcgatgaaaaattgagagtcgaaggtatacgcgtctctcagggctgctctactacggacgaagaaatcgaactttttttagaagcggtcgcggaggtgttaaaatttctgtaa

SEQ ID NO: 46322 - protein, 280 aa, Unknown
  Obtained from environmental sample
  DOMAIN (2)...(269): Aminotransferase class-V
  misc_feature (1)..(280): Xaa is any amino acid
METLEKMGKLTGSVTVDSAGMVTPETFTKALDKYGDVRFAAIMSVNNETGAVTDIASLRDVIKKRKETAPIHFHCDLVQAIGKIPIDISNWEIDSASISAHKISGPRGIGLLYLRKPLEAFYTGGGQEKGIRGGTENTQGAVELANCLAQYADAKTVRLEYERAKSRWKKLITSLAAMERCTLIPSCRAPEDGRFSPYILQAAFKDIPGEVMARALDDIGFAVSTGSACSSSSPERPVLTAMGVDEKLRVEGIRVSQGCSTTDEEIELFLEAVAEVLKFL

SEQ ID NO: 46323 - DNA, 324 bp, Unknown
  Obtained from environmental sample
  misc_feature (1)..(324): n is a, c, g, or t
atgaaaaaccaaacaggggcgatggatttttctgacttggaaaaagtcatcgtaacggtcaaagggcagaatgttatcattgacagcgacgtggcgagtatctacggcgtgctaacaaaagaggtaaatcaagccgtaaagaacaatcctgaaaagttccctgccggatatatcttaaaattgactgatgaagaaacaaactctttaaggtcaaaaaaaatgaccttaaagaaacccggacgcggacaacatagcaaatataattgtaaactacggctccaaaacaccagtagcccggaaaaagtgatccgcgagcccggataa

SEQ ID NO: 46324 - protein, 107 aa, Unknown
  Obtained from environmental sample
  misc_feature (1)..(107): Xaa is any amino acid
MKNQTGAMDFSDLEKVIVTVKGQNVIIDSDVASIYGVLTKEVNQAVKNNPEKFPAGYILKLTDEETNSLRSKKMTLKKPGRGQHSKYNCKLRLQNTSSPEKVIREPG

SEQ ID NO: 46325 - DNA, 783 bp, Unknown
  Obtained from environmental sample
  misc_feature (1)..(783): n is a, c, g, or t
ttgcatttacccggggaaccgcttactacggaggtgaacaccatggtgaatgaggcgacaatcagcaaactccatgacatgaaactttccgccatggcagatgcgttcaggcagcagatgcaggaaagcgctatgaatacgctttccttttccgagcggtttggccttttggtagaccaggaatgggacaccagaaaaaacaaccgcctaaaaaggcttatccaaagggccgatttccccatcggcggcgcttgcatggaggatattgaataccaaagcgaccgtaaactaagcaaagaacatttgctgcagctttcaacctgttctttcatcaatgaaaagcacaatatcattatcctcggagcgacaggcgctggtaaaacgtatctgagctgcgcctttggaatggctgcctgccgtcatttcttttcggtaaggtatatccgtttgcctgatttactggatgaactttcggtagccagaggcgagggtatattccagaaggttatgcaaggttataaaaagattgacctgcttatccttgacgaatggcttctggttccgctttcgccgactgaaagccgagacctgctggaattggtagaatcgcgctattcccgctgttcaaccattttttcaagtcaatttgacgtttccggctggcatacaaaaatttctgacgttccattggcggatgcaatactcgaccgcattgttcacaactcttataccgtgttaattggcggtgaagaatcaatgcgtaaacggaaggctgttacctaa

SEQ ID NO: 46326 - protein, 260 aa, Unknown
  Obtained from environmental sample
  DOMAIN (37)...(66): IstB-like ATP binding N-terminal
  misc_feature (1)..(260): Xaa is any amino acid
MHLPGEPLTTEVNTMVNEATISKLHDMKLSAMADAFRQQMQESAMNTLSFSERFGLLVDQEWDTRKNNRLKRLIQRADFPIGGACMEDIEYQSDRKLSKEHLLQLSTCSFINEKHNIIILGATGAGKTYLSCAFGMAACRHFFSVRYIRLPDLLDELSVARGEGIFQKVMQGYKKIDLLILDEWLLVPLSPTESRDLLELVESRYSRCSTIFSSQFDVSGWHTKISDVPLADAILDRIVHNSYTVLIGGEESMRKRKAVT

SEQ ID NO: 46327 - DNA, 861 bp, Unknown
  Obtained from environmental sample
  misc_feature (1)..(861): n is a, c, g, or t
atggctgaacactatgggacggcggttatcccgaccggcgtaaggaaaccgcaacagaaagccatggttgaacggacggtgggcatgctttccacatggattaccgccgccctccgtaaccgccagttcttttccctgtttgagctgaatcaagcaatgaggcggaaactggacgacttcaacaagaagccgttccaaaaaagaaaaggctgccgggaaagcgcctttgcagaggaacggccattcctcatcccgcttcccgacaagcctttcgaattgtcaacgtggaagatagcaaccgttcagtttaactaccatgtcgccgtcgacaagatgtattatagcgtaccgtacgagtatatcaaatacaaagtggacgtaaggcttacttcaagcatggtggaagtattctaccagaatacccggatagcctcccacaggcggttatacggctatcccggacagtacggcacggttatggagcacatgcctgaaaaacaccggcaatacacacagtggaacgccgaacggtttatcaggtgggcttccgacatcggcccctgcacgctgcaagcggtgaaggcaattatcgcttcacgaaaagtggaagaacaaagctataattctgtatttgccctgttgaaactcgccgacacgtactcggtagcccgtcttgaaaccgcctgtgaaaaggcgctttcctatactgcaaggccaagttttagaagcatcaaaaccattttgaagacaggcagcgatcggctcaaggcggaaacaacaccgccgagccccgcaaacgatacggcctttgcatttacccggggaaccgcttactacggaggtgaacaccatggtgaatga

SEQ ID NO: 46328 - protein, 286 aa, Unknown
  Obtained from environmental sample
  misc_feature (1)..(286): Xaa is any amino acid
MAEHYGTAVIPTGVRKPQQKAMVERTVGMLSTWITAALRNRQFFSLFELNQAMRRKLDDFNKKPFQKRKGCRESAFAEERPFLIPLPDKPFELSTWKIATVQFNYHVAVDKMYYSVPYEYIKYKVDVRLTSSMVEVFYQNTRIASHRRLYGYPGQYGTVMEHMPEKHRQYTQWNAERFIRWASDIGPCTLQAVKAIIASRKVEEQSYNSVFALLKLADTYSVARLETACEKALSYTARPSFRSIKTILKTGSDRLKAETTPPSPANDTAFAFTRGTAYYGGEHHGE

SEQ ID NO: 46329 - DNA, 393 bp, Unknown
  Obtained from environmental sample
  misc_feature (1)..(393): n is a, c, g, or t
atgaagtccggcgtaaaaaaatatgcggctgatgaatcgttaaaatatcccgttgtattggtgcacggaataatcgcgcacgacaggcggtcttgctttaatttttggggaagaattccgaaaatttttgaaaaaaaaggcataaaagtttatcttggaaacaccgactcatggggttcttatgattcaaacgcgaaaatattaaagtctacaatagaaaaaatattgcaaaaagaaaaaacggagaaagttaatattatagcgcactcaaaaggcggcatagactcccgatatttaatttggaactacggtttccatgacaaagtggcgagcttaaccacaatatcaacgccgcaccacgggctctgcgttagcggatcttatttacagtaa

SEQ ID NO: 46330 - protein, 130 aa, Unknown
  Obtained from environmental sample
  misc_feature (1)..(130): Xaa is any amino acid
MKSGVKKYAADESLKYPVVLVHGIIAHDRRSCFNFWGRIPKIFEKKGIKVYLGNTDSWGSYDSNAKILKSTIEKILQKEKTEKVNIIAHSKGGIDSRYLIWNYGFHDKVASLTTISTPHHGLCVSGSYLQ

SEQ ID NO: 46331 - DNA, 309 bp, Unknown
  Obtained from environmental sample
  misc_feature (1)..(309): n is a, c, g, or t
atgaaagaatttaacgcgcacatagaaaaaaatgaaaatgtatactatcaaagcctttatacgacaatgaagaattcatttgacgatttaatgttttttcacagccacaggtacttaaaaaacataagcggggaaaacgacggctttgtaaatgaaaattccgcgaaatggggagagaacgtaaaaaaaatagaaggcgcgatatcccacgcggaaatacttgattataaaatgaaaaatatattcggggtaaatatacccgatatttacataaaaatagcggaaaaattggcaaaaaacgggttttag

SEQ ID NO: 46332 - protein, 102 aa, Unknown
  Obtained from environmental sample
  misc_feature (1)..(102): Xaa is any amino acid
MKEFNAHIEKNENVYYQSLYTTMKNSFDDLMFFHSHRYLKNISGENDGFVNENSAKWGENVKKIEGAISHAEILDYKMKNIFGVNIPDIYIKIAEKLAKNGF

SEQ ID NO: 46333 - DNA, 1371 bp, Unknown
  Obtained from environmental sample
  misc_feature (1)..(1371): n is a, c, g, or t
atgcgttttgaagaattattgcactggatcgacggccaatttttacagccccaccattttcaatactttcaacgtcagaaccttgcgtttatgcaaaacaaccgggttctgtccatcccctacccctggggtcttattgattttgaagttgacgaagacagcctggccgcgggccggctggtagtcaggcgtttttccgcgattatgggggacggaaccgccttgtccatgcccggcaactgcctcctttcccctctggatttgacggaaaccctgaaggctaaccctaacgagataaccgtatatattgcattgccgcactggtcggaattcgaggcgaacatggccgaggacggagtttcggcggaaaggaggcgcttccttccccaaaaaaaacaactccgtgacgaaaataccggggacaatgaaatcatcctgatcacgcggcggctcaacgcgtggctgactacggatctggccgataacaaggacgccgtgattatgccggtattgaagctcaacgtgttaagccatgacaaggaggaaagggctctggagatcaatgaaaaatattttccaccatatatcattttctccgccgagggcgctctctacggaatcatccagggactccttgcagacctgcgccgctgccgtaacaaagccatagacatcctcacggggcttaattataaaaatgacgatctctcaggccgtaacgcgtacacggtgctgaggcttaaaaccctgaacctctacgaacagcgcataacaagcctgacggcgtcgggaagcataagcccctatcatctttatctggaactcagctccctcttgtccgagctgatggcctatgaccccgtcaacagcatccaggggataaagccttacaatcacgacgactgcgccccggtctttctggaaatcatcaaggatataagatcctttattctccgggagggaagcgtcgactttgtccgcctggatttcaagcccattgaagaaggcaaatatttgtattgtccgattaagccccaggaggtcttcaggaccgagagcgcctatcttgcgctccaatgctcaggtcaaagggacgcggtggttaaggccgtggaggaaggcgacacctttaaactgatcaacccccaatcgaagcatctgcgcatccgggggatcaaactcaacgaggagcattatccgccccgcttcctgccggttatacccaacacccgctggttcaaacttgatctggaggaatcttcgagtgtctggcgggagataaccgatgagaagggcatggtagtcgattatgtggcgggcattttccctggcctggagctttccctgtacctggcattgggagataaataa

SEQ ID NO: 46334 - protein, 456 aa, Unknown
  Obtained from environmental sample
  DOMAIN (9)...(454): Bacterial protein of unknown function (DUF876)
  misc_feature (1)..(456): Xaa is any amino acid
MRFEELLHWIDGQFLQPHHFQYFQRQNLAFMQNNRVLSIPYPWGLIDFEVDEDSLAAGRLVVRRFSAIMGDGTALSMPGNCLLSPLDLTETLKANPNEITVYIALPHWSEFEANMAEDGVSAERRRFLPQKKQLRDENTGDNEIILITRRLNAWLTTDLADNKDAVIMPVLKLNVLSHDKEERALEINEKYFPPYIIFSAEGALYGIIQGLLADLRRCRNKAIDILTGLNYKNDDLSGRNAYTVLRLKTLNLYEQRITSLTASGSISPYHLYLELSSLLSELMAYDPVNSIQGIKPYNHDDCAPVFLEIIKDIRSFILREGSVDFVRLDFKPIEEGKYLYCPIKPQEVFRTESAYLALQCSGQRDAVVKAVEEGDTFKLINPQSKHLRIRGIKLNEEHYPPRFLPVIPNTRWFKLDLEESSSVWREITDEKGMVVDYVAGIFPGLELSLYLALGDK

SEQ ID NO: 46335 - DNA, 807 bp, Unknown
  Obtained from environmental sample
  misc_feature (1)..(807): n is a, c, g, or t
atggaatatgccaaaagcgcgtcggaatccaaaagccgcttcctggcaaacatgagccatgaaatgcgtacacccctgaacgccattatcggtttggcggaactggaactgggcggcacaaacctggaaggggattcctttgttaacatggagaagatatataccgcaggtatgaacctcctggggataatcaacgatctgctcgacattaccaaaatcgaagccggaaaatttgcccttgtccccgttgagtatgaagtctccagcatgattaacgatacgctcaatttgaatatggtccgcatcggcagcaaaccgattcagtttaaccttgaaataaacggctccctgctgtcccggctggaaggcgacgaattgcgggtaaaacaaattttcaataaccttttgtccaacgccataaaatatacggtttccggctccgttaagtggaccgtttcgtgcaagcgggaagggaacagggtaaaaataatcagcacggtcagcgacacggggataggcatcagcgaggaagaccagaaaaaattatttgacgaagcgtattatcaaaccgatctcaagacaaattactatgttgaaggaacgggcctcggcttacccattaccacgaacctggtcaggcttatgggcgggactattggagtacaaagcgaacgcggcaagggatcgacattcaccgtggaattttaccagaacgcggtgacagacgaagtaatcagcgatgaaaccgcagagaacctggcgcagttccgttattcggcccaccgccgctacaagaaccagaaatga

SEQ ID NO: 46336 - protein, 268 aa, Unknown
  Obtained from environmental sample
  DOMAIN (10)...(76): His Kinase A (phosphoacceptor) domain
  misc_feature (1)..(268): Xaa is any amino acid
MEYAKSASESKSRFLANMSHEMRTPLNAIIGLAELELGGTNLEGDSFVNMEKIYTAGMNLLGIINDLLDITKIEAGKFALVPVEYEVSSMINDTLNLNMVRIGSKPIQFNLEINGSLLSRLEGDELRVKQIFNNLLSNAIKYTVSGSVKWTVSCKREGNRVKIISTVSDTGIGISEEDQKKLFDEAYYQTDLKTNYYVEGTGLGLPITTNLVRLMGGTIGVQSERGKGSTFTVEFYQNAVTDEVISDETAENLAQFRYSAHRRYKNQK

SEQ ID NO: 46337 - DNA, 702 bp, Unknown
  Obtained from environmental sample
  misc_feature (1)..(702): n is a, c, g, or t
ttggaccttcgggacctgttaggcgaaagccgcaganccctggaaaatcctgtccgcgaacttaaggaaggggagcttgataaggacaaaacccgcagggtaaaggaatttctntccggcctggaagataattttaagaccgagtcagctaacctcgaaagggaaagccttgcgcttgcttccgaacgccgccgcctggaagatggagccttccctgaggaagagcaaggttatactattgggatggaagtcctggcaggcgaaaaccgccgccgcggaaggatagtccggcttgatagaaagggctccggcgaagaagcctcctcgtggattgttgagatcggttcccttaaaatgagcttttcggaaaatgatctagtccccgtttctacagaagcccgtagcgccactatgcgtaaaagcacctcctgggcggttgatcttgcgccttcgacatcggtgcaggctgaactgcgcctgcgcggtatgaggtttagcgacgcaatggaagcgcttggcaagcagcttgacgcagccgttctgggtgggttgcaccaatttgcggtgattcacggtaagggtgaaggtatactccaaaaaggggttcacgactttcttaaaaaagatccaagggtcgcggatttctttttttcccggcccgaggtgggcggatttggaaggacggaagtaatactgaaataa

SEQ ID NO: 46338 - protein, 233 aa, Unknown
  Obtained from environmental sample
  DOMAIN (158)...(233): Smr domain
  misc_feature (1)..(233): Xaa is any amino acid
MDLRDLLGESRRXLENPVRELKEGELDKDKTRRVKEFLSGLEDNFKTESANLERESLALASERRRLEDGAFPEEEQGYTIGMEVLAGENRRRGRIVRLDRKGSGEEASSWIVEIGSLKMSFSENDLVPVSTEARSATMRKSTSWAVDLAPSTSVQAELRLRGMRFSDAMEALGKQLDAAVLGGLHQFAVIHGKGEGILQKGVHDFLKKDPRVADFFFSRPEVGGFGRTEVILK

SEQ ID NO: 46339 - DNA, 957 bp, Unknown
  Obtained from environmental sample
  misc_feature (1)..(957): n is a, c, g, or t
ttggaaaccatccgcgcaagggcgcgctacggctntgagcataggtggaatttcgcggaaagcccgacaagcgtcgggaggctggtcttaaagcaggcgaggcatccgcttttggggagccgcgccgtgcccctggatctctttatggaaaacggcgtccgtacggtgatcatcacggggccgaataccggcggcaaaaccgtagccctcaagaccctgggcctcttggcgctgatgaaccagttcggcctggcccttccggcgggagaggggacgctccttccggtctttgactgcgtttacgcggatatcggagacgagcagtccataagccagtccctttctactttttccgcgcacatgaccaacatcgccgaaattatctcttcctctaccgaacattcgcttgtgcttcttgacgaactgggatcgggaaccgacccggaagaaggcagcgcgatagcgatggcgattcttgatcattttattgaaaagaaagccagcctgattattaccacccaccacggaattcttaaaaattacggatacacgcgcgagggcgtggaaaacgcctcgatggaatttgacagccggactttatcgccgacttacaaaattgttatggggattccgggcgaaagcagggcggtcgatattgccgccaaaaacggcttccctccggcattggtaaagcaggcaaggagttatctggatgaggaacgctcggatgtttcggcgctgattgccgggctcaaggaaaagcacagggagctggaagcggcggcgaattctgcaaaaatgaaggagatgcggcttctgaaagaacgcgnccagacagacctgaaagagctgcgcntgaaacaaaaagagtaccagcttcgtcaggaaggcgttggaccttcgggacctgttaggcgaaagccgcaganccctggaaaatcctgtccgcgaacttaa

SEQ ID NO: 46340 - protein, 318 aa, Unknown
  Obtained from environmental sample
  DOMAIN (18)...(243): MutS domain V
  misc_feature (1)..(318): Xaa is any amino acid
METIRARARYGXEHRWNFAESPTSVGRLVLKQARHPLLGSRAVPLDLFMENGVRTVIITGPNTGGKTVALKTLGLLALMNQFGLALPAGEGTLLPVFDCVYADIGDEQSISQSLSTFSAHMTNIAEIISSSTEHSLVLLDELGSGTDPEEGSAIAMAILDHFIEKKASLIITTHHGILKNYGYTREGVENASMEFDSRTLSPTYKIVMGIPGESRAVDIAAKNGFPPALVKQARSYLDEERSDVSALIAGLKEKHRELEAAANSAKMKEMRLLKERXQTDLKELRXKQKEYQLRQEGVGPSGPVRRKPQXPGKSCPRT

SEQ ID NO: 46341 - DNA, 972 bp, Unknown
  Obtained from environmental sample
  misc_feature (1)..(972): n is a, c, g, or t
ttgatgaaaaagcacgttagccgaacaaagatccccggcgttcttgaggaaataggcgggttcggcggattgttcgcacttcctaagatggattatgctgaacctgtgcttgtttcagggaccgacggagtaggtacaaagttaaaaatagcgatgttagttgataaacacgatactataggaattgactgtgtcgccatgtgcgttaacgacataatctgcgcgggtgcaaagccgcttttctttcttgattatatcgcgttaggcaaaaatatccctgaaaaagttgagaaaatagtcgcgggagtcgcggaaggctgcgtacaggctctctgcgcccttgtaggcggagaaacagccgaacatcccggaataatgaaagaggacgaatacgatctggccggtttttccgtaggcatagctgaaaagtcaaaaatacttgatataaattccgtacaaccaggagatgttgtcatagggcttgcgtcatcgggagttcattcaaacgctttttctcttacgcgaaaagtttttggaatagacaataacaaaagcatacttgaaaagcattttggcgaacttggctgtacgttagctgaagttctcttaatacctacaaggatctatgttaagccgattcttgcgcttcttgaaaagacaagcatacgttccctgtgccacataacgggaggcggtttttatgaaaatatcccgcgcgcatttggtaaaaatgtcggcgccgttattcaaaagaacgcaataaatattccgccgatttttaatcttattgccgcgcaggggaaaatccctgaaagggatatgttcaatacttacaacatgggtattggaatgtgcgcgattgtacctccgcaaagcgcggacgagaccgtgcgtcttctgaaatcatccggcgaaagcgccgccgtaattggagaaattaaaagcggtatttcaggagtaattatagaatga

SEQ ID NO: 46342 - protein, 323 aa, Unknown
  Obtained from environmental sample
  DOMAIN (153)...(323): AIR synthase related protein, C-terminal domain
  misc_feature (1)..(323): Xaa is any amino acid
MMKKHVSRTKIPGVLEEIGGFGGLFALPKMDYAEPVLVSGTDGVGTKLKIAMLVDKHDTIGIDCVAMCVNDIICAGAKPLFFLDYIALGKNIPEKVEKIVAGVAEGCVQALCALVGGETAEHPGIMKEDEYDLAGFSVGIAEKSKILDINSVQPGDVVIGLASSGVHSNAFSLTRKVFGIDNNKSILEKHFGELGCTLAEVLLIPTRIYVKPILALLEKTSIRSLCHITGGGFYENIPRAFGKNVGAVIQKNAINIPPIFNLIAAQGKIPERDMFNTYNMGIGMCAIVPPQSADETVRLLKSSGESAAVIGEIKSGISGVIIE

SEQ ID NO: 46343 - DNA, 480 bp, Unknown
  Obtained from environmental sample
  misc_feature (1)..(480): n is a, c, g, or t
ttggaagccaaactccacgacgccgccgtaggcgacagcataacgttcatcttttccgagtatactgccgcctcgtcccaattgaacgactccgtaatggcccaaatcggcgccaacagcggtcagacggcgtttgtttccatgggcgacatgcgggccaaggcgctcggcatagccgacataacagtcggcaccaagtggggcgcggcgacggctattgagacggtgaacaacgctctgcaaaaggtttcgcatcagcgtagctctttgggcgcgatacagaaccgtttggagcacacgatcaagaacctcgacacagccgccgagaacttgcaggctgccgagagccgcatccgcgacgtcgacatggcgagggagatcatggagttcacgaagaacaccattctccagcaagcgtcgcaggcgatgttggcccaggcgaaccagcagccgcagagcgtgttggctcttctcaggtag

SEQ ID NO: 46344 - protein, 159 aa, Unknown
  Obtained from environmental sample
  DOMAIN (66)...(137): Bacterial flagellin C-terminus
  misc_feature (1)..(159): Xaa is any amino acid
MEAKLHDAAVGDSITFIFSEYTAASSQLNDSVMAQIGANSGQTAFVSMGDMRAKALGIADITVGTKWGAATAIETVNNALQKVSHQRSSLGAIQNRLEHTIKNLDTAAENLQAAESRIRDVDMAREIMEFTKNTILQQASQAMLAQANQQPQSVLALLR

SEQ ID NO: 46345 - DNA, 738 bp, Unknown
  Obtained from environmental sample
  misc_feature (1)..(738): n is a, c, g, or t
gtgtgcggcgagaattcagcgctgctcaattccaccgaaggcaaagtcggcaggccgcgaatcaaaccaccccaccttgcggaggtgggtctgttcctcaagcccacgctggtgaataatgtcgaatcgttcgcgcatatccccgccattatcgaaatgagcggggatgaacacctgaaaataggccatcccgactcaggggggacaaaactgatatgcctgtccggccatgttcaaaaccgcggagtctttgagattccgcttggcaagctgacactgcgggagattatctacgatcccgaattgggcggaggaattccggcaggcaggaaactcaaatttttccaccttggcggaaagagcggccaaatcggcggacccgaattgctggacaccgtgtacagttacacggacctgagaaaagcgggcctcggcgtcggctcaggcgcgatcgtagtcatggacgaggcggttccgatcctcgaatacctggaatgcgtcaccgaatttttcatccatgaatcatgcggaaaatgcataccctgccgcgagggaaacaggcaaattttgaagatactcaaaaaaatccagacttcgggcgcagatccctctgatttggatttactgcgcaggcttatccgcaccatgacagacgcgtcattctgcggccttgggcagacggccgcgaaggcccctggagagcgcgtggagacacttttaaggcggaaatcgaggtga

SEQ ID NO: 46346 - protein, 245 aa, Unknown
  Obtained from environmental sample
  DOMAIN (1)...(127): Respiratory-chain NADH dehydrogenase 51 Kd subunit
  misc_feature (1)..(245): Xaa is any amino acid
MCGENSALLNSTEGKVGRPRIKPPHLAEVGLFLKPTLVNNVESFAHIPAIIEMSGDEHLKIGHPDSGGTKLICLSGHVQNRGVFEIPLGKLTLREIIYDPELGGGIPAGRKLKFFHLGGKSGQIGGPELLDTVYSYTDLRKAGLGVGSGAIVVMDEAVPILEYLECVTEFFIHESCGKCIPCREGNRQILKILKKIQTSGADPSDLDLLRRLIRTMTDASFCGLGQTAAKAPGERVETLLRRKSR

SEQ ID NO: 46347 - DNA, 492 bp, Unknown
  Obtained from environmental sample
  misc_feature (1)..(492): n is a, c, g, or t
gtgcttgaaatactggaaacgtacgacaatgatccgcagcagcttatcgccgtattgcttgatatacagagcgcttcgggcaaacattatgtcgacaaaaaatgggcgcagtttgtatccgagcgtctggacctgcctctgaccaaagtgtacgacgtgctgactttttacgccatgttcagcaccgaacccaggggcgcgtacctcatcgaaatctgcgagagcgccccctgccgcttcggcagcgcctcgttgcgcgcgcaggagctcgtgcgctggttcgaggccgcggcggggataaaaatcggcgagacaagcgcggacggcaaaataacgctggcgcgcacaagctgcgtcggggcctgcgacatagggcctgtggcgaaaataggcgacgaggtcttcggcaaccttgacgagggaaaagtaaaagaacttgtcaggagttgtttggaaggcagtctgaaagaggtatcgcaatgtcaaaaataa

SEQ ID NO: 46348 - protein, 163 aa, Unknown
  Obtained from environmental sample
  DOMAIN (3)...(151): Respiratory-chain NADH dehydrogenase 24 Kd subunit
  misc_feature (1)..(163): Xaa is any amino acid
MLEILETYDNDPQQLIAVLLDIQSASGKHYVDKKWAQFVSERLDLPLTKVYDVLTFYAMFSTEPRGAYLIEICESAPCRFGSASLRAQELVRWFEAAAGIKIGETSADGKITLARTSCVGACDIGPVAKIGDEVFGNLDEGKVKELVRSCLEGSLKEVSQCQK

SEQ ID NO: 46349 - DNA, 450 bp, Unknown
  Obtained from environmental sample
  misc_feature (1)..(450): n is a, c, g, or t
ttgtttggaaggcagtctgaaagaggtatcgcaatgtcaaaaataaataaacttctttccaaaaacgcgcattttgatccgctctcggttgacgattatgtaaaggcgggcggttttgaagcattgaaacaagcggcggcgatgaaaagcgaggatataatcgccgaagttaaagcggcaaaacttctcggacgcggaggggccgcgtatccggcgggcagcaaatgggaacacctgcttcatattcacggaacgcccaagtacattgtctgcaacgcggacgagggcgagccgggaaccttcaaggacaagtatattcttgagaggttccccctgaaactgctggaaggaaattatatcgcgggttttacctttaaggcgaagggccggatatatctatgtgcgcggggaataccgcagcatacagaagcggctgattacagcgattaa

SEQ ID NO: 46350 - protein, 149 aa, Unknown
  Obtained from environmental sample
  DOMAIN (37)...(148): Respiratory-chain NADH dehydrogenase 51 Kd subunit
  misc_feature (1)..(149): Xaa is any amino acid
MFGRQSERGIAMSKINKLLSKNAHFDPLSVDDYVKAGGFEALKQAAAMKSEDIIAEVKAAKLLGRGGAAYPAGSKWEHLLHIHGTPKYIVCNADEGEPGTFKDKYILERFPLKLLEGNYIAGFTFKAKGRIYLCARGIPQHTEAADYSD

SEQ ID NO: 46351 - DNA, 1602 bp, Unknown
  Obtained from environmental sample
  misc_feature (1)..(1602): n is a, c, g, or t
atgcagaggcaggcagtgcctctggttttcccggaagcgccccgtgtcggtacgggaatggaagtgaagtgcgcctacgattcgggcgttcttgtaaaagcgcgcagagcgggcactgttcttcgagtaacgtcgcaggaagtaattgttaagccggaaagagcgggaaatgtaaaaccggcggcgcaggtttcgttagacgaaaacggcaacgatgtttatcagcttatcaaattccaaagaaccaatcaggacacttgtttcaatcaacgccccattgttaaagcgggcgaaaaaattgtaagcggacaggtaattgccgacggtcccgctacccaaaacggagaacttgctcttggaagaaatatccttgtaggctttatgccgtggaacgggtacaactatgaggactcgatacttatctctcagcgtgttgtaaaagatgatatgtttacttcaatacatatcanagaatttgttgtcgaagtaagggaaacaaaactcggtcccgaaaaaattacccgtgatattcccaacacatcggaaaaaagccttgataacatggacagcgagggtattatccgcgtcggcgcgaaagtgcgttccggcgacattcttgtcggcaaggtaacgcccaagagcgagaccgagacaacgcctgaattcaaactgctcaattcaatattcggcgaaaaggctaaggaagtgcgcgacacatcccttaaagtgccgcacggcatagagggaacaataattgatattcagcggcttaagcggacagagcatgacagtctaagccccggagttgacgaggtggttaaggtgttaatcgccgcaaagagaaaactccgcgaaggcgataaaatggccggccgccacggaaacaagggcgtcgtcgcccgtatcctgccggaagaagacatgccgtttatggaagacggaaccccgttggatatttgccttaccccgctcggcgttccctcgcgtatgaacataggtcagcttttggaaacagaacttggctgggcgggctccactcttaacgaatggtattccgctcccgtattccagtctccctcgacggatcaaatagaagaaaaacttaaagaagccggattgcccgtaacaagcaaaacagttctgcgcgacggcagaaccggtgaaccgtttataaatccgattttctgcggagtaatttacttccttaaacttcaccatcttgtcgatgacaaaatgcacgcgcgctcgaccggtccttactcgcttgttacgcagcagccgttgggcggaaaagcgcagttcggcggacagcgtctgggcgaaatggaagtttgggcgttggaagcgtacggcgcggcgcatactttacaggaactcctgaccattaagtctgatgatatgaccggacgttccaaaatttacgaggctattgtaaagggagagccttccactacggcgggcataccggaatcgtttaacgtgctggtgcaggaactgagggggcttgctctggacttggctatttttgataacaagaataagcaaattccccttactgaaaaagatgaagaactgattgcaaaatcaggaagtaacttctag

SEQ ID NO: 46352 - protein, 533 aa, Unknown
  Obtained from environmental sample
  DOMAIN (435)...(511): RNA polymerase Rpb2, domain 7
  misc_feature (1)..(533): Xaa is any amino acid
MQRQAVPLVFPEAPRVGTGMEVKCAYDSGVLVKARRAGTVLRVTSQEVIVKPERAGNVKPAAQVSLDENGNDVYQLIKFQRTNQDTCFNQRPIVKAGEKIVSGQVIADGPATQNGELALGRNILVGFMPWNGYNYEDSILISQRVVKDDMFTSIHIXEFVVEVRETKLGPEKITRDIPNTSEKSLDNMDSEGIIRVGAKVRSGDILVGKVTPKSETETTPEFKLLNSIFGEKAKEVRDTSLKVPHGIEGTIIDIQRLKRTEHDSLSPGVDEVVKVLIAAKRKLREGDKMAGRHGNKGVVARILPEEDMPFMEDGTPLDICLTPLGVPSRMNIGQLLETELGWAGSTLNEWYSAPVFQSPSTDQIEEKLKEAGLPVTSKTVLRDGRTGEPFINPIFCGVIYFLKLHHLVDDKMHARSTGPYSLVTQQPLGGKAQFGGQRLGEMEVWALEAYGAAHTLQELLTIKSDDMTGRSKIYEAIVKGEPSTTAGIPESFNVLVQELRGLALDLAIFDNKNKQIPLTEKDEELIAKSGSNF

SEQ ID NO: 46353 - DNA, 315 bp, Unknown
  Obtained from environmental sample
  misc_feature (1)..(315): n is a, c, g, or t
atgccgtgcggcactttaagggatgtgtcgcgcacttccttagccttttcgccgaatattgaattgagcagtttgaattcaggcgttgtctcggtctcgctcttgggcgttaccttgccgacaagaatgtcgccggaacgcactttcgcgccgacgcggataataccctcgctgtccatgttatcaaggcttttttccgatgtgttgggaatatcacgggtaattttttcgggaccgagttttgtttcccttacttcgacaacaaattctntgatatgtattgaagtaaacatatcatcttttacaacacgctga

SEQ ID NO: 46354 - protein, 104 aa, Unknown
  Obtained from environmental sample
  misc_feature (1)..(104): Xaa is any amino acid
MPCGTLRDVSRTSLAFSPNIELSSLNSGVVSVSLLGVTLPTRMSPERTFAPTRIIPSLSMLSRLFSDVLGISRVIFSGPSFVSLTSTTNSXICIEVNISSFTTR

SEQ ID NO: 46355 - DNA, 855 bp, Unknown
  Obtained from environmental sample
  misc_feature (1)..(855): n is a, c, g, or t
ttgaaagatgtaaaaattacagatcattgttatgtaatagcccgcctgccgacaaacaccgaaaaagaaaatgtaccttgtatcgggtttctttctcatcttgatacggcgagcgatgtttcgggcaagaacgttaagccccaatttgtacagaattatgacggtggaagaattgagctagctgacggtctttgccttgatcccgaaaaagagccggggcttgcagagcaaaaagggaagcctattattcacagcgacgggactacgctattgggagcggatgacaaagcggggatagcggaaattatggccgctgtggagtactttgtttccaatccgcagatagagcatgggcaggtcgagattatttttactcccgatgaagaaaccggcaagggactgcctgaatttccgcttaaggaaattaagtccgctttttgctacacggttgatggcggtcctttgggcgaaattgagagcgagtgttttaacgcatggaaagccgacatcgaattctacggcaaagtgatacatataggccatgcaaggggtatacttgccaatgcgacgcttatggcggcaacctttgctactctcttgccccgcaatgaaagtccggaagcgaccaatggttactacggctactactgcccaatggaaattaaaggcgatttggaaaaagcgaccctcgaaatttttattcgcgattttgaaaacagtgggattgaacggcggattacggctctgaaagtttttgcacaaacggtaaaaacccaatttccgggcggagaagtaattgttaaaactcagcctcaatactataatatgaaatcgaagatagatgaaaaaccctga

SEQ ID NO: 46356 - protein, 284 aa, Unknown
  Obtained from environmental sample
  DOMAIN (160)...(264): Peptidase dimerisation domain
  misc_feature (1)..(284): Xaa is any amino acid
MKDVKITDHCYVIARLPTNTEKENVPCIGFLSHLDTASDVSGKNVKPQFVQNYDGGRIELADGLCLDPEKEPGLAEQKGKPIIHSDGTTLLGADDKAGIAEIMAAVEYFVSNPQIEHGQVEIIFTPDEETGKGLPEFPLKEIKSAFCYTVDGGPLGEIESECFNAWKADIEFYGKVIHIGHARGILANATLMAATFATLLPRNESPEATNGYYGYYCPMEIKGDLEKATLEIFIRDFENSGIERRITALKVFAQTVKTQFPGGEVIVKTQPQYYNMKSKIDEKP

SEQ ID NO: 46357 - DNA, 366 bp, Unknown
  Obtained from environmental sample
  misc_feature (1)..(366): n is a, c, g, or t
gtgtttcttataccttttgtaaaaagagtcactaatgaaggatcaacggtaattactgacgattttaagggatattccgctctggatagcgatgaagaaccctatacccatttaactatcaatcattcggcaaaagagtacagtgacggaaatggtattcacaccaacaatattgagaatttttggagtattttaaaacgaggtatcattggagtataccacaagacaagctccaagtatctgcaacactatgtcaacgaggcctgttataggcggaataacggaaataatatgagcgcttttaacaggatattaaaacggtctgtaatgccgcaggcaaattacgcctggaaggtggttttttag

SEQ ID NO: 46358 - protein, 121 aa, Unknown
  Obtained from environmental sample
  misc_feature (1)..(121): Xaa is any amino acid
MFLIPFVKRVTNEGSTVITDDFKGYSALDSDEEPYTHLTINHSAKEYSDGNGIHTNNIENFWSILKRGIIGVYHKTSSKYLQHYVNEACYRRNNGNNMSAFNRILKRSVMPQANYAWKVVF

SEQ ID NO: 46359 - DNA, 627 bp, Unknown
  Obtained from environmental sample
  misc_feature (1)..(627): n is a, c, g, or t
atgcgccatgagcctggggctaacaacgagcaagcagggaaccgcgaacctccggttcggcacccttcggactcggttgaggagcatctgattgtcgatcagattgttgcggggcagaaggacctgttccgccttttagtgcggcgttacgagcagtctgtgtacggcatgggcatgggtttttttcgcaatgccgaggatgcttccgattttacgcaggaggttttcctgaaggtttaccggaacctgtcccgttttgagcacaggtcccgtttttcaacatggctgtacaaggtcgcctacaacacagcgataaacgacataaaccggagaaaagaataccggagccttgcggaagaaaacatcgcctcggaggctggcgataatgaaacgccggagcggatattgattcgcaatgcggcgcggaaagcggtcttggcttcattgcgggaattgccgcagaggtaccggatctgcgttgatttgttttttttctacgaccgttcgtatcaggagattgaagtgattaccggttttccggtaaatacgatcaaatcccatgtgttcagggcgaagaaattgttgagggaaaagcttggttttttaggaaaaggagttgaagattaa

SEQ ID NO: 46360 - protein, 208 aa, Unknown
  Obtained from environmental sample
  DOMAIN (148)...(197): Sigma-70, region 4
  misc_feature (1)..(208): Xaa is any amino acid
MRHEPGANNEQAGNREPPVRHPSDSVEEHLIVDQIVAGQKDLFRLLVRRYEQSVYGMGMGFFRNAEDASDFTQEVFLKVYRNLSRFEHRSRFSTWLYKVAYNTAINDINRRKEYRSLAEENIASEAGDNETPERILIRNAARKAVLASLRELPQRYRICVDLFFFYDRSYQEIEVITGFPVNTIKSHVFRAKKLLREKLGFLGKGVED

SEQ ID NO: 46361 - DNA, 720 bp, Unknown
  Obtained from environmental sample
  misc_feature (1)..(720): n is a, c, g, or t
ttgatgatcagatggccgagactatatagccgtatcggctggcaggataggctgcgcattaccgtagatgagggtagttttagcgagttcgattcgggcatggagtcagggaaccccatttccttccccgaatacgaagataaggtccgcgaggcgcagaaaacctgcggcacgaaggaggcggtggtaacaggccgctgtaccattcagggctatccttgtgtggtatgcgtcatggacagccgctttatgatggccagtatgggcagcgtggtcggcgagaagatcactcgcgcggtggaatacgccacggagaaacgcctgcccgtgataattttttccgcctcgggcggggcgcgcatgcaggaggggattttttccctgatgcagatggcgaaaacatccggcgcgattgcgcgtcacggaaaagccggacagctttatatctccgtagtatgcgatcccacgacgggcggcgttaccgcctcattcgccatgttaggcgatattatcatcgccgagccgggagtgacaatcggcttcgccggcaaaagggttatccaggacaccatcggcgccaccctgccggaaaaattccagacggccgaatttatttttgagcacggttttaccgacataatagtctcacggcaggaaatgcccgcgacgctcgcgcggcttatccgcatgcacggctataaaaaagaagggggtaaataa

SEQ ID NO: 46362 - protein, 239 aa, Unknown
  Obtained from environmental sample
  misc_feature (1)..(239): Xaa is any amino acid
MMIRWPRLYSRIGWQDRLRITVDEGSFSEFDSGMESGNPISFPEYEDKVREAQKTCGTKEAVVTGRCTIQGYPCVVCVMDSRFMMASMGSVVGEKITRAVEYATEKRLPVIIFSASGGARMQEGIFSLMQMAKTSGAIARHGKAGQLYISVVCDPTTGGVTASFAMLGDIIIAEPGVTIGFAGKRVIQDTIGATLPEKFQTAEFIFEHGFTDIIVSRQEMPATLARLIRMHGYKKEGGK

SEQ ID NO: 46363 - DNA, 660 bp, Unknown
  Obtained from environmental sample
  misc_feature (1)..(660): n is a, c, g, or t
gtgcggggccatgacatcgaagacctgaaacggatcaatttctcaatgccccatcccgagggctaccgcaaggctctgcgccttgttaagcaggcggaaaaattccgcaggccggtgctgtgttttattgacacgccgggcgcgttctgcggggtcggcgcggaggagcgcggccagggcgaggcaatcgcccgcaacctgtatgaattcatgatggctaaaactccggtaatgtccattgtcctcggcgagggcggttccggcggggcgcttgcaatcggcgtaagcgacgagcttgcaatgatggagaacgcgctgtactcggtgatctctcccaagggctttgcttctatattatggaaggacggttccagggaaagggaagccgccgagatgataaaaatcactgcggaagaccttaaatctttcggcatttgcgacgccataatcgccgaacctgaaggcggcgcgtccagggacgtaaaccttaccgcgacgaatattgccgcatgggtccggtctacgctggatcgcctgtcgaaagaaaactttgaaaatctgccagagaagcggtatcagaaatacaggaagtttggagtttttcaagaaagggaaacgggggaaacagggactaggggaacaggggttttttgttcgtag

SEQ ID NO: 46364 - protein, 219 aa, Unknown
  Obtained from environmental sample
  misc_feature (1)..(219): Xaa is any amino acid
MRGHDIEDLKRINFSMPHPEGYRKALRLVKQAEKFRRPVLCFIDTPGAFCGVGAEERGQGEAIARNLYEFMMAKTPVMSIVLGEGGSGGALAIGVSDELAMMENALYSVISPKGFASILWKDGSREREAAEMIKITAEDLKSFGICDAIIAEPEGGASRDVNLTATNIAAWVRSTLDRLSKENFENLPEKRYQKYRKFGVFQERETGETGTRGTGVFCS

SEQ ID NO: 46365 - DNA, 750 bp, Unknown
  Obtained from environmental sample
  misc_feature (1)..(750): n is a, c, g, or t
gtgaaagaggattccccagttataataaatgtcgtgagcgataatacatattccgcaaaacttgatgttgttatgcgtaacgccgaactgccgcaggctttgtccagcaaaataaaaacaaccgccgccgcgagccccgcttttatggcagatctccaggcctgtcttgaaggcgaccggtatttaagggcgcttgttgacaaaaaacattcccttcccacgggttacgcgcccaatgacctggttacgcttactgatggctcctacagggtcagccggggcgggcttacgctccgccgctccgcagtcgccgccctggaagaaatggcgaaagccgcccgcgccgaaggtatcactttggtcgcctcatcggcgtaccgctcttatgattatcaaactcaggtatataacaggaacgtgcgggaaatggggcaggaggccgccgacagggagtcggccagaccgggccacagtcagcaccagaccggccttgttgtcgatttcggctccattgacgattcgtttgccgtaacccccgccggccgctggattaaggccaacgcgtcgcgtttcggctggtccctgtcctttcctgacggctatgaggccgtgaccggctaccgctgggaaagctggcattaccgctatgtgggcaagggccttgccgcctttattgacaattactttgacggcatccagcaatacgcgctacgtttcctccatgaatgggaacaagcaggaaaaccctaa

SEQ ID NO: 46366 - protein, 249 aa, Unknown
  Obtained from environmental sample
  DOMAIN (95)...(219): D-alanyl-D-alanine carboxypeptidase
  misc_feature (1)..(249): Xaa is any amino acid
MKEDSPVIINVVSDNTYSAKLDVVMRNAELPQALSSKIKTTAAASPAFMADLQACLEGDRYLRALVDKKHSLPTGYAPNDLVTLTDGSYRVSRGGLTLRRSAVAALEEMAKAARAEGITLVASSAYRSYDYQTQVYNRNVREMGQEAADRESARPGHSQHQTGLVVDFGSIDDSFAVTPAGRWIKANASRFGWSLSFPDGYEAVTGYRWESWHYRYVGKGLAAFIDNYFDGIQQYALRFLHEWEQAGKP

SEQ ID NO: 46367 - DNA, 1212 bp, Unknown
  Obtained from environmental sample
  misc_feature (1)..(1212): n is a, c, g, or t
atgaacagcgtttttatgaatacttatcacaggttgcctgtaactttcgcgaggggcgaaggttcatggctttttgacatagacggaaaaaaatatctggatttaagttcgggaatagccgtaaacattctaggtcataattatccgccgttagtgcgggcagttactgagcaggcggggaaattttttcatgtgtgcaattattttcaaagcgatacaaccgcggcatttgccgaaaaacttgtgcaggccactgctcctgcgggaatgaaaaaagtttttctttgcaattcgggggcggaggccaacgagggggcgtgcaagctcgcgagaaaatattcgcttgtaaaatacgggccgggaaggcataccatcgtcacattaaaggggagttttcacggaaggacgattacgactttatccgcgaccgggcaggaaaaattccacaaggactttggtccctttaccgagggctttgcctatattcccggcaatgacgtgnaggctctggaaaaggctcttgacgcgaaaacgtgggcgggcttgcttattgaggccgtgcagggcgaaggcggcgtcaggccccagtcccaggaatttattgaaacggcggcccggctctgcgccgagcgggacatactcctcatgtttgacgaaatccagtgcggtattggccggacagggtcattcctcgcctttgaacaataccgctataacggcaaacccgtcaaagccgatctggtaacgcttgccaaaagtttggcgggcggcatacccgccggggcggtgcttgccggggaaaaagccgccggtgtttttgagtctggggatcacaacagcacctttggcggcaaccccgtcgccgccgccgcgggcctcgtggttctggaaacggtcaacaagcccgaattcctggcggaagtttcccgcaagggcgaaaagatcatggccgcgatcaaaggctggaatcaccccgcaatacaggaagtccggggacggggccttttgatcgggattgacattgacagggacgcctggccccttctggaaaaagccatcgcgggcggaataaattccgataagaaaaactgcggcctgttaattcttgccgccggaacaaaaaccctgcgcctgctcccccccctcatcatcagcgacagcgagatcgaccaggggctggagatactgaaagaaataataaataatagctaa

SEQ ID NO: 46368 - protein, 403 aa, Unknown
  Obtained from environmental sample
  DOMAIN (15)...(343): Aminotransferase class-III
  misc_feature (1)..(403): Xaa is any amino acid
MNSVFMNTYHRLPVTFARGEGSWLFDIDGKKYLDLSSGIAVNILGHNYPPLVRAVTEQAGKFFHVCNYFQSDTTAAFAEKLVQATAPAGMKKVFLCNSGAEANEGACKLARKYSLVKYGPGRHTIVTLKGSFHGRTITTLSATGQEKFHKDFGPFTEGFAYIPGNDVXALEKALDAKTWAGLLIEAVQGEGGVRPQSQEFIETAARLCAERDILLMFDEIQCGIGRTGSFLAFEQYRYNGKPVKADLVTLAKSLAGGIPAGAVLAGEKAAGVFESGDHNSTFGGNPVAAAAGLVVLETVNKPEFLAEVSRKGEKIMAAIKGWNHPAIQEVRGRGLLIGIDIDRDAWPLLEKAIAGGINSDKKNCGLLILAAGTKTLRLLPPLIISDSEIDQGLEILKEIINNS

SEQ ID NO: 46369 - DNA, 663 bp, Unknown
  Obtained from environmental sample
  misc_feature (1)..(663): n is a, c, g, or t
atgctgatggatatggaaagaatgcttctggcaagcctgcgcaggggggacaatatccacgcgaatcaaatattaagcgaattgctggatgtacaatttaaggaattaaacggaaattttaatgtttttaagcttaaagcgctggaatgggcggtattattgtcaagaactacaataaattcaaataatatcaatgacgattcgttgttggaaacaaataattgttacttgaaaagaatagaagaaagcgcgaattttcaggaggtaaaagatattcttttttgttttacggaacaaatggcggaaaggattttctcctttcagggagtgcgtcatttctcggcaataaaaaaagcggaacgctatatatgggaaaattatacaaaaaagatcggtcttaaggaaatagctgatgccgccggactttccgcgtcatatttcagttcgatttttaaagatgaaatgggagaaaatctttccaattatcttaaccgtttaagagttgaaaaggcggccgccatgcttacttcaactaatattcccataagcaaaattgcggaggcctgcggttttgaggatcaaagctggttctcaaaaatctttaaaaacaataccggttttactcccggtaagtaccgtgagcagggtaatatattaagttaa

SEQ ID NO: 46370 - protein, 220 aa, Unknown
  Obtained from environmental sample
  DOMAIN (118)...(164): Bacterial regulatory helix-turn-helix proteins, AraC family
  misc_feature (1)..(220): Xaa is any amino acid
MLMDMERMLLASLRRGDNIHANQILSELLDVQFKELNGNFNVFKLKALEWAVLLSRTTINSNNINDDSLLETNNCYLKRIEESANFQEVKDILFCFTEQMAERIFSFQGVRHFSAIKKAERYIWENYTKKIGLKEIADAAGLSASYFSSIFKDEMGENLSNYLNRLRVEKAAAMLTSTNIPISKIAEACGFEDQSWFSKIFKNNTGFTPGKYREQGNILS

SEQ ID NO: 46371 - DNA, 687 bp, Unknown
  Obtained from environmental sample
  misc_feature (1)..(687): n is a, c, g, or t
atgcctacggaagcctttaacagcaaaaacgcgttgccttccctgaaagaatctttattggaaattttattgccaataattttgatactcggttatttttccgggcggcttaccctgctggaggtaagcgctttttcggtcgtgtatatagcggttgtagaggtctttataaagaaggacatagccgtaaaagacattacaaaggttttcgcgaaagcggttccaattgtaggcggagtattggcgattctcgcgatggcaaaggccctttcctacgcgattatcgattccggcatacctgaaaacttcgcttcatggatgcagacggctgtcagttcaaagtacgtcttcctgctgcttttgaacctctccctgcttgtggtcggctgccttatggacattttttcggcgatcctcgttgtgcttccccttatcgtgccgctcggatacgcctacggcattgacccggttcatcttggaattatctttataatgaatcttgaagtcggtttcctgacaccgcccgtagggttaaacctcttcctggcaagctatcgttttgaaaagacctttgtcaaaatctgccgttatgtgcttccatatcttgggatacagttcgctgtagtattgttggtgacatacgtaccagggctgtcaggctggctgatacaaataattcaaaggtag

SEQ ID NO: 46372 - protein, 228 aa, Unknown
  Obtained from environmental sample
  DOMAIN (1)...(219): DctM-like transporters
  misc_feature (1)..(228): Xaa is any amino acid
MPTEAFNSKNALPSLKESLLEILLPIILILGYFSGRLTLLEVSAFSVVYIAVVEVFIKKDIAVKDITKVFAKAVPIVGGVLAILAMAKALSYAIIDSGIPENFASWMQTAVSSKYVFLLLLNLSLLVVGCLMDIFSAILVVLPLIVPLGYAYGIDPVHLGIIFIMNLEVGFLTPPVGLNLFLASYRFEKTFVKICRYVLPYLGIQFAVVLLVTYVPGLSGWLIQIIQR

SEQ ID NO: 46373 - DNA, 870 bp, Unknown
  Obtained from environmental sample
  misc_feature (1)..(870): n is a, c, g, or t
atgttaaaaataattgcaataaatttaaaaaatatatatcttaaaattaagaggatatttatggtaacagtacggatggattcgcttatcaaatcaatagccacggctttggatattgttgaaggaagccttgtgggggcaagtaccaatcacggtaagcgaattgccgttctttgtgcgaaaatgggaaaggtactgggaaaaaaaacggaggaaattaccgccgtgacgatttgcgcattactccatgacagcgctcttactgaatatattctttcagagaaaataaacggagaacatgatcagtccatgaaaaaacactgcgaaattggacagcggaatgtggatgatctttgttttaagacaaatgtaaaagattttgttctatatcaccatgaacgcgccgatggtatgggacctttcgggatacacgaaggagaaggtccgcttgaagctgaacttattaccattgccgattcaattgatgttacctggcatctgcaaaggctggagcctgaaggattgcctgttatcagagacgtaattgttaaagaaaccggaaaacgctacagcagaaaagccgcgcaaacaatgctggaaattctcgattggcctacggttttgtctcttaagacgatgtcattaaacaaacagcgtcggatgccttatctccctggactgtcgaggtacaaacagataccatttttggcctggccggttttgttgccaaaatcatcgactacaaatctctttttacccgcctgcactcaacccaaattgccaacaaagcctggtttatggggcaatactacaagcatgattcacaagaactggcggaactgtatcttgcggcgtcccttcacgatctag

SEQ ID NO: 46374 - protein, 289 aa, Unknown
  Obtained from environmental sample
  DOMAIN (48)...(164): HD domain
  misc_feature (1)..(289): Xaa is any amino acid
MLKIIAINLKNIYLKIKRIFMVTVRMDSLIKSIATALDIVEGSLVGASTNHGKRIAVLCAKMGKVLGKKTEEITAVTICALLHDSALTEYILSEKINGEHDQSMKKHCEIGQRNVDDLCFKTNVKDFVLYHHERADGMGPFGIHEGEGPLEAELITIADSIDVTWHLQRLEPEGLPVIRDVIVKETGKRYSRKAAQTMLEILDWPTVLSLKTMSLNKQRRMPYLPGLSRYKQIPFLAWPVLLPKSSTTNLFLPACTQPKLPTKPGLWGNTTSMIHKNWRNCILRRPFTI

SEQ ID NO: 46375 - DNA, 498 bp, Unknown
  Obtained from environmental sample
  misc_feature (1)..(498): n is a, c, g, or t
atggggcaatactacaagcatgattcacaagaactggcggaactgtatcttgcggcgtcccttcacgatctaggcaaattggcaattccctctgaaattctggagaaacccggcaaactttctgatgaagagtttgatattatcaagggtcatgttcgcatgacctgggagcttcttggcgatattgaaggattagggactatatgccaatgggcctccaaccaccatgaaaaactggacggcagtggatacccttttgggaagaaggcccctgaactggattttaattcccgcctgctaacctgccttgatttgtaccaggcgataagcgaagaaaggccttaccaccccaggcgcaatcacggagataccatcgcgatacttaacgaaatggcggatatgggaaaaatagacggggatattgtcaaagacatggatgtcgctcttgccccatacgacaataaagatttgccgccgcctgatggttgtggactttaa

SEQ ID NO: 46376 - protein, 165 aa, Unknown
  Obtained from environmental sample
  DOMAIN (4)...(109): HD domain
  misc_feature (1)..(165): Xaa is any amino acid
MGQYYKHDSQELAELYLAASLHDLGKLAIPSEILEKPGKLSDEEFDIIKGHVRMTWELLGDIEGLGTICQWASNHHEKLDGSGYPFGKKAPELDFNSRLLTCLDLYQAISEERPYHPRRNHGDTIAILNEMADMGKIDGDIVKDMDVALAPYDNKDLPPPDGCGL

SEQ ID NO: 46377 - DNA, 471 bp, Unknown
  Obtained from environmental sample
  misc_feature (1)..(471): n is a, c, g, or t
gtggagatcgaagaggcgttcagggaataccgggactccatgatacgggcaatgactttgttttccggagacgaggaagcggcccttgacggggtttcccacgcgtttacccaggcgctggtcaacaagctcatgctggaagccatgcccgaaccagccatgaaggcgtggctttacgcggcagcccgtaacgctgtggtggacatcaagcgccgtgaaacccgcttttaccggtttgccggggagaatgggaactttgaaattgccgatccccggcccgatgatccgctgggaaaaaccatagcggaactgctgattgaaaagctccccgaatccctccgcgtgccagtggaactgaaatactacggcggcatgaacgctacggaaatcgggaaggcaatgaacgttccggctgctacggtgcgaacaaggttacgtgctgcaatggggcagttaaggggaaaaaattaa

SEQ ID NO: 46378 - protein, 156 aa, Unknown
  Obtained from environmental sample
  DOMAIN (99)...(152): Sigma-70, region 4
  misc_feature (1)..(156): Xaa is any amino acid
MEIEEAFREYRDSMIRAMTLFSGDEEAALDGVSHAFTQALVNKLMLEAMPEPAMKAWLYAAARNAVVDIKRRETRFYRFAGENGNFEIADPRPDDPLGKTIAELLIEKLPESLRVPVELKYYGGMNATEIGKAMNVPAATVRTRLRAAMGQLRGKN

SEQ ID NO: 46379 - DNA, 1458 bp, Unknown
  Obtained from environmental sample
  misc_feature (1)..(1458): n is a, c, g, or t
gtgcgaaataaaaacaaaaagtttagtaatcttcgcaataaaaaatacatggttccggtggatattcttaacgaataccccgacggcgaatactgggtaattgatcaagctacaagggacgcggctattgcgttaaaggaaactcttaacgaatttaatattcaagcggaagttacaggcataagaaaaggtcccgtaattacaatgtttgagattcttcccgctcccggcgttaaactttcaaaaattgtcggcttacaggacaatatcgccctgcgtcttgccgcttcgtccgtgcgcattgtcgcccctattcccggaaaacacgccgtaggtatcgaagttcccaacgcaaaacgtaatattgtttcttttaaagaaatcattgagaacgagctgcagcgcgaagagaaaaaaatggagattcccgtcgttatgggaaaagacatcacaggggaagcgcagacagtcgatcttgttcaaatgccgcacctgttaatcgcgggcgctaccggttcgggaaagtcagtctgtgtaaactccataatactttcaatactgtatcagcttcatccggcggagtgcagacttatgcttatcgacccaaaaattgttgagttgaaattgtacaacgatatcccccatttattgacgccggtaattaccgattcaaaaaaagcgtttcaggctttacaatactgtatttatgaaatggagagacgctatgcctgccttgactcaatgggcgtgcgcgatattcgcagttacaacaaacgcgtcaaagaaaaaaatgtcgcgcaggagtatatgccctatatagtcgttgtaattgacgaatacgccgatttgatgacaactaccggaaaggaattggagtccaccgttgcaaggcttgccgctatgagccgcgccgtcggcattcaccttgtgcttgcgactcagcgtccttcaatcgacgtaattacggggcttatcaaggcaaatattccaagccgtatcgcgttcatggtcgccagtaaaacggacagcagaatcataatcgacatggttggcgctgaaaaacttttaggcaagggcgatatgctttattccggcgttgtcgatcctttcccgattcgtatgcagggcgcgtttatttccgaagaagaagtagaatcggttgttgaatatgtaaaatcattcggcgagcccgattacatagacgatgaaattttctttgaagaagaagaggaagactcaggcgcttccctgttctccgacggcgatgatccgttatacgaaaaagcgctggaaatagtttatcagcagggcaaggcaagcgccagttttattcaacgcagattaaaaatcggctttaatcgcgccgcaaggcttattgatgaaatggaacatcacggagtggtaggtcccgctaacggaagcaagccaagagaactggtaagagacttcagcgcgtaa

SEQ ID NO: 46380 - protein, 485 aa, Unknown
  Obtained from environmental sample
  DOMAIN (124)...(318): FtsK/SpoIIIE family
  misc_feature (1)..(485): Xaa is any amino acid
MRNKNKKFSNLRNKKYMVPVDILNEYPDGEYWVIDQATRDAAIALKETLNEFNIQAEVTGIRKGPVITMFEILPAPGVKLSKIVGLQDNIALRLAASSVRIVAPIPGKHAVGIEVPNAKRNIVSFKEIIENELQREEKKMEIPVVMGKDITGEAQTVDLVQMPHLLIAGATGSGKSVCVNSIILSILYQLHPAECRLMLIDPKIVELKLYNDIPHLLTPVITDSKKAFQALQYCIYEMERRYACLDSMGVRDIRSYNKRVKEKNVAQEYMPYIVVVIDEYADLMTTTGKELESTVARLAAMSRAVGIHLVLATQRPSIDVITGLIKANIPSRIAFMVASKTDSRIIIDMVGAEKLLGKGDMLYSGVVDPFPIRMQGAFISEEEVESVVEYVKSFGEPDYIDDEIFFEEEEEDSGASLFSDGDDPLYEKALEIVYQQGKASASFIQRRLKIGFNRAARLIDEMEHHGVVGPANGSKPRELVRDFSA

SEQ ID NO: 46381 - DNA, 1212 bp, Unknown
  Obtained from environmental sample
  misc_feature (1)..(1212): n is a, c, g, or t
atggccgagtttccgaacagattccaaatcattgcctcaacgtatgcaaaggcaaatgtggacttcacgcacggaaagggtgctttgctttttgatagcaaagggaaggaatacttggattttgcgagcggaatatccgtcaatgcgcttgggcattctcacccagccataaaaaaagccataaaggagcagagcgaaaatttttcgcatatttcaaacttatttccaaactcaccgcagataaagctcgctcaaaaaatgctttcgctgaccaaattcggaaaagaaaaaggcaaagcctttttttgcaattctggcacagaggcaaacgaggccgctataaaattcgcgagaaaatattttcacagcaaaggcgaaaaaaaacgtgttgaaataataacatttgaaaacagttttcacggacgcacctatggcgcgcttgccgcaacagggcaagaaaaactgaaagatggttttggttcaatgcctgccggattcaaacacgtgaaatggaacaatgcagaggaattgcaaaaggcagttggcaaaaacactgcggctataatgcttgagcctgtggttgcggaaggcggaattttgatgccttcaaaaaaattcatagagacgataaaccagcttaaaaagcaaagcggctgcctaattatagcagacgaaattcaaattgggtttgggcgttgcggagctatttcttgctcggagctttttggcataaatgcagatattacaacttgggcaaaatctctgggtggtggcttgccacttggcttggtgcttatgagcgcaaaaattgccgaatgcctaaaaccaggcgaccacggaaccacctttggcgggaaccccattgcttgcgctgcgggtcttgctgttttggaaattatttcaaagcacaaagttctctcaaatgtaaaggagcgttctttgcagttaaaaaatggcttggaagtccttgcaaaaaaacatccttgccttggcaaggttcgcggctgcggcttgctgcttggaattgaatgcaaaaagcctgtggcagatattattgccgcttgcagggaacaaggtttgctcattttgcgcgccggaacagacgttttgcggtttttgccaccgcttattgtaacaaaggcacaagtaaatgaggctttgaggaaattggataagagtatttttactatatttacacccacggctctgtag

SEQ ID NO: 46382 - protein, 403 aa, Unknown
  Obtained from environmental sample
  DOMAIN (36)...(390): Aminotransferase class I and II
  misc_feature (1)..(403): Xaa is any amino acid
MAEFPNRFQIIASTYAKANVDFTHGKGALLFDSKGKEYLDFASGISVNALGHSHPAIKKAIKEQSENFSHISNLFPNSPQIKLAQKMLSLTKFGKEKGKAFFCNSGTEANEAAIKFARKYFHSKGEKKRVEIITFENSFHGRTYGALAATGQEKLKDGFGSMPAGFKHVKWNNAEELQKAVGKNTAAIMLEPVVAEGGILMPSKKFIETINQLKKQSGCLIIADEIQIGFGRCGAISCSELFGINADITTWAKSLGGGLPLGLVLMSAKIAECLKPGDHGTTFGGNPIACAAGLAVLEIISKHKVLSNVKERSLQLKNGLEVLAKKHPCLGKVRGCGLLLGIECKKPVADIIAACREQGLLILRAGTDVLRFLPPLIVTKAQVNEALRKLDKSIFTIFTPTAL

SEQ ID NO: 46383 - DNA, 525 bp, Unknown
  Obtained from environmental sample
  misc_feature (1)..(525): n is a, c, g, or t
gtgggtgtaaatatagtaaaaatactcttatccaatttcctcaaagcctcatttacttgtgcctttgttacaataagcggtggcaaaaaccgcaaaacgtctgttccggcgcgcaaaatgagcaaaccttgttccctgcaagcggcaataatatctgccacaggctttttgcattcaattccaagcagcaagccgcagccgcgaaccttgccaaggcaaggatgtttttttgcaaggacttccaagccattttttaactgcaaagaacgctcctttacatttgagagaactttgtgctttgaaataatttccaaaacagcaagacccgcagcgcaagcaatggggttcccgccaaaggtggttccgtggtcgcctggttttaggcattcggcaatttttgcgctcataagcaccaagccaagtggcaagccaccacccagagattttgcccaagttgtaatatctgcatttatgccaaaaagctccgagcaagaaatagctccgcaacgcccaaacccaatttga

SEQ ID NO: 46384 - protein, 174 aa, Unknown
  Obtained from environmental sample
  misc_feature (1)..(174): Xaa is any amino acid
MGVNIVKILLSNFLKASFTCAFVTISGGKNRKTSVPARKMSKPCSLQAAIISATGFLHSIPSSKPQPRTLPRQGCFFARTSKPFFNCKERSFTFERTLCFEIISKTARPAAQAMGFPPKVVPWSPGFRHSAIFALISTKPSGKPPPRDFAQVVISAFMPKSSEQEIAPQRPNPI

SEQ ID NO: 46385 - DNA, 927 bp, Unknown
  Obtained from environmental sample
  misc_feature (1)..(927): n is a, c, g, or t
ttggcgcaggcgcttgaactttctgcaaagcacattaaacgcttttcggacaaacagagagaacaattcgccgattttcaatttgaaatggagccggggcttgttacaggccagcgtatactccccatagaaagagcggcaatttatgtccccggcggacggttccccctgttttcttcggtactcatgtgcatgattcccgctttttgcgccggtgtggaagaagtgatattttcatcgccgcctacgaaagacggtattcccgataaaaaaatactcgctgccgccgcaatcgccgctgaagtcgcgggtaacaataaagtacgcattttcgctatcggcggcgctcaggcgatagccgctctcgcgcttggcactaaatctgtcccgcgcgttgatgttatcgccggacccggcaataaatttgtcgccgccgccaagcagcaattattcggcgaagtagggatagattttatagccggtcccaccgatgtgcttgttatcgcggacgggcaggctgatggcggcgatattgaaaagacggccgatcttgtcgcggcggatatgcttgggcaggcggaacatgaccctgacgcgagggcgcgggcgttggttccaagtaaagaacttgccgaaaaaattcttgcggctattgaaagaagaattaaaaaactgccgacggaaaaaaccgctcgcgcttctttggatgcgggcgggttaattgttgtttatgaaacacgggaagaggcgatacgtatagcgaacattatcgcgcctgaacatcttgagcttcaaattgccgatgcggataattggattccaaagttaaaaaattacggctctctttttataggaagcctgtgcgcggaagttctcggcgattattcggcggggattaaccacactctgcctactcggccgatctga

SEQ ID NO: 46386 - protein, 308 aa, Unknown
  Obtained from environmental sample
  DOMAIN (1)...(306): Histidinol dehydrogenase
  misc_feature (1)..(308): Xaa is any amino acid
MAQALELSAKHIKRFSDKQREQFADFQFEMEPGLVTGQRILPIERAAIYVPGGRFPLFSSVLMCMIPAFCAGVEEVIFSSPPTKDGIPDKKILAAAAIAAEVAGNNKVRIFAIGGAQAIAALALGTKSVPRVDVIAGPGNKFVAAAKQQLFGEVGIDFIAGPTDVLVIADGQADGGDIEKTADLVAADMLGQAEHDPDARARALVPSKELAEKILAAIERRIKKLPTEKTARASLDAGGLIVVYETREEAIRIANIIAPEHLELQIADADNWIPKLKNYGSLFIGSLCAEVLGDYSAGINHTLPTRPI

SEQ ID NO: 46387 - DNA, 1008 bp, Unknown
  Obtained from environmental sample
  misc_feature (1)..(1008): n is a, c, g, or t
atgattaacgaaaatgatgccggcgcgaaatctgatgttttgggaacggattttatcagcgaatttataaaagaagatttggcggcgggaaaattcaaccatgtgcatacgcgctttccgcccgagcccaacggctggctgcatatcggccactgtaaggcgttctacatcgactttagcatggcggagcgttttggcggcaaatgcaatttgcgctttgacgacaccaatcccgagaaagaagatatatcctatgtcgaggcgatcaagcgcgatgttaaatggatgggttatgactgggaggacagggaatattacgcgtcggactattacgagtacttgtacgatttggcggtgaagattatcaaaaagggaaaagcctatgttgacgatctttccgatgttgaaatgagcgaataccgcggaaccgctgttcaagataaaaataacataaccgaaacgccgccgggcaaaaacagcccctaccgcgaccgttctattgaagaaaaccttgaccttttcgcccgtatgcgagcaggcgaattccccgacggggcaagaaccctgcgggcaaaaatcgacatggcccacccgaacctgcttatgcgcgatcccgtcatgtaccgcatacgccgcgagacccattaccgcaccggcaacagttggtgcatctatcccatgtacgatttccagcaccctttgtccgacgcgaaagagggcattacccattccctctgctctcttgaatacgagatacaccggcccctgtacgaatggtttatccgcgaggctgaggttttcccctcgcggcagatagagtttgcccgccttaacctgagccatactgttatgagcaaacgctggctgttgaagctggtgcaggacaagcgggtttccggctgggacgatccccggatgcccacaatagcgggcctgcggcgcaggggctatacaccgcaggcaatacggaactttgtttcccagatcggcattgccaaaaccgactag

SEQ ID NO: 46388 - protein, 335 aa, Unknown
  Obtained from environmental sample
  DOMAIN (34)...(335): tRNA synthetases class I (E and Q), catalytic domain
  misc_feature (1)..(335): Xaa is any amino acid
MINENDAGAKSDVLGTDFISEFIKEDLAAGKFNHVHTRFPPEPNGWLHIGHCKAFYIDFSMAERFGGKCNLRFDDTNPEKEDISYVEAIKRDVKWMGYDWEDREYYASDYYEYLYDLAVKIIKKGKAYVDDLSDVEMSEYRGTAVQDKNNITETPPGKNSPYRDRSIEENLDLFARMRAGEFPDGARTLRAKIDMAHPNLLMRDPVMYRIRRETHYRTGNSWCIYPMYDFQHPLSDAKEGITHSLCSLEYEIHRPLYEWFIREAEVFPSRQIEFARLNLSHTVMSKRWLLKLVQDKRVSGWDDPRMPTIAGLRRRGYTPQAIRNFVSQIGIAKTD

SEQ ID NO: 46389 - DNA, 579 bp, Unknown
  Obtained from environmental sample
  misc_feature (1)..(579): n is a, c, g, or t
atgagtcgaggtcatgcgtccggttttgtcctgcccggtgaatatcgtaagccggcggaacgcctttttcccgaaaaagggtacttaaagggacagaaaccggaattaaagtccgttgccgcttttgcgaaatctctggggatagacgttgattatcaacgtttgcttgcccttgataaaaacagcggggaattgcggacatttatagaacattttcagaataatcttgaccttttaatccaaaaaacatgggtcgaaaaagccgaagaaagacgcaaggatcatcttcaggataaaataccggtttttatgggttttatcgaaaagggggattatcctaaggcaatagaacatttcgctttgatccttgaagaattggcttttctctttttcggcattcaaagcagtaaaaacgactttaccgaatatactttccgcattgacgcgcaaatggggcttttttggtggtacggcgcaaggctttccacgctgaaagatataggcgaaacaatcagcatggatgataaaacattgtgggcaattttactccttggcctgtgttatctgacaaatttttaa

SEQ ID NO: 46390 - protein, 192 aa, Unknown
  Obtained from environmental sample
  misc_feature (1)..(192): Xaa is any amino acid
MSRGHASGFVLPGEYRKPAERLFPEKGYLKGQKPELKSVAAFAKSLGIDVDYQRLLALDKNSGELRTFIEHFQNNLDLLIQKTWVEKAEERRKDHLQDKIPVFMGFIEKGDYPKAIEHFALILEELAFLFFGIQSSKNDFTEYTFRIDAQMGLFWWYGARLSTLKDIGETISMDDKTLWAILLLGLCYLTNF

SEQ ID NO: 46391 - DNA, 972 bp, Unknown
  Obtained from environmental sample
  misc_feature (1)..(972): n is a, c, g, or t
ttgatggccgagactttgggacagtattatctttacaccgccgttgccataaatgatctcgacgggaattttatcggcgtccttcgtttttccagattgatacctgacttttttacacgtttattaagttcaaccatccccttccttgtttttggctttttattaattatgggaatctgcctgagcctttatcatttcacaagataccagtcgcatttggttcaggaaaaacttaacgcggaactggaaaagaaaaccgccgagcttaaattatcaattaaaaaagccgaagcggaaagccgccactgcgaggcgatattaaacaatatgtttgacggcgtattaaccctggacagcaggttaaatattatccacgcaaaccagcggctttgctccctgtttgacactaaaaaagacgcccgcagcctgtcacttatcgaattcagccattccgccgaattggaagaagcagccaagatagttctttcaacagggcggccttatgaatttatattaaagcgctataacggaaagctccagcagtttcagggatatgccgcgccgcttgacacgggctctcttacccctcccggcatagtaatggtgttaggcgacatcagccgacttgtaaaacttgagcagattcgcaaggattttgccgccaatgtctcccatgaacttaggacgcccattcaggtgatacagggctttgccgaaaacatacttaacgcccagccggaagaaaacgagcagattcgtcattttgccgagattatcagaaaaaacgccaaagcgatggacaatcttacaagcgatctgttaactttggtcagcctggaaaaccccgacgtggaacgtcccccgctgggagaagcggttgtgagtagtattcttaaagaggccgtagatatggttgcggtctcggcaaaggaaaaaatattttcatttccgtttcctgccagccctgaataa

SEQ ID NO: 46392 - protein, 323 aa, Unknown
  Obtained from environmental sample
  DOMAIN (215)...(282): His Kinase A (phosphoacceptor) domain
  misc_feature (1)..(323): Xaa is any amino acid
MMAETLGQYYLYTAVAINDLDGNFIGVLRFSRLIPDFFTRLLSSTIPFLVFGFLLIMGICLSLYHFTRYQSHLVQEKLNAELEKKTAELKLSIKKAEAESRHCEAILNNMFDGVLTLDSRLNIIHANQRLCSLFDTKKDARSLSLIEFSHSAELEEAAKIVLSTGRPYEFILKRYNGKLQQFQGYAAPLDTGSLTPPGIVMVLGDISRLVKLEQIRKDFAANVSHELRTPIQVIQGFAENILNAQPEENEQIRHFAEIIRKNAKAMDNLTSDLLTLVSLENPDVERPPLGEAVVSSILKEAVDMVAVSAKEKIFSFPFPASPE

SEQ ID NO: 46393 - DNA, 642 bp, Unknown
  Obtained from environmental sample
  misc_feature (1)..(642): n is a, c, g, or t
atgagcgatccgccgattccctgcgacaaaggcaaacggcgggacagcctgcaccaggcccttgccctgcaccatggggataactggtttacgatgttcaaggatcagcgatcgaacctgtggtacataagatcgtcaaaggcgataagcgaaaacgggttctttgtagcgcttaaagggtatgaggcccaggtcttcattgacatatacgaggttgaggatgacgcaaaaggccgctgggcgcgtctgcatcatgacttgcagggccgcggagtgagcgatccgcaatcggctatcatggatatttatcttggcgacctgtattaccgtttcacaaaactcctcaagccggagcttgtcaaccagttgcacggcttctttgtcgcgggtactgccgggaaacaaaaggcgcaggcctttgttgaatcgcttaaagagacggcggagaaatattttgaaacggcagcccactttatcaagggagcggatgggaaatttgaaccatggacagggaacagggaactcgccgacnaagttggtgcgggaacagggaacaaagggaagaaagaggcaaaaacgtcagctgtgtcagaaaagaagagtcagtcacggggccctgggaggattcaaggggtatgttga

SEQ ID NO: 46394 - protein, 213 aa, Unknown
  Obtained from environmental sample
  misc_feature (1)..(213): Xaa is any amino acid
MSDPPIPCDKGKRRDSLHQALALHHGDNWFTMFKDQRSNLWYIRSSKAISENGFFVALKGYEAQVFIDIYEVEDDAKGRWARLHHDLQGRGVSDPQSAIMDIYLGDLYYRFTKLLKPELVNQLHGFFVAGTAGKQKAQAFVESLKETAEKYFETAAHFIKGADGKFEPWTGNRELADXVGAGTGNKGKKEAKTSAVSEKKSQSRGPGRIQGVC

SEQ ID NO: 46395 - DNA, 1323 bp, Unknown
  Obtained from environmental sample
  misc_feature (1)..(1323): n is a, c, g, or t
atgacatacaagatatcttacaacttggacggcgggaaattggaagacggcgtcacaaaccccgtgacctacaccgcggagagcggcggcttcatgctgaacaatcccgttaaagccggattagagttcctaggctggacggatcttaacaagagcgccaaggacagagacactgtgctgtacgtctacttcgagtacggcaacaccgaaggcggcgacagaagcttcaaagccgtatggggcaacgcggtctcctatacagtagagttcgacgcgaacgccaacggcgaggtgaagaaccccgagccggccaagacgggcaccggcggcaggctgacgactatgccgacgttgactcgcgacggttacgccttcaacggctggttcacggagaaagagggcggcaggcaggtgaccacaagctcgttgttcaccagcgacacgaagatctacgcccagtgggacacgacgttcacaataacgttcaacgccaacggcggcgcggtgtcgccagcgacgttgaagacggccaccggcaggaagctgccgtacctgcccaccgcgtatagggacggatacgtgtcggaaggctggttcaccagcgccacaggcggtacaaaggtgagtaacagcacagagttcaacggcgacgctactctctacgcccgttgggctgtagcatccgccggtattctgacatacagatcgggcgccaacggcacgctgtctgccactgtagacggtacatcggtgccatccggcgcaaccgttcaaggcggcaagagcgtaatatttaccgccaccccgatagacggctacggagtagtgcgctggacggtaaacggcgttgtactaatggactcgtcgagaacgtacacgttatggggtctatccggcgctacggaggtgatggtaactttcgacgcgatctacgtatcagtgaagacacccgacagagtgatccccggaaagggcgccgaaaccgaggccgcgatagtagtcccgtccgcgttgtcggcggagtttgcggccggtccgaaccctgtggtgaggtcgtcgtccaaagaagtaaaattcttctacaggggcgcatcagcaaagagcgtcacgctgctgatatacgacgagtccggcaaagtagtccgcaagataaccaacccgccgcatgtcgcaagtgtcaacggcaggagagtcgttggcgtctgggatctgaaagacgctaggggccgcgcggtgtctgaggggacgtacttggtgcgcggtgtggtgaagggtgtcggcgggaggtcggagcgggtgtcggtggtcgtgggggtgaggtag

SEQ ID NO: 46396 - protein, 440 aa, Unknown
  Obtained from environmental sample
  misc_feature (1)..(440): Xaa is any amino acid
MTYKISYNLDGGKLEDGVTNPVTYTAESGGFMLNNPVKAGLEFLGWTDLNKSAKDRDTVLYVYFEYGNTEGGDRSFKAVWGNAVSYTVEFDANANGEVKNPEPAKTGTGGRLTTMPTLTRDGYAFNGWFTEKEGGRQVTTSSLFTSDTKIYAQWDTTFTITFNANGGAVSPATLKTATGRKLPYLPTAYRDGYVSEGWFTSATGGTKVSNSTEFNGDATLYARWAVASAGILTYRSGANGTLSATVDGTSVPSGATVQGGKSVIFTATPIDGYGVVRWTVNGVVLMDSSRTYTLWGLSGATEVMVTFDAIYVSVKTPDRVIPGKGAETEAAIVVPSALSAEFAAGPNPVVRSSSKEVKFFYRGASAKSVTLLIYDESGKVVRKITNPPHVASVNGRRVVGVWDLKDARGRAVSEGTYLVRGVVKGVGGRSERVSVVVGVR

SEQ ID NO: 46397 - DNA, 786 bp, Unknown
  Obtained from environmental sample
  misc_feature (1)..(786): n is a, c, g, or t
gtgagttctagcgaagagatttttgttccgagcacccctgagcagcgggtgctttacgactactatcaagctaggggaaaggatatggtagggttgatagacaaaaaagacatggatggtattatgacaagcgaaaaactttgccgcaatgacataaccaataaaaatcaagcggttaaatgcactaaagaaaatttctttgaatttaagataataaagagcaatcaattgaatgcttttgcggtgccgggtggttatgtatatttttacactcaaatattaaaaccgaacaaaggttttcagagtgaaagcgagcttatgagcgttatggggcacgagattggtcatgtggtgttgcaccacagcagggatagaatagttaaggcggttggtgcctctgctattatacagttgcttttaggagatggcatgggtgcgcttttagcacaacttggtaccagcttttggcttacgaaaaacggtcaagaagacgaatctcaatccgattcaatgggtttttattacaccagtaaaatgggaatatcttcgcaaggtttaagcgacttttttgccagagggttgcaaagctataataaagaaacgggattctgtagcgaaaaagcggaagcttctcttacagatgtattcagcacccatcctccatcttgcaaaagggtgaacgccaataggacaagaataataacgtctggtcaagatttcccaatggatttacataatgaccccaaaccgtttacacagcttgttatagatgcaaggcttccttga

SEQ ID NO: 46398 - protein, 261 aa, Unknown
  Obtained from environmental sample
  DOMAIN (52)...(234): Peptidase family M48
  misc_feature (1)..(261): Xaa is any amino acid
MSSSEEIFVPSTPEQRVLYDYYQARGKDMVGLIDKKDMDGIMTSEKLCRNDITNKNQAVKCTKENFFEFKIIKSNQLNAFAVPGGYVYFYTQILKPNKGFQSESELMSVMGHEIGHVVLHHSRDRIVKAVGASAIIQLLLGDGMGALLAQLGTSFWLTKNGQEDESQSDSMGFYYTSKMGISSQGLSDFFARGLQSYNKETGFCSEKAEASLTDVFSTHPPSCKRVNANRTRIITSGQDFPMDLHNDPKPFTQLVIDARLP

SEQ ID NO: 46399 - DNA, 1203 bp, Unknown
  Obtained from environmental sample
  misc_feature (1)..(1203): n is a, c, g, or t
ttgaggctctattttgatgcgacttgcccgctttgccgctcgtttgcaaagcttttgcgaaagcacctgagcgggcaaattgaacttttggaactgccagacggcgaacaagcaaaagattttaagctggaactttcaaacggcgaatttttatacggcaaagaagctatagacgctttggaaaaggaagtccctaaggttcgggattttttttggatgctgcccgattcctataaagggaaggctctgcacagcacttacgctttggctaaatttggacgctggtttttttatctttttagaagaggcgatgcgatgagtgcggacataaagaatagggtaaaagagctaacctcaaaactcaacgaggcaaaccgcctttactatcagggcaaagcaaccctcttttccgattatgaatacgacttggctttaaaagaattggaaactttggaaaaagaacatcccgaactaaagcgagcggactccccaacacagacggttggcaaggaaaccgcgagcgattttgcgcgcatagcccacaaaaccccaatgctctccattgcaaacgcctacagcgaagcagaggttttggactgggaacgccagcttcacgggcttatcgagggaaaattggaatatgtgtgcgaggtgaaaatagacggaaccagtatgtctcttttgtataaaaacggaaaattgctcagagggcttacaaggggagatggcgaatctggcgatgatgtgaccgcaaacataaaaaccataaaggacatccctcaatttttggcggacgccccaagcggcgagtttgaggttcgtggcgaagtgtatatggagcacagcacctttgaaaaattaaacgaagaactactcgctcagggcaaaaccccctatgcaaatcccagaaacaccgccgcgggcagcttaaaactcaaagacccggaagaaaccgcaaaaagagaattgagattcttcgcataccaagtcctaatcaactctccactctcaactctcaactctcaactctcaactctcaactctccactctccactctccactcntcactacatagccaaaatctaagtttgctaaaaaaattaggttttaatgtttttaaattttttgtaagggattccgttcaggggatttttgaagcacgggatcattttgacgggttgcggcagagtttgcccttttga

SEQ ID NO: 46400 - protein, 400 aa, Unknown
  Obtained from environmental sample
  DOMAIN (108)...(400): NAD-dependent DNA ligase adenylation domain
  misc_feature (1)..(400): Xaa is any amino acid
MRLYFDATCPLCRSFAKLLRKHLSGQIELLELPDGEQAKDFKLELSNGEFLYGKEAIDALEKEVPKVRDFFWMLPDSYKGKALHSTYALAKFGRWFFYLFRRGDAMSADIKNRVKELTSKLNEANRLYYQGKATLFSDYEYDLALKELETLEKEHPELKRADSPTQTVGKETASDFARIAHKTPMLSIANAYSEAEVLDWERQLHGLIEGKLEYVCEVKIDGTSMSLLYKNGKLLRGLTRGDGESGDDVTANIKTIKDIPQFLADAPSGEFEVRGEVYMEHSTFEKLNEELLAQGKTPYANPRNTAAGSLKLKDPEETAKRELRFFAYQVLINSPLSTLNSQLSTLNSPLSTLHSSLHSQNLSLLKKLGFNVFKFFVRDSVQGIFEARDHFDGLRQSLPF

SEQ ID NO: 46401 - DNA, 603 bp, Unknown
  Obtained from environmental sample
  misc_feature (1)..(603): n is a, c, g, or t
atgacatttgaactcccaaaattgccttatgggttcaacgaccttgaaccacattacgactgtgctactgtggaaattcattactcaaaacatcacgctacttacgcgacaaatttgaacaaggctgtggaagaggcaggatggcagggcaaaagcataacggaaattttaaccagtttagagactgcccccgaacagcaaaagagtgctttgagaaatcacggcggcggttatcataatcattgcctgttttgggaatcgctttgcccaaaaagcacaggcataaattctgggaaattgtctgaagcgataaacgcaaaatggggaaattttgaaactttctctcaagcgtttaccgcaaaagcattaggacattttggttccggctgggcttggcttgtgaaaaacaaaaccggagagttggaaatcatagatacccatgaccaaattagccccataagccttgggtttaaacccataaccgtagttgatgtttgggaacacgcttattatctgaaatacaaaaatgtccgcgcagactggctcaaggcttggtggaatatagtggattggaaaaaagccgaagagcggtatctcagttag

SEQ ID NO: 46402 - protein, 200 aa, Unknown
  Obtained from environmental sample
  DOMAIN (2)...(89): Iron/manganese superoxide dismutases, alpha-hairpin domain
  misc_feature (1)..(200): Xaa is any amino acid
MTFELPKLPYGFNDLEPHYDCATVEIHYSKHHATYATNLNKAVEEAGWQGKSITEILTSLETAPEQQKSALRNHGGGYHNHCLFWESLCPKSTGINSGKLSEAINAKWGNFETFSQAFTAKALGHFGSGWAWLVKNKTGELEIIDTHDQISPISLGFKPITVVDVWEHAYYLKYKNVRADWLKAWWNIVDWKKAEERYLS

SEQ ID NO: 46403 - DNA, 1020 bp, Unknown
  Obtained from environmental sample
  misc_feature (1)..(1020): n is a, c, g, or t
ttgagcatagatgttcagttgggtcgcacaggaaaaataccccccgttgcaaatttaaagcccgttcagctaggtggcacancagtaaaaagggcaacgcttcacaacttgaacgaaataaaaagactggatttgcgaataggcgattttgcaggtgttgaaaagggcggagaaattatcccgaagattgtggaggttcaaaccgaaaaaagacccccaaatgcagaacctgtgaaagaaccggaattatgccctgtgtgcgggagcgttttggcaaaagaggatgtggatttgcgttgcgagaatttgcaatgcaaagctcagttgcagggatttttggaatactttgtatcgcgcaaggttatggaaattgagaacctgggttcggctctgatagagatgcttttgaacaatggcatgataaaagaggtttgggatatttaccgcttaaagaaagatgaattggcaaaacttgagggaatgggtgagcgcagtgcgcagatagttatggaaggcattgaaaaaagtaaaagcaatagcttagagagattgattgcgggatttggtattcgccatctaggggtgaatggcgcaaaaattttggcaaagcattttaaaaatttagaggcggtggcaaaaacggaaaaaaaggaattggaaaatataaatggaataggggagataattgcggagagcgtttataattttttccattcgagccttggcgaagaatgggtgaaaaaaataaataaaataggcataaacacggaatacaaaggcgtgagcggaacgcttttcgctgggcaaaccgtggttttaacgggaactctcccgactttggacagggaagaggcaaaagcgattttggaaaccaacggcgcaaaggttaccagctcggttagcaaaaaaacatcttgggtacttgctggcgaaaacgcggggagcaagctggaaaaagcaaaggaactaaaaattcccatttacgatgaggaatggttcaaggaaaaaattgctaactga

SEQ ID NO: 46404 - protein, 339 aa, Unknown
  Obtained from environmental sample
  DOMAIN (207)...(236): Helix-hairpin-helix motif
  misc_feature (1)..(339): Xaa is any amino acid
MSIDVQLGRTGKIPPVANLKPVQLGGTXVKRATLHNLNEIKRLDLRIGDFAGVEKGGEIIPKIVEVQTEKRPPNAEPVKEPELCPVCGSVLAKEDVDLRCENLQCKAQLQGFLEYFVSRKVMEIENLGSALIEMLLNNGMIKEVWDIYRLKKDELAKLEGMGERSAQIVMEGIEKSKSNSLERLIAGFGIRHLGVNGAKILAKHFKNLEAVAKTEKKELENINGIGEIIAESVYNFFHSSLGEEWVKKINKIGINTEYKGVSGTLFAGQTVVLTGTLPTLDREEAKAILETNGAKVTSSVSKKTSWVLAGENAGSKLEKAKELKIPIYDEEWFKEKIAN

SEQ ID NO: 46405 - DNA, 1392 bp, Unknown
  Obtained from environmental sample
  misc_feature (1)..(1392): n is a, c, g, or t
ttgggcttagacgtaaaaaatcgctatgtatttctctttctcggtcggttcaatcggcatttccgcaatgatgcacggatacctgtcttngacaggaacggcgatcagctgtttccattccgtacatggcgcaataccacaaccgaaaaagccgccgctcttttaaccgaagaatttaaattcaatataccccagcgctggagtatagcccatttgtatcaggcaatcttaaacaaagaaattcatgttaaagatattgattttataaccactcttgcgggatatgtgcattggaaattaaccggtaaaaaagttcttggtataggcgacgcgtccggtatgtttccgatagacagcggcaaatataatccgcagatgttgaaaaaatttaacgatcttaccgcttcacaaaattacacatggaaaataacaggcattcttcccgcaattctaaacgccggtgaaaacgccgggactctcaccgtgcagggggcgaaactgctcgacagttccggaagtatgagggacgggattcctctctgcccgcctgaaggagacgcgggaacaggcatggttgcgactaacagcgtagcagaacgtacaggcaatgtttcggcgggcacttccattttcgcaatgatcgttatggaaaaagagctgtcaaaggtatatcccgaaattgacattgtcactaccccggcgggaaaacctgtagcgatggtccactgcaacaactgcacttccgatattgacgcgtggataaaattattcggcgaactgtttgatataagcggaaaaaaaccggacaagaccgcgctttacaatatgttatataacaaagctttagaagctgataatgattgcggtgggcttctttcttttaattacttttccggtgaaacaattacgggatttgaggaaggccgtcccctgttcgcgcgtctgccggacagcaatttcaatctggcaaattttatgcggatgcttctcttttcgagcatggcgaccttaaaatacggcatagatattcttaccgaaaaggagaaggcgcggatagacagtctgttaggtcatggcggcttattcaaaaccaaaggcgtggggcagcggtttatggccgcggtttttaacgcgccggttggcgtaatggaatccgccggagaaggcggcgcgtggggcattgcccttcttgccgcgtttatgctcgaagaaaaagaaaccttggaaaaattccttgcggaaaaagtctttgccgggaaaacaggcgcgcggattgaacctgatccgaaagatgtggaaagcttcggcaaattcatggaacgttataccgccggtctcaaaattgaacgggccgcggttgaaaatttgagaaggagtggttatgaatcttaa

SEQ ID NO: 46406 - protein, 463 aa, Unknown
  Obtained from environmental sample
  DOMAIN (196)...(433): FGGY family of carbohydrate kinases, C-terminal domain
  misc_feature (1)..(463): Xaa is any amino acid
MGLDVKNRYVFLFLGRFNRHFRNDARIPVXDRNGDQLFPFRTWRNTTTEKAAALLTEEFKFNIPQRWSIAHLYQAILNKEIHVKDIDFITTLAGYVHWKLTGKKVLGIGDASGMFPIDSGKYNPQMLKKFNDLTASQNYTWKITGILPAILNAGENAGTLTVQGAKLLDSSGSMRDGIPLCPPEGDAGTGMVATNSVAERTGNVSAGTSIFAMIVMEKELSKVYPEIDIVTTPAGKPVAMVHCNNCTSDIDAWIKLFGELFDISGKKPDKTALYNMLYNKALEADNDCGGLLSFNYFSGETITGFEEGRPLFARLPDSNFNLANFMRMLLFSSMATLKYGIDILTEKEKARIDSLLGHGGLFKTKGVGQRFMAAVFNAPVGVMESAGEGGAWGIALLAAFMLEEKETLEKFLAEKVFAGKTGARIEPDPKDVESFGKFMERYTAGLKIERAAVENLRRSGYES

SEQ ID NO: 46407 - DNA, 864 bp, Unknown
  Obtained from environmental sample
  misc_feature (1)..(864): n is a, c, g, or t
atgtttcccaaattctcaattcagcgatcactgatcgccatttctgataaacctgccaaatcaaaaaccaatttggcgatcactgatcgccgaattaatcccccagcctttgaatattctcttaattggacacatattcagagaataatgcgggtatcaaatcctgaagcgaggtcttggtatttgcgggaaactgtcgaacagtcatgggatgttcgtactttggatcgcaatatcagtactcaatattatgaacgcttgcttatgtcacaagtgaagaaaccggttattcaggaaatgctgtcaaagaccgggaaataccaaaaaaacaaacttgaatttatcaaaaatccgtcagttcttgaatttcttggactgcccggaaatattgggtatagcgagaaaatattggaaaaggcaataataaatcatctgcaacagtttatccttgaacttggaaaaggtttcgcctttgttgaacgccagcaacttattcgtacagatacaagcgattattatattgacatggttttctataactatattttaaaatgctttgttcttattgatctcaagaccgaccgcattactcatcaggacgtaggtcagatggatatgtacgtccgaatgtatgacgaacttaaacgcaatgagggcgataaccccactatcggcattttgctatgttccgaaaccgacaaggatattgcacgatattcaatactaaaaggcaatgaacatcttttcgcaaccaaatacaaactatatctccctaccgaagaagaacttcgtatagagatagaaaaagaaaaagagtttattcgtctgcagttagaggataataaaagcgaaaccctgatataa

SEQ ID NO: 46408 - protein, 287 aa, Unknown
  Obtained from environmental sample
  DOMAIN (9)...(270): Protein of unknown function (DUF1016)
  misc_feature (1)..(287): Xaa is any amino acid
MFPKFSIQRSLIAISDKPAKSKTNLAITDRRINPPAFEYSLNWTHIQRIMRVSNPEARSWYLRETVEQSWDVRTLDRNISTQYYERLLMSQVKKPVIQEMLSKTGKYQKNKLEFIKNPSVLEFLGLPGNIGYSEKILEKAIINHLQQFILELGKGFAFVERQQLIRTDTSDYYIDMVFYNYILKCFVLIDLKTDRITHQDVGQMDMYVRMYDELKRNEGDNPTIGILLCSETDKDIARYSILKGNEHLFATKYKLYLPTEEELRIEIEKEKEFIRLQLEDNKSETLI

SEQ ID NO: 46409 - DNA, 900 bp, Unknown
  Obtained from environmental sample
  misc_feature (1)..(900): n is a, c, g, or t
atgatcgccaaagggggctatcagacagaactcgacataaaatatccgttcagccttatcgcctcggacgaaaagagcggctccgccacggtattacccgccttctggttcacccacaatatgtacgcggtgatgcggagcgctcagaagttcgcggcacgggacaaacgggtacaccgcgaccagttcatcgaacacgatcccctggcgcccgacaccgtagacgaaatcttctacgcgttagacctgattgaccggcacaaggttggcgccgccggcaatgacgacagcctccggtcaacgccgtctatacatatagacgaggctcgcaaagcgtataggatgatggcgcgccactactgcgccaaaaatatcctgccgtacatgaaagagaacggccttaaaaatctcagggaattgacagtttcattaagacgctttaacgacgacaacagtaacggcaggtggacagactgcggcggaacgatcatcgccgagcgatcgttaaaacgtattatcaacacgataaagagcgacgacgtcaaaacgtgggacgacgtccacgccctattcgacgctcacgccgccgcctacaaaaccgaaaaggtcaaacacgccgtccgttccatggcaaaattagaaaaaatcaatgtaaacgaactacccgaaaatgacttcgcggccttcctgatgtccgtcccgaaagactgcgccgaaatagccgcccgcaccgcccggtcaagggcgaaggactacgaaaacccgttccgcgtatcgacatacgaatcaacggaagagatgattaacgtgctgggtccggcggaggacgcggtggtaatcaagaccgccaaggagatggatgaattggcggccttggcaaaagaactgcatacagagtaa

SEQ ID NO: 46410 - protein, 299 aa, Unknown
  Obtained from environmental sample
  misc_feature (1)..(299): Xaa is any amino acid
MIAKGGYQTELDIKYPFSLIASDEKSGSATVLPAFWFTHNMYAVMRSAQKFAARDKRVHRDQFIEHDPLAPDTVDEIFYALDLIDRHKVGAAGNDDSLRSTPSIHIDEARKAYRMMARHYCAKNILPYMKENGLKNLRELTVSLRRFNDDNSNGRWTDCGGTIIAERSLKRIINTIKSDDVKTWDDVHALFDAHAAAYKTEKVKHAVRSMAKLEKINVNELPENDFAAFLMSVPKDCAEIAARTARSRAKDYENPFRVSTYESTEEMINVLGPAEDAVVIKTAKEMDELAALAKELHTE

SEQ ID NO: 46411 - DNA, 1551 bp, Unknown
  Obtained from environmental sample
  misc_feature (1)..(1551): n is a, c, g, or t
ttgatcctaagcagcctttacggacagtttttacgtcaacccctcaaaaaaggacacatcaagatgaagtacggcgattttgtagacgaggcgcgggagtacgtcataaccaaccccaagacccccgcgaagtggatcaactatatcggcaacctggctttcggcgggttcgtggaccacacgggcggcgcgctcgtctgcaagggcgacccgtcgctcaaccgcatcaccaagtatatccagcagatgccctcctccgacttcaagggcgagacgctctatataaggataaagaaggacggcggctggaaggtcttttcgcccttcttcgtgccgactctggacgagtacgactctttcgagtgccgcgtggggctggggtacaacaagatcgtctccgtcttctacggcgtcaaaaccgagtgtacgatcttcatcccgcaggacgctcaggtcgagatccgcgacatccgcgtgaccaacgtctccggctcgcccctcgaaatagacgttattccggtgctcgaatacacgcacccggacgcggtcaagcagttcacgaacgccgactgggtcccgcagaccatgcagtcgcgctgcttcgccaacagcgacggggtgcggacgctcgtccagtacccgttcatgttccgcgacataaagatcaattacttcacctccaacgcagccgcctcctccttcgagaccgaccgcagggtgtttctgggcgacaacgagtacggcacgtgggccgcgccgtgcgcgttaaaggccgacgaactcggcaacaacgaggcccacaggggcgacaacatcgccgcgctgatgcaccgcttgggcgcgctcaagccgggcgagagcagacggatcatcacccagctgggccagaaggacagcttggccgtggcccagccggagatagagcgcttccgcaacccggacgaggtggacaaggctttcaactcgctgaaggcgttctgggagaagtacctgacggccttgcaggtggacacgcccgatccggcgttcaacagcatggtcaacgttcacaatccgcgtcagtgcttcaccacctattattggtcgcgctacttgtcatactaccaactcggcatgggcacgcggggtttgggcttccgcgacagctctcaggacgtgatgggcgtagtcgcccacatgcccgacaaggccaaggagctgatcgtcaagctgctctccgtgcagaatacggacgggtcggcgatgcaccagttcaaccccatgagcatggaggcgaccaacggcgacgcgcacgagatgcccgaccgcccgcagtattacggcgacgatcatctttggatagtattggccgtgggcacgtatataaaggaaacgggcgacagcggcttcctgaacgaatcggtctcatactacgaaaaggacgcttggggggccccggtggagtcgggcagcgtctacgaccacctagccagagcgttgcgcttcaccaggagaacatgggcaaccacggcctgccgctattgggcttcgcggactggaacgactgcgtga

SEQ ID NO: 46412 - protein, 516 aa, Unknown
  Obtained from environmental sample
  DOMAIN (207)...(302): Glycosyltransferase 36 associated family
  misc_feature (1)..(516): Xaa is any amino acid
MILSSLYGQFLRQPLKKGHIKMKYGDFVDEAREYVITNPKTPAKWINYIGNLAFGGFVDHTGGALVCKGDPSLNRITKYIQQMPSSDFKGETLYIRIKKDGGWKVFSPFFVPTLDEYDSFECRVGLGYNKIVSVFYGVKTECTIFIPQDAQVEIRDIRVTNVSGSPLEIDVIPVLEYTHPDAVKQFTNADWVPQTMQSRCFANSDGVRTLVQYPFMFRDIKINYFTSNAAASSFETDRRVFLGDNEYGTWAAPCALKADELGNNEAHRGDNIAALMHRLGALKPGESRRIITQLGQKDSLAVAQPEIERFRNPDEVDKAFNSLKAFWEKYLTALQVDTPDPAFNSMVNVHNPRQCFTTYYWSRYLSYYQLGMGTRGLGFRDSSQDVMGVVAHMPDKAKELIVKLLSVQNTDGSAMHQFNPMSMEATNGDAHEMPDRPQYYGDDHLWIVLAVGTYIKETGDSGFLNESVSYYEKDAWGAPVESGSVYDHLARALRFTRRTWATTACRYWASRTGTTA

SEQ ID NO: 46413 - DNA, 333 bp, Unknown
  Obtained from environmental sample
  misc_feature (1)..(333): n is a, c, g, or t
ttgggcgacgagcacccgctcttcggtctcgcccgtaacagctggctctccggaacgtcgtcgtggacatatcaggcggcgagccgctacataatgggtctgcgcccgcagatggacggcctcttggtcgatccgtgcgtcccgtccgattggaagaaattctctgtagagcgcaatttccgcggatgccgctacgtgataaacgttgagaatccgggccgcgtctgcaagggcgtaaaatcaatatccgttgacgggaaagcgcttgacaagcccgtcgtccccgcctttacggacgggaaaacgcacgaagtcaacgtggtgatgggctga

SEQ ID NO: 46414 - protein, 110 aa, Unknown
  Obtained from environmental sample
  misc_feature (1)..(110): Xaa is any amino acid
MGDEHPLFGLARNSWLSGTSSWTYQAASRYIMGLRPQMDGLLVDPCVPSDWKKFSVERNFRGCRYVINVENPGRVCKGVKSISVDGKALDKPVVPAFTDGKTHEVNVVMG

SEQ ID NO: 46415 - DNA, 1023 bp, Unknown
  Obtained from environmental sample
  misc_feature (1)..(1023): n is a, c, g, or t
atgaaaaatgttgccatagcaggcgcaacaggcgcagtcgggcaggaattattgtctattctggcagagcggaattttccgataaagtctttaaaattattggcttcgtcaaggagcgcaggcagaaaaataaaattcaagggcgaggatataaccgtgcaggagcttcgccacgattcctttgatggcgtggatttggttttgtcttccgctggaggttccatctccaaagagtatatgccctccgctgttaaagcgggtgcggtggtggtggataacacatcttattttagaatgaatcccgaagttccgctcgtggtgccggagataaatccgcaagagatcaagaaacacaaaggcattattgcaaacccgaattgcagcactataataatgctggtgccgctattccctttatacaaagcctttggcattgagagagttcaggcgtgtacctaccaagcttcaagcggtgcgggggcaatcgctatggaagaacttcgcttggaatgtgcggctcttgcagagggaaaaacctttaaacgcaccgttatccctcaccaatacgcttttaatttattcccgcacaactcctcttacaatgacggcagcccagataaatccgctgtccatgcacctactggctattgcgaagaggaatggaaaatgatagccgaaacccataaaatttttggggatagcagtttgcgcgtaaatgcaacttgcgtcagagtccctgttttaagagcacattccgaggctttgaacataaggttttccaaaaaggtgagcatattggatatctatggcattttgcgcgaagcaccgggtgttgaaattttggaagagccgtcaaaaaatcgctggcctatgcccatagatgcgagcggcaaagaccccgtgctcgtaggcaggattcgcgttgaccaatctcaggaaaacacttttgatatgtgggttgttggtgaccaaattcgcaagggcgcagctttaaatgctgtgcagatagcggagcttttatag

SEQ ID NO: 46416 - protein, 340 aa, Unknown
  Obtained from environmental sample
  DOMAIN (136)...(327): Semialdehyde dehydrogenase, dimerisation domain
  misc_feature (1)..(340): Xaa is any amino acid
MKNVAIAGATGAVGQELLSILAERNFPIKSLKLLASSRSAGRKIKFKGEDITVQELRHDSFDGVDLVLSSAGGSISKEYMPSAVKAGAVVVDNTSYFRMNPEVPLVVPEINPQEIKKHKGIIANPNCSTIIMLVPLFPLYKAFGIERVQACTYQASSGAGAIAMEELRLECAALAEGKTFKRTVIPHQYAFNLFPHNSSYNDGSPDKSAVHAPTGYCEEEWKMIAETHKIFGDSSLRVNATCVRVPVLRAHSEALNIRFSKKVSILDIYGILREAPGVEILEEPSKNRWPMPIDASGKDPVLVGRIRVDQSQENTFDMWVVGDQIRKGAALNAVQIAELL

SEQ ID NO: 46417 - DNA, 600 bp, Unknown
  Obtained from environmental sample
  misc_feature (1)..(600): n is a, c, g, or t
atggaaattcaggttcaggaacttatcgataggataaaaaaagacggagttaaagccgcaactgaagaggctaacaaaatcaaggctgaggcgagcgccgaagcccaaaggattgttgaaactgctaaaaaagaagcgagtaacctgcttgaacgcgcaaaacaggacgccgaacgctcggaaaaagccggtattgcagcgcttgaacaggcttcacgcaatcttattttggcgttcaaggatgaaatccaggctttactaaacaaaataatcaacgacaatgtaggcggaaattacaacgatgacgtactaaaatcggctctgcctgagttgattaaaaagtgggctgataaagaaggcggcgatctttcggtcattttaccggaaggcgagctttccagactgcaaggcttttttaatgaaaaacttaaaagcgaactttcaaagggcgtggagttaaaatccaaccgcaagttagcttccggtttcagaatttcaaataaagaaggttctgtttactacgatttttcgtcggaagcggtcgcgaaacaactatcggcttatttgaacccaaaactggcggacctcttaaaaaaataa

SEQ ID NO: 46418 - protein, 199 aa, Unknown
  Obtained from environmental sample
  DOMAIN (11)...(198): ATP synthase (E/31 kDa) subunit
  misc_feature (1)..(199): Xaa is any amino acid
MEIQVQELIDRIKKDGVKAATEEANKIKAEASAEAQRIVETAKKEASNLLERAKQDAERSEKAGIAALEQASRNLILAFKDEIQALLNKIINDNVGGNYNDDVLKSALPELIKKWADKEGGDLSVILPEGELSRLQGFFNEKLKSELSKGVELKSNRKLASGFRISNKEGSVYYDFSSEAVAKQLSAYLNPKLADLLKK

SEQ ID NO: 46419 - DNA, 324 bp, Unknown
  Obtained from environmental sample
  misc_feature (1)..(324): n is a, c, g, or t
gtgagatcatactattactttattgcccagcttccttctttgatttacgaacaaaaaccgcctatgtcttccgctcattttaaagagttagccgctgatttaatggaagacgacgattttaaagtaatggattatctttcttttaacgacgtgttttccgcccaaaaaagtaattgcgcttttgtaaataattggaaaaactgggaacgagctttaaaattaaacttggctaaagagcgggcgataaagttaaagaaagatgttcagctaacggatattccgttttttccgcaggaagccgctattaccgccgtaaagccgtga

SEQ ID NO: 46420 - protein, 107 aa, Unknown
  Obtained from environmental sample
  misc_feature (1)..(107): Xaa is any amino acid
MRSYYYFIAQLPSLIYEQKPPMSSAHFKELAADLMEDDDFKVMDYLSFNDVFSAQKSNCAFVNNWKNWERALKLNLAKERAIKLKKDVQLTDIPFFPQEAAITAVKP

SEQ ID NO: 46421 - DNA, 939 bp, Unknown
  Obtained from environmental sample
  misc_feature (1)..(939): n is a, c, g, or t
ttggaaagactgggacgcggtgctggaatgaataataaatcatttctcttggcagtttccggtggtttggatagtatgtgcatgttgcatcgctttgcaagcgatgcaaaaaaatattcaaatttgtatgcggcttacgtgaaccacggaattaggcaggatgcaaacgaagattccaaactcattaaaaaaaaatgcgaagaatacggtgtcccgttttatgaaacttttatagaccaaaaaatttttgagggcaaaaacaactttgaagccattgccagaactgcgagatacgatttgctctttgaattgaagaataaattgaatgttgattttttggcaactgcacaccacaaaaacgaccaagcggaaaccgtgtttttacgcatagcgagaagcacaagtttaaaaggtttgcggggcattttaacggagcgagaagacggggttattcgcccgatgctggaattcacaaaagaggatttgcagagatacgcagagcaaaatggcattgagtggcgagaggattccacaaataaaaatattgagcattttagaaacaaggttcgtctgcaaattttgccaagtattgaaagcgaatgtaatggcacaataaacagcttggcacatatagcggaactttcgcaaaaaatttacccgaatgtgattaaaattttggattcatattttaacccttttttggttgaccattccaaaggcacattgactttaaagcatttttacttgcccgcgatggctggttatggcgaactttttaggctgtggcttgggagcaaaggcttttcttgggaagagacaaatgaagacgaaaagctctacgaaaaactgcaaaagaaggattcttttagatttcgtctgggcaaggtgtgttttgagaggaaaaaaggattattttctacattcctcctatggacttaa

SEQ ID NO: 46422 - protein, 312 aa, Unknown
  Obtained from environmental sample
  DOMAIN (14)...(214): PP-loop family
  misc_feature (1)..(312): Xaa is any amino acid
MERLGRGAGMNNKSFLLAVSGGLDSMCMLHRFASDAKKYSNLYAAYVNHGIRQDANEDSKLIKKKCEEYGVPFYETFIDQKIFEGKNNFEAIARTARYDLLFELKNKLNVDFLATAHHKNDQAETVFLRIARSTSLKGLRGILTEREDGVIRPMLEFTKEDLQRYAEQNGIEWREDSTNKNIEHFRNKVRLQILPSIESECNGTINSLAHIAELSQKIYPNVIKILDSYFNPFLVDHSKGTLTLKHFYLPAMAGYGELFRLWLGSKGFSWEETNEDEKLYEKLQKKDSFRFRLGKVCFERKKGLFSTFLLWT

SEQ ID NO: 46423 - DNA, 708 bp, Unknown
  Obtained from environmental sample
  misc_feature (1)..(708): n is a, c, g, or t
ttgctttccggtgatgatgattccggatactccaatgactcgcttgaacccacggcgattagaacaatggtacaaatgcgcacgacgggaagcagagattctcaggaagttatcgacataataaaagaatatattgccgtaaactttcccaaaaacgtggaggtgataatcggcggcggcgtaacctatgaaatggcggttaccgatttgatttttaactctcaaatcatatcaatatttatttccgtgtttatagtttttctcattatcgcgatttccaacaaatcgctgattgccggggtcataggcgcggtcccgttgacgctggcgatcctgtgcaatttcgcggtgatgggttttcttggaattaaactcactctcggaaccgccctgatttccagccttgcggtcggcatcggcattgattataccattcactttattgaaattttcaagcatgaataccagtcaggaagacaaaattttcttcacctgacgttcatcggctgtggaaaagccattatgattaacgccctggcagtgggcgcgggattcggggtgcttgcgttttcccagttcaaaattatcgcggaacttggcttgcttatcgctttaagcatgctgataaccgcttttgtcagccttacggtaataccggctctgcttatggtgatacaaccgaaatttatttatggggtgagtaaatga

SEQ ID NO: 46424 - protein, 235 aa, Unknown
  Obtained from environmental sample
  misc_feature (1)..(235): Xaa is any amino acid
MLSGDDDSGYSNDSLEPTAIRTMVQMRTTGSRDSQEVIDIIKEYIAVNFPKNVEVIIGGGVTYEMAVTDLIFNSQIISIFISVFIVFLIIAISNKSLIAGVIGAVPLTLAILCNFAVMGFLGIKLTLGTALISSLAVGIGIDYTIHFIEIFKHEYQSGRQNFLHLTFIGCGKAIMINALAVGAGFGVLAFSQFKIIAELGLLIALSMLITAFVSLTVIPALLMVIQPKFIYGVSK

SEQ ID NO: 46425 - DNA, 642 bp, Unknown
  Obtained from environmental sample
  misc_feature (1)..(642): n is a, c, g, or t
gtggttgaattttttcagaaagaaaccgacataagccgctctgaccgttttatccgcgagtattttggcggctcaaaagatctaaacttggcggttgtggccgatactacggaagaacttttgcaccccgacgtgctgcaggctgtggataatctttccgcttacctgaccgcgaatgtcccggccgtgggcaaagtcgtcggctttacggatattatcaagcgtatcaaccaggtgttcaacgtcggcgaaagccccgaaggactgcggaacattgtgtcgcataacgcaagtgatggttttggttttaatgataacgcctccggggattttggttttggtaattttgattccgatgacgctcattatattgaaaccccgcggcaggaaaacggctttcaagaaagcggttttaatataacccaatacaacacggcggatattttacggtttttggacagcgcggccggaaaatccccccacctgagcggcaatgaattagtgcgggaattaaaacgccttactaattatgacggcatgggatattatgagattccctcaaatccccggcgttatggcaaaaaaacacccgaagaacttcagcggttgatagcaaattatctgggttttgctttccggtga

SEQ ID NO: 46426 - protein, 213 aa, Unknown
  Obtained from environmental sample
  misc_feature (1)..(213): Xaa is any amino acid
MVEFFQKETDISRSDRFIREYFGGSKDLNLAVVADTTEELLHPDVLQAVDNLSAYLTANVPAVGKVVGFTDIIKRINQVFNVGESPEGLRNIVSHNASDGFGFNDNASGDFGFGNFDSDDAHYIETPRQENGFQESGFNITQYNTADILRFLDSAAGKSPHLSGNELVRELKRLTNYDGMGYYEIPSNPRRYGKKTPEELQRLIANYLGFAFR

SEQ ID NO: 46427 - DNA, 771 bp, Unknown
  Obtained from environmental sample
  misc_feature (1)..(771): n is a, c, g, or t
atgaaagaaatcttagacatcgtttatcgaaaaatagatgatatatctttaaagctcgatttattcctgccggataacaacgaaaaccctccgctcattttatggattcacggcggagcgtggatgatgggcgaccgcaaatggtgcggtatgaaaggccaacttgagcgcggatacgcgatagcaagcatagattaccggctgagtacaaccgcgccgtttccggcttgcattattgattgtaaatatgctcttgcttttttacgaaaaaatgaaaataaatatcccatagatgtgtcccggatatgtgtcgccggagattcagcgggcggacatcttgcgtcattgatgggcgtaaccgcaggtcattctgaatgggaaccggaaggctcggattgttctgtgcaggcggttattaatttttacggccaaattactttcaaagataaaggaaataaatcgccggaagatgataatgtgattaatactttgttaggcgcgcctattcttacgccgaaaggattaatgataggagcgatagccagtcctctaacctatattaacggaaataaacagccgccttttttgattgtacacggcgacaaagatgatgttgtaaatattgagcagagttatatgctgcgcgatgaactggaaaaatacggccataaagtcataatgcataccgtattcggcggcggtcatggttttgattgtcccgtcgtcggggatatagcgaattcatttttagattttcattttaagaaataa

SEQ ID NO: 46428 - protein, 256 aa, Unknown
  Obtained from environmental sample
  DOMAIN (40)...(252): Prolyl oligopeptidase family
  misc_feature (1)..(256): Xaa is any amino acid
MKEILDIVYRKIDDISLKLDLFLPDNNENPPLILWIHGGAWMMGDRKWCGMKGQLERGYAIASIDYRLSTTAPFPACIIDCKYALAFLRKNENKYPIDVSRICVAGDSAGGHLASLMGVTAGHSEWEPEGSDCSVQAVINFYGQITFKDKGNKSPEDDNVINTLLGAPILTPKGLMIGAIASPLTYINGNKQPPFLIVHGDKDDVVNIEQSYMLRDELEKYGHKVIMHTVFGGGHGFDCPVVGDIANSFLDFHFKK

SEQ ID NO: 46429 - DNA, 1224 bp, Unknown
  Obtained from environmental sample
  misc_feature (1)..(1224): n is a, c, g, or t
ttgatcagatcggccgagggcgcggaagtaatcttaaaagaaacaaagaacaaaaacagcgaagtaagcctttacgcccaggcgcggggaggaaccctgagcgctgcctatgaaacaattgtttcagcttctcttgccgcggaaatgctcaacgcctcggggctcggcccttattcaaggtcgcaattgaccagggcactgttggacaagcaggtatcgttgtcattctggacgcagaattacctccggggctttcagggcggcgctgcggtaaaagaccttaaaaccctgttcgaaatgctatacatcatgttcaccgagccccgtttcgatcccgaagcggtaaaagccatgctggatcagcgcaggacaatgatggcctatcaggaaaacgatcccaacgcggttttccagagggaaataacccgcactatcaacacgaacccgcgctttcacccgctggagaaagaggatctgcaaaaagcggatatagaccaggctctcgctttcataaaagcctgccttaatcccggcgattacacctttgtttttgtcgggagcatcgacatcccgctgctccgttcccttacagaaacgtacctggcttcaataccggcttccaatccttttaacgcctggattggtatcgaagcgggcaggccgcctgatacagttaaggaagtaaaaaaggggagggaagaaagaagcacggtttacatgagctggtatagcaagcagcctttttccgataaaaaaagcgccgcaatatccgtgttaaacgaataccttgatattcagcttatcgatgtaatacgcgaggctttgggaggggtttattcagtctcatcctggatttccctttcacccattcccttcggggagctttccggaggcgcgtattttacctgcgatcccaaaagagtagaggaactggtttctgcggtcaaagaggagttttataaagtctcaaggggtaacatcgatgacgccgttttacagaaagcgattgaagccctgattaaggaacaggaagagtctgttcaaagcaacctttacatagcccagagctacgcaaattcggctgtaatttaccgttctccccttagccgcctggacaaaaggccggccttgtaccgggcagtagtggcagcggatttacaaacggttgcaggagaacttctggcaggaagcagcgtcaggcttaccctttaccctgagaactga

SEQ ID NO: 46430 - protein, 407 aa, Unknown
  Obtained from environmental sample
  DOMAIN (161)...(339): Peptidase M16 inactive domain
  misc_feature (1)..(407): Xaa is any amino acid
MIRSAEGAEVILKETKNKNSEVSLYAQARGGTLSAAYETIVSASLAAEMLNASGLGPYSRSQLTRALLDKQVSLSFWTQNYLRGFQGGAAVKDLKTLFEMLYIMFTEPRFDPEAVKAMLDQRRTMMAYQENDPNAVFQREITRTINTNPRFHPLEKEDLQKADIDQALAFIKACLNPGDYTFVFVGSIDIPLLRSLTETYLASIPASNPFNAWIGIEAGRPPDTVKEVKKGREERSTVYMSWYSKQPFSDKKSAAISVLNEYLDIQLIDVIREALGGVYSVSSWISLSPIPFGELSGGAYFTCDPKRVEELVSAVKEEFYKVSRGNIDDAVLQKAIEALIKEQEESVQSNLYIAQSYANSAVIYRSPLSRLDKRPALYRAVVAADLQTVAGELLAGSSVRLTLYPEN

SEQ ID NO: 46431 - DNA, 570 bp, Unknown
  Obtained from environmental sample
  misc_feature (1)..(570): n is a, c, g, or t
ttgcaggagaacttctggcaggaagcagcgtcaggcttaccctttaccctgagaactgaggatctaccggcagatatggtttctgaattacgccacaaaattatgtcgcgtatcaggagcaatggaacctcaatagaggtcttattatgcaaggcattgtggcgtgaaggcattcgctacagaaaaaaccttaggacactgccgggtaaacctgacattgtaataacaaaacacaagatcgccgtcttttgcgacggcgaattttggcatgggaagaattgggaatcaaagaaaaacactattaaagaaaaccgcgattattgggttcccaaaattgaacggaatattgctcgtgataatgcaactgaaaaaaggctaatcaatatggggtgggttgtgcttcgcttttggggcatggacattaagaaagaccttaatggctgtgtcaatgaaataaaagaagcaatttatgagaaaacaaacggtgttgataagatggactacaacagcatgattgatttatacgccgccgaaagcgatccgggtcctggctattgtgttgaggattaa

SEQ ID NO: 46432 - protein, 189 aa, Unknown
  Obtained from environmental sample
  DOMAIN (24)...(97): DNA mismatch endonuclease Vsr
  misc_feature (1)..(189): Xaa is any amino acid
MQENFWQEAASGLPFTLRTEDLPADMVSELRHKIMSRIRSNGTSIEVLLCKALWREGIRYRKNLRTLPGKPDIVITKHKIAVFCDGEFWHGKNWESKKNTIKENRDYWVPKIERNIARDNATEKRLINMGWVVLRFWGMDIKKDLNGCVNEIKEAIYEKTNGVDKMDYNSMIDLYAAESDPGPGYCVED

SEQ ID NO: 46433 - DNA, 873 bp, Unknown
  Obtained from environmental sample
  misc_feature (1)..(873): n is a, c, g, or t
atggggcggcaaacgattcttttcctgaatcggcgcggcttcgcccacttttactattgcccttcatgcggctatgagcagaaatgcaaacgctgttcagtgtcgctgacctggcataaaaacaaaaacagggctttatgccattactgcggctattcggaaccccctgttgatgtctgtccgaaatgcggctccctggaagccggttacaggggcttcggcacggaaatggtggaggaggaggtcaggcgcactttcccaaacctgcgggtacgccggatagacgcggacgcggcggcaaaaaaaggaattctggaagatactatcagcctgtttaaggccgggttgatagacatactgcttggaacccagatggtcgcaaaaggcctgaattttcccggcgtgcgccttgtgggcgtggtctttgccgacaccggcctgcacctgcccgacttccgcgccgcagagcgtaccttctccttgattgtgcaggttgccggaagggcagggcgttatttcccggacggcaaggttatagtccagaccttccgcatgggcgatcctgtgataacccgctcctgcgcgattgacgtcaaaggcttttttgaagcggaacttagccagcgtgaggctctcaatttcccgccctatacccggcttatccgcttcagcgcccgaagccgtaattccgatcgcgccgatatcgcaatcaagcgtcttgctgcgctcgccgagtcgcttatccccccgggcgccgacatgcttgggcccgcggaatgtcccataggagttatcaacggaaactaccgtcgccagcttattctgcgcggcaatcaatgggtaccctgcacggcgctgcccgcgtccttttaa

SEQ ID NO: 46434 - protein, 290 aa, Unknown
  Obtained from environmental sample
  DOMAIN (83)...(173): Helicase conserved C-terminal domain
  misc_feature (1)..(290): Xaa is any amino acid
MGRQTILFLNRRGFAHFYYCPSCGYEQKCKRCSVSLTWHKNKNRALCHYCGYSEPPVDVCPKCGSLEAGYRGFGTEMVEEEVRRTFPNLRVRRIDADAAAKKGILEDTISLFKAGLIDILLGTQMVAKGLNFPGVRLVGVVFADTGLHLPDFRAAERTFSLIVQVAGRAGRYFPDGKVIVQTFRMGDPVITRSCAIDVKGFFEAELSQREALNFPPYTRLIRFSARSRNSDRADIAIKRLAALAESLIPPGADMLGPAECPIGVINGNYRRQLILRGNQWVPCTALPASF

SEQ ID NO: 46435 - DNA, 1611 bp, Unknown
  Obtained from environmental sample
  misc_feature (1)..(1611): n is a, c, g, or t
gtgcctttttcactgccgatgggaagcggcggcggatataaaggcgttgtcgatatactgcacgagaaagcgtattttatgcagggtgatgctcttgaaaaagaagaagctgttcccgatgagtttaaaaacgctgtcgcggcggcgcgtgaaaaattggtcgaggcggcggcagaaggcgatgacaacctgatggaacaatacattgagaaaggttctctttctcctgaagaaatgaaaaagggacttgttcaggctcttgcgcagaacaagtatgttccggcttttgcggggtgtccgctgaataactccgggttattcccgttgatcgatttcattgttgacgctgcgccgaatccgcgtacagcgaacgatacggttattgacagcgaaggcaatgaaactcctgttcctattgatccggacaaaccgatggccgctctggttatcagaacgaactatgatcagttttccggcaaactttcatggcttaaagttattaacggcaaactttcagccgattccgaagctcttaatgttaccgataataaaaaagagagaatcggcaaactctatacatgtcagggcaagaagattgaggaagtcagggaacttttcgcgggcgatgtgggaataatcacaaaatccgccacgttgaaaaccaacgatacgttagctgctattgatacaggcaaaacatttctgcctctgcgcctgcctgagccagttcactctgtcgcggtcagcgcggcggcgaaaaaagacgatgacaaactcggcgaatttcttgtacgcgccgcggaagaagataaaactttcaactaccactacaataccgaaaccagagagacagttatttccggcatgggcgaacttcagatcaacatcattctggaaagaatcaaggcgaaccagaagatcgaagtagaaacccgcgttccgaaagtcgcctaccgcgaaacaatcaccaaaaaggcgggcgccgagtacacgcacaaaaagcagagcggcggccacggccagtacggcaaagtggtactcgaaatcgcgcctcttccgcgcggcgaaaagtatcagtttgttaacgctattttcggcggcgctatccccaagaactacatccccggcgttgaaaagggcgtagtcgagggaatggcgcacggcactatggcgagttatcccgtcgtagacgtggaagtaaaagtcgtagacggcaaataccacccggtagattcaaacgaattgtctttcaaacttgccgcgcgcaacgccttccgcgaggccatgaaacaggcgaatcccaccctgctcgaaccaattatgaatttgacggtctttgtcgaggaaaaataccttggcgacgtaatgagcgacctttccggcaagcgcggcaaaatcctcgtcagggattccgcgggcggcatcgcggaaatacgcgccgaagtgcctcaggtggaacttntgcgttactcgatagacttgcgctcgattacatcgggaacgggctctttcagcgtggcgtttagccattacgcgcctatatcggggagaatagcggatgaagttatcaaggcgagagagtcgttcaaggtaatggaagcggacgagtag

SEQ ID NO: 46436 - protein, 536 aa, Unknown
  Obtained from environmental sample
  DOMAIN (159)...(226): Elongation factor Tu domain 2
  misc_feature (1)..(536): Xaa is any amino acid
MPFSLPMGSGGGYKGVVDILHEKAYFMQGDALEKEEAVPDEFKNAVAAAREKLVEAAAEGDDNLMEQYIEKGSLSPEEMKKGLVQALAQNKYVPAFAGCPLNNSGLFPLIDFIVDAAPNPRTANDTVIDSEGNETPVPIDPDKPMAALVIRTNYDQFSGKLSWLKVINGKLSADSEALNVTDNKKERIGKLYTCQGKKIEEVRELFAGDVGIITKSATLKTNDTLAAIDTGKTFLPLRLPEPVHSVAVSAAAKKDDDKLGEFLVRAAEEDKTFNYHYNTETRETVISGMGELQINIILERIKANQKIEVETRVPKVAYRETITKKAGAEYTHKKQSGGHGQYGKVVLEIAPLPRGEKYQFVNAIFGGAIPKNYIPGVEKGVVEGMAHGTMASYPVVDVEVKVVDGKYHPVDSNELSFKLAARNAFREAMKQANPTLLEPIMNLTVFVEEKYLGDVMSDLSGKRGKILVRDSAGGIAEIRAEVPQVELXRYSIDLRSITSGTGSFSVAFSHYAPISGRIADEVIKARESFKVMEADE

SEQ ID NO: 46437 - DNA, 552 bp, Unknown
  Obtained from environmental sample
  misc_feature (1)..(552): n is a, c, g, or t
gtggtatttgccgtctacgacttttacttccacgtctacgacgggataactcgccatagtgccgtgcgccattccctcgactacgcccttttcaacgccggggatgtagttcttggggatagcgccgccgaaaatagcgttaacaaactgatacttttcgccgcgcggaagaggcgcgatttcgagtaccactttgccgtactggccgtggccgccgctctgctttttgtgcgtgtactcggcgcccgcctttttggtgattgtttcgcggtaggcgactttcggaacgcgggtttctacttcgatcttctggttcgccttgattctttccagaatgatgttgatctgaagttcgcccatgccggaaataactgtctctctggtttcggtattgtagtggtagttgaaagttttatcttcttccgcggcgcgtacaagaaattcgccgagtttgtcatcgtcttttttcgccgccgcgctgaccgcgacagagtgaactggctcaggcaggcgcagaggcagaaatgttttgcctgtatcaatagcagctaa

SEQ ID NO: 46438 - protein, 183 aa, Unknown
  Obtained from environmental sample
  misc_feature (1)..(183): Xaa is any amino acid
MVFAVYDFYFHVYDGITRHSAVRHSLDYALFNAGDVVLGDSAAENSVNKLILFAARKRRDFEYHFAVLAVAAALLFVRVLGARLFGDCFAVGDFRNAGFYFDLLVRLDSFQNDVDLKFAHAGNNCLSGFGIVVVVESFIFFRGAYKKFAEFVIVFFRRRADRDRVNWLRQAQRQKCFACINSS

SEQ ID NO: 46439 - DNA, 1317 bp, Unknown
  Obtained from environmental sample
  misc_feature (1)..(1317): n is a, c, g, or t
ttgatcgcggggtacggcagcggcgttccggccggtatggcggatatggtcttcggcggcggcaagttcgtggccgtgggggcgaagggcaaggggtgcgtgtcgagcgacggtagctcttggaccgcttccaccggactgaacgaggccgacgactttaaggcggtaaagtacgggaacaatacattcttggcgctgggggctaagggctcggtctacaaatccgccgacggttcgaattggactaagttgaccggaagcagcgtaacgtcttacaagcagatcgtatacggaggcggtaagtttgtggctgtcggggactccggcgtatcggtgtcgtcggacggaaagagttgggagaggaaggccggcgccaaaaatctggcaagcgtggccttcggcgcgaataggtacgttgctgtgggcaatgacggaacccttgtctcatctgagagcggggacgcttgggaagaccacagcgtcgacgacgcggtcttcacgtcggtcgctttcgggggaagcactttcgttgtgggcgggagaacgccgggagtcgcgcaaaccagcaaggccgtcttatatacgtccgccgacgggaaggcgtggacggatgtgtcaaacgacctaaccggatgggcgacagggcagtatccggtatcgctgtgcttcggcggagaaaagttccttgccgccgtcagcggcaacaaggcgattaagacgtgcgatgccaccgccgccggcgtgaaatactggggaaatgcgtcggctttgcctgaagaggcggacgggtacacgatggtttcggcggcatacgtggacaacaagtttatcgtgctgggcaacaaaacgaccggcgaagccttggtactcaactccgccgacgcctcgagttggacgcctataatgatcccgcaagagataaagggcgtacggtcggtcaccttcgcgaaggacgcctacattgccgccgcggactcgggtaacatctacgcgtatttgaacggttcgtgggtttctcagagcagggcgacgaatagaaatctatctacaatatattcgggtaacaatgtcatactcgcggccggcgcgggcggggcgatgctctactcggaaagccccccgacgtcgataaggcacgtgtcggcgcctcgcaacgcggcgtcgtctaagggcggctttatgagttggagcgtacgcggcgcgcgcccgccgtcacgctgtcgttcacaccgaacagcgtcggtacgattgcggtctattcgcttagcgggaggcggctttacaaggcatacatcggcgctggcgagaggagcgtaa

SEQ ID NO: 46440 - protein, 438 aa, Unknown
  Obtained from environmental sample
  misc_feature (1)..(438): Xaa is any amino acid
MIAGYGSGVPAGMADMVFGGGKFVAVGAKGKGCVSSDGSSWTASTGLNEADDFKAVKYGNNTFLALGAKGSVYKSADGSNWTKLTGSSVTSYKQIVYGGGKFVAVGDSGVSVSSDGKSWERKAGAKNLASVAFGANRYVAVGNDGTLVSSESGDAWEDHSVDDAVFTSVAFGGSTFVVGGRTPGVAQTSKAVLYTSADGKAWTDVSNDLTGWATGQYPVSLCFGGEKFLAAVSGNKAIKTCDATAAGVKYWGNASALPEEADGYTMVSAAYVDNKFIVLGNKTTGEALVLNSADASSWTPIMIPQEIKGVRSVTFAKDAYIAAADSGNIYAYLNGSWVSQSRATNRNLSTIYSGNNVILAAGAGGAMLYSESPPTSIRHVSAPRNAASSKGGFMSWSVRGARPPSRCRSHRTASVRLRSIRLAGGGFTRHTSALARGA

SEQ ID NO: 46441 - DNA, 966 bp, Unknown
  Obtained from environmental sample
  misc_feature (1)..(966): n is a, c, g, or t
ttgacaaatcttgcgggagttccctttccgtacgacagcaaacgcaggccgaaaatcccttcggatttaagagggacatgggtggaaaattctttgaataatgaatacaaaaaagcgtccgatccaaagacgctttacaataccttaaacaaagcggtttctttttccaaagagcgcaatgttccggtttattgcggagaattcggagtgttcatgattaacagttttaatgaagatcgcgtaaggtggtacaggatagttacagccgcgcttgccaaaagaaatatttcaagaacaagctgggattattacggcggtttcggactgtttaatacggacggcaagagggatttttatgaggatatgaatacggatgtcgcgcgcgcaatggggtttacgccgcctgctcaaagcccgcgcaagtatgagccgttaaataaaagttttacaatttatgatgattatccggcgggagagattacctgcggatattgggatgaaaagactgattttagtttatatgataccaatgccgcgcagggagagtatgcaataagatggggtaacgcttcgcgttataatattttttattttgcttttgacaggggcggaaatttcagtgaaattgcaaataacggttttattgaatttaaagctcgtacgggaaaatcggtcctttttgacatccgctttgtaaatcctgaaaacgcgtcttccataccgtggcgaatgcgttacacgattaatgataaaatacttccgccggacggcaagtggcacacaatccgtataccgctaaaaaaaatgaaagatatgggagcgtggttaagtacaacgcagaaatggcttccttctcagagtaaattctcatggagcaatataaagcagtggaaaattgtcgctgaacacggagatatgaatggtttatgcgtctggtttgacgatataaaattacttgttccctaa

SEQ ID NO: 46442 - protein, 321 aa, Unknown
  Obtained from environmental sample
  misc_feature (1)..(321): Xaa is any amino acid
MTNLAGVPFPYDSKRRPKIPSDLRGTWVENSLNNEYKKASDPKTLYNTLNKAVSFSKERNVPVYCGEFGVFMINSFNEDRVRWYRIVTAALAKRNISRTSWDYYGGFGLFNTDGKRDFYEDMNTDVARAMGFTPPAQSPRKYEPLNKSFTIYDDYPAGEITCGYWDEKTDFSLYDTNAAQGEYAIRWGNASRYNIFYFAFDRGGNFSEIANNGFIEFKARTGKSVLFDIRFVNPENASSIPWRMRYTINDKILPPDGKWHTIRIPLKKMKDMGAWLSTTQKWLPSQSKFSWSNIKQWKIVAEHGDMNGLCVWFDDIKLLVP

SEQ ID NO: 46443 - DNA, 690 bp, Unknown
  Obtained from environmental sample
  misc_feature (1)..(690): n is a, c, g, or t
ttgtatacggtagtaaaaatcgaaacggggactgttcccgcctatgttttccacggccaccagttgtcaaatatttattcaaattttaataaattaatcggaatctgcatccgctatattctaaaaccttttggaataaaaaatattatagacgcgcgcagtccgtataaacgttttctcatagaaagcaaagcatacgcgttttcgataaacagccattgtctttccattatcggccatacccacaggccgctttttgaatcattgggacgcttcgattacattaaatttgaaatcgaacggctctgccgcgattatccttccagtccatgcgaggacaagctgcgtatagaaaacgaggttaccgccctcagaaaagagctgggtaagctcaagcgcaaagagcggcaggatgtcctgcgtcagagtctttacggggacgagcttcccgttccgtgtctttttaattcaggctgtaccttgggcaaaaagggaataaacgcgattgaaataacacacgaggatattgcgcttgtttactggtttatcgaggggaaaagcaaaaaatttataaaacgaggcggctatgaaataaacgagctcccgaacactccctaccgccgcgccgttcttaatcagaacaaacttgattacattctcgcaaagataaaacttttagggaacaagtaa

SEQ ID NO: 46444 - protein, 229 aa, Unknown
  Obtained from environmental sample
  misc_feature (1)..(229): Xaa is any amino acid
MYTVVKIETGTVPAYVFHGHQLSNIYSNFNKLIGICIRYILKPFGIKNIIDARSPYKRFLIESKAYAFSINSHCLSIIGHTHRPLFESLGRFDYIKFEIERLCRDYPSSPCEDKLRIENEVTALRKELGKLKRKERQDVLRQSLYGDELPVPCLFNSGCTLGKKGINAIEITHEDIALVYWFIEGKSKKFIKRGGYEINELPNTPYRRAVLNQNKLDYILAKIKLLGNK

SEQ ID NO: 46445 - DNA, 1638 bp, Unknown
  Obtained from environmental sample
  misc_feature (1)..(1638): n is a, c, g, or t
atgacgcttgcggaaaaagtggggcagatgactcaggcggaacggggaaatctggaaaaaggcgatatcaaaaaatacggcattggttctgttttaagcggcggcggatcaactccatgggaaaatactccgcagggctgggtaaaaatgattaacggctttgtggaagaatctttaaaaacgcggcttggaattcctgttgtttacgggattgacgcggtacacggacacaacaacgcgcaaggcgcgacgattttgccgcataacatcgctcttggcgcaattgccgccggtaaccaacagcgcggagcgcaggcggcgtatacagcgggaaaaattaccgctcaggaaatgattgcggcgggtgtgcgctggacattcgcgcctgttcttggcgtcgctcaagacgttcgatggggacgcacttatgaaagtttcagcgaaaatgaaagtattgttacaataatgggcgcgggctttatcaaaggtttgcaggaaaacggagccgccgcctgtatgaagcattatcttggagaaggtcagacaatagacggacgcaatcaaggtaacgccgttttagatcgcgccggaattgagaaaattcttccgccctaccgcgcggcaattaaagagggggtgatgtctttaatgccttcattttcaagcgtgaacggaattaaaatgcaccagcacaaagaactgcttaccgatttgttaaaagatgaaatgggttttaaaggttttgttgtttccgactggtcggcaattagacaactancggtgggcaaatacaaaacgcagatcgcaaacgcatttaacgcgggagtggacatgtacatggcatctgacggccgtgacagttggatatcatatattaatgatcttattaagctggttgaagaaggaaccgtcccgatgtcgcgcattgacgacgctgttatccgcattctgcgtttcaagcaaagcataggcttatttgaaaatccgctgacagctcaggcgggcgaaatcggcacagacgaaaacagaaccgccgcgcgcgcacttgtttccgattcgcttgtgcttttgcgtaacgaaaataacgcgctcaaaaaactttctgagagtaagaaaattctggtcgcgggacagggagcaaacgatatagggatgcaatgcggcggatggacaataacatggcagggttcgcatggcaatattacaaaaggaacaacaatactggaaggaataaaagagacaaccagggacaaagcatcggttacttatgccgaagacgggaacgcggtcggttctttcgacgcggtaatcgccgtaatcggagagaacccttacgctgaaactgaaggcgaccgatcaggcaatatcaatattcgggacagggacatggaaactctgcaaaaaatctatgaatatcgctgtcctgtaatcgttattatgctgtcaggccgcccgatgaatataggcgatgagtataagaaatgggacgcttttatcgccgcgtggctgcccggtacggaaggcggcggaatagctgatattcttttcgggaataaaagttttacgggacggactccttacacatggcgaanaacgctaaatggagaggttttatatccctttggatttggaatttag

SEQ ID NO: 46446 - protein, 545 aa, Unknown
  Obtained from environmental sample
  DOMAIN (354)...(545): Glycosyl hydrolase family 3 C terminal domain
  misc_feature (1)..(545): Xaa is any amino acid
MTLAEKVGQMTQAERGNLEKGDIKKYGIGSVLSGGGSTPWENTPQGWVKMINGFVEESLKTRLGIPVVYGIDAVHGHNNAQGATILPHNIALGAIAAGNQQRGAQAAYTAGKITAQEMIAAGVRWTFAPVLGVAQDVRWGRTYESFSENESIVTIMGAGFIKGLQENGAAACMKHYLGEGQTIDGRNQGNAVLDRAGIEKILPPYRAAIKEGVMSLMPSFSSVNGIKMHQHKELLTDLLKDEMGFKGFVVSDWSAIRQLXVGKYKTQIANAFNAGVDMYMASDGRDSWISYINDLIKLVEEGTVPMSRIDDAVIRILRFKQSIGLFENPLTAQAGEIGTDENRTAARALVSDSLVLLRNENNALKKLSESKKILVAGQGANDIGMQCGGWTITWQGSHGNITKGTTILEGIKETTRDKASVTYAEDGNAVGSFDAVIAVIGENPYAETEGDRSGNINIRDRDMETLQKIYEYRCPVIVIMLSGRPMNIGDEYKKWDAFIAAWLPGTEGGGIADILFGNKSFTGRTPYTWRXTLNGEVLYPFGFGI

SEQ ID NO: 46447 - DNA, 480 bp, Unknown
  Obtained from environmental sample
  misc_feature (1)..(480): n is a, c, g, or t
gtgcgaatactacgaaaaggacgagtaggggtggaaaagtttacggcgaaacatatcgaatcggttctcttgggcgtggcggtcggggatgccctcggcgttccgtttgagttcctgccacgcggcactttcattgccgttgacatggcaggccacggaacccatgaccagccccccggcacatggtcggacgacacctcgctcacgctttgcttggcgtgggctatggctaggcgcaatgacattgacggcattctgaacgagactgcgcgtaatttcctgcgctggtacatagatgaagaatttacagcgcatggatatgtgtttgacattgggaatgccacgaaaagggcgatggacaagctcgcaaaaaaaatacctccaacgcattctggcggcgacaccataaacgacaacggaaacggctccctgatgcgtattgccccaattgccttttttgccgcagacagagcgctttga

SEQ ID NO: 46448 - protein, 159 aa, Unknown
  Obtained from environmental sample
  misc_feature (1)..(159): Xaa is any amino acid
MRILRKGRVGVEKFTAKHIESVLLGVAVGDALGVPFEFLPRGTFIAVDMAGHGTHDQPPGTWSDDTSLTLCLAWAMARRNDIDGILNETARNFLRWYIDEEFTAHGYVFDIGNATKRAMDKLAKKIPPTHSGGDTINDNGNGSLMRIAPIAFFAADRAL

SEQ ID NO: 46449 - DNA, 333 bp, Unknown
  Obtained from environmental sample
  misc_feature (1)..(333): n is a, c, g, or t
ttgcggtatagaataagaatgattaaagaagcgattacgatggcggcaaagagagaagatctctcttatgaatgtgccgaaactgttatgaatgaaatcatggaagggaaagccagcgaaattcagatggcggcttaccttgcggcaatgtctgtaaaaggcgagactatcgatgaaattacagcgtccgccgccggaatgcgaaaacactgcgtcagagttttgcatgacatggatgtgctgggaattgtcggcacgggcggagatcattcaattccttcaatatatccactacttccgcgctggttatttccgcggcgggagttcccgtag

SEQ ID NO: 46450 - protein, 110 aa, Unknown
  Obtained from environmental sample
  DOMAIN (7)...(72): Glycosyl transferase family, helical bundle domain
  misc_feature (1)..(110): Xaa is any amino acid
MRYRIRMIKEAITMAAKREDLSYECAETVMNEIMEGKASEIQMAAYLAAMSVKGETIDEITASAAGMRKHCVRVLHDMDVLGIVGTGGDHSIPSIYPLLPRWLFPRREFP

SEQ ID NO: 46451 - DNA, 603 bp, Unknown
  Obtained from environmental sample
  misc_feature (1)..(603): n is a, c, g, or t
ttgcatcttttaaaaaccatcaatctttgtttcctctttgctcagaactaccatatatcaatgaaatatgtcgctcccgtaagacgcgagcttggtattcgcactatcttcaatatactcggtcctttggcaaatccggctggcgcaaacatggaattgctcggcgtgtacgaacaagaattggttgaaccgatggcgaaagttttgtgcaatctcggggtaaaaaagggaatggtcgtttacggtcaagacggactggatgaaatctcccttggcgctcccactacggtttgtgaattacgcgacgggtttattaaaagttatgaaattgagccggaacaattcgggtttgaacgctgtaataaagaagcgttgttgggcggaacgccgcctgaaaacgcgcagataacaaggagcattcttgccggagaaaaaggtccaaggcgaaacgcggtgcttctcaattccgccgcggcaattcatatcgcaaagccggaagtaagcataaaggacgccgtaaatatcgcggcggaggcaatcgactcgggcaaggcaaatgaacagcttaagctttttatatccatgtcgcanaataaaaattga

SEQ ID NO: 46452 - protein, 200 aa, Unknown
  Obtained from environmental sample
  DOMAIN (1)...(186): Glycosyl transferase family, a/b domain
  misc_feature (1)..(200): Xaa is any amino acid
MHLLKTINLCFLFAQNYHISMKYVAPVRRELGIRTIFNILGPLANPAGANMELLGVYEQELVEPMAKVLCNLGVKKGMVVYGQDGLDEISLGAPTTVCELRDGFIKSYEIEPEQFGFERCNKEALLGGTPPENAQITRSILAGEKGPRRNAVLLNSAAAIHIAKPEVSIKDAVNIAAEAIDSGKANEQLKLFISMSXNKN

SEQ ID NO: 46453 - DNA, 798 bp, Unknown
  Obtained from environmental sample
  misc_feature (1)..(798): n is a, c, g, or t
atgcagatcgatatgctcgacgcgcttctgcgcttcggggcgagcctgtacgccgtcggcgacgacgatcaggcgatatacggcttcaggggcgcggacatcaggcccatacggaacttcgcggcgcgcttcagggacgcggctatcgtcaaattgcagatcaattaccgcagcgtaaacgcgatactcgactgcgccaacagattgtgggcggataaaccggcggagtatagaaaagtattggtgagcgggctgaagtctcaacctgcgggttaccgcaaacctaagactatgcgcttcgggacgcaagcgcaggcgcttgaatggatattgggcagggcgcggttcatcgagcgtcgggaaaatatccctataaagtcaatggccgtgctgttccgcatcaacgacacgctgaccgcgacagccggccattacaagagcatgggtttgaccgacgataaaatcccgcaactgctgaccgtccacgcgagcaagggtttggagtatcccgtcgtcttcctgtgcgacttggaggagggcgtattcccgcactacaggttgcgcaaagagaggcgcatccatacgtggacggagttgctgaaggcgatagtcaagccgaagtcaaaagaggatattgacgcggcgcgggattgcgatatcgaggaggagctgcggctgttctacgtaggagtgacgcgggcgcagcggagcctgtttttcgttacggcgtccaacaagccgttttacgggcgcgacatgaagttcaagccgtcgcggtttttgcggctggtgaggtag

SEQ ID NO: 46454 - protein, 265 aa, Unknown
  Obtained from environmental sample
  misc_feature (1)..(265): Xaa is any amino acid
MQIDMLDALLRFGASLYAVGDDDQAIYGFRGADIRPIRNFAARFRDAAIVKLQINYRSVNAILDCANRLWADKPAEYRKVLVSGLKSQPAGYRKPKTMRFGTQAQALEWILGRARFIERRENIPIKSMAVLFRINDTLTATAGHYKSMGLTDDKIPQLLTVHASKGLEYPVVFLCDLEEGVFPHYRLRKERRIHTWTELLKAIVKPKSKEDIDAARDCDIEEELRLFYVGVTRAQRSLFFVTASNKPFYGRDMKFKPSRFLRLVR

SEQ ID NO: 46455 - DNA, 915 bp, Unknown
  Obtained from environmental sample
  misc_feature (1)..(915): n is a, c, g, or t
atgtgcgacgatctattatccggtttgaatcccgaacaactgaccgcggtcacggcggagaaccgcggatcgctcttggtgctcgccggagccggttgcggcaagacctccgtcctcacgcggcgcgtcgcctaccttgtccgccaaggcgttcctccgaaacgtatttgcgcgttgaccttttcccgcaaagccgccgaagagatggcgcaccgcctcgcgaaattggatcccgcttgcggcggcaaagacgcgccgctcgtcaccacgttccacgctttcgcgctgcgcgtgctgcaggagcggcgcgacggacggcgcaacttcaatcggataggctttaatgacgataatatatcgctgctcgacggcaaacggcgtttcgagttgatcgctcaagcgagcacggcggctatgcgcaagacgctgggcatgggaataattgagctcagcggcgccctcgaactattgttgagcttccccgaaaaagcctccaagagatggaatgacgaagagttcagcctattggcgaaaatcgagcacgggttttacgacttgcggaaagcgaacggggtgtgggatttctccgacttgatttgcggcgggcttgaacttttctccaaatacccggacatcgccgacgattggggcagacgcttcgatgttgtttggttgacgaatccaagacacgaaccctatgcagatcgatatgctcgacgcgcttctgcgcttcggggcgagcctgtacgccgtcggcgacgacgatcaggcgatatacggcttcaggggcgcggacatcaggcccatacggaacttcgcggcgcgcttcagggacgcggctatcgtcaaattgcagatcaattaccgcagcgtaaacgcgatactcgactgcgccaacagattgtgggcggataa

SEQ ID NO: 46456 - protein, 304 aa, Unknown
  Obtained from environmental sample
  DOMAIN (9)...(302): UvrD/REP helicase
  misc_feature (1)..(304): Xaa is any amino acid
MCDDLLSGLNPEQLTAVTAENRGSLLVLAGAGCGKTSVLTRRVAYLVRQGVPPKRICALTFSRKAAEEMAHRLAKLDPACGGKDAPLVTTFHAFALRVLQERRDGRRNFNRIGFNDDNISLLDGKRRFELIAQASTAAMRKTLGMGIIELSGALELLLSFPEKASKRWNDEEFSLLAKIEHGFYDLRKANGVWDFSDLICGGLELFSKYPDIADDWGRRFDVVWLTNPRHEPYADRYARRASALRGEPVRRRRRRSGDIRLQGRGHQAHTELRGALQGRGYRQIADQLPQRKRDTRLRQQIVGG

SEQ ID NO: 46457 - DNA, 753 bp, Unknown
  Obtained from environmental sample
  misc_feature (1)..(753): n is a, c, g, or t
ttgatgatggccgagcagagatacccccaaaacaagcgtcttgacaataccatcatatatataaacgatctgcctatgcgcccttttgaagtggtttcgccgtttgagcctgccggagaccagagggaagccatcgccgcactggcagatggaattaaggccggcgacaagtttcaggtactccagggggttaccggctccggtaagacctttaccatggcgaagataatcgaggcggtgcagatgcctaccctgattgtaagccacaacaagaccctgtcagcccagctcttcagggaattccggggcttttttccgcataacgctgtggaatactttgtctcttattacgattactaccaacctgaagcttatgtagccagccgggacctatacattgaaaaagacgcctccataaacgacgagatagagcggctgcggctttccgccaccaggagcctgatggaacgggaggacgtgatcattgtagcaaccgtctcgtgcatttacggccttgccacgccggaagtctacaaaaagatgaccgccacgttttcactgggcgataccatcgacgtggacgcgctgatccggcgttttgtggagctccagtacgagcgaaacgacgcgatccttgaacggggccgcttccgccgccgcggcgacaccgtggaaatttaccccgcctacctggaagaagccctacagggtggatctggattgggacaaggtggaaaggatacgccgtattaa

SEQ ID NO: 46458 - protein, 250 aa, Unknown
  Obtained from environmental sample
  DOMAIN (34)...(187): Type III restriction enzyme, res subunit
  misc_feature (1)..(250): Xaa is any amino acid
MMMAEQRYPQNKRLDNTIIYINDLPMRPFEVVSPFEPAGDQREAIAALADGIKAGDKFQVLQGVTGSGKTFTMAKIIEAVQMPTLIVSHNKTLSAQLFREFRGFFPHNAVEYFVSYYDYYQPEAYVASRDLYIEKDASINDEIERLRLSATRSLMEREDVIIVATVSCIYGLATPEVYKKMTATFSLGDTIDVDALIRRFVELQYERNDAILERGRFRRRGDTVEIYPAYLEEALQGGSGLGQGGKDTPY

SEQ ID NO: 46459 - DNA, 627 bp, Unknown
  Obtained from environmental sample
  misc_feature (1)..(627): n is a, c, g, or t
atgaaaacgcgattgtccctgaccgatatttgcccctacagcctcagcacgaaagcattgacggatgtaggatttggccacctggaatcgttctgtgatattcttataaaacgcaacactaccctccccgcctccgcctcccaaatatacttgactgccttcgataatcagacaatagtgcatattaccgcgtatcagggcgaaagccccgatcctgacgagaattacctgttgaatagttttgaactccgcggcatacctaaagccaaagcgggcaaagaaaagataaatatccgctttgaatatgatttgaacggcattttgaaggttcaggcggaaatagtctcaacaggcaaatcggcggaagtgacggttaacacggcgcagatgggcaaaaaccttgatctttcaaaatggaaggacgcttccgccgcctggaaataccggaagataataagtaaggcggaaaggcttgtaaaggttcatgacggagccgaagacattgaagcggccgccgatgaattgaaaaaagcgcttgttatgaattgggacaacgcgattatcgaaaaactgaagaacatcctcgccgatgagattgaatacatggaaaaggaagacaagcggtga

SEQ ID NO: 46460 - protein, 208 aa, Unknown
  Obtained from environmental sample
  misc_feature (1)..(208): Xaa is any amino acid
MKTRLSLTDICPYSLSTKALTDVGFGHLESFCDILIKRNTTLPASASQIYLTAFDNQTIVHITAYQGESPDPDENYLLNSFELRGIPKAKAGKEKINIRFEYDLNGILKVQAEIVSTGKSAEVTVNTAQMGKNLDLSKWKDASAAWKYRKIISKAERLVKVHDGAEDIEAAADELKKALVMNWDNAIIEKLKNILADEIEYMEKEDKR

SEQ ID NO: 46461 - DNA, 1119 bp, Unknown
  Obtained from environmental sample
  misc_feature (1)..(1119): n is a, c, g, or t
atgaccccgcaggaaattttcgcaagtctcaaggggcagaaaattacaacaaacggttgggcggatcaggcgaactcaggcgcgggactctcctacgctaacccggcaaactttatccttattgacgacgattcttatccggccgcgaaagccaagagagaggcctttacagacgcgattaacagcgacaacgccaagtttattattgtctccggggacatagatttgggcgacggcgtgataagcgacgccgacaaatcgtattttgacgcgtttgatccgtcaacccacaaacgccttaacggcgacatcaggtttaacataagatcgaatactacgataataggaattaacaacgcccggcttatgttcggcggattaaatgtcaacaacagatccaacattataatcagaaacataactttctatgacgcgcacggctcaacggaagaagacacaaaatttaacaccaattccaaagcaagcattgacgcgctgaccgtacagggaacttcggagggcgtctgggtagatcattgtaaattcacagacggaacctgcaaggacttaagccgcaactacaaccatgacggcgcttttgacattcccaaaggaaaatacataacggtatcatggtgcgaatttaccaaccacgacaaggtgatgcttgtagcgggcagcgacagcgccgcgaacgccgtcgccgaagacaggcagattaccctgcaccacaattatttccacggaactacccagcgtatgcccaggacgcggggaacacagatgcacatatataacaattactataataacattggcgtttctggtaataccggctcttttatggggccgggctggggagcggaatttatagttgaaaacaactattttggctcaaaatccggcaaaaccatagaatggtttgacacaaacgccacataccccgttaaattttactatagcggcaacaatatagcggacagtaatacctcatggtggggcagggcgtcgaaccccaggccctggacgccggcctattcgtattcgcctgagccaaacgccggtctgccaacgtcaattccggcggaagcggggccggcgctggtgtttaagaaatag

SEQ ID NO: 46462 - protein, 372 aa, Unknown
  Obtained from environmental sample
  DOMAIN (95)...(297): Pectate lyase
  misc_feature (1)..(372): Xaa is any amino acid
MTPQEIFASLKGQKITTNGWADQANSGAGLSYANPANFILIDDDSYPAAKAKREAFTDAINSDNAKFIIVSGDIDLGDGVISDADKSYFDAFDPSTHKRLNGDIRFNIRSNTTIIGINNARLMFGGLNVNNRSNIIIRNITFYDAHGSTEEDTKFNTNSKASIDALTVQGTSEGVWVDHCKFTDGTCKDLSRNYNHDGAFDIPKGKYITVSWCEFTNHDKVMLVAGSDSAANAVAEDRQITLHHNYFHGTTQRMPRTRGTQMHIYNNYYNNIGVSGNTGSFMGPGWGAEFIVENNYFGSKSGKTIEWFDTNATYPVKFYYSGNNIADSNTSWWGRASNPRPWTPAYSYSPEPNAGLPTSIPAEAGPALVFKK

SEQ ID NO: 46463 - DNA, 612 bp, Unknown
  Obtained from environmental sample
  misc_feature (1)..(612): n is a, c, g, or t
gtgatttttcctccttttattggtatactctgtattatgaatcgaatccacataaatcaattaggttacaggccaaatgatcccaaaaaagccgctataaccgtgaaccctccaaatgatgacacagggacggatttcagtattgtccgcgtgtcagacgaagcggttgtttacaacggaaaggcaaacgaagctgtttcggattccgcttcgcaggatatggtacgcatagccgatttttcgaatttcaccgtagcggggaaatatactgtctattcaggcgcgttacgttcctttccgtttgcaatcggcgataacccctacgcgggcttgcgtacagccgtactggaaatgtttcattatcaaaaatgcggcgttgatcttgaatgtggtttgtggtctcatcccgcctgtcatacaacgcccgcggtgatttacggaacaaataaaaagaaagatgtttcaggcggctggcatgacgcgggcgattacggacgatacattgtccccgccgcaaaagcggttgcggatttactgtgggcatataagctcgccgccaattccgacccaggagttttggatactgcctggtttgaaattgaatggatgtga

SEQ ID NO: 46464 - protein, 203 aa, Unknown
  Obtained from environmental sample
  DOMAIN (8)...(99): N-terminal ig-like domain of cellulase
  misc_feature (1)..(203): Xaa is any amino acid
MIFPPFIGILCIMNRIHINQLGYRPNDPKKAAITVNPPNDDTGTDFSIVRVSDEAVVYNGKANEAVSDSASQDMVRIADFSNFTVAGKYTVYSGALRSFPFAIGDNPYAGLRTAVLEMFHYQKCGVDLECGLWSHPACHTTPAVIYGTNKKKDVSGGWHDAGDYGRYIVPAAKAVADLLWAYKLAANSDPGVLDTAWFEIEWM

SEQ ID NO: 46465 - DNA, 525 bp, Unknown
  Obtained from environmental sample
  misc_feature (1)..(525): n is a, c, g, or t
atgattaccggccccaatatggcggggaaatccacctacctgcgttctgcggcgcttatcaccctgatggcgcagattggctcttatatacccgcgagccagggtcgaatagggatttgcgacaggatctactgccgcgtaggcgcttccgacaacctggcgcggggggaatcgaccttccttgtggagatgaacgagaccgcctatatcctcaacacggcaagcgaaaaaagccttgtaataatggacgaagtaggccggggaaccggcaccaacgacgggctttcaatcgcgtgggcagtcagcgaggaattgcttgacagggtcaaatgccgtaccttttttgccacccattaccatgagctttcattgttgaaccatccgcgcatagtaaaccgttcaatggaggtgctggagaaagacggcggaataattttccttcgccgactgagggaggggccgacagcggaatcctacggcatccatgttgcgcgtctcgcggggctttcaccttcccgtgcttga

SEQ ID NO: 46466 - protein, 174 aa, Unknown
  Obtained from environmental sample
  DOMAIN (1)...(174): MutS domain V
  misc_feature (1)..(174): Xaa is any amino acid
MITGPNMAGKSTYLRSAALITLMAQIGSYIPASQGRIGICDRIYCRVGASDNLARGESTFLVEMNETAYILNTASEKSLVIMDEVGRGTGTNDGLSIAWAVSEELLDRVKCRTFFATHYHELSLLNHPRIVNRSMEVLEKDGGIIFLRRLREGPTAESYGIHVARLAGLSPSRA

SEQ ID NO: 46467 - DNA, 597 bp, Unknown
  Obtained from environmental sample
  misc_feature (1)..(597): n is a, c, g, or t
atgggcgcaaacaccaaatacaaagacagcgttttctctttgctattcagcgacccggatttgcttcgggaactgtattgcgctcttgaaggcgtttctctgccggcggatattcccgttaccatcaacacgctgcgggacgcgctttttatgggcatgataaacgatatttcatttgagataggcggcaagctgataatcctcatcgaacaccagtcaacaattaatcccaatatggcgctgcggttgttaatgtacatagcgcgcgtgtacgaaaagctcataggtgacaggaacatctacagttcacgtctgatccatattccgcggcccgaattctatgtattgtacaacggtgtaacgccttaccccgacagggaaacactcaaactgtcagacgcgtttgagaaagccggacttttcgggctgcctgaaaaggcaaacgccgctttggagcttgaggtaaatgtaataaacatcaacgaggggaagaacgaaagcatagtaaacagatgtaaaacactggcagggtacagcgcttttgtaaccaaagtacgggcatttgagaaagactgggggacaggactgaagcgatga

SEQ ID NO: 46468 - protein, 198 aa, Unknown
  Obtained from environmental sample
  misc_feature (1)..(198): Xaa is any amino acid
MGANTKYKDSVFSLLFSDPDLLRELYCALEGVSLPADIPVTINTLRDALFMGMINDISFEIGGKLIILIEHQSTINPNMALRLLMYIARVYEKLIGDRNIYSSRLIHIPRPEFYVLYNGVTPYPDRETLKLSDAFEKAGLFGLPEKANAALELEVNVININEGKNESIVNRCKTLAGYSAFVTKVRAFEKDWGTGLKR

SEQ ID NO: 46469 - DNA, 603 bp, Unknown
  Obtained from environmental sample
  misc_feature (1)..(603): n is a, c, g, or t
atgaaaaaaacagcgcctttaatattagttatttttatattattaacgggatgcgctacaacgaaagtaacaagggtagattccaacaagcaaacggatttaagcggctactggaacgacaaagacgtcaggattgtctgcgaatcgcttatcaatgattgtctttcaagcccacgggttaatcaggcaataagggcgatggggagcaaaacaccgactgtaatagtcggaaatttcaggaacgagagcagcgaacatatagacacggcgatcattacgtcaattatggaaacgacaatttttaacaccggaaaaatggactttgtagccggcggcgcggcaagagaagcgctccgcgcggaacggcaggatcagcagggaaacgccagcgaagagacctcggcggcattggcaaaagaaaccggcgcgaattttatgcttttgggaacggtaaggactatcgttgacagattggataacaaatctgtcagaacatattttgtcagcgccgaattgaccagtatcgaaaccaatcagcggatatggatgggacaaaacaccgaaataaaaaaagaaataacaaggccaaaaaacaaactctaa

SEQ ID NO: 46470 - protein, 200 aa, Unknown
  Obtained from environmental sample
  SIGNAL (1)...(21)
  misc_feature (1)..(200): Xaa is any amino acid
MKKTAPLILVIFILLTGCATTKVTRVDSNKQTDLSGYWNDKDVRIVCESLINDCLSSPRVNQAIRAMGSKTPTVIVGNFRNESSEHIDTAIITSIMETTIFNTGKMDFVAGGAAREALRAERQDQQGNASEETSAALAKETGANFMLLGTVRTIVDRLDNKSVRTYFVSAELTSIETNQRIWMGQNTEIKKEITRPKNKL

SEQ ID NO: 46471 - DNA, 582 bp, Unknown
  Obtained from environmental sample
  misc_feature (1)..(582): n is a, c, g, or t
atggaaattaaaaaagctacagaatttggagacaatattagagaaaaaataggtgaattatacgttaatgcgttttatgatgacgtattaaaatatttctcaaagaataaaactaaactaataaagttattcgcctgcggttttctgcttgaatgtttatatgtagcaataatagataatgaaattatcggaatggttgcctgcatgggtaaaggtgaaatttgtattaaattagatttaaaaacaattgttaaatatatggggctattcaggggattaattataaattattggttaaaacagtttttaaaagggtctccaaaactagatgaaaaaacagcattaattgaatgtgtggctattgatacaaaacatctaagagaaggcattgcttcaacacttgttaaatcattatttacattaaccgaatataaaaattatatattagaagtaataggaacaaatagaaaagccattaaattgtacgacaaattaggttttaaacttgcgtatataataccgtattttccaaaaatatacttcggcatgaaatatacaaaaaaagaaaatttgtataaataa

SEQ ID NO: 46472 - protein, 193 aa, Unknown
  Obtained from environmental sample
  DOMAIN (54)...(168): Acetyltransferase (GNAT) family
  misc_feature (1)..(193): Xaa is any amino acid
MEIKKATEFGDNIREKIGELYVNAFYDDVLKYFSKNKTKLIKLFACGFLLECLYVAIIDNEIIGMVACMGKGEICIKLDLKTIVKYMGLFRGLIINYWLKQFLKGSPKLDEKTALIECVAIDTKHLREGIASTLVKSLFTLTEYKNYILEVIGTNRKAIKLYDKLGFKLAYIIPYFPKIYFGMKYTKKENLYK

SEQ ID NO: 46473 - DNA, 795 bp, Unknown
  Obtained from environmental sample
  misc_feature (1)..(795): n is a, c, g, or t
atgttaaattacagtctaagcatgaaaaagcaaaaatatacggatattaatattgccctgattaataaatgggtaaaaaacggcttggaatggacagctcccccgattagtcatgaggattttttaaatgcaaaaaacggcaattataatattccgctgacgccgaataagcctgttcccaaagagtggctgccttcattaataaataagaaattattaggagttgcaggcggcggcggacagcaaatgccgatttttgtagctttgggagctgattgtacagtaattgattattcagatgaacagcttgcaaatgaaagatttgtttctgaaagagaatcatatttaataaatatcgttaaagctgatattacggaaaaatttccgtttgaggaatcccaattcgatataatatttcatccgatatcaaattgttatattgaagatgtttatcatgtatggaatgaatgttatagggtattaaaagataatggtatattaatagcgggaatgggtaatgggatcaactatttattcggcaatacagaaaagcagccattggttgcggtaaataaattaccgtataatccgttaaagaatcctgaacagtatgaaaaaattaattttgaatatgataatatccaatttagccactctttagaagaattaatcggcggacaattaaaagccggatttaccattactgatctttatgaagattatgataataacggcgttttaaaagattatgttccgcaatatattgttacaagagcagtaaaacatataaaataa

SEQ ID NO: 46474 - protein, 264 aa, Unknown
  Obtained from environmental sample
  DOMAIN (73)...(167): Methyltransferase domain
  misc_feature (1)..(264): Xaa is any amino acid
MLNYSLSMKKQKYTDINIALINKWVKNGLEWTAPPISHEDFLNAKNGNYNIPLTPNKPVPKEWLPSLINKKLLGVAGGGGQQMPIFVALGADCTVIDYSDEQLANERFVSERESYLINIVKADITEKFPFEESQFDIIFHPISNCYIEDVYHVWNECYRVLKDNGILIAGMGNGINYLFGNTEKQPLVAVNKLPYNPLKNPEQYEKINFEYDNIQFSHSLEELIGGQLKAGFTITDLYEDYDNNGVLKDYVPQYIVTRAVKHIK

SEQ ID NO: 46475 - DNA, 603 bp, Unknown
  Obtained from environmental sample
  misc_feature (1)..(603): n is a, c, g, or t
atgttaaatgagttagacgaaataaaaaaagatgaaacattaacatccaaacaaagaggcaaagctaaaggcggcgctattgggagtgcttccggcagtattaccggagctacaggcggtgctgtcgcgggaacattgcttggagccatagccggtggcgcaatagcaggaactgccattggaacagcagttcccgggcttggtaatgctgtaggtcttttagtcggcgcgggtattggcgccgcaggttattatttcggcggcaaagccggacgcgccataggtgaaaaaattggcgagtctgtggcaaccgatgattcggaagcacagacaagtcaaaatacaaattggcgtgccaatacaaccagaaatcgtagacaaaggtatcggcaagtaatgccggtttccgatttgccgccgcaaattacacagacaagctcaagctttacgcctcaaaaagtagaactcggcgggcaggcggttatggatgttaatcttaatattgaaggcattaatccgacagcttctgtcgcaatacgcaataacactacagacattcagtttaatcccggttacgcgaaatttgcgaggtatgtcagatga

SEQ ID NO: 46476 - protein, 200 aa, Unknown
  Obtained from environmental sample
  misc_feature (1)..(200): Xaa is any amino acid
MLNELDEIKKDETLTSKQRGKAKGGAIGSASGSITGATGGAVAGTLLGAIAGGAIAGTAIGTAVPGLGNAVGLLVGAGIGAAGYYFGGKAGRAIGEKIGESVATDDSEAQTSQNTNWRANTTRNRRQRYRQVMPVSDLPPQITQTSSSFTPQKVELGGQAVMDVNLNIEGINPTASVAIRNNTTDIQFNPGYAKFARYVR

SEQ ID NO: 46477 - DNA, 630 bp, Unknown
  Obtained from environmental sample
  misc_feature (1)..(630): n is a, c, g, or t
gtgccgtatgtggaacaaaaacagtttgacatcgaaagcattgtcaatgacatcaagcggataaaaagcgcaatcaataccgaagccggattaaataaagtcttggcatttttacaaggcggagaattatatgaatttgaagctgttgacaagcattgcatatcccaacagccggggataaaaaagcctgacagagcaaccgcgactattaacagtatagcaaacggaatgactgaaaaatcaattttacatctttcagaaataagcggcggtactggaatgactgttagaactgacttaccgcaattaccgagagaaataaaaaccctcaattccataaatggaggcatgagggaaaaatctgtcattgaattaaaaaacgaccactacaaattatcgcaccccaccgaaaagcccgtccgtcttgccgagcgcatccttgccctcatatcagaccccggcgacaccatctatgatccgttcatgggttcaggcagtttcggcgtggcgtgtattaatacaggcagaaaatacatcggttcggaaatgaaacaggagtattttgacattgcctgcaaacggataaatgaggctgtaaaagaacagggattattttcagaggctgtataa

SEQ ID NO: 46478 - protein, 209 aa, Unknown
  Obtained from environmental sample
  DOMAIN (2)...(193): DNA methylase
  misc_feature (1)..(209): Xaa is any amino acid
MPYVEQKQFDIESIVNDIKRIKSAINTEAGLNKVLAFLQGGELYEFEAVDKHCISQQPGIKKPDRATATINSIANGMTEKSILHLSEISGGTGMTVRTDLPQLPREIKTLNSINGGMREKSVIELKNDHYKLSHPTEKPVRLAERILALISDPGDTIYDPFMGSGSFGVACINTGRKYIGSEMKQEYFDIACKRINEAVKEQGLFSEAV

SEQ ID NO: 46479 - DNA, 723 bp, Unknown
  Obtained from environmental sample
  misc_feature (1)..(723): n is a, c, g, or t
atgcgcatagtcctgggagtcaccggcggaattgccgcatataaggccgtgcttttactgcggctcatcaaagaagccgggcacgatgttcaagtagtacccacccattccgcgctgaaattcgttggaaaggcaacgtgggaagcgttatcgggacaaccagtacatacctccgtattcgatgacgtggttggcgtcgaacatgtaaaagtcggttcaaccgctgatttggtaattgtggcaccagcgactgccgatttcctcgcccgggttgcaactggtcgcgccgatgatctcttgaccgcaacgatcctagtcgccgaatgcccaaagttgttcgcgcccgcaatgcacacgcaaatgtgggaaaatcctgcgactcaagctaatgttgcgactttgaaggcgcgcgggattcaattgatcgggccagcttctgggcgattaactggccaggactccggaataggccgaatgaccgaacccgaagaaatctttcgagaactcagtgctttccttgaacctagggtgctggattccgcgaaccgctttcagcggccgcagaatgacgggggacgtgatgactgccgccaagttttgattaccgcaggtgggacgcgggaggcgattgatccggtacgttttgttggtaaccgttcctcaggaaaacaggggatcgcgctcgcgcagtcagcaatcgcgagtggcgcccacgtcacataa

SEQ ID NO: 46480 - protein, 240 aa, Unknown
  Obtained from environmental sample
  DOMAIN (1)...(116): Flavoprotein
  misc_feature (1)..(240): Xaa is any amino acid
MRIVLGVTGGIAAYKAVLLLRLIKEAGHDVQVVPTHSALKFVGKATWEALSGQPVHTSVFDDVVGVEHVKVGSTADLVIVAPATADFLARVATGRADDLLTATILVAECPKLFAPAMHTQMWENPATQANVATLKARGIQLIGPASGRLTGQDSGIGRMTEPEEIFRELSAFLEPRVLDSANRFQRPQNDGGRDDCRQVLITAGGTREAIDPVRFVGNRSSGKQGIALAQSAIASGAHVT

SEQ ID NO: 46481 - DNA, 321 bp, Unknown
  Obtained from environmental sample
  misc_feature (1)..(321): n is a, c, g, or t
ttggtactccctaatctcactcccgaacagcgcgctgccgcccttgaaaaggccaccgaagctcgtcgtgtgcgcgctgaagtgaagaatcgcctcaagtattcccagggctccttgcgagaggtaattgagcaaggtcaaaacgatgaatacattggcaaactgaaggtgatcgccatgctggaggcgctgcccggcgtcggcaaagtcaaggcgcgtcaaatcatggaagatattggtattgcagaaactcgacgcgttcggggtctcggcccgcaccaagcccaagccctaattgaccgcttcgatagccatttatga

SEQ ID NO: 46482 - protein, 106 aa, Unknown
  Obtained from environmental sample
  misc_feature (1)..(106): Xaa is any amino acid
MVLPNLTPEQRAAALEKATEARRVRAEVKNRLKYSQGSLREVIEQGQNDEYIGKLKVIAMLEALPGVGKVKARQIMEDIGIAETRRVRGLGPHQAQALIDRFDSHL

SEQ ID NO: 46483 - DNA, 915 bp, Unknown
  Obtained from environmental sample
  misc_feature (1)..(915): n is a, c, g, or t
atgagcgttatgaacgaaacgatgttggtcacattgtattgcattatcgatgattttatcaatgctttggcaaaaactgccgacggccgaaaaatgctggattcatggaaagccaaacgggggccgcaaaggcagttaagcctcagcgaggtgcttgcgctgaatataatgcgcttttattttcacatattcgatttgaaggcatttgtaagccttgccgaaaatgcctataaagcatattttccccgtttgcccaactatgaaaattttcttaaggcggcaaaccggtcgtttccgtttaccgtattgctgttgcagtattttttgatgctaaaccgccgtatgagcagggacgggatattttttcttgactcgaccgcattgagcgtgtgtgccaactggaacataccgacgcatcgcgtaacggaagggtatgcttcacgcgggaaaacaagcaagggatggtttttcggcttcaagctgcatggggcctgcgatgcggaagggaatctggtgagcctgcgcttttcaaccggaagcgaacatgacagccaacaaaccgagccgctcactgacgggctgactggaatatttgtcggcgatgcggggtatttgctgaggcaggaggtatttacacgcctgtttgaaaagcatgtacgcgttttgtctgccgcccggaagaatatgaagcgtctgatgaccgaagagcaagggcatttattgaggaaacggagcattattgagactgtgtggggcgtgttaaaagaacgacacgggctggtatttcatttggcacgaaacatggtcgggcttttcaggcattactgctacagtctgctcagtaaaatgatgcagccttttttgtattcttgcccgttaaggctgcccgacctctcccttggtctccttccttaa

SEQ ID NO: 46484 - protein, 304 aa, Unknown
  Obtained from environmental sample
  DOMAIN (120)...(284): Transposase DDE domain
  misc_feature (1)..(304): Xaa is any amino acid
MSVMNETMLVTLYCIIDDFINALAKTADGRKMLDSWKAKRGPQRQLSLSEVLALNIMRFYFHIFDLKAFVSLAENAYKAYFPRLPNYENFLKAANRSFPFTVLLLQYFLMLNRRMSRDGIFFLDSTALSVCANWNIPTHRVTEGYASRGKTSKGWFFGFKLHGACDAEGNLVSLRFSTGSEHDSQQTEPLTDGLTGIFVGDAGYLLRQEVFTRLFEKHVRVLSAARKNMKRLMTEEQGHLLRKRSIIETVWGVLKERHGLVFHLARNMVGLFRHYCYSLLSKMMQPFLYSCPLRLPDLSLGLLP

SEQ ID NO: 46485 - DNA, 360 bp, Unknown
  Obtained from environmental sample
  misc_feature (1)..(360): n is a, c, g, or t
atgggcgtttccaaacggcttaaagagtttgattcgtcggtacaggtcacgctcatgcagccggattcgcctttccacgggcttgaggggatgaagcacatggaatcaaccataacgccgaaaatatttgacaggagtattgccgacttgcatatcacggtaaaaaccgaagacgcttacaaaacggcgcgtcggcttgccgcggaagaaggcgtgttcgtcgggataagctcgggggcaaacgtgtacgccgcgatggaaacggcaaaaacactgcccgcgggctcgcgagtggctacaatactgtgcgataacggcaaccgttatctgtcacagcccttatggagggacatcacataa

SEQ ID NO: 46486 - protein, 119 aa, Unknown
  Obtained from environmental sample
  misc_feature (1)..(119): Xaa is any amino acid
MGVSKRLKEFDSSVQVTLMQPDSPFHGLEGMKHMESTITPKIFDRSIADLHITVKTEDAYKTARRLAAEEGVFVGISSGANVYAAMETAKTLPAGSRVATILCDNGNRYLSQPLWRDIT

SEQ ID NO: 46487 - DNA, 447 bp, Unknown
  Obtained from environmental sample
  misc_feature (1)..(447): n is a, c, g, or t
atggagggacatcacataatgttgcgactttcttccgccatggaaaagaatataagaacacatggcgaaaccgcctatcccaatgaatgttgcggcgttctaatcggcgaggttgataacaagggaagcaaaaccgtcaggtctacgctgacaattgataacgcgagggaagacggcgagcaataccaccgctttctcataacgccggaagatatgatgaaagcggagcanatggcaagatcgatgaaacttgatgtcatcggtttttaccactcgcatcccgaccatccctcggagccttcaggttatgataaggatcacgcgcttcctttttactcgtatgtgattgtgtcggtggataagggcaaggcgcagattcttaccagttgggagcttatggatgacagggttgattttatacaggaaaaaattataccggaaggatag

SEQ ID NO: 46488 - protein, 148 aa, Unknown
  Obtained from environmental sample
  misc_feature (1)..(148): Xaa is any amino acid
MEGHHIMLRLSSAMEKNIRTHGETAYPNECCGVLIGEVDNKGSKTVRSTLTIDNAREDGEQYHRFLITPEDMMKAEXMARSMKLDVIGFYHSHPDHPSEPSGYDKDHALPFYSYVIVSVDKGKAQILTSWELMDDRVDFIQEKIIPEG

SEQ ID NO: 46489 - DNA, 360 bp, Unknown
  Obtained from environmental sample
  misc_feature (1)..(360): n is a, c, g, or t
atgattaaagttcttattccttacgcgctcagggcgtttaccgggcgtaacgcggaagtggaagtagaaggcggcacggcgggcgacgctattaacgcgctggcgaacgcctaccctacccttaaaacccacctgttcacagaaaacggacagcttcgcgacttcatcaacctgtttgtaggcggcgcaaacatcaacagcctgcaggggctcaacacgccggttgcggataacggcgaagtgatgatagtccccgctattgccggaggctgcgctgcaattgccggaagctgcgctgcaaataccgccggagaggcgcagggcgatgcccgcgacggcagcggcggcgattcattatga

SEQ ID NO: 46490 - protein, 119 aa, Unknown
  Obtained from environmental sample
  DOMAIN (4)...(90): ThiS family
  misc_feature (1)..(119): Xaa is any amino acid
MIKVLIPYALRAFTGRNAEVEVEGGTAGDAINALANAYPTLKTHLFTENGQLRDFINLFVGGANINSLQGLNTPVADNGEVMIVPAIAGGCAAIAGSCAANTAGEAQGDARDGSGGDSL

SEQ ID NO: 46491 - DNA, 864 bp, Unknown
  Obtained from environmental sample
  misc_feature (1)..(864): n is a, c, g, or t
atgaagattagcgatatactgaatacaggaaaaattactgtctcgtgcgagctgtttccgccaaagcacggatccggtcttgccggcgctcaaaatattgtccgcgagaccgctagtctgcgtccgtcatttataagcatcacttatggcgcgggaggcggaacaagcgattacacggaaaatcttgcggtcgaagcgcagaaacacggaatacctgcgctggcgcacctgacntgcgtctcatcgaatcaacaggtggtaagaggtgttttatcagaacttgcggcaggcggtattgagaatattcttgccttaaggggcgacatccctaacgggcagccgtttccggctgacgcgcagtatccccatgcctgcgacttaatgaaagagattcaaaatttcggtaatttttgcataggcggagcgtgttatcccgaagggcatcccgaatcggaaaaccttgaaaaggacattgaaagccttaaaatcaaagttgactgcggctgcagttttttaacaacgcagatgttttttgataacaacattttgtataattttttataccgccttttacatcataaaattgacgtgcctgtaattgccggaattatgcctgttataaacggacggcagattgcccgtatctgtaaactttcaggtacgattctgccgcagcgtttccgcgcgattgtagataaattttcagacaacagcgccgctatgagtcaggcgggcattgcttatgctacagagcagattatcgatcttattgcgaatgatgtccgtcatatccatatatataccatgaacaaaccggatattgccgggagaataataagtaatttgtcggaaatattcagataa

SEQ ID NO: 46492 - protein, 287 aa, Unknown
  Obtained from environmental sample
  DOMAIN (2)...(283): Methylenetetrahydrofolate reductase
  misc_feature (1)..(287): Xaa is any amino acid
MKISDILNTGKITVSCELFPPKHGSGLAGAQNIVRETASLRPSFISITYGAGGGTSDYTENLAVEAQKHGIPALAHLTCVSSNQQVVRGVLSELAAGGIENILALRGDIPNGQPFPADAQYPHACDLMKEIQNFGNFCIGGACYPEGHPESENLEKDIESLKIKVDCGCSFLTTQMFFDNNILYNFLYRLLHHKIDVPVIAGIMPVINGRQIARICKLSGTILPQRFRAIVDKFSDNSAAMSQAGIAYATEQIIDLIANDVRHIHIYTMNKPDIAGRIISNLSEIFR

SEQ ID NO: 46493 - DNA, 663 bp, Unknown
  Obtained from environmental sample
  misc_feature (1)..(663): n is a, c, g, or t
atggttgtaaagaaaacaactaaaaaaacggcaaaaaaaacttacccgtcggcgaagaaaacttttccgaagccacgacgtataacgattgacgagttggctgaaattcacgccaaaacagaggcctcgattgataagatgtcaatcgaaatcaagaaattagccgacgatagacggaagacagaggccatcgtcagggaactgtctaaaaatctaggtcacatgggtaacgatatcggcgaacttacggaatttattgttatccccaagatacgccttgccatgaacgcattgggtaaacatacctttgataacatacaaacggataggctatacaaaaaaatcgatgaactcggtgaaaagaaaactcttaccgaagtagatgtgctgctcagcggcgacacggaggctatggcggttgaaacaaaaacccatcctctgatacgtgatgtgaaaaggcatcaggaacgcttggaaatactgcgccaacatgaagagttggtcggtattaagggcaagaaactctttggcgctgtggttggggcgattgtggacgctgaggtaaaagactttgcgctagagagagggctttatgttgtaaagatacgcgaggagaaggagaggttagatatcgtggaaccggaaacgtgcagggtttggtag

SEQ ID NO: 46494 - protein, 220 aa, Unknown
  Obtained from environmental sample
  misc_feature (1)..(220): Xaa is any amino acid
MVVKKTTKKTAKKTYPSAKKTFPKPRRITIDELAEIHAKTEASIDKMSIEIKKLADDRRKTEAIVRELSKNLGHMGNDIGELTEFIVIPKIRLAMNALGKHTFDNIQTDRLYKKIDELGEKKTLTEVDVLLSGDTEAMAVETKTHPLIRDVKRHQERLEILRQHEELVGIKGKKLFGAVVGAIVDAEVKDFALERGLYVVKIREEKERLDIVEPETCRVW

SEQ ID NO: 46495 - DNA, 660 bp, Unknown
  Obtained from environmental sample
  misc_feature (1)..(660): n is a, c, g, or t
gtggacgccgtcatggagcagaaccgcgagaaattccacaagatagtagaaaacaacaacgcccagatcgagacggtcaaactgcagcaggtatctataaacaactccgccgcggagcttgtccgcgtggagaagctgctcgaaaacctcaagttggagatggatcagatcaaccggcgcacaagcaagatagaggcgatagacgctcgtataaacagcgtggacacggtcgtctccgacatggagatacgcatagagtccatagacaagggcagggagcttgtcaacacgacgcagaagaagatagacggtctaaacgatatacttgggctggcctcctcgcgtatagacgacataaacgagaagtcgaaagatatcgacgaggttgggcgcaaggtgggcgagatgtccgggatgatggactctgtagagcgccgtatacgggaactagcacgggagaagcagctgataaaagaggccgagaaccgcatatcaagcctcactatacttgtggaggacgtaaaggcggcaatggcgaacttgtcggcggagcagcagcgcatacaagaggcggtggagaaggcctcggaactgcgcttcttgttgggcgaggttgagtacaagatgaatatgttcaaacagcagaaagagcagatgtga

SEQ ID NO: 46496 - protein, 219 aa, Unknown
  Obtained from environmental sample
  misc_feature (1)..(219): Xaa is any amino acid
MDAVMEQNREKFHKIVENNNAQIETVKLQQVSINNSAAELVRVEKLLENLKLEMDQINRRTSKIEAIDARINSVDTVVSDMEIRIESIDKGRELVNTTQKKIDGLNDILGLASSRIDDINEKSKDIDEVGRKVGEMSGMMDSVERRIRELAREKQLIKEAENRISSLTILVEDVKAAMANLSAEQQRIQEAVEKASELRFLLGEVEYKMNMFKQQKEQM

SEQ ID NO: 46497 - DNA, 828 bp, Unknown
  Obtained from environmental sample
  misc_feature (1)..(828): n is a, c, g, or t
atgaaaccagtaaaacttgaaacgttattttcccgccccttaaaagaattccctccgttctatcaatcaaataatactgtaatttttaacggcgactgcttggagatactgcgctctttccctgaaaattcaatagatatgatttttgccgatccgccgtatatgctgtctaatgacggatttacctgccaaaacgggaaaatggttaatgtgaacaaagggaagtgggacaaaagcaatggttttgaaaatgatacggagtttcataatgagtggatttccgcttgcagacgtgttttgaaacctgaaggaacaatttggatttcgggtacatatcacagtatttatcaatgcggttatcttttacagaaaaacaattttcatttcttaaatgatatcgcgtggttcaagccaaacgcttcgcccaatttaagctgtcggttttttacagcgtcgcatgaaacccttatttgggcgcgtaaggacaagaaagcgaaacacacatttaactacgaagaaatgaaaaacggactttttccggaagataaattaaaaaaggaaaatacgcaaatgcgatccgtctggtcaataccaacgccaaaaacgggagaaaaagaaaaggggaaacatcccactcaaaaaccgctggatctcttaagacgcattgtcattgcttcaacgaaagaaaacgacattgtattggaccctttttgcggtagcggaactacgggcattgcctgtaaaaatataggcaagcggttttttatcggaattgaaatagaagagaaatattgcgagttggcgaaagaaaggttgttgcttgcttaa

SEQ ID NO: 46498 - protein, 275 aa, Unknown
  Obtained from environmental sample
  DOMAIN (45)...(270): DNA methylase
  misc_feature (1)..(275): Xaa is any amino acid
MKPVKLETLFSRPLKEFPPFYQSNNTVIFNGDCLEILRSFPENSIDMIFADPPYMLSNDGFTCQNGKMVNVNKGKWDKSNGFENDTEFHNEWISACRRVLKPEGTIWISGTYHSIYQCGYLLQKNNFHFLNDIAWFKPNASPNLSCRFFTASHETLIWARKDKKAKHTFNYEEMKNGLFPEDKLKKENTQMRSVWSIPTPKTGEKEKGKHPTQKPLDLLRRIVIASTKENDIVLDPFCGSGTTGIACKNIGKRFFIGIEIEEKYCELAKERLLLA

SEQ ID NO: 46499 - DNA, 609 bp, Unknown
  Obtained from environmental sample
  misc_feature (1)..(609): n is a, c, g, or t
atggatttgccggatcttttccgtacaggcgttgttgacgtggaagactacggggtcagccagaaactgctggttcccctggattcttatcttaaagacaatatgccgaattactacagccgccttttcatgaataacgcagacaagcccatgtatgcttccgacggcaagatgtactacataggcaatctcacggcgcagaacgtaaatcatcagggcaaccattacatcaataagacatggctggacaaactaggactggccatccccaaaactgtcgatgagttgactgccgttctaagggccttccgcgacaaggctcccaacggcaatccccagacagtgctaccatttagcgcgggaggcgagcccaagcccataactcactttactcaggggttggcgccccattttgctatgttcggagtgccattctatgacaacaatggtaaaggcggatacgcggctattactgccgcgaaaaaagtccagcttgtgactgattatccgggctttagggacgcggtggaatggcttgccttatgctacagggaaaagcttctcgatatggaagccccttacccaggattccaatgccctgggccgtaa

SEQ ID NO: 46500 - protein, 202 aa, Unknown
  Obtained from environmental sample
  misc_feature (1)..(202): Xaa is any amino acid
MDLPDLFRTGVVDVEDYGVSQKLLVPLDSYLKDNMPNYYSRLFMNNADKPMYASDGKMYYIGNLTAQNVNHQGNHYINKTWLDKLGLAIPKTVDELTAVLRAFRDKAPNGNPQTVLPFSAGGEPKPITHFTQGLAPHFAMFGVPFYDNNGKGGYAAITAAKKVQLVTDYPGFRDAVEWLALCYREKLLDMEAPYPGFQCPGP

SEQ ID NO: 46501 - DNA, 528 bp, Unknown
  Obtained from environmental sample
  misc_feature (1)..(528): n is a, c, g, or t
ttggctccagtccagaatttatttacagaaccgcttcattttctggatgtatcgcggtacgatctgaatttttatattcgagccgttactgaatgtgaattaatggaaaagtctttacagaaaatcgcggtaaaaatcagaattaatgctttgcttacgcaaatacattatttgagttccacaaaagccgtaaaaccggttgttctggatgaaagaataacaaaagtattaacatatctcgaagaaaattataataaagatatttccctggacgatttagcagatagattttttattaccaaaaaccaccttaatttcattttcactaaaatggtaggtatgcccattaagaaatacatcactgcgaaacgtcttggatttgcgcggcatgaaattctggctggaaagaacccaacacaagtcgcgtataacgctggtttccatggttatgctccattctaccgtgcgtataaattattctacggcctttcaccattagaacagttaacggacggtgttaataactaa

SEQ ID NO: 46502 - protein, 175 aa, Unknown
  Obtained from environmental sample
  DOMAIN (75)...(121): Bacterial regulatory helix-turn-helix proteins, AraC family
  misc_feature (1)..(175): Xaa is any amino acid
MAPVQNLFTEPLHFLDVSRYDLNFYIRAVTECELMEKSLQKIAVKIRINALLTQIHYLSSTKAVKPVVLDERITKVLTYLEENYNKDISLDDLADRFFITKNHLNFIFTKMVGMPIKKYITAKRLGFARHEILAGKNPTQVAYNAGFHGYAPFYRAYKLFYGLSPLEQLTDGVNN

SEQ ID NO: 46503 - DNA, 414 bp, Unknown
  Obtained from environmental sample
  misc_feature (1)..(414): n is a, c, g, or t
atgcgttatctaatagatacgaatattttattgttttatgtatgggaagatgaccgcctttccaaagaggtttctgatttgctctgggatagttcaaatacaataactatcagttcaaggagcatagaagaaattgtccatttgcttagaattggtaaagttaaatttccgcgatggaaagaaactaaggatatttttaatcatatagacgaaattggtttttcggttgattacttcaaaaaagaacacatattgacacttggcaaattaactcctgcttctgagcacaaagaccctgttgaccacgctattatggcacatgctataactaataaggctactcttattagttcggatagcaagatgcgtttttatgggaatcagggtttaaggtttgtttggaatagggtgtag

SEQ ID NO: 46504 - protein, 137 aa, Unknown
  Obtained from environmental sample
  DOMAIN (3)...(133): PIN domain
  misc_feature (1)..(137): Xaa is any amino acid
MRYLIDTNILLFYVWEDDRLSKEVSDLLWDSSNTITISSRSIEEIVHLLRIGKVKFPRWKETKDIFNHIDEIGFSVDYFKKEHILTLGKLTPASEHKDPVDHAIMAHAITNKATLISSDSKMRFYGNQGLRFVWNRV

SEQ ID NO: 46505 - DNA, 954 bp, Unknown
  Obtained from environmental sample
  misc_feature (1)..(954): n is a, c, g, or t
atgaagctgaacacacgtaaacttatcgccttgtttttggcggtttttgcaataacatcacacgcggcagatgcaacggcactgaaaactaccatagaaagtctcagtggcactggcaccctttcggctgtggtaagcggcaacaccgtcaccgtgacgggagtaaaaactgatgcggatgaaccgctcggactgaacatagatgctgacgtgacagtagtctggcaagcagagcttactggaatacctaaaaggtcagccccgtataacatgggactaatctatatatactccggcactggctcttttgagatgcagagtggcaaaatagagaataccaatgatggttatgcgcttgacaactcttccaaaggagcaataaccataagtggcggcacggtctcggcaactactggctacgcggttcacaactacggctacggtggaacggcaaccataagcggcggcacggtctcggcaactactggcaacgcgatttacaacggttccggcggaacggtaaccataagcggcggagatgtctcggctacaattggcgatgcgatttacaactggggcagcgtaaacataagcggcggaacggtctcggcaactactggcaacgcggtttacagcgaaactggaacaatcacagtatcgggcaatgcgaaagtgacatcggcaaacgtaaacacaagcggcggaacgatatataactactcaacaggcacgattgaaataacaggcggcacggtgaaaaacacggctagcggcaacgcgatttactgcggagcttccaataaaccatcagcggtaaccataagcggtggaaaggttttggcaaaagacggctacgcagtttctggtgattactacaactatgtcactttaacaggcgggcttgtattcgcctacggaactattaccaacagttatagcagcaatagtgtataa

SEQ ID NO: 46506 - protein, 317 aa, Unknown
  Obtained from environmental sample
  SIGNAL (1)...(22)
  misc_feature (1)..(317): Xaa is any amino acid
MKLNTRKLIALFLAVFAITSHAADATALKTTIESLSGTGTLSAVVSGNTVTVTGVKTDADEPLGLNIDADVTVVWQAELTGIPKRSAPYNMGLIYIYSGTGSFEMQSGKIENTNDGYALDNSSKGAITISGGTVSATTGYAVHNYGYGGTATISGGTVSATTGNAIYNGSGGTVTISGGDVSATIGDAIYNWGSVNISGGTVSATTGNAVYSETGTITVSGNAKVTSANVNTSGGTIYNYSTGTIEITGGTVKNTASGNAIYCGASNKPSAVTISGGKVLAKDGYAVSGDYYNYVTLTGGLVFAYGTITNSYSSNSV

SEQ ID NO: 46507 - DNA, 2007 bp, Unknown
  Obtained from environmental sample
  misc_feature (1)..(2007): n is a, c, g, or t
atgccgcctaaccccgtaacgatacaggccgagtttgaacctgtgccgcccaatacgccttatcttacaatgactactgtggaatttgcccctgtccaatacgattataaacagccggcggcacagaccgttataatacgcaacaccggcaatacgacggcaaatgcaagaataacaattggtggaacacacgcgtcttcgtttacccttggcggtattttaacgccaaccatcgcggcgaaggaagaaacaaccttcacagttcaacctaataccgggcttggcgcgggaacatacacagccgcaatcaccgcaacctattcgggcggcgttgtagaaaacaaagaggaggaaataattgtctcctttacagtccacccggctgttattaacatagcggcgattcctttaaccgcccctgcacacggcgaaactccggaaatgactattgatacggagcagtacagcgggaatataacatgggatccgcaggtgcaaaataataaatttatcatcggagccgtatacacggcgaccattaatttgacggcaaaagacaactacaccttgcaaggcttagcgtatgatttctttactattgagggagcggcatcggtaagctattccggcactactgacaacaccggcattgttacggcggtgtttccggcggcgccgattaacgtctacgatcaagacacttggaataacgctcatacagtaatcagcagcggaggaaatgacaagagctacactatcaacataacaggcaattttgtgacggtgggcgtaacctcgtcaacattcggtagtgttacaggcattaacgtaaccattaccgggaatcacaccataaccctttcaggaacaggctcattgctccgtctcggcaataatcagactgtcgttatccatgacaccgactttgtgggtcttaataccaatgacacctcgttgatttatgtaaacggctataacgcccgtttaaccatggaggggaactcctcggtatctggtaataaaggatcacttggaggcggggtatttgtagaaagcagcttaaacgaagcaactactgcaatcttcacaatgaaagacaacgcctcggtacacaacaatacatccaccagccgaggaggcggggtgtgtgtggaaaccttagcaaccttcaatatggaaggcggaacaatcttggacaataataccaccggcagcggttatggcggcggcggggtgtattttagtggctacaccttcaacatgacaggcgggacaatctcgggcaatacctcctccagcaatggcggcggggtgtatgttaccggaaatagcgcagccttcaccatgaacgatggaaaaatctccggcaataccggcaataccgataacccttacggcggcggagtgggtgtggagggtagcggaacctttaccatgaatggcgggataatctccggaaataccgttaacggcggcggcggggtgaatgtgcacagtggaacattcatcatgagcggcgggacaatctccggaaataccgccaaccaaggcggtggggtgtatgtgagtgttattggggccttcaccatgagcggcgggacaatctccggaaataccgccttcaataccgataccgtgtcctatggctacagcggcggcggcggggtgtatatttacggtggaaccttcaccatgaacggagggacaatctccggcaatactgccgcgtccttcaatccctcctcgtattacggcggcggcggggtgtatgtatacctcggaaccttcaccaaatcaggcggcggaatcattacgggctatgacggcgatatggtgaacggcaatgtggtaaagaacagttccggcgttgtacagagcaacagtgggcatgcggtatatgtattataccaatccaacatgagcccaggcaagcgcagggaaactaccgcagggtcaacggttaaccttgattggagcgtaagcggttcggcggggggatgggaatag

SEQ ID NO: 46508 - protein, 668 aa, Unknown
  Obtained from environmental sample
  misc_feature (1)..(668): Xaa is any amino acid
MPPNPVTIQAEFEPVPPNTPYLTMTTVEFAPVQYDYKQPAAQTVIIRNTGNTTANARITIGGTHASSFTLGGILTPTIAAKEETTFTVQPNTGLGAGTYTAAITATYSGGVVENKEEEIIVSFTVHPAVINIAAIPLTAPAHGETPEMTIDTEQYSGNITWDPQVQNNKFIIGAVYTATINLTAKDNYTLQGLAYDFFTIEGAASVSYSGTTDNTGIVTAVFPAAPINVYDQDTWNNAHTVISSGGNDKSYTINITGNFVTVGVTSSTFGSVTGINVTITGNHTITLSGTGSLLRLGNNQTVVIHDTDFVGLNTNDTSLIYVNGYNARLTMEGNSSVSGNKGSLGGGVFVESSLNEATTAIFTMKDNASVHNNTSTSRGGGVCVETLATFNMEGGTILDNNTTGSGYGGGGVYFSGYTFNMTGGTISGNTSSSNGGGVYVTGNSAAFTMNDGKISGNTGNTDNPYGGGVGVEGSGTFTMNGGIISGNTVNGGGGVNVHSGTFIMSGGTISGNTANQGGGVYVSVIGAFTMSGGTISGNTAFNTDTVSYGYSGGGGVYIYGGTFTMNGGTISGNTAASFNPSSYYGGGGVYVYLGTFTKSGGGIITGYDGDMVNGNVVKNSSGVVQSNSGHAVYVLYQSNMSPGKRRETTAGSTVNLDWSVSGSAGGWE

SEQ ID NO: 46509 - DNA, 1137 bp, Unknown
  Obtained from environmental sample
  misc_feature (1)..(1137): n is a, c, g, or t
ttgaacttagtccgcgtgttcagcggcaaggtctccaccgggcacgagttgctgaacgtcagcaaaggtgcggctgagcggatcggaaatatgtactttatccgcggcaaggagagggtagacacagacgagatccacggcggcgacataggcggtctgctcaaactgaaggccacccacaccaacgactcgcttgtggataaggccgtcaaataccgcgtagcccctacggcctatccggagccgctggtaagcgtcgccgtcgccgccaaggtcaagggcgacgaggacaagatcgccgtaggcatcgccaagctgaacgaggaggacaagtgcttcagctacaaattccactccgacatccaccaatccatcctatccgcgatgggcgatatccagttagacatcatattagagaatttgaaaaaccgcttcaaggtggaagtcgagcgcaaacagcccaaaatatcatatagggagacgatcacgaaatctgccaagtacgtggagtacacgcacaaaaagcagacgggcggcgccggtcagttcgccaaagttttcatagacttagagcctatgccgcgcggcggcggttacgagtttgtagacaagatcgtgggcggcgtgatagaccagccgctacgccccagcgttgacaaaggcgtcagggcgaagttggaggagggtataatagcgggttatcccatagtagacgtgcgtgtatcgcttgtggacggcaagacgcaccccgtagactccaaagacgtggccttccagatagcgggccgcgaagtcttcaaaaaagcgtttgaagcgtcgtcgccgatattgctggaaccggtggtggaattgaaagtcaccgtgcccgtagagtacaccggcgacataatgggcgacctctcgtcgcgtcgcggcaaagtaggcggcatggagcaggtagggaaattggagacgatcaccgcgaaggtgccggaggcggaaatccaatcgtactcaagcacgctgcgctcgctgacgcagggtcgcggcttctactccaaagtcttttcgcattatgaacaagtcccgcccgaaaacgcgaagaaggtcatagaggcgcatcaggcggagatggcgcatcatgagaaagctgagtag

SEQ ID NO: 46510 - protein, 378 aa, Unknown
  Obtained from environmental sample
  DOMAIN (3)...(66): Elongation factor Tu domain 2
  misc_feature (1)..(378): Xaa is any amino acid
MNLVRVFSGKVSTGHELLNVSKGAAERIGNMYFIRGKERVDTDEIHGGDIGGLLKLKATHTNDSLVDKAVKYRVAPTAYPEPLVSVAVAAKVKGDEDKIAVGIAKLNEEDKCFSYKFHSDIHQSILSAMGDIQLDIILENLKNRFKVEVERKQPKISYRETITKSAKYVEYTHKKQTGGAGQFAKVFIDLEPMPRGGGYEFVDKIVGGVIDQPLRPSVDKGVRAKLEEGIIAGYPIVDVRVSLVDGKTHPVDSKDVAFQIAGREVFKKAFEASSPILLEPVVELKVTVPVEYTGDIMGDLSSRRGKVGGMEQVGKLETITAKVPEAEIQSYSSTLRSLTQGRGFYSKVFSHYEQVPPENAKKVIEAHQAEMAHHEKAE

SEQ ID NO: 46511 - DNA, 525 bp, Unknown
  Obtained from environmental sample
  misc_feature (1)..(525): n is a, c, g, or t
ttgacttacttaaaccccttcaacctcttcaacctcaaagcattagtcaacaccgacaccgaactcaaactcatagccgccgccgcgaagaccggattcaacaacggcccgccgaataaatgcagcaccccggcggctatcggtatcccaagcacgttgtacccgaaggcccagaacaaattctgtttgatgttgcggattgtctgcttgctcaggttgatcgcggtgggaacgtccgacaaatcgctccgcataagtatgatgtcagccgactccatagcaacgtcggtgccgcttcctatcgcaatgccgacgtcagcttgcgcaagggcgggagcgtcgttgattccgtcgccgaccattgccactttgcggccgcctttttgcagcatcttcacctcggcggacttgtcttgtggcatcacctcggcgagtacgcggtttatacctacttgtttggcgatggcgtcggcggtcttcttattgtctccggtgatcatggcgacctcgattcccatcttgtga

SEQ ID NO: 46512 - protein, 174 aa, Unknown
  Obtained from environmental sample
  misc_feature (1)..(174): Xaa is any amino acid
MTYLNPFNLFNLKALVNTDTELKLIAAAAKTGFNNGPPNKCSTPAAIGIPSTLYPKAQNKFCLMLRIVCLLRLIAVGTSDKSLRISMMSADSIATSVPLPIAMPTSACARAGASLIPSPTIATLRPPFCSIFTSADLSCGITSASTRFIPTCLAMASAVFLLSPVIMATSIPIL

SEQ ID NO: 46513 - DNA, 687 bp, Unknown
  Obtained from environmental sample
  misc_feature (1)..(687): n is a, c, g, or t
ttgatggaggagcgcggcgtcgatctcgccgagcttgccgccgcctccgaaaaacttatgtccgagggaaaaacaccgatgtacgtggcctttgacgggaaagccgccgggatcgtggcagtggccgacattctgaaaaaaagcagcaagatggcgatagaacggcttcacaagatgggaatcgaggtcgccatgatcaccggagacaataagaagaccgccgacgccatcgccaaacaagtaggtataaaccgcgtactcgccgaggtgatgccacaagacaagtccgccgaggtgaagatgctgcaaaaaggcggccgcaaagtggcaatggtcggcgacggaatcaacgacgctcccgcccttgcgcaagctgacgtcggcattgcgataggaagcggcaccgacgttgctatggagtcggctgacatcatacttatgcggagcgatttgtcggacgttcccaccgcgatcaacctgagcaagcagacaatccgcaacatcaaacagaatttgttctgggccttcgggtacaacgtgcttgggataccgatagccgccggggtgctgcatttattcggcgggccgttgttgaatccggtcttcgcggcggcggctatgagtttgagttcggtgtcggtgttgactaatgctttgaggttgaagaggttgaaggggtttaagtaa

SEQ ID NO: 46514 - protein, 228 aa, Unknown
  Obtained from environmental sample
  DOMAIN (1)...(135): haloacid dehalogenase-like hydrolase
  misc_feature (1)..(228): Xaa is any amino acid
MMEERGVDLAELAAASEKLMSEGKTPMYVAFDGKAAGIVAVADILKKSSKMAIERLHKMGIEVAMITGDNKKTADAIAKQVGINRVLAEVMPQDKSAEVKMLQKGGRKVAMVGDGINDAPALAQADVGIAIGSGTDVAMESADIILMRSDLSDVPTAINLSKQTIRNIKQNLFWAFGYNVLGIPIAAGVLHLFGGPLLNPVFAAAAMSLSSVSVLTNALRLKRLKGFK

SEQ ID NO: 46515 - DNA, 1029 bp, Unknown
  Obtained from environmental sample
  misc_feature (1)..(1029): n is a, c, g, or t
atggacgtgtggatgagagcagccgccgcgagaaaagacggaatggattctaccgttatgcggcttggagacaatatgcgtgaagtggcggtaaccgaaggcgataaagttgaagctcaaatcaagttcggctggcaggtgaacacatggggcatcggcgaccttgccgcccgttacgcgaaaatcagcggcgcgcaggcggaaaaactggcggaagaatacgccgctttatacaatattgcgcctgaacttaaacaagcaggcaaggcgagggacgcaatgcttgaacaggcaaaaatagaaatcgctcttaaagaaatgcttgaaagcgaacacgcgggggcttttaccactaccttccaagaccttcacggtctgccgcaattgccaggtcttgcctgccagcggcttatggaacaggggtacggtttcggcgcggaaggagactggaaacagtccatgctgacacgagccgccaaagttatggcttcgggattatcaggcggcgtttccttcatggaagattacacctaccactttgagcctggcaaagaagccgcccttggcgctcacatgcttgaaatatgcccatcaatcgcaagcggcaaaccgcgtattgaagttcatccgctgggaatcggcggcaaagcagaccccgcccgtatggtgtttgacgccgctccagggcatgcggtacttgcgacgcttatcgatcttggcagccgtttcagaatgatcgtaaatgaaattgagactgtaaaaattaaaaaaacaatgccgaaactgcctgtcgcccgcgccctttggaaaccgtatccgaatttaagcgatgccgctgaggcatggataatttcgggcggtacgcatcattcggtatacagttccgctcttacgacggagtatttccgtgattttgcggaaatgagcggcattgaatttgtgcttatcgaccgtgatacaaaaccggctcgtttacaggacgaactgcgccgcaacgaagcctattggtctcatcagtctgttatgtga

SEQ ID NO: 46516 - protein, 342 aa, Unknown
  Obtained from environmental sample
  DOMAIN (1)...(340): L-arabinose isomerase
  misc_feature (1)..(342): Xaa is any amino acid
MDVWMRAAAARKDGMDSTVMRLGDNMREVAVTEGDKVEAQIKFGWQVNTWGIGDLAARYAKISGAQAEKLAEEYAALYNIAPELKQAGKARDAMLEQAKIEIALKEMLESEHAGAFTTTFQDLHGLPQLPGLACQRLMEQGYGFGAEGDWKQSMLTRAAKVMASGLSGGVSFMEDYTYHFEPGKEAALGAHMLEICPSIASGKPRIEVHPLGIGGKADPARMVFDAAPGHAVLATLIDLGSRFRMIVNEIETVKIKKTMPKLPVARALWKPYPNLSDAAEAWIISGGTHHSVYSSALTTEYFRDFAEMSGIEFVLIDRDTKPARLQDELRRNEAYWSHQSVM

SEQ ID NO: 46517 - DNA, 1395 bp, Unknown
  Obtained from environmental sample
  misc_feature (1)..(1395): n is a, c, g, or t
gtggtcactgagggtattcttgacggtattcttatggatttcttatcgctgtcccaatctcttggggcgcggcttctttcctttggaaattcccatgagaccggcttttcctctgtaaccgtcgattcccgaaccgcgcgcaaaggctcgcttttcgtggcgctttccggttcaaactgcgacggccattccttcgcggaagcggcctttaaaaacggagcctgcgccgctcttgttgaacgcgataaaatcgaaacatttaaccttgacaaaattgcggaatcactgggtaaaatccttattgccgttgataattcgcttgagggattacagaaagccgcggcggcgtatctgaaaaaattccccggccttttgaaaatcgccattacaggctcgtcgggaaaaaccaccaccaaggaaataaccgcgaaaattattggaattgaaaaatgcgtggtaatgaacccggggaattacaactctgatatagggctgcccctttcggttttcaatgtcaggaaccgccatgaaatcgccgtgtttgaggccggaatgaaccgcgtgggggaaatcgccgaacttgcttccgtgcttattcctgatgtcgctttaattacaaatattggatccgcccatatcggaattatcggcagcaaggaggccatagctcaagagaaaaaaaatattttttcaaaattcaacgggaaaggcgttgcgctgatcccggccgattctccttaccgcgattacctcgcgcaaggggtgcggggcagggtttctttttacggtgaaagctctttcgcgcagcttggcggggtaaaagaccttggcctttacggcagcgaaattatctgggacgggaaacaggcgcgcttcgctttgccgggcaggtacaacctcgcgaacgccattgccgccatcgccatagcgcgggaagtgcctgtcggcgcggaggcggtaaggcagggcattgaatcggtcaggcccctgttcggacgcggcgaaataatgcgcggcaaggttacggtcatacaggactgctataactccaacccggaatcgcttgccgtcgcgctggaattctgcgaaagcctggactggccgggccgccgcgtatacgtaatcggggaaatgctggagttaggcgaagattctgaaaaagcccatgaaaggatggggcgccttttggcggaaagcaaagcggacatggtgttcctctacggcaaagaaaccgccgcggcggcaaaaacgcttccgccgggccggttcctgcgtacctgcgatattaacgaactgacccaggcagttaacggttacgcgcgggagggggaccttgtccttcttaaaggctcgcgcggctgcgccctggagagggttttcggaggaggcgtctga

SEQ ID NO: 46518 - protein, 464 aa, Unknown
  Obtained from environmental sample
  DOMAIN (35)...(118): Mur ligase family, catalytic domain
  misc_feature (1)..(464): Xaa is any amino acid
MVTEGILDGILMDFLSLSQSLGARLLSFGNSHETGFSSVTVDSRTARKGSLFVALSGSNCDGHSFAEAAFKNGACAALVERDKIETFNLDKIAESLGKILIAVDNSLEGLQKAAAAYLKKFPGLLKIAITGSSGKTTTKEITAKIIGIEKCVVMNPGNYNSDIGLPLSVFNVRNRHEIAVFEAGMNRVGEIAELASVLIPDVALITNIGSAHIGIIGSKEAIAQEKKNIFSKFNGKGVALIPADSPYRDYLAQGVRGRVSFYGESSFAQLGGVKDLGLYGSEIIWDGKQARFALPGRYNLANAIAAIAIAREVPVGAEAVRQGIESVRPLFGRGEIMRGKVTVIQDCYNSNPESLAVALEFCESLDWPGRRVYVIGEMLELGEDSEKAHERMGRLLAESKADMVFLYGKETAAAAKTLPPGRFLRTCDINELTQAVNGYAREGDLVLLKGSRGCALERVFGGGV

SEQ ID NO: 46519 - DNA, 1122 bp, Unknown
  Obtained from environmental sample
  misc_feature (1)..(1122): n is a, c, g, or t
gtgacaagagaaagagcgttcaggtacgacttctttatgttggccgcaatcctgctgctgctgctgctcggcctggtgattctttattccgcgtcattcttgttcgcgtcaaaccagccttcccgttttgtcagcggatgggcgcccatgtccagcaacattgtcgctgttttgattatgcttttcctgttcccgatactttccatggttaatctcgaattgttcaaaaaaggatgggtggttttctttattttgtttcttacaatgttaattaacatacttccgtttttcccgttattccagaaagagaaccacaggccgggcgttgacgcgatgcggtggatattccttaaatttcccggccagagacatttaagcttccagccctcggagttaatcaaagtggcgctgccgctgtaccttgcctatatcctggataaaaacaaggacaggctgaataattttttctacggccccctgccccccgtggtggtaacaacaatcttctgtttcctggttctgcgccagagcaatttttccgaagctgtccttatagcccttatcagcatggtaatttgcttcgtctcagggatacagttacgctggtttaccgtggttatcgcgctgatggtcctggtcggctatcaactgactttcggcaatcccgagggcaggtggtacgagcgtatacagaattttatcagcaagaccccggatgaatacggcgaaaaataccagagcgaccttagcctggaagccgtcaaagcggggggattttggggaaaaggcatagggcagggctctttgaaagtcaggatgccggaggtacacggcgattttgtcttcgcttcttatgtcgaggagtcgggattcctgggagtgctgttttatattgtccttataggttttttcgcgtggatagggtataagacggcgtggcgaagcggcgaccgttactgccagcttctcgcgttcggactggttacctccgttgttatccagactttgctgaatatagccgtggtcggaaaaattgttccgacaaccggtatccccctgccctttgtttcatcggggggatcttcgctttggcgactcttatcagttccgcgctgcttgtaa

SEQ ID NO: 46520 - protein, 373 aa, Unknown
  Obtained from environmental sample
  DOMAIN (11)...(373): Cell cycle protein
  misc_feature (1)..(373): Xaa is any amino acid
MTRERAFRYDFFMLAAILLLLLLGLVILYSASFLFASNQPSRFVSGWAPMSSNIVAVLIMLFLFPILSMVNLELFKKGWVVFFILFLTMLINILPFFPLFQKENHRPGVDAMRWIFLKFPGQRHLSFQPSELIKVALPLYLAYILDKNKDRLNNFFYGPLPPVVVTTIFCFLVLRQSNFSEAVLIALISMVICFVSGIQLRWFTVVIALMVLVGYQLTFGNPEGRWYERIQNFISKTPDEYGEKYQSDLSLEAVKAGGFWGKGIGQGSLKVRMPEVHGDFVFASYVEESGFLGVLFYIVLIGFFAWIGYKTAWRSGDRYCQLLAFGLVTSVVIQTLLNIAVVGKIVPTTGIPLPFVSSGGSSLWRLLSVPRCL

SEQ ID NO: 46521 - DNA, 1110 bp, Unknown
  Obtained from environmental sample
  misc_feature (1)..(1110): n is a, c, g, or t
gtggttgccaaactgcgcggcgggattgaaagccggatgaaacgcttcggtgtggaaactgtgaacggtagaggtgaaattatcgcgccgccttcgggagaaacgccggtaaaagtaaaatcaattacgacagacaacaagacggcggaacacgagggaaaaaccctgctggtctgcgccggctctgttccggcgttgccccccataccgggcgcgaagggcaatcccctggtcgtagactccgctgccctgctcacgatagagaatgtccccaaacagcttgctattatcggcggcggcgttatcggcgttgaattcgccggccttttttccgcgttgggctgtgaggttacggttatcgagatgatggacgagattgtaccctttatggataaggaacaggcgcccatcctccgccgcgccatgaaaggggttgactttaaactcggctgtaaagttgaaaaaattgacggcgcagctgtgtattatactacgaaagacgcaaaggctgaactgcggaaagccgatctgatactgatggcggtgggccggcggcctgttctggatacctggggagcccaggcggcgggtattgataccggtccccgaggagtcgctgtggatgaccggatgcgtaccaacattccccgcatttgggctgccggagacgtaacaggaaaaagcctgctcgcccattgtgcctaccgcatgggagaagtcgcggtagcggacattctcgcgacgctggatgccggaacagggaacaaggaacagggaacagggaacagagaacacggagccgccgacaaggccaatcgtatgcgctataacgccataccctgggcagtttacggcatcaccgaagctgccggcgtcggccttaccgaggcaggaggccgaggcaaaaggaatcgcgatactcaaggcgagcctgccgatgaaattatcgggccgctttgccgcggaaaacactttttcgggagcgggggcggtcaaagttatcgccggcgcagcagaccgccgcattctgggcatacacgcggtcggcgcgtattcgccggaatttatctggggcggcgccgctcttatcgaacaggaattccgcattga

SEQ ID NO: 46522 - protein, 369 aa, Unknown
  Obtained from environmental sample
  DOMAIN (93)...(228): Pyridine nucleotide-disulphide oxidoreductase
  misc_feature (1)..(369): Xaa is any amino acid
MVAKLRGGIESRMKRFGVETVNGRGEIIAPPSGETPVKVKSITTDNKTAEHEGKTLLVCAGSVPALPPIPGAKGNPLVVDSAALLTIENVPKQLAIIGGGVIGVEFAGLFSALGCEVTVIEMMDEIVPFMDKEQAPILRRAMKGVDFKLGCKVEKIDGAAVYYTTKDAKAELRKADLILMAVGRRPVLDTWGAQAAGIDTGPRGVAVDDRMRTNIPRIWAAGDVTGKSLLAHCAYRMGEVAVADILATLDAGTGNKEQGTGNREHGAADKANRMRYNAIPWAVYGITEAAGVGLTEAGGRGKRNRDTQGEPADEIIGPLCRGKHFFGSGGGQSYRRRSRPPHSGHTRGRRVFAGIYLGRRRSYRTGIPH

SEQ ID NO: 46523 - DNA, 441 bp, Unknown
  Obtained from environmental sample
  misc_feature (1)..(441): n is a, c, g, or t
atgccggaacagggaacaaggaacagggaacagggaacagagaacacggagccgccgacaaggccaatcgtatgcgctataacgccataccctgggcagtttacggcatcaccgaagctgccggcgtcggccttaccgaggcaggaggccgaggcaaaaggaatcgcgatactcaaggcgagcctgccgatgaaattatcgggccgctttgccgcggaaaacactttttcgggagcgggggcggtcaaagttatcgccggcgcagcagaccgccgcattctgggcatacacgcggtcggcgcgtattcgccggaatttatctggggcggcgccgctcttatcgaacaggaattccgcattgacgaagttaagcagctaatttttccccatcccacggtgagcgaactcatacgtgacgcggtgtggagcattggagaatag

SEQ ID NO: 46524 - protein, 146 aa, Unknown
  Obtained from environmental sample
  DOMAIN (40)...(141): Pyridine nucleotide-disulphide oxidoreductase, dimerisation domain
  misc_feature (1)..(146): Xaa is any amino acid
MPEQGTRNREQGTENTEPPTRPIVCAITPYPGQFTASPKLPASALPRQEAEAKGIAILKASLPMKLSGRFAAENTFSGAGAVKVIAGAADRRILGIHAVGAYSPEFIWGGAALIEQEFRIDEVKQLIFPHPTVSELIRDAVWSIGE

SEQ ID NO: 46525 - DNA, 633 bp, Unknown
  Obtained from environmental sample
  misc_feature (1)..(633): n is a, c, g, or t
atggatcttatgatgccggttatggacggcgaagaagcgactaagctgatacgttccctgggtacggaatacgcaagtacagtacagattatagcccttacggcaatgccggaaggagatgccgccgagagggaaaaaacgcttttgggcagcggttttaacgcggttatgtacaaacccttcacccttgaaactgtagatgattttattaaaaactggatgaatgataaaataaagaactgtgcaataccacccgaaaaaaaggagaaaattatggaagtagacatacccggagtagaaaacgaaaaggtaaagaaaatttacggcaaaaaatttaacatctatttggatgttttgcgttcatatctggacgttgtgccaaaatctcttgaagagatgagccaggttaacaaggaaacattgccgaattacgttatcagcgtgcacggcgtaaaaagcgtcagcgacttcatcggcgcggaagaagcgcggaaaatggcccttgaactggagatgctgggcagggccggagatctttccggcgtactggcaaagaacggaacgttcattcaatacgcgaaagagcttatagtcaatgtagaaaagtatctggctaagacggacgcaaaatag

SEQ ID NO: 46526 - protein, 210 aa, Unknown
  Obtained from environmental sample
  misc_feature (1)..(210): Xaa is any amino acid
MDLMMPVMDGEEATKLIRSLGTEYASTVQIIALTAMPEGDAAEREKTLLGSGFNAVMYKPFTLETVDDFIKNWMNDKIKNCAIPPEKKEKIMEVDIPGVENEKVKKIYGKKFNIYLDVLRSYLDVVPKSLEEMSQVNKETLPNYVISVHGVKSVSDFIGAEEARKMALELEMLGRAGDLSGVLAKNGTFIQYAKELIVNVEKYLAKTDAK

SEQ ID NO: 46527 - DNA, 1875 bp, Unknown
  Obtained from environmental sample
  misc_feature (1)..(1875): n is a, c, g, or t
ttgcgatcattctgctgcaaaaggcttccaagattatccttgaagacagccttgaaggtattggttatctgggtgatgaggaggcgagatactgggaaggcagagaaaaccaggtattttgaggtaatacgcacgcttgcggcaataatgggcgattttcaaagtaccgaacctcttgagcggcgcgaccggtatgatgacgtcctgttggccgccctgaggtctcagcccaacattgtccgcatagccgccgtctataaacccaacgccattgacggcatggattcccgtttcataggccgggtcggctctacagccacgggacaatactcaatgacctgggcaagggataccggtgagattgcagcctcggcgaacctggacattcagggaacaatggattatttgaacgggccaaacgcgcgcaaggaccgggtagaagatcccacgccccttaaagtaaacggaaaagacacttttgttttcaggctgggagttccgattattaataatcaaaccagcgaagtagtcgggagcgtaacctgtcttttaactattgacggggcgcagcccatggtggaaaggaccattaaagggaaagaggcgattgtcgccatgtccatttacaccaacaccgggtttattatcgggagttatgtgccggaacgtataggcaagaacctgcgtgacgtggattctatctacggcaattatattaatgacgcgtatcaggcagttgttcaaggaaaggatttccagtgcaacagctattcagcagtgttgaaaacaaacgtgtcaattgacttaacgtcttttcagataggcgaatccgacgtaaagtggactataatgattgggtcatcggaagattacattttgaaagatgtaagggatatgatctattttaccgccatccctaccgcgatagccattataatagcggcgataattgtgtactttgtccttcacagcactacacaaccgatcgttaaggtagccgaaaccctcaaggacatctccgaaggcgaaggcgatcttacaagaagcatttccgtcgcttccaaggacgaggttggcgatcttgccctgtactttaacaaaacgctgtcaaaaattaaaaatcttgtcttgatcatcaagaaagagggggcaaacctccagaatatcgggaacgaccttgccagcaacatgaccgaaaccgccgcggcggttaatgaaattaccgccaatatccagagcatcaagggccgggttattaaccagtccgccagcgttaccgaaaccaacgcgaccatggaacaggttatcaacaacatcaacaaactcaacggtcatgtggaaagccagagccgtaatgtttcccaggtttcatccgccattgagcagatggtcgccaatatcagttccgtaaccaacacgctggtcagcaacgccaccaatgtaaagaatttaagggaagcctccgaagtaggacggaacggattgcaggaagtggcgacagatattcaggaaatagcccgcgaatccgaaggcttgctggaaattaacgcggttatggaaaatatcgccagccagaccaacctgctgtcaatgaacgcggcgattgaggcggcccacgcgggagaagcgggcaaaggctttgccgtagtcgccgatgaaatccgcaagctggcggagagttccagcgagcagtccaaaactatcggcacggtgcttaaaaagatagcggaatcgatcaccaaaataaccaaatctactgataacgtactgaagagatttgaagcgattgactccggcgtcaaggtagtggccgatcaagaagaaaattccctaacgcgatgggagagcagggaaaagggaccaagcaagtcctga

SEQ ID NO: 46528 - protein, 624 aa, Unknown
  Obtained from environmental sample
  DOMAIN (447)...(620): Methyl-accepting chemotaxis protein (MCP) signaling domain
  misc_feature (1)..(624): Xaa is any amino acid
MRSFCCKRLPRLSLKTALKVLVIWVMRRRDTGKAEKTRYFEVIRTLAAIMGDFQSTEPLERRDRYDDVLLAALRSQPNIVRIAAVYKPNAIDGMDSRFIGRVGSTATGQYSMTWARDTGEIAASANLDIQGTMDYLNGPNARKDRVEDPTPLKVNGKDTFVFRLGVPIINNQTSEVVGSVTCLLTIDGAQPMVERTIKGKEAIVAMSIYTNTGFIIGSYVPERIGKNLRDVDSIYGNYINDAYQAVVQGKDFQCNSYSAVLKTNVSIDLTSFQIGESDVKWTIMIGSSEDYILKDVRDMIYFTAIPTAIAIIIAAIIVYFVLHSTTQPIVKVAETLKDISEGEGDLTRSISVASKDEVGDLALYFNKTLSKIKNLVLIIKKEGANLQNIGNDLASNMTETAAAVNEITANIQSIKGRVINQSASVTETNATMEQVINNINKLNGHVESQSRNVSQVSSAIEQMVANISSVTNTLVSNATNVKNLREASEVGRNGLQEVATDIQEIARESEGLLEINAVMENIASQTNLLSMNAAIEAAHAGEAGKGFAVVADEIRKLAESSSEQSKTIGTVLKKIAESITKITKSTDNVLKRFEAIDSGVKVVADQEENSLTRWESREKGPSKS

SEQ ID NO: 46529 - DNA, 948 bp, Unknown
  Obtained from environmental sample
  misc_feature (1)..(948): n is a, c, g, or t
atgaccgagactgcggcggctataaatgagattaccgccaatatccagagcatcaaggggcgcgtcattaaccagagcgccagcgtaaccgagacaaatgccacaatggaacaggttattatcaacatcaacaaattaaacggtcatgttgaacaacaaagccaaaatgtctcacaggcgtcatccgccattgaggaaatggtggcgaacatcagttcagttaccaacacgctgatcaataactccgctaacgtaaaaacattgcaggaagcttccgaagtgggacggaccggattgcaggaagtagcctccgatattcaggaaatatcccgcgagtcagaaggcttgctggaaattaacgcggtaatggaaaacatcgccagccagaccaacctgctttcgatgaacgcggcaatagaagccgcccacgcgggtgaggcgggcaaaggcttcgccgtagtcgccgatgaaatccgcaaactggcggagagttccagcgaacagtccaagacgattggcacggtactgaaaaagatagcggagtcaattaaaaagattacagaatccacagataacgtacttaaaagattcgaggcgattgactcaggagttaagaccgtttcacagcaggaagaaaatgtccgcaacgcgatggaagagcagggacaggggagcaagcaagtcctgcaaagcgtaggcgatttaaatgaccttacacggcaggtaaagtccggcagtgaggaaatgctcagcggcagtcaggaagtaatgaaggaaagccggaatcttgaaagagtgacgcaggagatcacgggcggcatgaacgagatggcctccggcgcggatcagattaacgtggcggtaaataccgtcaacgagataagcgtcagaaaccgccagggcattgagtctctaacgagggaagtttcgaagtttaaagttaactaa

SEQ ID NO: 46530 - protein, 315 aa, Unknown
  Obtained from environmental sample
  DOMAIN (51)...(271): Methyl-accepting chemotaxis protein (MCP) signaling domain
  misc_feature (1)..(315): Xaa is any amino acid
MTETAAAINEITANIQSIKGRVINQSASVTETNATMEQVIININKLNGHVEQQSQNVSQASSAIEEMVANISSVTNTLINNSANVKTLQEASEVGRTGLQEVASDIQEISRESEGLLEINAVMENIASQTNLLSMNAAIEAAHAGEAGKGFAVVADEIRKLAESSSEQSKTIGTVLKKIAESIKKITESTDNVLKRFEAIDSGVKTVSQQEENVRNAMEEQGQGSKQVLQSVGDLNDLTRQVKSGSEEMLSGSQEVMKESRNLERVTQEITGGMNEMASGADQINVAVNTVNEISVRNRQGIESLTREVSKFKVN

SEQ ID NO: 46531 - DNA, 360 bp, Unknown
  Obtained from environmental sample
  misc_feature (1)..(360): n is a, c, g, or t
ttgctcccctgtccctgctcttccatcgcgttgcggacattttcttcctgctgtgaaacggtcttaactcctgagtcaatcgcctcgaatcttttaagtacgttatctgtggattctgtaatctttttaattgactccgctatctttttcagtaccgtgccaatcgtcttggactgttcgctggaactctccgccagtttgcggatttcatcggcgactacggcgaagcctttgcccgcctcacccgcgtgggcggcttctattgccgcgttcatcgaaagcaggttggtctggctggcgatgttttccattaccgcgttaatttccagcaagccttctgactcgcgggatatttcctga

SEQ ID NO: 46532 - protein, 119 aa, Unknown
  Obtained from environmental sample
  misc_feature (1)..(119): Xaa is any amino acid
MLPCPCSSIALRTFSSCCETVLTPESIASNLLSTLSVDSVIFLIDSAIFFSTVPIVLDCSLELSASLRISSATTAKPLPASPAWAASIAAFIESRLVWLAMFSITALISSKPSDSRDIS

SEQ ID NO: 46533 - DNA, 366 bp, Unknown
  Obtained from environmental sample
  misc_feature (1)..(366): n is a, c, g, or t
ttgtattcaaaaattatcgctgtagcctgctcttacgaagcgcttagttccaaacggccgcacaaggaagcaaaagacggttatacaggcatgcttgagttgttgaagaacgaaggcaagcaatacgatgacactatcgtcagggcgcttgttctttcactttcgatatacccaataggtttgtatgtactcctgtcaaacgggaaaaaagggcaggttatagacataaatcctgaaaataccaagttcccgattgtagagatttttggagagactactcccgacgggaaaaacagaacggtgcaaacatcacctaatgaaattagtatcgtgcggcccctaaaccgttcggagattgagaattaa

SEQ ID NO: 46534 - protein, 121 aa, Unknown
  Obtained from environmental sample
  misc_feature (1)..(121): Xaa is any amino acid
MYSKIIAVACSYEALSSKRPHKEAKDGYTGMLELLKNEGKQYDDTIVRALVLSLSIYPIGLYVLLSNGKKGQVIDINPENTKFPIVEIFGETTPDGKNRTVQTSPNEISIVRPLNRSEIEN

SEQ ID NO: 46535 - DNA, 1242 bp, Unknown
  Obtained from environmental sample
  misc_feature (1)..(1242): n is a, c, g, or t
atggagccttttcccgcattttttattgtactcgcgttaatactattcagcggacttttttcgctttttgattacgctcttggtttttgcaagaaatcgcgccttgagaaagaacatggcaaaatctacaaatctgttttaagggcgtttgaaaatcccagaaaattatcgcttgtctgccggtcatggatcaacctattaagaattttggcggcttttcttaccggctttactgttatacgctatctggaaaccgcgcgggcaggcggcattgaaagcgtacttgtcattgcggcatccgtgctggttttgggaacaattacgactcttcttgcggacgcgcttccaaaatttatttctcacagaanaccggaaaaaatcgccgcttttctgattgtattaataaaaatactcggtattcccgtgattccttttattcttccggcaatgaagatcgcttcgagctttcaccatgaagataacataacggaagatgaactgcatagtgtcctcttggaaagtgaaaaacagggcattatggaaagcaaagaacgcactatggtagaaggcgttttctatcttggggatcgtcctgtggaagcgtttatgactcaccgttcggaaattcaatggctggatgtaaacgcgccgtacaatgaaacaaaagaaaaagtaattgaacaccgtcagcgctgttacccggttgtagacggaagccccgatgaaataattggcgcggttgatcttgacgatatagttcttgatatggcgcagaccaatccccagggattacgcgcaattatgaaaaaagcgcagtttataccgcaaaccatgtcggcgctgaaagcgtttgaatcctttaagcacagtcaggccaactttttgtttgtaatggatgaatacggcggattatcaggggtaatttcacttagaatgttatttgaagaaatcgtcggagaactttccgcgcctgtaaaaaaagaagaacccataaaaaagcaggaagacggcagttggcttgcggacggcacattgaacatagacgacgtagcggaagcgctttcgcttgctaatcttcgggaaaagggcgacttccagacctttgccggttttgtcctctctcttgccgaggaacttccgcaagccggagacagcgtggagtataaaggctacagatttacggtaaaagaaatggacggcaaccgcatagacaaaattttaattaccaatataaaaaattaa

SEQ ID NO: 46536 - protein, 413 aa, Unknown
  Obtained from environmental sample
  SIGNAL (1)...(26)
  DOMAIN (5)...(184): Domain of unknown function DUF21
  misc_feature (1)..(413): Xaa is any amino acid
MEPFPAFFIVLALILFSGLFSLFDYALGFCKKSRLEKEHGKIYKSVLRAFENPRKLSLVCRSWINLLRILAAFLTGFTVIRYLETARAGGIESVLVIAASVLVLGTITTLLADALPKFISHRXPEKIAAFLIVLIKILGIPVIPFILPAMKIASSFHHEDNITEDELHSVLLESEKQGIMESKERTMVEGVFYLGDRPVEAFMTHRSEIQWLDVNAPYNETKEKVIEHRQRCYPVVDGSPDEIIGAVDLDDIVLDMAQTNPQGLRAIMKKAQFIPQTMSALKAFESFKHSQANFLFVMDEYGGLSGVISLRMLFEEIVGELSAPVKKEEPIKKQEDGSWLADGTLNIDDVAEALSLANLREKGDFQTFAGFVLSLAEELPQAGDSVEYKGYRFTVKEMDGNRIDKILITNIKN

SEQ ID NO: 46537 - DNA, 981 bp, Unknown
  Obtained from environmental sample
  misc_feature (1)..(981): n is a, c, g, or t
atgatcagatggccgagtcctaggagcctgttgatttgcgcgcctactttggaactctgctctcagataaaagcggaagttgattttttaacgcaaagcctgccttcttcctgccggaatacggcgcttcttatcggttcagtaaaaatagaaaaacaaattgaaaatttaagaaaagcaaaacccgttgtaattgtgggaaacccgggcagacttcttgttcttgcaaagatgaaaaagttaagggtaaacaacctgcgttttttaattttagatgaagcagaccgtcttaccgcgccagaatgtcttgaagaaacaaaagaattacttgctattattgagagtgtaacaaagcgttcgtcttcacgcgagccggcgaattccgttcaaagccgcctgtgcgccgccgcctgttccgctacggtcggaaagaaaacaagcgcacagttggggtctctttttgaatccgccgaaattgttgagtgcgccgatcatgaaattctgcgagagagaattgaacactgggcgctgttcagtgaaaagcgtcgtaaagctcaaatgctgcgttccctgttgtccgcgcttcagggcaagtccaaaaaagcgcgagttaaagcgcttgtttttacaagccgcggcgatgaagcggatttgattctttcacgcctcctgtaccatcatgtctccgcggcgggacttttcggcaaagtaaataaaaagccgcaagcctccgcggaacgcanagaggcgctcgattcattccgcgagggcagggtagtagtgcttgtttccacagaccttgccgcccgcggtcttgatataccggacattacccatgttattgcgcttgatgttcccgctgacggcgaagtgtacattcaccgctgcggcagaaccgggcgggcggggaagaagggcatcatggtaaccatcggcgatgaaacgcagatgcgcccttctgcctctctggagaaaaattaa

SEQ ID NO: 46538 - protein, 326 aa, Unknown
  Obtained from environmental sample
  DOMAIN (6)...(150): DEAD/DEAH box helicase
  misc_feature (1)..(326): Xaa is any amino acid
MIRWPSPRSLLICAPTLELCSQIKAEVDFLTQSLPSSCRNTALLIGSVKIEKQIENLRKAKPVVIVGNPGRLLVLAKMKKLRVNNLRFLILDEADRLTAPECLEETKELLAIIESVTKRSSSREPANSVQSRLCAAACSATVGKKTSAQLGSLFESAEIVECADHEILRERIEHWALFSEKRRKAQMLRSLLSALQGKSKKARVKALVFTSRGDEADLILSRLLYHHVSAAGLFGKVNKKPQASAERXEALDSFREGRVVVLVSTDLAARGLDIPDITHVIALDVPADGEVYIHRCGRTGRAGKKGIMVTIGDETQMRPSASLEKN

SEQ ID NO: 46539 - DNA, 873 bp, Unknown
  Obtained from environmental sample
  misc_feature (1)..(873): n is a, c, g, or t
gtgttttactacgccgcttatgtaaactccatcgtaaacaacataccccaggctatccgctactcggagaaagcacttggtttcaggcccggttacggtccggcaagatccctgcttgcaaaactccggtaccagagcggccaatacgcggaggcggcgcggctgtccgacgagtctattgcggctaaccgcgaggatctgtcggcatggtacctcaaagggctttcctatatacgacttggacggaacgaagattccattaccgtgttcggcaacgcgcttgccattgaccccaacgatgaatttacccgcgcggccctggaggacacccttatctccgtcaccagccttgaggaaccgcgccgggcaacctgggccaaatggcattttgacagggcaagggactaccgctcgcgcagcctttcggatcaggcgctttttgagtacaggcggggccttcgcctgaacccttacgcggttgatcgccgcgaatacgcggacctcctccgcatgcagggctatccagcgcgttatcttgaggaactccgcctgctgcaggaccagggaatcgccgaccgaagcatgaacgacgcggtggaaacctataattccctgctttcaggcgctctgttccaacgctggggtgttaagcccgtcgagattgacgggcggcattggaaaatcgcagtgttttcagtcgccggccaatccagctaccgccatgttgacgcanggtcggtcgcgtcatcatacataagggaaattttaatacacgaccgcgccgttgtcccaatgaccctggaagtccagcagccgtcgttttcgcaggcgttccgtaccgcgagggaggcaacgcggatttcttcctgttag

SEQ ID NO: 46540 - protein, 290 aa, Unknown
  Obtained from environmental sample
  DOMAIN (67)...(100): Tetratricopeptide repeat
  misc_feature (1)..(290): Xaa is any amino acid
MFYYAAYVNSIVNNIPQAIRYSEKALGFRPGYGPARSLLAKLRYQSGQYAEAARLSDESIAANREDLSAWYLKGLSYIRLGRNEDSITVFGNALAIDPNDEFTRAALEDTLISVTSLEEPRRATWAKWHFDRARDYRSRSLSDQALFEYRRGLRLNPYAVDRREYADLLRMQGYPARYLEELRLLQDQGIADRSMNDAVETYNSLLSGALFQRWGVKPVEIDGRHWKIAVFSVAGQSSYRHVDAXSVASSYIREILIHDRAVVPMTLEVQQPSFSQAFRTAREATRISSC

SEQ ID NO: 46541 - DNA, 498 bp, Unknown
  Obtained from environmental sample
  misc_feature (1)..(498): n is a, c, g, or t
atggaaaacgagcgcgacatctcccttaaaggcgagttattcgtcggcaggaccggctcggccgcggcgtctttttacgcctaccgcaccggtgtggacaggatgcgcaacgcgtcgcggggcattgtcgagcaaatggggaacgccctccctcttcgcggaaaacttatccagcggcgtcaggcgcagggccttatcgacaagggccgcgccgacaaggtcaaggaagccgccgtatacgatattgtcaaaaaagaaagatcccagctcgcgaaccagggaattggccttgtttattcgcccgaggatctggtgggaaaaattacaatcgaagccgttgatgaggaagtagcatcgggtaaacttgcgcgtaacgggttctttgaccgcatagaggaaggcgatgaggttttcttcatccctgaaggcggttataaagcccccgcagagacggccgcaaacccggaactaagggccttactgcgtaccttaagatag

SEQ ID NO: 46542 - protein, 165 aa, Unknown
  Obtained from environmental sample
  misc_feature (1)..(165): Xaa is any amino acid
MENERDISLKGELFVGRTGSAAASFYAYRTGVDRMRNASRGIVEQMGNALPLRGKLIQRRQAQGLIDKGRADKVKEAAVYDIVKKERSQLANQGIGLVYSPEDLVGKITIEAVDEEVASGKLARNGFFDRIEEGDEVFFIPEGGYKAPAETAANPELRALLRTLR

SEQ ID NO: 46543 - DNA, 846 bp, Unknown
  Obtained from environmental sample
  misc_feature (1)..(846): n is a, c, g, or t
atgcaaagaattttagacacatctgaacttatccctgtaatcgccgcgcttgcgaagaaagcttgttacgaattgggcgatgatgtaatagacgctttgcgttatgcgcaaaacagggaggagtctccttacggcagagattgcctgagccagcttgtcgaaaacgccgaatacgcgaaaaaagaacaaatcgcctgctgtcaggacacaggcacatgcaatgtcatcatggaaataggccaggagctttcatggaaaggcatgcccctttttgacgcggtcaacgagggagtgcgccggggctacgaggaaggataccttagaaaatccatggtggcggatccattcgacagggttaacacgggcgataatacgcctgcaatgctgcacacggagatcgttcccggcgacagggtgtcggtaaccgtcatgccaaaaggcggtggctgcgagaacatgggggcgttttgtacgctgttgccctccgacggagtacatggtgtaatacaatttgtaatacagactgtggataaggcaggcggcaaagcctgccctcccctgcttgtcggcgtagggatcggcggcagcatggacaaatgcgtgtggctcgcaaaaaagtccctgctccgtccgataggcagccgcaattccaatcctttctattcaaacatggaaacggaactgctggaaaagataaacaatttaggtcttggccccatgggaatgggcggcaggatcaccacccttgacgtgcatgtcgaatactgcccatgtcatataacggccctgcccgtggcagtaaacctccagtgccacgccagccgcagcgccagagcggagctttaa

SEQ ID NO: 46544 - protein, 281 aa, Unknown
  Obtained from environmental sample
  DOMAIN (10)...(281): Fumarate hydratase (Fumerase)
  misc_feature (1)..(281): Xaa is any amino acid
MQRILDTSELIPVIAALAKKACYELGDDVIDALRYAQNREESPYGRDCLSQLVENAEYAKKEQIACCQDTGTCNVIMEIGQELSWKGMPLFDAVNEGVRRGYEEGYLRKSMVADPFDRVNTGDNTPAMLHTEIVPGDRVSVTVMPKGGGCENMGAFCTLLPSDGVHGVIQFVIQTVDKAGGKACPPLLVGVGIGGSMDKCVWLAKKSLLRPIGSRNSNPFYSNMETELLEKINNLGLGPMGMGGRITTLDVHVEYCPCHITALPVAVNLQCHASRSARAEL

SEQ ID NO: 46545 - DNA, 447 bp, Unknown
  Obtained from environmental sample
  misc_feature (1)..(447): n is a, c, g, or t
ttggcctttgtcggcgatgtggaagccgtggacgccacgatcctcaactccgcgctggacgacgggattattccggtggtttcttccgtggcctacggcttaggcgaggacgagggccgctcgctcaacataaacgccgacattgccgccgcgaaaatcgccggggccatcaaggcggaaaagctcatgcttatgacggacgtacagggcatactccgcgatgtccaggatacggcctcattaatcaggcagataaatcgctctgagttggaagccctcaaaaaggacggcgttttcagcaagggcatgattccaaagattgactgctgcctccttgccatggacggaggcgtcaaaagaactcacattattgacggacgcttgccccatgcccttttaatcgaactttttaccgacgaaggcatgggcactatgatagaattgtag

SEQ ID NO: 46546 - protein, 148 aa, Unknown
  Obtained from environmental sample
  misc_feature (1)..(148): Xaa is any amino acid
MAFVGDVEAVDATILNSALDDGIIPVVSSVAYGLGEDEGRSLNINADIAAAKIAGAIKAEKLMLMTDVQGILRDVQDTASLIRQINRSELEALKKDGVFSKGMIPKIDCCLLAMDGGVKRTHIIDGRLPHALLIELFTDEGMGTMIEL

SEQ ID NO: 46547 - DNA, 702 bp, Unknown
  Obtained from environmental sample
  misc_feature (1)..(702): n is a, c, g, or t
atgaacggaaaagaacagaagtatcagaacgcggaaatagccgagattctcattcacgccttgccgtatatccagcaatttcagggcaaaaccatagtggtcaaatacggtggcaacgcgatgatcaacgaggagcttaaggccgccgtaattcaggacgttattcttatgggttgcgtgggaatccgtaccgttctggttcacggcggtggccccgagattgacgccatgcttaaaaaaaccggaaaagaaagccgtttcatcaatggccttcgttacaccgacgaggatacaatggaaatcgtccagatggttctctgcggcaagctgaacaaagacatctgctcccttatccagcacgcaggcggcagggccgtgggcctttgcggcatcgacggcgctctgcttcaggctcgccgaaaaagcggcgaagaccttggcctttgtcggcgatgtggaagccgtggacgccacgatcctcaactccgcgctggacgacgggattattccggtggtttcttccgtggcctacggcttaggcgaggacgagggccgctcgctcaacataaacgccgacattgccgccgcgaaaatcgccggggccatcaaggcggaaaagctcatgcttatgacggacgtacagggcatactccgcgatgtccaggatacggcctcattaatcaggcagataaatcgctctga

SEQ ID NO: 46548 - protein, 233 aa, Unknown
  Obtained from environmental sample
  DOMAIN (30)...(205): Amino acid kinase family
  misc_feature (1)..(233): Xaa is any amino acid
MNGKEQKYQNAEIAEILIHALPYIQQFQGKTIVVKYGGNAMINEELKAAVIQDVILMGCVGIRTVLVHGGGPEIDAMLKKTGKESRFINGLRYTDEDTMEIVQMVLCGKLNKDICSLIQHAGGRAVGLCGIDGALLQARRKSGEDLGLCRRCGSRGRHDPQLRAGRRDYSGGFFRGLRLRRGRGPLAQHKRRHCRRENRRGHQGGKAHAYDGRTGHTPRCPGYGLINQADKSL

SEQ ID NO: 46549 - DNA, 705 bp, Unknown
  Obtained from environmental sample
  misc_feature (1)..(705): n is a, c, g, or t
atggcgggcggacaaaaaaggggcacggtggtggctgcgggaactgccgtggcgccgtggagccatgcccaaggggccgcgaccagtgcccaaaggatcggaaggcgcagccgaaaacttccccaaaaattgttgatcattagaggaaccgcaagtgcggctgcgtctacgcttggcggtcgtaaaccgccaccgcaaacagccagtcccccagcctgttcaggtacgtccccacccactgcggtgcctccccggacgcgcaaagctgcgccgccagccgttcagcccgacggcaaacggtcctcgcgtggtgcgccgcgaccgtcctttcgctacccgcaggcagcagaaaggcccgtggtccgccgtcaggcagcatcctgtcgatgtccgcctccatgtcgccggtcgaaagcctcgtcctctgcaccgcgcaggcccccgcagggtccgccaccgcagcgcccagcgcgaacatgtcccactgcattgcctccagtttcccgtccagccccgcgtccccgcccgtgtgcagccgcagcgcaccaagcagcgcgttcagctcgtccagcgccccgcacgcctccagccttgggtgccacttcggcacacgcgcaccgccaatcagcgaagtctccccgcagtcccccgagcgcgtgtatatcttcatcggcatcccctgatccactagctactagctactag

SEQ ID NO: 46550 - protein, 234 aa, Unknown
  Obtained from environmental sample
  SIGNAL (1)...(26)
  misc_feature (1)..(234): Xaa is any amino acid
MAGGQKRGTVVAAGTAVAPWSHAQGAATSAQRIGRRSRKLPQKLLIIRGTASAAASTLGGRKPPPQTASPPACSGTSPPTAVPPRTRKAAPPAVQPDGKRSSRGAPRPSFRYPQAAERPVVRRQAASCRCPPPCRRSKASSSAPRRPPQGPPPQRPARTCPTALPPVSRPAPRPRPCAAAAHQAARSARPAPRTPPALGATSAHAHRQSAKSPRSPPSACISSSASPDPLATSY

SEQ ID NO: 46551 - DNA, 522 bp, Unknown
  Obtained from environmental sample
  misc_feature (1)..(522): n is a, c, g, or t
gtggatcaggggatgccgatgaagatatacacgcgctcgggggactgcggggagacttcgctgattggcggtgcgcgtgtgccgaagtggcacccaaggctggaggcgtgcggggcgctggacgagctgaacgcgctgcttggtgcgctgcggctgcacacgggcggggacgcggggctggacgggaaactggaggcaatgcagtgggacatgttcgcgctgggcgctgcggtggcggaccctgcgggggcctgcgcggtgcagaggacgaggctttcgaccggcgacatggaggcggacatcgacaggatgctgcctgacggcggaccacgggcctttctgctgcctgcgggtagcgaaaggacggtcgcggcgcaccacgcgaggaccgtttgccgtcgggctgaacggctggcggcgcagctttgcgcgtccggggaggcaccgcagtgggtggggacgtacctgaacaggctgggggactggctgtttgcggtggcggtttacgaccgccaagcgtag

SEQ ID NO: 46552 - protein, 173 aa, Unknown
  Obtained from environmental sample
  DOMAIN (9)...(172): Cobalamin adenosyltransferase
  misc_feature (1)..(173): Xaa is any amino acid
MDQGMPMKIYTRSGDCGETSLIGGARVPKWHPRLEACGALDELNALLGALRLHTGGDAGLDGKLEAMQWDMFALGAAVADPAGACAVQRTRLSTGDMEADIDRMLPDGGPRAFLLPAGSERTVAAHHARTVCRRAERLAAQLCASGEAPQWVGTYLNRLGDWLFAVAVYDRQA

SEQ ID NO: 46553 - DNA, 315 bp, Unknown
  Obtained from environmental sample
  misc_feature (1)..(315): n is a, c, g, or t
atggcgcggcagttgaggggaccttgttccgccggccgctctgtgctgctgatcgaggatttgatcagcaccggggggtcgagcatcaagtgcgtggaggccctgcggctggagggcgccgaggtgcttgggttgctggcgcttttttcgtacgggctgcggcaggcgaacacggctttcggcgaggccaaggtgccgtgcaggacgctggctggcttcaaggaactggcggagatggcgttggagagcgggtatgtctcgaaggaggggatggcggctctgcacaagtggcaggaactagtagctagtagctag

SEQ ID NO: 46554 - protein, 104 aa, Unknown
  Obtained from environmental sample
  misc_feature (1)..(104): Xaa is any amino acid
MARQLRGPCSAGRSVLLIEDLISTGGSSIKCVEALRLEGAEVLGLLALFSYGLRQANTAFGEAKVPCRTLAGFKELAEMALESGYVSKEGMAALHKWQELVASS

SEQ ID NO: 46555 - DNA, 1059 bp, Unknown
  Obtained from environmental sample
  misc_feature (1)..(1059): n is a, c, g, or t
gtgctgcccctgcaccacacatacccaaccacttgctcttttatggctccaatttttaccggtatccccactgtaatcacggagaaaatcgtgggtaaagtggtggtagatgatataagagactccggagtgactttcctaattgccgttccgttgctgtatgacaaggtaatgaccgccattgacgcgggttataaaaagctgccggggatcatccgcggtcccttgaacgtagtgaggaaaatcgcccttgccgaggcaaaaaaaggaagacccgaatttgggcgaaaggtattccgcttcatacgcaaaaaggccggacttcattcggtgacaatcatggttgccggaggcggccccctcgacccggctaccgctgactttttcgattcatttggttttaacattgtccacggatacggcatgagcgaaaactctccgcttatcagtgttaataccccgcggcataaacgtaatgtgtcggtcggccttccggtaagctacaccgaagtaaaaatccttgacacaacgccggagggcatcggtgaaatagcggtaaaatctccgtcggtaatgcttggctattttgaaaatgaagaagcgaccaaagaggtgataaataaagacggttatctgttgaccggcgatctgggctatcgcgacgaggacggtttcatctacattaaaggtcgcaagaaaagcctgatcgtatcctccggcggaaaaaatatctacccggaagaaatagaaattcaatttaataattcacgcgtaattggtgaagtccttgttatgggtcgcaaggaacctgcccacggaggcgagaagattattgccgtaacggttcctaactatgacatgatcaaggaagatcatcccggcagggaaaacgatgaaaattttgtcaaaagtttaataaagaaggccattgaggaagcaaaccgtaacctgccaagctacaagaagatcagcgaatttatattacggaaagaaccatttgaaaaaaacgcccagcagaagatacgaaggttcatgtacaaggagtatgaaaaaccctag

SEQ ID NO: 46556 - protein, 352 aa, Unknown
  Obtained from environmental sample
  DOMAIN (2)...(264): AMP-binding enzyme
  misc_feature (1)..(352): Xaa is any amino acid
MLPLHHTYPTTCSFMAPIFTGIPTVITEKIVGKVVVDDIRDSGVTFLIAVPLLYDKVMTAIDAGYKKLPGIIRGPLNVVRKIALAEAKKGRPEFGRKVFRFIRKKAGLHSVTIMVAGGGPLDPATADFFDSFGFNIVHGYGMSENSPLISVNTPRHKRNVSVGLPVSYTEVKILDTTPEGIGEIAVKSPSVMLGYFENEEATKEVINKDGYLLTGDLGYRDEDGFIYIKGRKKSLIVSSGGKNIYPEEIEIQFNNSRVIGEVLVMGRKEPAHGGEKIIAVTVPNYDMIKEDHPGRENDENFVKSLIKKAIEEANRNLPSYKKISEFILRKEPFEKNAQQKIRRFMYKEYEKP

SEQ ID NO: 46557 - DNA, 738 bp, Unknown
  Obtained from environmental sample
  misc_feature (1)..(738): n is a, c, g, or t
ttgttatttgttacctgttatttgttatttgttaatatggggttttcaatgtttccatctcaatcacctaagtcctcttacaagtactttgatgtgctaatgacgttatttgtcgcggttcttgttctgagtaacattgcatcttcggcgaaaattgtcgatctgggtttttctatcttcggaatccctatggcgtttgacggcggcactttgctttttccgcttgcctatgtactcggcgacatactcaccgaagtgtacggctttagggccgcgaaacgggttatctggacaggctttgcggtactggcgttttcatcgctggtgttttttgtccttaagctccttcccggcgaaagctcctgggaggccgagactggctccgccgcgtacaacgccgttcttggcgggatgagcagcgggggccttgtccttgcaagcctcgcgggataccttgtaggggaattatccaattcagccgtactgtcaaagatcaaatttttgatgaacggacgatggctctggttcagggccatggtttccagccttgtcggggaattcctggacagtttaatttttgtgttcatcgcctgcctcaccggggttttcggctggaatcttttcctgagccttgcgctgactaactacatactgaaatgcctcattgaagcgctggtgctgcctcttacatatacagcggtacgtttgttgaaaaagggcgaggcggaacaggtgtga

SEQ ID NO: 46558 - protein, 245 aa, Unknown
  Obtained from environmental sample
  DOMAIN (59)...(220): Uncharacterized ACR, YhhQ family COG1738
  misc_feature (1)..(245): Xaa is any amino acid
MLFVTCYLLFVNMGFSMFPSQSPKSSYKYFDVLMTLFVAVLVLSNIASSAKIVDLGFSIFGIPMAFDGGTLLFPLAYVLGDILTEVYGFRAAKRVIWTGFAVLAFSSLVFFVLKLLPGESSWEAETGSAAYNAVLGGMSSGGLVLASLAGYLVGELSNSAVLSKIKFLMNGRWLWFRAMVSSLVGEFLDSLIFVFIACLTGVFGWNLFLSLALTNYILKCLIEALVLPLTYTAVRLLKKGEAEQV

SEQ ID NO: 46559 - DNA, 1716 bp, Unknown
  Obtained from environmental sample
  misc_feature (1)..(1716): n is a, c, g, or t
atgcagcaggaagttctcctgggcataggcgggattcgcgccctgcgcgccctggggatcaaccccgccgcaacccacatgaacgagggccacgcggctttcctcgggcttgagcgtgtccgcgaaatcatgactgaaaagaatttcacctttgaagaggcaagagaagcgatctggccgactaatatcttcaccacccacacgccggttccggccggtaatgagcgttttgacatcagcctggttgaaaaatacttccgctcctggccgcagattctcggtatatcatggaaggattttcttggtcttggacggattaatgtcaacgatgacaaagaaactttctgccttaccgtgcttgccttaaagatggcggcctacgccaacggcgttgccaaactgcatggggttgtttcccgcgatatgtggcagggactttggccgggagttccaataaacgaagtccccataggccatgtcaccaacggcgtacatccccgcacctgggtttccagcggtatgatagagcttttagatcgctatttcggcccccattttgagaacaagccgacagacctgcatatttgggaccgcatgagcagaatcagcgacgaggagttatggcgtacccatgaacgccgccgtgaaaggctggttgcctttgcccgtgaccgcatacgcgaacagtacaagcgtaccggcgctgtggaacgccgcgtccagcaggcagaagacgccctttcaccctatgccctaaccctgtgcttcgcccgccgctttgccacttacaagaggggtaatctgctgttacgcgatccagaacggcttttacgactggtaagggacaatgaccgcccaattcagcttatattcgccggcaaggcccacccccacgatatgcccggcaaggaccttatccgcgatatcgtccattttgccgaaaggtacgatgtcacgagccgcattgtctttgtagagaattacgatatgaccgtcgccaaataccttacatcgggcggcgacatatggcttaatacgccgcggcggccgatggaagcgtcgggtaccagcggcatgaaggccgcgatgaacggcgtccttaactgctccatcctggacggctggtgggacgaggcttacaatccggaagtgggctgggccattggccacggtgagcagtatgctgacgagaggctccaggacgatattgaaagcaaggccctgtacgatcttcttgagcgggatataatcccactcttttaccagcgcggcagggacggccttccccgcgaatggataaagaggatgaaggattgcatgcgccagatagggcaatccatgtcatgtcacaggatgttgatggattattccaacaacttctatttccccgccctaaaaaactaccgcaaactgataaaagatgaatatgctgacgcanaatcacttgcggcgtattttggcaagctgcgtgattcctgggacagcctcaagatcgtanagatcgaggccaataccaagccgaatatgcagcgcggtgaatcactcaatgttacggcccatatcgacctcggcaaaatgtcgcctaacgatctgctggtagaaactgtattacggcgcggtatcgaaccagagcaacgagattaccaatgcccacaggatcgagatgaagtgggtcagcaacaaagacggcctgaaccagtaccatgtgcgcgttga

SEQ ID NO: 46560 - protein, 571 aa, Unknown
  Obtained from environmental sample
  DOMAIN (4)...(448): Carbohydrate phosphorylase
  misc_feature (1)..(571): Xaa is any amino acid
MQQEVLLGIGGIRALRALGINPAATHMNEGHAAFLGLERVREIMTEKNFTFEEAREAIWPTNIFTTHTPVPAGNERFDISLVEKYFRSWPQILGISWKDFLGLGRINVNDDKETFCLTVLALKMAAYANGVAKLHGVVSRDMWQGLWPGVPINEVPIGHVTNGVHPRTWVSSGMIELLDRYFGPHFENKPTDLHIWDRMSRISDEELWRTHERRRERLVAFARDRIREQYKRTGAVERRVQQAEDALSPYALTLCFARRFATYKRGNLLLRDPERLLRLVRDNDRPIQLIFAGKAHPHDMPGKDLIRDIVHFAERYDVTSRIVFVENYDMTVAKYLTSGGDIWLNTPRRPMEASGTSGMKAAMNGVLNCSILDGWWDEAYNPEVGWAIGHGEQYADERLQDDIESKALYDLLERDIIPLFYQRGRDGLPREWIKRMKDCMRQIGQSMSCHRMLMDYSNNFYFPALKNYRKLIKDEYADAXSLAAYFGKLRDSWDSLKIVXIEANTKPNMQRGESLNVTAHIDLGKMSPNDLLVETVLRRGIEPEQRDYQCPQDRDEVGQQQRRPEPVPCAR

SEQ ID NO: 46561 - DNA, 582 bp, Unknown
  Obtained from environmental sample
  misc_feature (1)..(582): n is a, c, g, or t
atgagttcccctaacttacaaaaatcctcttacaggtactttgacattataatgacgttttttgtcgttgttcttgttctgagtaatatcgcctcgtcggcgaaaattgttgacctgtgtttttctgttttcgggatccgccttgcctttgacggcggcactttgctttttccgctggcttatgtgctcggagacatactcacggaagtgtacggctttaaggccgctaagcgggttatctggacaggctttgggatactggcgttttcagcgctggtatttcttgtccttaggctccttcccggcgaaagctcctgggaagccgagaccggttccgccgcgtacaacgccgttcttggcgggatgagctcaggcggcattgtcctcgcaagcctcgcgggatacctggtgggggaattgtccaattcggcgtcactttcaaagatcaaagttttaacgaagggacgctggctctggttcagggccatggtttccagccttatcggtgaacttctggacagtttaatttttgtgttcatcgcctgccttatgggggtcttggctggaatcttctcgccataa

SEQ ID NO: 46562 - protein, 193 aa, Unknown
  Obtained from environmental sample
  DOMAIN (43)...(190): Uncharacterized ACR, YhhQ family COG1738
  misc_feature (1)..(193): Xaa is any amino acid
MSSPNLQKSSYRYFDIIMTFFVVVLVLSNIASSAKIVDLCFSVFGIRLAFDGGTLLFPLAYVLGDILTEVYGFKAAKRVIWTGFGILAFSALVFLVLRLLPGESSWEAETGSAAYNAVLGGMSSGGIVLASLAGYLVGELSNSASLSKIKVLTKGRWLWFRAMVSSLIGELLDSLIFVFIACLMGVLAGIFSP

SEQ ID NO: 46563 - DNA, 414 bp, Unknown
  Obtained from environmental sample
  misc_feature (1)..(414): n is a, c, g, or t
gtggggcctgtggttgcgtacgcgtttgcggcccatgtgggagacgggagccggttcagcacgggggcgcaggtaagcaacttcatcgggtttgtcccgaggctggactattccgggacaatccagcacaacgggccaattacgaaacacgggaacgggtatttgcggggtttgctggttcaggctgcttggtctgcggttcgttcaaagtccggcggagctttacaggaacggtataagtctaagactgcgggccagggtacgagcaagaagaagaccatagtctcaataggccgccggttagctgaaatcatgtactcggtattgaaaaacaaaagcaagtatgagccgcggcaatggaaaggggtaaaagataaaacgaccgtgatggtcgaacaagcaatgagcgcttag

SEQ ID NO: 46564 - protein, 137 aa, Unknown
  Obtained from environmental sample
  DOMAIN (1)...(79): Transposase IS116/IS110/IS902 family
  misc_feature (1)..(137): Xaa is any amino acid
MGPVVAYAFAAHVGDGSRFSTGAQVSNFIGFVPRLDYSGTIQHNGPITKHGNGYLRGLLVQAAWSAVRSKSGGALQERYKSKTAGQGTSKKKTIVSIGRRLAEIMYSVLKNKSKYEPRQWKGVKDKTTVMVEQAMSA

SEQ ID NO: 46565 - DNA, 1641 bp, Unknown
  Obtained from environmental sample
  misc_feature (1)..(1641): n is a, c, g, or t
atgggaaaatctttaaacggcatgagccttggcggattagcgatgggtatagggttggtttccgatataagcgtaataattattgatctgcttcatcaggcttttggggaaagggaaaccgctcccataccggaagaaatcggaaacaaagcggcatctatatcggggtcaaataccgcttctaccattacaactgcgcttgtgttcattccgattatcatgctgccgggaccgttaggcggtcttttcggcgacattgctatcgcccttgttacatctgtagcggcgggctggctttacgctcaattttttcttccttctctttattctatgttcttcggcgatccattaaaaacagccaataaaaatagattgataaaaactaattcagtttttacaaatggcagtcttgaaaaaaaatattgcttttttctttcaaatgttcttcgtaattcgggtaagtttttagccgttacggcggggttaagcgttttagggtgttttacgcttttaacccgcccggctgtattcattaatcccgatgaagctgaggaggtgcgagtttccatagcatttcctcaaggaactttattggattccatgaccaataataatgtcccctccaaaataggttcaagactgccgtttgtaaaaactgtttatggaattgcgggcgcggaagaagcggacgttatcagaagggcggatattgattataaaaaagaagaattaattttgcactgtattttagaaaagggatataaaccgcanaaagcgttagatgaaatcaaaaaacttttggaaaacagcaatgaatattcttgtacggcgtattttccgaaagacaggattgaggttcttttagggttgtcggcggagcggacttttgtaatcaaagggaaggacagggaggaactgcttgaacgagtgagttttacacaaaatgaatttaactccgcgacaacagcggtaaatttctgtccgtggggaaaaagacctgaaatacggatatacccaaacagggaaacagccgcttttctttcaattcccgcgtcgcagatagcggaaacactctacattcttaatgaaggagtcataacaacaaagcttgaaattgaaggaaaaccgctgaatgttcgcgtaacaggagcgcggaaaactcataacgattcaattcagtcgcttgaaaaaataccgttgaagtcaggacagggaaaaaatgtttatcttggctcccttgcaaaaatagaacaaaaagaagcggaagcgtctcttgcgcggttggacagatccgatgtcgtctacgccgacatatctgcagtaaagaaaattccggcttccgttaaaaaattaaccgcgcgatttccttggtttacaggagccgatgaatcggtattcagccgctacaaaaactctttgattttttacattatcctggtgcttgtccttttgtatatgacaatgggcgctcaatttgaatctttcctacttccgcttattcttatgttgagcataccattttcacttgccggagcggggcccgctctttttatcagcggctcaaaaattgattcgggcgcggtacttgggttaaccgccctattcgggcttgttgtgaataacagcccttattctctttga

SEQ ID NO: 46566 - protein, 546 aa, Unknown
  Obtained from environmental sample
  misc_feature (1)..(546): Xaa is any amino acid
MGKSLNGMSLGGLAMGIGLVSDISVIIIDLLHQAFGERETAPIPEEIGNKAASISGSNTASTITTALVFIPIIMLPGPLGGLFGDIAIALVTSVAAGWLYAQFFLPSLYSMFFGDPLKTANKNRLIKTNSVFTNGSLEKKYCFFLSNVLRNSGKFLAVTAGLSVLGCFTLLTRPAVFINPDEAEEVRVSIAFPQGTLLDSMTNNNVPSKIGSRLPFVKTVYGIAGAEEADVIRRADIDYKKEELILHCILEKGYKPXKALDEIKKLLENSNEYSCTAYFPKDRIEVLLGLSAERTFVIKGKDREELLERVSFTQNEFNSATTAVNFCPWGKRPEIRIYPNRETAAFLSIPASQIAETLYILNEGVITTKLEIEGKPLNVRVTGARKTHNDSIQSLEKIPLKSGQGKNVYLGSLAKIEQKEAEASLARLDRSDVVYADISAVKKIPASVKKLTARFPWFTGADESVFSRYKNSLIFYIILVLVLLYMTMGAQFESFLLPLILMLSIPFSLAGAGPALFISGSKIDSGAVLGLTALFGLVVNNSPYSL

SEQ ID NO: 46567 - DNA, 1218 bp, Unknown
  Obtained from environmental sample
  misc_feature (1)..(1218): n is a, c, g, or t
ttgagacaaataatcattttttggtatattcttcacatggactacaaagaagctggtgttgacattgaggaaggctaccgcgccgccgcccattacaaagggctttccgaaatgaccataaacggtaaggctgcggttctaggcggaatcggcagttttgcaggattgtattcgctgaaggattttttatcaggcgttggcgctatggaagaaccggtactggtttccggcacggacggggtcgggacaaaactggacattgcctttaaattaaaaaaattcgatacagtgggcattgactgcgttgccatgtgcgtcaacgatgtgctgtgccagggggccaagcctctgttctttctggattaccttgcctgcgggaaactcgatgccgacatggcagcggaaattgtcaaaggtgtcgcaattggctgccgggaaacgggtagcgtgctgcttggcggagagaccgccgaaatgccaggtttttacgaaaacggaaaatatgacatagccggtttttcggtcggtattgttgaccgaaaaaaaatagttgacggttccaaaatctgcgaaggtgacaccctgcttggaataagctcgtcaggcccccattcgaacggtttcagcctgatacgcaaaataattacggacttgaacgaggactttggcgggatgcccatcggcagggcccttctggaaccaacgcgcctgtatgtaaaacctgtattgggtttgatggaaaaaattgagatacgcggcatggccaatattacgggcggcggtttctacgaaaacatcccccgaatttttgcccaacggaattataccgcggtgatccggcaaggctcctgggacattccgccgattttcgcaaggcttgccgcgggctgctataacgcaggctgctccggcccccttgcccaaaggcagggcgttgaattgctaaaagttgacgcggcgttaaaaaaacaaatgtttaatacttttaacatgggtataggtttcgtgctggcgcttgcgccggctgacgttgaagcggcgaaagagcatttagacaactgcggttttccttcccgggaaatcggctatgttgaaaaaaacgacgggaataaaggggatacccccttcggttcctcattcgctcagtcatgtccgtgcgagcacggacgcgacttcgctccattcgtcaataacgcgcagggactgcgtatacaataa

SEQ ID NO: 46568 - protein, 405 aa, Unknown
  Obtained from environmental sample
  DOMAIN (190)...(375): AIR synthase related protein, C-terminal domain
  misc_feature (1)..(405): Xaa is any amino acid
MRQIIIFWYILHMDYKEAGVDIEEGYRAAAHYKGLSEMTINGKAAVLGGIGSFAGLYSLKDFLSGVGAMEEPVLVSGTDGVGTKLDIAFKLKKFDTVGIDCVAMCVNDVLCQGAKPLFFLDYLACGKLDADMAAEIVKGVAIGCRETGSVLLGGETAEMPGFYENGKYDIAGFSVGIVDRKKIVDGSKICEGDTLLGISSSGPHSNGFSLIRKIITDLNEDFGGMPIGRALLEPTRLYVKPVLGLMEKIEIRGMANITGGGFYENIPRIFAQRNYTAVIRQGSWDIPPIFARLAAGCYNAGCSGPLAQRQGVELLKVDAALKKQMFNTFNMGIGFVLALAPADVEAAKEHLDNCGFPSREIGYVEKNDGNKGDTPFGSSFAQSCPCEHGRDFAPFVNNAQGLRIQ

SEQ ID NO: 46569 - DNA, 636 bp, Unknown
  Obtained from environmental sample
  misc_feature (1)..(636): n is a, c, g, or t
atggcagccgaatcaaaagtaaaaattatggtccttgtttcgggcggcgggacaaatctacaggccctgcttgacgcgcagaaaaatgaggccttcggttccggcgactcagggggcgagatcgtccttgttgtgtcagataacgcaggggcctgcgcattggacagggcaaaagccgccggagtcgcggtggctgtggaggagcctgacaggaacatccccaaagataaacgccggcaggagctgtcggatcgcattttcatgttagctgaaacttactatatagatcttatcgttttggcaggctttctctcgatattgaaaggtgagatcgttacctgctattcaggcaggatcatcaacctgcacccaagcctgctgccgaaattcgggggcgacggaatgtacggcgggcgtgtgcaccgcgccgtgctggacgccgaggaaaaagaatccggctgtacggtgcatcttgtggacgcgggggtcgataccggctccatacttttgcaacgcaaggttccggtgctgtcaggcgacacgccggatactttggccaataggatacatacagaagaacatatcgccattgtggaagcggtaaagatgatggttgaacggataaataacaactaa

SEQ ID NO: 46570 - protein, 211 aa, Unknown
  Obtained from environmental sample
  DOMAIN (7)...(201): Formyl transferase
  misc_feature (1)..(211): Xaa is any amino acid
MAAESKVKIMVLVSGGGTNLQALLDAQKNEAFGSGDSGGEIVLVVSDNAGACALDRAKAAGVAVAVEEPDRNIPKDKRRQELSDRIFMLAETYYIDLIVLAGFLSILKGEIVTCYSGRIINLHPSLLPKFGGDGMYGGRVHRAVLDAEEKESGCTVHLVDAGVDTGSILLQRKVPVLSGDTPDTLANRIHTEEHIAIVEAVKMMVERINNN

SEQ ID NO: 46571 - DNA, 483 bp, Unknown
  Obtained from environmental sample
  misc_feature (1)..(483): n is a, c, g, or t
atgaaaaggaaggcgttgatcagcgtattttacaaagacgggattctggaattggcttcttatttaaacggggcagggtgggagattctttcaaccggcggcacttcaaaacatctgaaggaaaacaatatccctgtaaccgatgtttcctcggtgactggttttcccgaatgccttgacggcagggtaaagaccctgcacccggcaatccacgccggccttctggcccgccgcgatgaaaaaacccacatggatacgcttcaggcgcttgggcttggaaccatcgaccttgtatgcgtcaacctgtatccgttttttgaaaaagtacaggctaatatgagccttgaacagaccgttgagtttatcgacataggcgggcctactatgcttcgttccgccgcgaaaaattatcacgatgttattgtccttacagaccctgcggattacgccgaagcgataacggccgaaagcgactcgcgataa

SEQ ID NO: 46572 - protein, 160 aa, Unknown
  Obtained from environmental sample
  DOMAIN (14)...(128): MGS-like domain
  misc_feature (1)..(160): Xaa is any amino acid
MKRKALISVFYKDGILELASYLNGAGWEILSTGGTSKHLKENNIPVTDVSSVTGFPECLDGRVKTLHPAIHAGLLARRDEKTHMDTLQALGLGTIDLVCVNLYPFFEKVQANMSLEQTVEFIDIGGPTMLRSAAKNYHDVIVLTDPADYAEAITAESDSR

SEQ ID NO: 46573 - DNA, 1536 bp, Unknown
  Obtained from environmental sample
  misc_feature (1)..(1536): n is a, c, g, or t
ttggtaacggaaagccggtactcatggagaacggagacacggttaaacgaaaacctcaatcttggttttttgattctcgattattgcaacgggcattattctcttgctttgcccgtatttctgcgaaaagcgttgtcgccgtggttcgtaccgcctcctgaagcggtcattgccggttgtgtttccgacagtaccgatcccggctgggataacagccagttaattgccgattcatatcccctgctatgcgatgccgtacaccagatgtttgagaatatttcagatgcggaaaaagaaaaggccgcaaaagggcttaagaaaaaacaagcagcggaattacgggcttcgtcagggtttcttgattttgatatggataatgcttattgcccggaaagtatggttttagcgctgcgctttatgctatgtatgaaaaattttgaactggttcgtcccaaagacgcttatgatgatatccgggatatgatgacaggatttttcagcaaaagatcattgtacgaaagatcatggaatcctcctgatcgcaattatcttgaaaccgctgtctgtattgatcatttgagcaaagcctcgggttattatctggaaaattatgaagaacttccgccatcccgtaaagatttttgggaaatcctcttgggggttgcaaaagacggccgccgttttgacgccgataaactggctgagcatatcagaattaccgctaagaagtttttttttagcggcagtgaatttgaaaggactttaagaataaaagcctccttgcttgaagtggatggaattacctattcctgcgagtattatgaagacttcaatgtatacgggatattacgctatcctttgctggtaaagccgttattcaaggcgtactgttatatnttcgctgctctggggcttttggaaattacctgtaaaacgccgccccttgcccttacaaaaatttcaaagcaattccccatctctccctacgattccttaaagaccatccgcgtcacaaaactcggcctttggtgtttgggcctgtcttcagagaaacctccgttaccccgtcacgaataccaggcaatagccgataaagaattgctccttgtcacggttcagggcaaatcgctggaacggacggtgtaccttgacaggataggcattaagcttggggaagatcgctggcgcgtgagtccggcttcttttatttcaggctgcgaaaccaaaaagcagatagaagaccggatcgagcgcttcaagaaacttatcgatccggcgcccgctccccattggctggaactgtttgacaaggcgcttacgcgggcgggactgtttggccattatcgcagcgatgtgcttgtgtacaatcttggcgagaaccgaaaaatagcggaagagcttctacgcgacccggaactgaagagtatcgcttttcgggccgagggaggaatgcttattgttccggctaaaaatcaaaagaagtttttggctttgttgagcgagcatggaatcgcgagtttttttggagagaagtaa

SEQ ID NO: 46574 - protein, 511 aa, Unknown
  Obtained from environmental sample
  misc_feature (1)..(511): Xaa is any amino acid
MVTESRYSWRTETRLNENLNLGFLILDYCNGHYSLALPVFLRKALSPWFVPPPEAVIAGCVSDSTDPGWDNSQLIADSYPLLCDAVHQMFENISDAEKEKAAKGLKKKQAAELRASSGFLDFDMDNAYCPESMVLALRFMLCMKNFELVRPKDAYDDIRDMMTGFFSKRSLYERSWNPPDRNYLETAVCIDHLSKASGYYLENYEELPPSRKDFWEILLGVAKDGRRFDADKLAEHIRITAKKFFFSGSEFERTLRIKASLLEVDGITYSCEYYEDFNVYGILRYPLLVKPLFKAYCYXFAALGLLEITCKTPPLALTKISKQFPISPYDSLKTIRVTKLGLWCLGLSSEKPPLPRHEYQAIADKELLLVTVQGKSLERTVYLDRIGIKLGEDRWRVSPASFISGCETKKQIEDRIERFKKLIDPAPAPHWLELFDKALTRAGLFGHYRSDVLVYNLGENRKIAEELLRDPELKSIAFRAEGGMLIVPAKNQKKFLALLSEHGIASFFGEK

SEQ ID NO: 46575 - DNA, 819 bp, Unknown
  Obtained from environmental sample
  misc_feature (1)..(819): n is a, c, g, or t
atgcgcgttgccagaaacaacccagagatgcgcgttcttctgaagaccctgaaggacaagggcggtcgtgtgggctttgtccccacgatgggctacctgcacgaaggtcacgcctcgctgatcaagcactgcaagtcgcggtgcgattcgattgtggtctctgtgttcgtgaacccgatgcagtttggcgaggacgaggacttcgccaggtacccccacgacctggagagcgaccaagcactgtgcctcaagcacggcgtgacagtgctgttcgtccctgaagagaaggagatataccccacgggcttcggcaccttcattgaccccgggcggatggggcaggtcctttgcggcaggtaccgccccgggcatttccgaggcgtcgtcactgttataggcaagctcctcaacatagtccagcccgacttggtgttttttggccagaaggacctgcagcaggcggccattgtccgcaggatgctccgggatttgaacctgcccatagagttggtcatagctcccaccgtccgcgagccagacggccttgccatgagctccaggaacacttacctctcgcctgaggagcgcgggcgggcgctgtgcatatcgagggcgctcttcaaggcggaggacgcattcaaggcgggctcgcgctcgtcgcaggaactgataggcaccgccaagaagaatctgaaagagctggacgagctccagtactgcgaactggtcgacgccctgacgatggaccccatcgagggtcaggtcggccgcctcgctggtctctgcgttgcggggaaaatcgggacgaccaggctatag

SEQ ID NO: 46576 - protein, 272 aa, Unknown
  Obtained from environmental sample
  DOMAIN (1)...(272): Pantoate-beta-alanine ligase
  misc_feature (1)..(272): Xaa is any amino acid
MRVARNNPEMRVLLKTLKDKGGRVGFVPTMGYLHEGHASLIKHCKSRCDSIVVSVFVNPMQFGEDEDFARYPHDLESDQALCLKHGVTVLFVPEEKEIYPTGFGTFIDPGRMGQVLCGRYRPGHFRGVVTVIGKLLNIVQPDLVFFGQKDLQQAAIVRRMLRDLNLPIELVIAPTVREPDGLAMSSRNTYLSPEERGRALCISRALFKAEDAFKAGSRSSQELIGTAKKNLKELDELQYCELVDALTMDPIEGQVGRLAGLCVAGKIGTTRL

SEQ ID NO: 46577 - DNA, 936 bp, Unknown
  Obtained from environmental sample
  misc_feature (1)..(936): n is a, c, g, or t
ttgggtataactttgggaaatagctggggagagcatgagccaccagactccagcacgacaaaaaagacgcggctcgaccttcagacagcggttgacaggggcggcaggctggtggtggtcacggcgtacgacgcgcccacggcactggtggcggacgccgccggcgtcgacataatcttggttggcgacagcgtcggaaacgtctgccttggctttgaaaacacgctgccagtcaccatggccatgatgcgccaccacctagaggccgtcgcgaggacgcgcccaaaggcattcctgatggccgacctgccctttatgagctaccagacgggtgcggaggacgcacttaggaacgccggggagctggtcagggcgggggctcaagcggtgaagctggagggcggccccgtcagggttcccgcaatacgcgccttggtggatgccggcattccagtgatgggccacatcgggctgacgccgcaggcggttcattccatgggcggctatagagtgcagggcagggacgaggcccaggcagtccagttgttggaagacgccaagcaactggaaggcgccggctgtttttctgtcctgctggagtgcgtccccctcgaactggccgccctcgtgacgaaagaactggacattttcaccataggcattggcgccggaccacattgttcgggccaggtgctggtgtaccatgacgttttgggcctgctggaggggcccagtccaaaattcgccaagaaatacatggacacattcggacagatggtcacggccctgacgcggtggtcgggcgacgtgaaaaatggcgtattccccggagagcaagagtcgtataaccttacagaagcggtctcggcgagattggccgccagggtttccggggcccgcccgcccgccccggcaaaacgcaggaaaggaccgtag

SEQ ID NO: 46578 - protein, 311 aa, Unknown
  Obtained from environmental sample
  DOMAIN (21)...(279): Ketopantoate hydroxymethyltransferase
  misc_feature (1)..(311): Xaa is any amino acid
MGITLGNSWGEHEPPDSSTTKKTRLDLQTAVDRGGRLVVVTAYDAPTALVADAAGVDIILVGDSVGNVCLGFENTLPVTMAMMRHHLEAVARTRPKAFLMADLPFMSYQTGAEDALRNAGELVRAGAQAVKLEGGPVRVPAIRALVDAGIPVMGHIGLTPQAVHSMGGYRVQGRDEAQAVQLLEDAKQLEGAGCFSVLLECVPLELAALVTKELDIFTIGIGAGPHCSGQVLVYHDVLGLLEGPSPKFAKKYMDTFGQMVTALTRWSGDVKNGVFPGEQESYNLTEAVSARLAARVSGARPPAPAKRRKGP

SEQ ID NO: 46579 - DNA, 762 bp, Unknown
  Obtained from environmental sample
  misc_feature (1)..(762): n is a, c, g, or t
ttgatacctaaatacaagtcaggaaaaatgggcgggaaacaagatgctatcaccccacagcccaattctctaccgccccacgccgcgacaggttcatgcggccatagggggcgtttgctcgaaaagtacgccgaacgcggactttcagtctttagcgactacgaaatccttgagttcctgctgactttcgcgcttccacgtgcagacactaagcccatcgccaagaatctgctcgcccgctacggcacggtgagcgccgtcgtcaacgcgccgctcgacgaactccgcgaggtcaagggggtggggcagcgctccgcggttctgctcaccctcgtcaaggacatcacggcgtactgtttgagggagggcgtcatagacaagcccgtcatcacccagcgcagcgacgttgagaattacctgcgctcacgcctcagcgaaagcaggaacgagcgcgtcatcgccctgtacctcgacaacggcaaccgcgttttgggggacgaggtcgtggcggaggggacggtgaaccgttgcgtgattttcccgcgcacggtcatggagggcgctataaagcactccgccgcatcgttcatcctcgtccacaaccatccgggcgggacggcggcggcatcggaggaggactggaagaccacggagcgcctttacaacgcgggaaagcagatcgacataccgatgctcgaccatataataatatccaaggacaaggcggttagtttgagggagtttaagcgttggccgggatga

SEQ ID NO: 46580 - protein, 253 aa, Unknown
  Obtained from environmental sample
  DOMAIN (127)...(252): RadC, DNA repair protein
  misc_feature (1)..(253): Xaa is any amino acid
MIPKYKSGKMGGKQDAITPQPNSLPPHAATGSCGHRGRLLEKYAERGLSVFSDYEILEFLLTFALPRADTKPIAKNLLARYGTVSAVVNAPLDELREVKGVGQRSAVLLTLVKDITAYCLREGVIDKPVITQRSDVENYLRSRLSESRNERVIALYLDNGNRVLGDEVVAEGTVNRCVIFPRTVMEGAIKHSAASFILVHNHPGGTAAASEEDWKTTERLYNAGKQIDIPMLDHIIISKDKAVSLREFKRWPG

SEQ ID NO: 46581 - DNA, 471 bp, Unknown
  Obtained from environmental sample
  misc_feature (1)..(471): n is a, c, g, or t
gtgctcagcggcgtggaaaagggacacgtcatcaaagacgaaatattaagcgccgattcgctgggcctcaacatggcgaggcgcggttatcccggctacgaggtgccgataaactcgtcgagtttcgatccttggctgcgccttgacggcaaagccttattcaggttcgcgacggagagcttctcggcgatggtgcgggagctaatcataaagagcaattggacgccggaggaggtgcgctgggtggttccgcaccaagcaaatggaaggataatcagggcggcggcgcagaagagcggggtgccattcgagcgtttctatttgaatatagatcatgtgggcaacacgtcgagcgcgagcattccggtggcgctgtcggaaatacaaaacggcatgcagaagaatgacaaagtcatattctgcacggtgggcgcgggaattacggcggcgggattatcattagagtggtaa

SEQ ID NO: 46582 - protein, 156 aa, Unknown
  Obtained from environmental sample
  DOMAIN (69)...(156): 3-Oxoacyl-[acyl-carrier-protein (ACP)] synthase III C terminal
  misc_feature (1)..(156): Xaa is any amino acid
MLSGVEKGHVIKDEILSADSLGLNMARRGYPGYEVPINSSSFDPWLRLDGKALFRFATESFSAMVRELIIKSNWTPEEVRWVVPHQANGRIIRAAAQKSGVPFERFYLNIDHVGNTSSASIPVALSEIQNGMQKNDKVIFCTVGAGITAAGLSLEW

SEQ ID NO: 46583 - DNA, 855 bp, Unknown
  Obtained from environmental sample
  misc_feature (1)..(855): n is a, c, g, or t
ttgataccgcgccttctgtatcagggaacctgtagcggtttaacggttttttcaagagccttgcctgcaaagatacatttaagaaaaaccagtttcatagattttcccggaaaaatttccgcggctgtttttttctctggctgtaacctgcgctgcccttggtgccacaaccgcgaattagtcatggatgcgtgttctttggatacgcaagagtgctcttcgagtctggaggagaaccttgtaagtcttgaagaaggccttgcccacataaggaaacggaggaaactcatcaagggagtagtgataagcggcggggaaccatgtattcacgcggaactcccggatttcattcgtgaaatcaaaaaaatatcacgccttgatgacgcagcgccaaaagcggcgccattaaccgcgccgcttgccgtaaaactggacacaaacggaaccatcccttccatgctggaaaaactctttaacagcgaggataccagtcccgattatatcgcccttgatttgaaaatcgcaccccgccgttatgcagaactgggggcaaaagatacgattcccaatccgggcgcgccgctttcccaaagcgcggaattgatcagagagtcgggcattgcccacgaataccgcacactcgccctgcccggcggttttatcaccgaaaaggacattgaagcccttgccgcgttgacggatgattcgccctggtatttcagccgtttccgcgggggtaactgccttgaaagcgaatgggacaggctggaagaaagccccagggaagccaaagagcgcgctttggccctggcaaaaaaggcggttgaactggggaaaaggggaatagtccgctaa

SEQ ID NO: 46584 - protein, 284 aa, Unknown
  Obtained from environmental sample
  DOMAIN (42)...(233): Radical SAM superfamily
  misc_feature (1)..(284): Xaa is any amino acid
MIPRLLYQGTCSGLTVFSRALPAKIHLRKTSFIDFPGKISAAVFFSGCNLRCPWCHNRELVMDACSLDTQECSSSLEENLVSLEEGLAHIRKRRKLIKGVVISGGEPCIHAELPDFIREIKKISRLDDAAPKAAPLTAPLAVKLDTNGTIPSMLEKLFNSEDTSPDYIALDLKIAPRRYAELGAKDTIPNPGAPLSQSAELIRESGIAHEYRTLALPGGFITEKDIEALAALTDDSPWYFSRFRGGNCLESEWDRLEESPREAKERALALAKKAVELGKRGIVR

SEQ ID NO: 46585 - DNA, 1236 bp, Unknown
  Obtained from environmental sample
  misc_feature (1)..(1236): n is a, c, g, or t
atggcaataccggcaggacgaattgaaacggaattttattttaagatactattcgatgaaaagttgcctttaaaatacattaaagacaggatagagtatcaccttattcttgatcagcctgttcttgaccagatggtactgcgtcccgacatgactatagaaggacttaaaccgcggacaaaaatcgctctgctgtttaattaccgcgggcaggcggtggatttttcaaccgagataatcaaggtaagcgaagagcttgttatctgcaaggtgcccgaaaaaatacataaaaatcttgaccgtaattatttgcggatagatacgccgtcggatattaaagtaatgtttacttttcggggcgatcgttacaatctttcttttcctaaagttatggaatacgagagtgtaaccgcaggtgatttattcggcgccgataatacccgcaatctttcggaattaattaaacagttgacgggacttgtaaagaattttgcggacgggtataaaattgtaaattttaaggacaagaagcctgaaacattggaagagaaaattgtttcggctaccggtaaagctcttttcctgccttctacggtggggcggcttccggcggcggatccgtatcctaaaaaacgcattattaccgaagaaatattcaagcgttatcttgaaagcacagggattggagaggagtatcttgccgagacctgtacgcggtttatgaaaaataaatttaacgatggtattttttcagacgcttgggttccgattttgtttcatgaatatgtcgtcggctacattcacatctggatcaacaaagaagggcgtttgccttttgatttttccatgcttgataatttatttcaattttcaaaagtacttgccttctcgcttaaagaaaacggatactttgagactggaagaattgaaaacgagccttttgaaagcagggttttggacataagcgcgtccgggctgctctttgcctgctctcatagtttaagcatcgcttctttgcttttggtagattccgagttaaccgtaatcgtagaagcgcctaaccgtacgattaaggttatagcgaaaatagtacgccgctttaaggataaaaatgccgtatacttcggctgccgtttttcaggcatggctcccgaagatactcgcttcctttttgagtacctttacggcaggcaaatagacgactccgacagcgcctttttatccgggcaggcttaa

SEQ ID NO: 46586 - protein, 411 aa, Unknown
  Obtained from environmental sample
  DOMAIN (289)...(396): PilZ domain
  misc_feature (1)..(411): Xaa is any amino acid
MAIPAGRIETEFYFKILFDEKLPLKYIKDRIEYHLILDQPVLDQMVLRPDMTIEGLKPRTKIALLFNYRGQAVDFSTEIIKVSEELVICKVPEKIHKNLDRNYLRIDTPSDIKVMFTFRGDRYNLSFPKVMEYESVTAGDLFGADNTRNLSELIKQLTGLVKNFADGYKIVNFKDKKPETLEEKIVSATGKALFLPSTVGRLPAADPYPKKRIITEEIFKRYLESTGIGEEYLAETCTRFMKNKFNDGIFSDAWVPILFHEYVVGYIHIWINKEGRLPFDFSMLDNLFQFSKVLAFSLKENGYFETGRIENEPFESRVLDISASGLLFACSHSLSIASLLLVDSELTVIVEAPNRTIKVIAKIVRRFKDKNAVYFGCRFSGMAPEDTRFLFEYLYGRQIDDSDSAFLSGQA

SEQ ID NO: 46587 - DNA, 873 bp, Unknown
  Obtained from environmental sample
  misc_feature (1)..(873): n is a, c, g, or t
ttgcagcgcggggatattttcgcggatggagaggcgtcttcagcacctccgccgttagtggtaattgacgaggcgcactgcatatcacagtgggggcatgatttcaggacaagctacctggagatcgccggatttatcaaaagcataaagccccggcccataacggcggcttttacggcgacagccacgccaaaggtgaaggatgacatagagcggcttctggctctgaaaaagcctgttttaatcaacaccgggtttgaccggcccaacctgtacttcgaagttcaaaaaccgggcgataaaaaagccgccttgcttgagtgcctgagcaaaagaaagaaatcaagcggcatcgtgtactgcgccacgcgcaaggccgttgacgagctgtacattacgctgccacgatacggattttccgtgacccgctaccacgccggccttgaagacggggagcgccgcgggaatcaggacgatttcctttgcgacaggaaaacaattatgattgcaactaacgcgttcggtatgggtatagacaagccgaatgtaaggtttgttattcattataatatgccgaaaaacattgaaagctattatcaggaagcgggccgcgccggcagagacggagttccggccgactgcgtgcttttgtacagcgggaaggacgtgcacatcaacgagtacctgattacccataacgaggaggacgcggagcccaatcctgaattgcaggcccacaaccgggagctgctcaggcagatgacgttttatgcgaccggaaacgaatgtctgcgccgcccgcctgcttgcttatttcggggaaggctcaccctcttactgtgggcactgttccgtctgcctcaccgcgtatga

SEQ ID NO: 46588 - protein, 290 aa, Unknown
  Obtained from environmental sample
  DOMAIN (133)...(209): Helicase conserved C-terminal domain
  misc_feature (1)..(290): Xaa is any amino acid
MQRGDIFADGEASSAPPPLVVIDEAHCISQWGHDFRTSYLEIAGFIKSIKPRPITAAFTATATPKVKDDIERLLALKKPVLINTGFDRPNLYFEVQKPGDKKAALLECLSKRKKSSGIVYCATRKAVDELYITLPRYGFSVTRYHAGLEDGERRGNQDDFLCDRKTIMIATNAFGMGIDKPNVRFVIHYNMPKNIESYYQEAGRAGRDGVPADCVLLYSGKDVHINEYLITHNEEDAEPNPELQAHNRELLRQMTFYATGNECLRRPPACLFRGRLTLLLWALFRLPHRV

SEQ ID NO: 46589 - DNA, 777 bp, Unknown
  Obtained from environmental sample
  misc_feature (1)..(777): n is a, c, g, or t
atgcgaccggaaacgaatgtctgcgccgcccgcctgcttgcttatttcggggaaggctcaccctcttactgtgggcactgttccgtctgcctcaccgcgtatgaggataccgatgtcaccctagaagcaaggatgatcatttcgtgcgtgtaccgcctgaaacagcggaaccacagctttggcaaaacaatgatcatcgatgtactgcggggcagcaggaacgaaaggattgcgcgcttcggcctggacgccttgagcgtatggggcatcatgtccggtacagacgcaaggcggatccgcgccatccttgactacctgattgacaggggctttctggcatccggaggcggcgaatacccggttgtggttcctgggtccggctgcgaagcggtgctgaaagaacaagagcggctttttatgaagctgcccaaggcagacggcaaagatcaatccaaaaagagcaaagaaaaagggctcctccccattgcagtcagggccggcccggcaagcgaggccgtcgggacaggcggggctgtcgaaacggccctggacaaagacctgtttgaaaagctaaaggaactgcggaaggaaatcgccgccagggaaggggtcccgtcttacatcgtgtttagcgacgccagcctgcgggacatatgccgtaaaaagccggccacgctggcccagttctctaaggtaaacggcgtgggctcggtaaagctgaagaaatacggggaagcgttcgttagggttgtactgcaaataaccggcggcaaataa

SEQ ID NO: 46590 - protein, 258 aa, Unknown
  Obtained from environmental sample
  DOMAIN (181)...(258): HRDC domain
  misc_feature (1)..(258): Xaa is any amino acid
MRPETNVCAARLLAYFGEGSPSYCGHCSVCLTAYEDTDVTLEARMIISCVYRLKQRNHSFGKTMIIDVLRGSRNERIARFGLDALSVWGIMSGTDARRIRAILDYLIDRGFLASGGGEYPVVVPGSGCEAVLKEQERLFMKLPKADGKDQSKKSKEKGLLPIAVRAGPASEAVGTGGAVETALDKDLFEKLKELRKEIAAREGVPSYIVFSDASLRDICRKKPATLAQFSKVNGVGSVKLKKYGEAFVRVVLQITGGK

SEQ ID NO: 46591 - DNA, 555 bp, Unknown
  Obtained from environmental sample
  misc_feature (1)..(555): n is a, c, g, or t
gtgggagatgtagcgggcatgggcgcagacctttatgagtcctatgtcggttccatcgtcgccaccatggcgctggcggtttcggcgggttataactttaacggggctgtggttcccatgctgatggccgccgtcggaacggtagcctccattatcggaactttctttgtacgctgcggagagaaggcggatcaaaagtccctgttgggggcattgagaaaaggaacctatatttcttccgctattattgttgtcgcgtcctacccggttatccgtatagcgcttcctgaaaaccagggagtctatttcgcggtattatctggattgctcgccggtgtgcttatcgggttctttaccgagtattacacttcggatcattacaggcccaccaaaaaccttgcagccgccagcctgaccgggcccgctaccataattatcgggggaatttcgctgggtatgctttccaccctgttgccggtaatcattgtcggcgcgtcggtaataaccagttttattgtttcaggaggtggacaattctttcatacagctcgatga

SEQ ID NO: 46592 - protein, 184 aa, Unknown
  Obtained from environmental sample
  misc_feature (1)..(184): Xaa is any amino acid
MGDVAGMGADLYESYVGSIVATMALAVSAGYNFNGAVVPMLMAAVGTVASIIGTFFVRCGEKADQKSLLGALRKGTYISSAIIVVASYPVIRIALPENQGVYFAVLSGLLAGVLIGFFTEYYTSDHYRPTKNLAAASLTGPATIIIGGISLGMLSTLLPVIIVGASVITSFIVSGGGQFFHTAR

SEQ ID NO: 46593 - DNA, 891 bp, Unknown
  Obtained from environmental sample
  misc_feature (1)..(891): n is a, c, g, or t
atgacggatttcgcccatggcctgtacggagttggcctttccgcggtaggcatgctttccactctgggtattaccctggcaaccgacgcttatggcccggttgcggataacgccggaggcattgccgaaatgtcccatctgccgcacgaggttagggaacgcaccgatgccttagactcccttggaaataccaccgccgccacaggtaaaggtttcgcgattggttccgcggcgcttacagccctggctttgattgtcgcgtatcttgacgaggtccacctgtatgtagccagggacaaattggattttcatttgaatcttgagcttaccaatcccccggtactgatagggctgtttgtaggcgttatgcttcccttcctcttttcatccatgaccatgagcgcggtaggcagggcggcgcagagcatagtaaaagaagtccgccgtcagtttaaggaaattaaaggcttaatggaaggtacggcggaagcggactatgccacctgcgtggatatttgtacccgcggggcgcagaaagaaatgatacttccggcgctgaccggcattatttcaccaattatagttggagtgctcctgggggttaacggcgtggcgggaatgctcgcgggcgcgacagcctcgggctttgttctggccattatgatggcgaactcgggcggcgcgtgggacaacgccaagaaacatatcgaaggcggaaattacggcggcaaaaaatcggatccccacaaggcggctgttgtcggcgacactgtaggcgatcctttcaaagacacttcgggcccgtccattaatattctgattaaactgctctccatggttttcgattgttttcgcggcctttgttctcagtttaatttgtttaatttatga

SEQ ID NO: 46594 - protein, 296 aa, Unknown
  Obtained from environmental sample
  DOMAIN (1)...(282): Inorganic H+ pyrophosphatase
  misc_feature (1)..(296): Xaa is any amino acid
MTDFAHGLYGVGLSAVGMLSTLGITLATDAYGPVADNAGGIAEMSHLPHEVRERTDALDSLGNTTAATGKGFAIGSAALTALALIVAYLDEVHLYVARDKLDFHLNLELTNPPVLIGLFVGVMLPFLFSSMTMSAVGRAAQSIVKEVRRQFKEIKGLMEGTAEADYATCVDICTRGAQKEMILPALTGIISPIIVGVLLGVNGVAGMLAGATASGFVLAIMMANSGGAWDNAKKHIEGGNYGGKKSDPHKAAVVGDTVGDPFKDTSGPSINILIKLLSMVFDCFRGLCSQFNLFNL

SEQ ID NO: 46595 - DNA, 540 bp, Unknown
  Obtained from environmental sample
  misc_feature (1)..(540): n is a, c, g, or t
atgttcgataacatcggtaatctttgctccacaaaaaaaatcgcggatacccttgtttcatccgggcgctcaatatcagttaacactctggaatcgtatctttcagctttgaccgacagttttatcctgtaccgtttggggcgttacgacgttcatggaaaagaattcctgaaaacaggccacaagtattatcttgccgatttgggactgcgtttttatctgctgggaagcaaaataacggatacaggcaggatactggagaacattgtgtttctggaattattcaggcgcggctgggaattgagcgtcggaaaaatgaatacttatgaaattgatttcatcgcgcaacggggagaaaaacgtgagtattatcaggttgctttgagcgtccgcgatgaaacgacgctggaacgtgaagtacgcccgctggaagcggtaaaagacaactatcccaaattcctgttaaccatggacgatgatcctcccgcggagcacaacggcattatcagggaaaacgtattggagtggctgacaaggtga

SEQ ID NO: 46596 - protein, 179 aa, Unknown
  Obtained from environmental sample
  misc_feature (1)..(179): Xaa is any amino acid
MFDNIGNLCSTKKIADTLVSSGRSISVNTLESYLSALTDSFILYRLGRYDVHGKEFLKTGHKYYLADLGLRFYLLGSKITDTGRILENIVFLELFRRGWELSVGKMNTYEIDFIAQRGEKREYYQVALSVRDETTLEREVRPLEAVKDNYPKFLLTMDDDPPAEHNGIIRENVLEWLTR

SEQ ID NO: 46597 - DNA, 666 bp, Unknown
  Obtained from environmental sample
  misc_feature (1)..(666): n is a, c, g, or t
atggatcagaaccttggagcattttcccgtttttcacggatattccagaacgatgaaataatttttagtgagcatgagccgggcgatactttctatgttatacagtccggaaaggtaaagttgctgaaaaacgacggggaatttgagcggactatagatgttctacagcctccggaaatgttcggtgaaatggcaatactggaaggttcgccgcgtagcgcttccgccattgccgtggacgaagtaaaggtgctggaattcaactcgcagaattttgaaatcctcatgactggaaacccccagatcggcattaacctgctgcggattttcgcaaagaggatatacgattcaaaacggcgttttatgatccttacgctgcaaaacccccaggcaaaggtcgccgatgttttcctgatgcttgatgaaacaacgacagatattgacagaagaacagatgtccgtgaattccagaccactattgaagatgtcgcacgttgggcaggaatcagcgtcacagaggcaagagaagtgcttcacacctttgttgtgcagaaccgcatggagatttactccacccgcatggttgttaaaaacatcaatgattttgcccgtgttgtcagctacaagcgtaaacaggcaaagaatccgactggaataaaaacctga

SEQ ID NO: 46598 - protein, 221 aa, Unknown
  Obtained from environmental sample
  DOMAIN (12)...(101): Cyclic nucleotide-binding domain
  misc_feature (1)..(221): Xaa is any amino acid
MDQNLGAFSRFSRIFQNDEIIFSEHEPGDTFYVIQSGKVKLLKNDGEFERTIDVLQPPEMFGEMAILEGSPRSASAIAVDEVKVLEFNSQNFEILMTGNPQIGINLLRIFAKRIYDSKRRFMILTLQNPQAKVADVFLMLDETTTDIDRRTDVREFQTTIEDVARWAGISVTEAREVLHTFVVQNRMEIYSTRMVVKNINDFARVVSYKRKQAKNPTGIKT

SEQ ID NO: 46599 - DNA, 726 bp, Unknown
  Obtained from environmental sample
  misc_feature (1)..(726): n is a, c, g, or t
atgaaaaaaactcacaactttcttcccgcatcagactggaggactttaccgctgatagatgtaaaccggacttaccgcaaggatacaatgctttttgccgaaggggagccgggagacgagctttttatcattcagaaaggctccataaaaattacaaaaatcgttgaccagaaagaagtgcttctcgcgatgctgaaacccggagatatattcggagaaatggcggtattggacggcaaaccccgggccgccagcgccgtggcttatgaggactgcgatgtgatggccgtgaacaaggcaaactttgaaataatgattaagaaccagccccagcttatcgacaagatcacaatcctccttgcggaccggatctggctgatttacaagcagttggccaataccctgattaaaaatccaatgggccggatgtatgacgccctgcttatccagcttgaaaaaaaccgtattacccttgacggcaaaacttcttatattttcacctttgggctgcctgaactgattaacatggtcgggctccccgagaaagagggcaccgcgattttttcacagatgatggaaggcaaatatcttcagataacaggcaacaagattcgtactacatccacggaagaaatccttaaacagtcggaatatttccgtaagatggacaaaatagagaaagctaaacaggaaagccgcctggcaagggaacagggaacagggtag

SEQ ID NO: 46600 - protein, 241 aa, Unknown
  Obtained from environmental sample
  DOMAIN (22)...(111): Cyclic nucleotide-binding domain
  misc_feature (1)..(241): Xaa is any amino acid
MKKTHNFLPASDWRTLPLIDVNRTYRKDTMLFAEGEPGDELFIIQKGSIKITKIVDQKEVLLAMLKPGDIFGEMAVLDGKPRAASAVAYEDCDVMAVNKANFEIMIKNQPQLIDKITILLADRIWLIYKQLANTLIKNPMGRMYDALLIQLEKNRITLDGKTSYIFTFGLPELINMVGLPEKEGTAIFSQMMEGKYLQITGNKIRTTSTEEILKQSEYFRKMDKIEKAKQESRLAREQGTG

SEQ ID NO: 46601 - DNA, 363 bp, Unknown
  Obtained from environmental sample
  misc_feature (1)..(363): n is a, c, g, or t
atgagagatatagcgacgaataaaagtaaggggtttgctgtcagaattgttaatttatataaaatgctttgttatgaaaaaaaagaatttgttatgtctagacaagttttaaaagctggtacgagtattggggcaaatctagcggaagcggaattcgcttttagtactaaagattacatttcaaaaaaaacaattgctctaaaggagtgttctgaaacggtatattggttggaattgttacatgatacaaattttgtaagtaaagaattatttacagaattgcagttggaatgtatggaaatacagaaactgctggtaagttcaataaaaacaacaagaaggagggaattaaataaaaaataa

SEQ ID NO: 46602 - protein, 120 aa, Unknown
  Obtained from environmental sample
  misc_feature (1)..(120): Xaa is any amino acid
MRDIATNKSKGFAVRIVNLYKMLCYEKKEFVMSRQVLKAGTSIGANLAEAEFAFSTKDYISKKTIALKECSETVYWLELLHDTNFVSKELFTELQLECMEIQKLLVSSIKTTRRRELNKK

SEQ ID NO: 46603 - DNA, 1164 bp, Unknown
  Obtained from environmental sample
  misc_feature (1)..(1164): n is a, c, g, or t
atgatttgtcatcttaacataattggttttaaagcgacggttgccgcggttaaagataaaactcttcgttttcgcccctttgttatagcggggacgcaaggagggcggcttcttgcccttgactgttcgccggaagccgttaagcaggggattatgccgggtatggcgttggctgtggcgcagaggcaggttaaggatttaattgttctttctcccgatattccggcttatcaggttatgaacagtgagctggagaaggtggcggaacgatatgccccggtttgggaaaatgataagatgggaaatttatttttggacataacgggcacgtcaagaatattcggccctcccgccgattgttcaacccggatactgcgggaaatttacgagcaggccggaataaaacccgccgccgcagttgcgtctaacaaactggtgtcgaaggttgcgacacggactattcgaccgacgggactgatacagatatataacggaacggaagcggagtttttatctcatcaggatatacggattttaccgggcatggggcagaaacttttacggacggcttctattgcgggaatgagggagattggcgaaatagccgctcttacggttgcgcaagcccttgccctgtttggcaaacaggggccgctgttacgaagtatggcgcagggtattgacggttcccgtgttgtggaaagaaaagaagacaggcggataacccggcaggctgatttcaacgaagacgttatagatgaaaccgcgattagggcggcgattgaaagccttgcggagcacggcgggcttgaaatgagaaatgagaaattaggaatgaagaatttgtcggtggctgttatctatgccgacggcgtgagggttgaaggaaaggaacaggtaaaacgtcccttggtaacggacagagaaataatggcagccgcttataaggtatacaaaaagactgtaggccgccgtatacggatacgatcgattggcattagttttgaaaatttagttcctttggggtttcagcctgatttgtttgaacctgaaacggaaacggcagacagaaaattgcaggaagcggttgacaagatacagaaccgttacggggcgggaaaaatcactaagggattggtcttggcaatgaggaaacaggaatga

SEQ ID NO: 46604 - protein, 387 aa, Unknown
  Obtained from environmental sample
  DOMAIN (9)...(340): impB/mucB/samB family
  misc_feature (1)..(387): Xaa is any amino acid
MICHLNIIGFKATVAAVKDKTLRFRPFVIAGTQGGRLLALDCSPEAVKQGIMPGMALAVAQRQVKDLIVLSPDIPAYQVMNSELEKVAERYAPVWENDKMGNLFLDITGTSRIFGPPADCSTRILREIYEQAGIKPAAAVASNKLVSKVATRTIRPTGLIQIYNGTEAEFLSHQDIRILPGMGQKLLRTASIAGMREIGEIAALTVAQALALFGKQGPLLRSMAQGIDGSRVVERKEDRRITRQADFNEDVIDETAIRAAIESLAEHGGLEMRNEKLGMKNLSVAVIYADGVRVEGKEQVKRPLVTDREIMAAAYKVYKKTVGRRIRIRSIGISFENLVPLGFQPDLFEPETETADRKLQEAVDKIQNRYGAGKITKGLVLAMRKQE

SEQ ID NO: 46605 - DNA, 936 bp, Unknown
  Obtained from environmental sample
  misc_feature (1)..(936): n is a, c, g, or t
gtggcgaccacgatcctcaaacccggcggctatgagcgtctgctccagcttgccgaactggcggcagaaacggtgaaatctgcctctgcgtccattaatgtaaatgccctcaattcactagcggaatccctgcctcaaaaaaacagataccgcaaagagtaccgccagattggcttgcgaaaaaccgagagcagcctgcccctgtttgactgcgcgaaagcgccctgtatgggcaccgattccgaaggaaacgccgattccgaaggagccgcaggctgtcccattcatcagcgcatacccgaataccttgccgccgtcgccgcgggcaattacgacgaggctttcaaaatcataacggttgacaataccgccccttcaattaccggcacgatttgcgatcaccagtgccagtataggtgtacgcgcattgattacgaggatcccctgcaaataagaagggctaagcttattgccgctgacaaggcgcagaaagcgtttacctcttcactgcaaagccctgcaatcaaaacagataaatcagcggctgttatcggcgctggtccggcgggtatcgctgcggctgtattcctgcggcgtaacggcgtaccagtgaccgtgtatgaaaagcgggataaagccttcggcattgtgcgttatgtgattccctcatttagaatccctgaagaagcgatcaaccgcgattttatgatggcggaaaaactcggcgtggaatttctctttaaccaagcggaagattattcccttgccgaactgcaaaaaaaacacggcttcgtcgtcattgccacaggcgcgtggaaaacaggcgctgctgtggtgaaacagggtcaggaaaaaataatcgacgccctgcgtttccttgaagactccaaaaagacccattgcggccttgagcttggaaaagggtcgcggtcatag

SEQ ID NO: 46606 - protein, 311 aa, Unknown
  Obtained from environmental sample
  misc_feature (1)..(311): Xaa is any amino acid
MATTILKPGGYERLLQLAELAAETVKSASASINVNALNSLAESLPQKNRYRKEYRQIGLRKTESSLPLFDCAKAPCMGTDSEGNADSEGAAGCPIHQRIPEYLAAVAAGNYDEAFKIITVDNTAPSITGTICDHQCQYRCTRIDYEDPLQIRRAKLIAADKAQKAFTSSLQSPAIKTDKSAAVIGAGPAGIAAAVFLRRNGVPVTVYEKRDKAFGIVRYVIPSFRIPEEAINRDFMMAEKLGVEFLFNQAEDYSLAELQKKHGFVVIATGAWKTGAAVVKQGQEKIIDALRFLEDSKKTHCGLELGKGSRS

SEQ ID NO: 46607 - DNA, 348 bp, Unknown
  Obtained from environmental sample
  misc_feature (1)..(348): n is a, c, g, or t
gtgtgcccgaaccgtgccaacgtgatggtggaattgccgtcgaacagtggtttaggaagccatcaagtcgtgcatattgaccgtatgtgcaacgaatgtgggaactgcgccattttctgcccccacgcaggcaagccgtataaggacaaacttacggttttttgctgtgaagaggattttgccgaaagcgaaaactcaggctttcttaaaaccggcgccgacacgttcaagattcgtctggaagacaagtccacgctgacttaccgcaggggcgagaacacgctccctaaacaatggatcgcgctgattgatgtcgttatgtcaaagtatgagtatttattagcatag

SEQ ID NO: 46608 - protein, 115 aa, Unknown
  Obtained from environmental sample
  misc_feature (1)..(115): Xaa is any amino acid
MCPNRANVMVELPSNSGLGSHQVVHIDRMCNECGNCAIFCPHAGKPYKDKLTVFCCEEDFAESENSGFLKTGADTFKIRLEDKSTLTYRRGENTLPKQWIALIDVVMSKYEYLLA

SEQ ID NO: 46609 - DNA, 468 bp, Unknown
  Obtained from environmental sample
  misc_feature (1)..(468): n is a, c, g, or t
ttgggaggaacaggagagattatgaatgtaaccgatgcgtttaggatggatgcggcagaacaagcgaaagtagatcagtttgttcacgattttaaccacaaactcaatccggtgcgcaaacctcagcagagtctgggcaaagatgattttctcaaattattgataacccagctttcctaccaggatccgacttcccccatggaagacaaggaattcatcgcgcagatggcccagttttcctcactggaacagatgaccagtatggcggctgactttgccaaactttcggcaatgataaccgaaaccggcgcttctacagcgctgggcaagggcgtggaactggttgacggggaacgggttgtacagggcacgattaaagcggtaaccaggggcgaacttccccaggtactggtaaacggcgcctattacaactgggaccaggttaagaaagtttttgacaacgaataa

SEQ ID NO: 46610 - protein, 155 aa, Unknown
  Obtained from environmental sample
  DOMAIN (13)...(155): Flagellar hook capping protein
  misc_feature (1)..(155): Xaa is any amino acid
MGGTGEIMNVTDAFRMDAAEQAKVDQFVHDFNHKLNPVRKPQQSLGKDDFLKLLITQLSYQDPTSPMEDKEFIAQMAQFSSLEQMTSMAADFAKLSAMITETGASTALGKGVELVDGERVVQGTIKAVTRGELPQVLVNGAYYNWDQVKKVFDNE

SEQ ID NO: 46611 - DNA, 723 bp, Unknown
  Obtained from environmental sample
  misc_feature (1)..(723): n is a, c, g, or t
atggcatatggccaagtgctggatacgttagccgataatatcgctgacagcgccgatcaggcgaaattatccgcggcggaggcaagcgtcgacgcgcgtgtcgggagcgcggcgatgatgcgtatggcggaggccgtcaaccggattaaggcctcgtccggcaacaacgccaaaattatcaagagggtcaattacatagccatgcgggccagatgtttagccttcaacgcggccatagagacggcgcgcgcgggtgaggccggcaaggaattcgccgccgtggccggtgaattgcgcggcttcgcggcgcgttgcgcggaatcggtgaagagcattaccgacatgattgaggaatctgagaggggcgttgacgacggagtcaaaatcaccgaggacgccgtgaggactatcggcaagattgttgaccgcaccgacgagaaaatcaaccgtaaggcattggatcatgcgaatacagcgaacgatgtcatatcgcacgcagattgcaacgagatttgcaccgcgggccagagcggacggcatctatcggagtggcaaaagcggtatgcggattttccttacaaaggaatttattcagccgcgccgctgacgctctggacgcagataggcgggaacggggcggatgcgggggacatatatagtataaataatataagcagtgtggataatatagacggcatagatgaatgtaagaagcgtcggtag

SEQ ID NO: 46612 - protein, 240 aa, Unknown
  Obtained from environmental sample
  DOMAIN (3)...(194): Methyl-accepting chemotaxis protein (MCP) signaling domain
  misc_feature (1)..(240): Xaa is any amino acid
MAYGQVLDTLADNIADSADQAKLSAAEASVDARVGSAAMMRMAEAVNRIKASSGNNAKIIKRVNYIAMRARCLAFNAAIETARAGEAGKEFAAVAGELRGFAARCAESVKSITDMIEESERGVDDGVKITEDAVRTIGKIVDRTDEKINRKALDHANTANDVISHADCNEICTAGQSGRHLSEWQKRYADFPYKGIYSAAPLTLWTQIGGNGADAGDIYSINNISSVDNIDGIDECKKRR

SEQ ID NO: 46613 - DNA, 1383 bp, Unknown
  Obtained from environmental sample
  misc_feature (1)..(1383): n is a, c, g, or t
ttggaagacaagctatttcccaccgcttccgtcgagcctgtggctcgaagttctcctatggatacgcctgtagttttgcctgtcgcggattggaccaataaacgcctttttaccctgttttggcctctgattatcgaacagctccttgtcgtaatgatgggaattatcgacatggtaatggtaagctatgtcggagaacacgcggtaggcgggatttcactggttgaaaccataaatttccttattattacggcttttaacgctatagccacaggcggctcagtagtcgcaagccagtatctggggcgcaaagaagaaaacaacgcctgcgattcggcaaaacagttgatatacataagtttgattatttcattaactcttatgttttttaccattttcacgcgccgcattatgcttaaaactatttttggcaacatcgcggacgatgtaatggaagcctctgatatttattttttgtttatagcgatttcatatccattccttgccctgtacaccgccgccgccgcgatgttcagaagcatgggagattcaaaactcccgatgaaaatagtaatactgatgaatatactaaacatcggcggaaacgccctatttatctatgtatttaaatggggtgtggctggcgcggctttatccacgcttatcgggcgcattgtcgtggcggtcgtcctgatttaccttttggtaaaagacaagacaagaatcatcaatttacacggattatcaaaggtaaaactggaaggcggcatgataaggcgcatcttaaatataggaataccaagcggtcttgaatcgtcaatgtttcaggtcggaaaaatattgattactagaatttttacggtattcggaaccgccgccattgcggctaacgccgtggggggaacgataaattcactcgcgttcatgccgggaagcggcttcggcatggggttattaatcgttacgggacaatgcatcggggcaggggactaccttgcagtaaaacggcacacaaaaaagatagtaatactctcttatttaacatatttaataataaatatatttatatttatttttatgaacccgataatcaacatttttagcctatcggaagaagcgcaccatttatgcgtagtgtttttaagggttcactgcgtaacttccacactcttttggtgtccgtccttcgtgcttccaaacgcgttaaaagcggctggggacgcccgttatgtcatgattgtcgccatctgtacaatgtggttcgtaagggtatgttccgcctattttatgtcgtacacgcttaggtttggccccgtaggggtttatttggccatgggcgcggactttttcttcgcgggggctattctacaccaaacgtggtaa

SEQ ID NO: 46614 - protein, 460 aa, Unknown
  Obtained from environmental sample
  DOMAIN (267)...(429): MatE
  misc_feature (1)..(460): Xaa is any amino acid
MEDKLFPTASVEPVARSSPMDTPVVLPVADWTNKRLFTLFWPLIIEQLLVVMMGIIDMVMVSYVGEHAVGGISLVETINFLIITAFNAIATGGSVVASQYLGRKEENNACDSAKQLIYISLIISLTLMFFTIFTRRIMLKTIFGNIADDVMEASDIYFLFIAISYPFLALYTAAAAMFRSMGDSKLPMKIVILMNILNIGGNALFIYVFKWGVAGAALSTLIGRIVVAVVLIYLLVKDKTRIINLHGLSKVKLEGGMIRRILNIGIPSGLESSMFQVGKILITRIFTVFGTAAIAANAVGGTINSLAFMPGSGFGMGLLIVTGQCIGAGDYLAVKRHTKKIVILSYLTYLIINIFIFIFMNPIINIFSLSEEAHHLCVVFLRVHCVTSTLFWCPSFVLPNALKAAGDARYVMIVAICTMWFVRVCSAYFMSYTLRFGPVGVYLAMGADFFFAGAILHQTW

SEQ ID NO: 46615 - DNA, 945 bp, Unknown
  Obtained from environmental sample
  misc_feature (1)..(945): n is a, c, g, or t
atggcatgtttgtttgattatattaagtggcggggagatttagattttaatgtgtctccttttaatccggtggataatattattttttcacagctttcgtatcttacgcttgatggaattgttccggctcctcaagataatgagggaattagcattgctcttgctgtaagggtttataatgaaaaatccagtcagcccggttttaaattgtcttcgatatttaaagaggatcatgatttaatcagggcgcttggagcgtcaagacgattcggtaattgccagttgttcggttttgtaaataatgttaacgaggatcgtgaaattcaattttccgccgtctgtgtttacacgagcgacgatcattgttttgtagcgtatcgggggactgattcgtccattttaggctggaaggaagattttaacatgtgctttaaagacgtaattccatcccagcttgaagccgtagattatcttgaaaaaatggctcctaaaataaacggctccctgcgcgtaggcggtcattcaaagggtggaaacctcgctatttacgccgcttcagaatgtgacagtaagattcaaaagcgcataacaacagtttatagcaatgattctcccggttttaacaaaaaatttatttacggtgacggttttaacgctattaaagacaagattcgtttttatgtgccacagtcgtcaattatcggaatgtttatggaacacggcactgattacaccgtaataaaaagcaatgaaagcggccttatgcagcacaatctttattcttgggacgtgacatataacgatatggttcttgccgaaaaaacaaccgtaggcagtaaatttgtaaatgacactttacgcgaatggcttgccaatcttgacaacgtggagcgtgaaaactttatagaagcgcgtataccatatactgattgccgcggacattaa

SEQ ID NO: 46616 - protein, 314 aa, Unknown
  Obtained from environmental sample
  misc_feature (1)..(314): Xaa is any amino acid
MACLFDYIKWRGDLDFNVSPFNPVDNIIFSQLSYLTLDGIVPAPQDNEGISIALAVRVYNEKSSQPGFKLSSIFKEDHDLIRALGASRRFGNCQLFGFVNNVNEDREIQFSAVCVYTSDDHCFVAYRGTDSSILGWKEDFNMCFKDVIPSQLEAVDYLEKMAPKINGSLRVGGHSKGGNLAIYAASECDSKIQKRITTVYSNDSPGFNKKFIYGDGFNAIKDKIRFYVPQSSIIGMFMEHGTDYTVIKSNESGLMQHNLYSWDVTYNDMVLAEKTTVGSKFVNDTLREWLANLDNVERENFIEARIPYTDCRGH

SEQ ID NO: 46617 - DNA, 1020 bp, Unknown
  Obtained from environmental sample
  misc_feature (1)..(1020): n is a, c, g, or t
atgcaaggaaccggtatactcaccctttcaggcaacggctatttattgcgtataggcaatgggcaaacagttatagcaaaagaccttaccctgcaaggatgcgacaataccgcttcggtggttgatgtttcgaccggcggcacattcagaatggagggcagcgccagggttaccggcaacattaattccagcggttccggcggcggcgtgcgtatatcgggaggggctttcataatgcagggtgaagctgcggtgtcaggcaatacctgcggagggaaccagaaccaggaacctcgtggcggcggagtgtttcttaatacaggaagctttaccatgagaggtaaagccagggtggagagtaatatagccagtaccaactatggtaatgccaatggcggcggggtatctgtaagtggtgggacatttaccatggaaggcggctttattcatgataatacagcaagcggcggtaagtatggtaatgcaaggggtggcggcgtgcatgtaagtggcgggacatttgttatggaaagtggctcaatccaggataatactgttacaggctgcgaaatcgcctggggcggtggcgtgtttggaaatttcactatgcgtaacggaacagtatccggcaatacagtcagtgtaaacaatataggcagtaacggccctgcggaagccagtggcggcggagtgagagggaacctcacgatgcttggcggaacaatatcgggtaatagcgccattgctgggagaactactcatagcaataataacgatgcctgcgcctatggcggcggggtgtacgggcaactgacaatgaatggcgggacgatatcgggtaataccatcagcgccagcaatagtgccaacgccaacagagtgatcgttaaaggcggcggggtgtattccctttttaacttcgctaaaaccggcgggactatttacggcaataacgcagcggatgatcttggaaatatcgcgattggcggaaaaggcatgcggtatatcgcgttggtctag

SEQ ID NO: 46618 - protein, 339 aa, Unknown
  Obtained from environmental sample
  misc_feature (1)..(339): Xaa is any amino acid
MQGTGILTLSGNGYLLRIGNGQTVIAKDLTLQGCDNTASVVDVSTGGTFRMEGSARVTGNINSSGSGGGVRISGGAFIMQGEAAVSGNTCGGNQNQEPRGGGVFLNTGSFTMRGKARVESNIASTNYGNANGGGVSVSGGTFTMEGGFIHDNTASGGKYGNARGGGVHVSGGTFVMESGSIQDNTVTGCEIAWGGGVFGNFTMRNGTVSGNTVSVNNIGSNGPAEASGGGVRGNLTMLGGTISGNSAIAGRTTHSNNNDACAYGGGVYGQLTMNGGTISGNTISASNSANANRVIVKGGGVYSLFNFAKTGGTIYGNNAADDLGNIAIGGKGMRYIALV

SEQ ID NO: 46619 - DNA, 438 bp, Unknown
  Obtained from environmental sample
  misc_feature (1)..(438): n is a, c, g, or t
atggcggtcatacgccgttctttgtcggaaactacaagagttgtccgcgcgacgcccataagcactttgtctctggcttcttcaaagtcatgcataatcacttcgggtctgtcttttcgcgcggcaaacaaagccgcttcgtttacaaggttcgcaatatccgcgccgctcattcccggcgtcgctcttgcgatgcgcgcaagatcaatttccttatctaaaggaatttttgcggcgtggatttgtaaaatagcctcgcgttcctttatgtctggcatcgcgacaataacttggcggtcaaaacgcccgggacgaagaagggctgggtctaaaacatcggggcggtttgtcgcggcaaggataataactccgtcttttgaatcaaagccgtccatttccacaaggagctggttcaatgtctgctcgcgttcgtcatga

SEQ ID NO: 46620 - protein, 145 aa, Unknown
  Obtained from environmental sample
  misc_feature (1)..(145): Xaa is any amino acid
MAVIRRSLSETTRVVRATPISTLSLASSKSCIITSGLSFRAANKAASFTRFAISAPLIPGVALAMRARSISLSKGIFAAWICKIASRSFMSGIATITWRSKRPGRRRAGSKTSGRFVAARIITPSFESKPSISTRSWFNVCSRSS

SEQ ID NO: 46621 - DNA, 567 bp, Unknown
  Obtained from environmental sample
  misc_feature (1)..(567): n is a, c, g, or t
gtggcggaggcgagggacgcatggcggtcaagccaaagcgtggtggacgcggcaaggacgtactggctcgatgagaccggcgtgaactgcggcatgacgcgcctgtatgggagggccatggcgggcgagagggtgtatgagtatgttccggacgtcaggttcgagaggacgtcgctggtgggcgccctggggctgggcggggtggtcgccccgctggcgtacaaaggctcgctggacggcgagtttttcgcgggctacgtcaaaaccagcctcgcgcccgccatgaagaggggggacacattgatcctggacaacctgtcggcccacaaagttaagggcgccctgcggccgcttgccgcgaagggcgtcaaagtcgtgttcctgcccgtgtattcgcaggatttcaacccgatcgagcacgcctggtccaaggtcaaggcctgcctgcggaagctgaaggccaggacggcagacgagctgctgcccgccatggccgtggccctggactcggtcacgccggaggactgcagggggtgggtcaggcattgcggatatggactacaataa

SEQ ID NO: 46622 - protein, 188 aa, Unknown
  Obtained from environmental sample
  misc_feature (1)..(188): Xaa is any amino acid
MAEARDAWRSSQSVVDAARTYWLDETGVNCGMTRLYGRAMAGERVYEYVPDVRFERTSLVGALGLGGVVAPLAYKGSLDGEFFAGYVKTSLAPAMKRGDTLILDNLSAHKVKGALRPLAAKGVKVVFLPVYSQDFNPIEHAWSKVKACLRKLKARTADELLPAMAVALDSVTPEDCRGWVRHCGYGLQ

SEQ ID NO: 46623 - DNA, 477 bp, Unknown
  Obtained from environmental sample
  misc_feature (1)..(477): n is a, c, g, or t
ttgttttttaagaaaaaaacagagaaaatattacaaaaaaaaacgggacatgatgcaatttttgaaatagataaattattagcgccgatattttataaaaactatgaaaaattatcattacctgagagaaatattgcgtgtataattgaattggaaagagatgtaaataatgacggtttcgatgggtatttttataatattcccggtaattatacaaaagaaacactaaatgcattaaaaacaataggctcaaaaacatttttaaaaatatttgaaaatgcggttaatagatttcccaatggaattgtacctgttgatagatttgaacggcaagaacttctaataaaaatctcaaataaaaataatgacgaagaaagcctatggaatgatttggacaatgaattttataagtatgaagaagatatttatacattaatgattgattatattaaggataatataatagatttcagataa

SEQ ID NO: 46624 - protein, 158 aa, Unknown
  Obtained from environmental sample
  misc_feature (1)..(158): Xaa is any amino acid
MFFKKKTEKILQKKTGHDAIFEIDKLLAPIFYKNYEKLSLPERNIACIIELERDVNNDGFDGYFYNIPGNYTKETLNALKTIGSKTFLKIFENAVNRFPNGIVPVDRFERQELLIKISNKNNDEESLWNDLDNEFYKYEEDIYTLMIDYIKDNIIDFR

SEQ ID NO: 46625 - DNA, 651 bp, Unknown
  Obtained from environmental sample
  misc_feature (1)..(651): n is a, c, g, or t
atggcgaagcaattacatgaaaccaaagaaaaacaaaaacgggcattactcgtaagtctgggcgatgatagtacaggcgagttacaggggcttgtaaaaaccctggaactggaaatcgcgggtcaggagcttgtcaaggtacgggaacggaatccgaaattcggcatgggaagcgggaaggccggggaaatcgccggaaaagccaaagaactggaagtggattgcctggtgttcgactgggacgcgagcccctcgcagcagcgaaattgggaagacctcgccgaaatccccgtcatcgacaggcaggaattaattatcaatatcttcgccatgcgagccgttacaagggaagcggacttgcaggtgcggcttgcggaattgcactaccggttgccgcggctgacccacaaatatatcgacctttcacggcagcggggcggacgctacggcaccaggggcgcgggcgaaaccaaactggaaaccgaccgccgcgagatccaaaaacgcatacacaaactggaaaaagaaattgaggatgttgccaaacagcggcaggtgcagcggcggcagcgggaacgccagggaacgccggtctgcgccattgttggctataccaacgcgggcaagtccagccttttcaacgctctttag

SEQ ID NO: 46626 - protein, 216 aa, Unknown
  Obtained from environmental sample
  misc_feature (1)..(216): Xaa is any amino acid
MAKQLHETKEKQKRALLVSLGDDSTGELQGLVKTLELEIAGQELVKVRERNPKFGMGSGKAGEIAGKAKELEVDCLVFDWDASPSQQRNWEDLAEIPVIDRQELIINIFAMRAVTREADLQVRLAELHYRLPRLTHKYIDLSRQRGGRYGTRGAGETKLETDRREIQKRIHKLEKEIEDVAKQRQVQRRQRERQGTPVCAIVGYTNAGKSSLFNAL

SEQ ID NO: 46627 - DNA, 327 bp, Unknown
  Obtained from environmental sample
  misc_feature (1)..(327): n is a, c, g, or t
atgcgcggacatattaagtcggtagataagactatcccacagattgttatgcacgaaagaatgggtcattctgtaaaaccgcctgttgttcgagaaagaattgaaaaattatttggcgatgttagccgaattgaattatttgcacgtcaaaaaattaatggatgggatgccattggttacggaattgatggaataagtattgaagagagaataaagcagattaataatccggaatatgttttttcatatattgaaacaaatgaacgaataactggcgtaaaaacgctgcaacaacaatcagcatttttattctcaaattataattaa

SEQ ID NO: 46628 - protein, 108 aa, Unknown
  Obtained from environmental sample
  misc_feature (1)..(108): Xaa is any amino acid
MRGHIKSVDKTIPQIVMHERMGHSVKPPVVRERIEKLFGDVSRIELFARQKINGWDAIGYGIDGISIEERIKQINNPEYVFSYIETNERITGVKTLQQQSAFLFSNYN

SEQ ID NO: 46629 - DNA, 858 bp, Unknown
  Obtained from environmental sample
  misc_feature (1)..(858): n is a, c, g, or t
atggacgtggcgcgcgactctctggagatcaagcgcgaggtcataacaaagctgatggaccaaggcctcttcccgtacacgcagcgctacctgcgccactggaacaaccacttctccacgataggcctgatcgggatgaacgagtccacgcagaacttcttcagggatccgggcaaggatctgaccgaccccgaggcgcgcagcttcgcaatggaggtgctgcagcacatgcgccgccgcctcataatgtatcaggaggagaccggccacttgtacaatttggaggccacccccggggagagcacctcctacaggctggcgaagatcgataggaagaggtcccccgacatgattatccccggcggcgacaacccgttcttcacgaactccacccagctgccggtcgacgccacgaccgacctctttgaggcccttgacttgcagaacgacctccagagccagtacaccggcggcacggtcttccacgcccacataggggagtccatagacgacgtagaggcttgcaagaagttggtcaagtccatcgcctacaactaccgcataccctacttcaccatatcgcctactttctccgtatgcaagtcccacggatatttgaagggccagcacttcgcctgccccaactgctccgaggagacggaggtctacgcccgtatagtaggctactaccgccccgtgcaaaactggaaccccggtaagaagtcggagttcagccagagggtggtctttgatcccgaagaccctgaagacgccgaaggcccggaggtggagatgatggattttgccggtatggtggagaagcgggagatgatggggctggctgaggctgtggggtga

SEQ ID NO: 46630 - protein, 285 aa, Unknown
  Obtained from environmental sample
  misc_feature (1)..(285): Xaa is any amino acid
MDVARDSLEIKREVITKLMDQGLFPYTQRYLRHWNNHFSTIGLIGMNESTQNFFRDPGKDLTDPEARSFAMEVLQHMRRRLIMYQEETGHLYNLEATPGESTSYRLAKIDRKRSPDMIIPGGDNPFFTNSTQLPVDATTDLFEALDLQNDLQSQYTGGTVFHAHIGESIDDVEACKKLVKSIAYNYRIPYFTISPTFSVCKSHGYLKGQHFACPNCSEETEVYARIVGYYRPVQNWNPGKKSEFSQRVVFDPEDPEDAEGPEVEMMDFAGMVEKREMMGLAEAVG

SEQ ID NO: 46631 - DNA, 702 bp, Unknown
  Obtained from environmental sample
  misc_feature (1)..(702): n is a, c, g, or t
atgggttcggacgcaaaaattcccgctattataggctggacgaaaacgtctttcatagactatccgggttgtccggccacgctattgttcctccccggctgcaacctacgctgcccctattgccacaaccccggtatcgtcctagacgaatatccaccgataccgtttgacgtcgtcagcgcccacatagtcaagcgaaaaaacgtaatagagggcgccgtgataagcggcggcgagcctacgctgcacccggggctgaaagatctttgcgacgccgtcaaatcgctgggattaaaagtaaagatagataccaacggccttgaaccggatgtattaacggcctgccgccccgattatctggccttggacattaaaacggcgttcggcaagtaccgcctgctgaatattcccgatcaatacgatagcgattgccgggagcgcctttccgagtcaatagacatagttaagtcgatggctgaaaacgccgaaataaggataaccgccgcgccgggcatagtcgaccgtggggatatagagagtctatgcgcggagttgcgcggggtgagcaaagtcttcctgcagcagttcagcccgaatcaaccgatgttgaaccccgcgtactcgtcggtgagcccgtacggcgcggacgaattggaatttatgcgtaatatgttttgggggcgggtattgagtgtgcggtag

SEQ ID NO: 46632 - protein, 233 aa, Unknown
  Obtained from environmental sample
  DOMAIN (28)...(185): Radical SAM superfamily
  misc_feature (1)..(233): Xaa is any amino acid
MGSDAKIPAIIGWTKTSFIDYPGCPATLLFLPGCNLRCPYCHNPGIVLDEYPPIPFDVVSAHIVKRKNVIEGAVISGGEPTLHPGLKDLCDAVKSLGLKVKIDTNGLEPDVLTACRPDYLALDIKTAFGKYRLLNIPDQYDSDCRERLSESIDIVKSMAENAEIRITAAPGIVDRGDIESLCAELRGVSKVFLQQFSPNQPMLNPAYSSVSPYGADELEFMRNMFWGRVLSVR

SEQ ID NO: 46633 - DNA, 1656 bp, Unknown
  Obtained from environmental sample
  misc_feature (1)..(1656): n is a, c, g, or t
atggtacagcttgacggcgggcgtttcgccaccagcgatcttaacgacctgtaccgccgcgtgattaacaggaacaaccgccttaaaaggctgataacgcttaacgcccctgacatcattatacgcaacgagaagcgtatgctgcaggaagcggtggacgcgttattcgacaattccaagaaaaagaaagtggtgaaaggttcttccaaccgtccccttaaatcgatcagcgacatgctcaagggaaaacagggccgcttccgccagaaccttttaggcaagcgcgttgactattcgggccgctcggtcattaccgtcgggccggatctaaaaatgtggcagtgcgggctcccgacaaaaatggcgatagagcttttcaagccctttataatgaaaaaacttgttgacaaggatgttgtctacaatatcaagaaagccaagatgctgctggaggccgaaagcgcggaaatcttcgcgatcctcgacgaagtggtaaaagaacatccggtgctgctgaaccgcgcgcccactctgcaccgcttaggtattcaggcctttgagccggtgctggtggaaggcaaggcgatcaagctgcatcccctggtctgccacgcctttaacgcggactttgacggcgaccagatggccgtccacgtgcccctgacccaggcggcgcagatggagtgctggacgcttatgctctccgcccgcaaccttcttaaccccgcgaacggcaggacaatagtgttcccatcgcaggacatggtgcttggaattaacttccttacccgcgtaaggcccaacggcaagcggccggagtgttcaaaaccggaaggtaaaggcaaatttccctattattcctcgccggaagaagcccttatggcggtggagaataaattcctcgattggggctccgtcataagggttaagcccgtgaaattcccgatatgggacaagatagaccatgagatggaaatcccggcggacggaattatagaaaccaccgtgggaaggctggtgttcaacgaggaacagcccaaagagattccctttatcaattacgagatgaaagacaaggagcttcgcgcccttattgagtatgtcttcaagaataacggttcctggattacggtaaaaatgctggacgcgattaagtctaccggctaccgttacgcgacagtttttggcgccaccatcggcattgacgacatagtggttcccaaagaaaaacccgaaatgatagagaaggcgaacaaggaagtagaggcgattcaggcccagtggcgcaagggcattatgacccaggaggagcgctacaacaaggttgtcgaggtatggaacaagaccaacgatgatcttacaaacatcatgatgaaaaccctggaagcggaccgcgacggcttcaactcgatatacatgatggccaactccggggcgcgcggaagccgcacccagatacgccagcttgccgctatgcgcggccttatgggcaaaccctccggcgagattatcgagctgccgatacgctccaattttaaggaagggctttcgtcatcgagttttttatttcgactaacggcgcgcgcaagggtcttgcggacaccgcccttaaaaccgcggaagccggttacctcacgcggcggcttgtggatatag

SEQ ID NO: 46634 - protein, 551 aa, Unknown
  Obtained from environmental sample
  DOMAIN (1)...(91): RNA polymerase Rpb1, domain 1
  misc_feature (1)..(551): Xaa is any amino acid
MVQLDGGRFATSDLNDLYRRVINRNNRLKRLITLNAPDIIIRNEKRMLQEAVDALFDNSKKKKVVKGSSNRPLKSISDMLKGKQGRFRQNLLGKRVDYSGRSVITVGPDLKMWQCGLPTKMAIELFKPFIMKKLVDKDVVYNIKKAKMLLEAESAEIFAILDEVVKEHPVLLNRAPTLHRLGIQAFEPVLVEGKAIKLHPLVCHAFNADFDGDQMAVHVPLTQAAQMECWTLMLSARNLLNPANGRTIVFPSQDMVLGINFLTRVRPNGKRPECSKPEGKGKFPYYSSPEEALMAVENKFLDWGSVIRVKPVKFPIWDKIDHEMEIPADGIIETTVGRLVFNEEQPKEIPFINYEMKDKELRALIEYVFKNNGSWITVKMLDAIKSTGYRYATVFGATIGIDDIVVPKEKPEMIEKANKEVEAIQAQWRKGIMTQEERYNKVVEVWNKTNDDLTNIMMKTLEADRDGFNSIYMMANSGARGSRTQIRQLAAMRGLMGKPSGEIIELPIRSNFKEGLSSSSFLFRLTARARVLRTPPLKPRKPVTSRGGLWI

SEQ ID NO: 46635 - DNA, 1809 bp, Unknown
  Obtained from environmental sample
  misc_feature (1)..(1809): n is a, c, g, or t
atggcggaaaccaaattcatacgaaatttttgcataatcgcgcatatagaccacggcaaatcaacgctggcggacaggctcatacagaaggcaaagctcgttgacgaccgcaacttccaggaccagatactcgacaacatggatattgaacgggagcgtggcataactattaaaagccaggcggtcagaatcccctatacggcccaggacggcaataactatgagcttaacctcgttgacactccgggccatgttgacttcacttacgaagtgagccgcgcgatcaactcctgcgagggggctctgctccttgttgacgccacgcaaggggtacaggcgcagaccctttcaaatatgtaccttgcccttgagcataacctcgaaatcgtgccggttatcaataaaattgacatgcaggccgccgacatagaaggcgcgaaaaaacagatagacaaggatttggggctggacgcggaaagcgccctgctggtttcggcgcgtaacggcaccggcgttgacgagcttttcgaggccatcgtcaagagaataccggcgcccacaggcgacagaaacgcctcgataaaagcgcttattttcgactgccattatgattcgtacaggggcgtcgtggtgcatctgcgcgtctatgacggaataattaaaaaagggatgaaaatatcctttatgtcaaacaactcggtttacgaggttgagactgtcggcgttttcaagctagcgttagtcgaaacaaacgagctttccgccggggacgtgggctatgtcatcgcgggcataaaaacggtcagcgacgtgcgggtcggcgacacggtgacgggcgcggacaacccatgcgccgctcccttaagcggtttccgcgtggtaaagcccgtggttttttcttccatatatccggtagattcaaatgattacgaagagcttcgctcaagcatggaaaaactcaagctaaacgacgcgtcgcttgtttatgaaaaagattcatcggcggctctcggtttcggtttccgctgcggctttctgggacttctgcaccttgaggttatacaggagcggcttgaacgggaatttgaccagtcggtgatctttacggccccttcggtaaagtacaaactgcggcttaaaaattcaaaagacgaagttatgatcgacaaccccatggaataccccgacgaaggattgattgaaagcgcccaggagccttatatacgcgcgtcgatcatcacccccgccacattcctgggcaatataatgaccctctgccttgaaaagcgcggcgttcagaccaacatgacctaccttgacgaaaaacgggtggagcttgtatacgacatgcccctttccgaagtgctttttgatttttacgaccgcctgaaaagcaccagccggggttacgcgtcattcgactacgacattaccgattacaggcccacggaactcgccaaactggacatattgctcaacggcaaagcggtggacgccctttcccagttggttttcagagaaaacgcctatgaccgcgcccgcaaggtatgcgaacgcttaagggacgaaattccccggcagcagttcaagatccccatacagggcgccattggcagcagcatcatcgcccgcgaaacggtcaacgccctgcggaaggacgtgctggcgaaatgctacggcggcgacataacccgcaagcgcaagctgcttgaaaaacaaaaagaaggcaagaagcgcatgaaacaggtaggcgacgtggaactgccccagagcgccttcctcgcggtattgaaagccaaggacgaataa

SEQ ID NO: 46636 - protein, 602 aa, Unknown
  Obtained from environmental sample
  DOMAIN (19)...(185): Ras family
  misc_feature (1)..(602): Xaa is any amino acid
MAETKFIRNFCIIAHIDHGKSTLADRLIQKAKLVDDRNFQDQILDNMDIERERGITIKSQAVRIPYTAQDGNNYELNLVDTPGHVDFTYEVSRAINSCEGALLLVDATQGVQAQTLSNMYLALEHNLEIVPVINKIDMQAADIEGAKKQIDKDLGLDAESALLVSARNGTGVDELFEAIVKRIPAPTGDRNASIKALIFDCHYDSYRGVVVHLRVYDGIIKKGMKISFMSNNSVYEVETVGVFKLALVETNELSAGDVGYVIAGIKTVSDVRVGDTVTGADNPCAAPLSGFRVVKPVVFSSIYPVDSNDYEELRSSMEKLKLNDASLVYEKDSSAALGFGFRCGFLGLLHLEVIQERLEREFDQSVIFTAPSVKYKLRLKNSKDEVMIDNPMEYPDEGLIESAQEPYIRASIITPATFLGNIMTLCLEKRGVQTNMTYLDEKRVELVYDMPLSEVLFDFYDRLKSTSRGYASFDYDITDYRPTELAKLDILLNGKAVDALSQLVFRENAYDRARKVCERLRDEIPRQQFKIPIQGAIGSSIIARETVNALRKDVLAKCYGGDITRKRKLLEKQKEGKKRMKQVGDVELPQSAFLAVLKAKDE

SEQ ID NO: 46637 - DNA, 918 bp, Unknown
  Obtained from environmental sample
  misc_feature (1)..(918): n is a, c, g, or t
gtgggagtggggttttccggctgcaaacaggagaagaaagcaaggacattcggtttcacctgtatgcagaataataatccgttctttatcgtcctggagcagacaatccgcgaagaagtggagaaaaacggcgacaggctgattacgattgatgctgaaatagattcccaaaaacaggtcgatcaaatcggggacttaatcgcccgggaaatcgacgctatttttctcaatcctgtagactgggaagcgattcggcccgcgctggtttcccttaacaaggctaaaatccccataattaactttgacgcgcaagtgaaggatattgatctggtatcagctttcgtgggttcggacaacaggaacgcgggttatatttgcggcgttgacatggtaaaacgcttccctaacggaggccccatcggcgtcctcgattccccgaccaagctctcggttcgtgatcgcattgacggcttcaatgaagcaattgcgggaaagggctttacaatagtattcttgaaggatacgatgggcggttttcctgtgggacagcgcaataccgaagaaatgctcagaaccaatcccgaagtaatcgccattatgggtggcaatgaccaggtggcgctcggcgctcttgcggcttgcaaaaccgcgaaccgcgccgatgtcctcatatacggcgttgacggatccccggcgggcaaagccgcaatcgccgagggcggacagtttgccggcacgggcgcgcaaagcccaatcgctatcgcgaaagaatctgtcgcgattgcgtataagattttgaaacagcagccttatgaaaagaaggtactggtcaggacattcctgatcaccaggagaacattggcgagtacgacattgatggctggcaatagatttaaatacaatcataatgccatataa

SEQ ID NO: 46638 - protein, 305 aa, Unknown
  Obtained from environmental sample
  DOMAIN (14)...(290): Periplasmic binding proteins and sugar binding domain of the LacI family
  misc_feature (1)..(305): Xaa is any amino acid
MGVGFSGCKQEKKARTFGFTCMQNNNPFFIVLEQTIREEVEKNGDRLITIDAEIDSQKQVDQIGDLIAREIDAIFLNPVDWEAIRPALVSLNKAKIPIINFDAQVKDIDLVSAFVGSDNRNAGYICGVDMVKRFPNGGPIGVLDSPTKLSVRDRIDGFNEAIAGKGFTIVFLKDTMGGFPVGQRNTEEMLRTNPEVIAIMGGNDQVALGALAACKTANRADVLIYGVDGSPAGKAAIAEGGQFAGTGAQSPIAIAKESVAIAYKILKQQPYEKKVLVRTFLITRRTLASTTLMAGNRFKYNHNAI

SEQ ID NO: 46639 - DNA, 867 bp, Unknown
  Obtained from environmental sample
  misc_feature (1)..(867): n is a, c, g, or t
atgcccgagatgaacgggtttgaggcgatgatacgcataaaatccaatcctttatactcagaaattcccgttatatttctgaccggctattcggacaatgacattgaagcccatggttttgaactgggcgttgtagattttattacaaaaccgttttccactcccgtgctgctcaaccgcattaaaacacatctggatattgatgaactaatccgggagcggacggcacagatcaggcggctgcaaaacggtattgtaactgttttggcagacgtagtcgaagagcgcgacaaaaatacgggcggacataatgaccgtacggcgaggtacgtaagaatactgattaaagcgatggaagaacgggggatatacagcgatgaaatacacggatggaacatggaaatgatcgtttcatcggcgcgattgcatgacgttggcaaaatccatatttttgacatggttttgaataagcccggcaagctggatagtgaggaatatgagaaaatgaaattccacaccacagaaggcgcgcagataatagacagaatgatcaggcaaacgggcgaagaagagttcctgcataacgccaaattattcgcggaataccaccatgaacactgggacggtagcggatatccgcacgggctgaaagaaaacgagatccctctgcaaggccgtatcatggcgattgccgacgtatatgacgcgctaatctccaagcggccatataaagaagcgtttactgtcgaggaagcgatccaaatcatcacaaccagcgcaggtacgcattttgatccaaagattgtggaagtatttcttgaagtgcatgatcagctcagggcggttagagaggcttcatgccaatag

SEQ ID NO: 46640 - protein, 288 aa, Unknown
  Obtained from environmental sample
  DOMAIN (100)...(237): HD domain
  misc_feature (1)..(288): Xaa is any amino acid
MPEMNGFEAMIRIKSNPLYSEIPVIFLTGYSDNDIEAHGFELGVVDFITKPFSTPVLLNRIKTHLDIDELIRERTAQIRRLQNGIVTVLADVVEERDKNTGGHNDRTARYVRILIKAMEERGIYSDEIHGWNMEMIVSSARLHDVGKIHIFDMVLNKPGKLDSEEYEKMKFHTTEGAQIIDRMIRQTGEEEFLHNAKLFAEYHHEHWDGSGYPHGLKENEIPLQGRIMAIADVYDALISKRPYKEAFTVEEAIQIITTSAGTHFDPKIVEVFLEVHDQLRAVREASCQ

SEQ ID NO: 46641 - DNA, 1605 bp, Unknown
  Obtained from environmental sample
  misc_feature (1)..(1605): n is a, c, g, or t
atgaccaaccttggaattccggtcccgccgggttttacaatttctactgatgtctgcgccgcttattacgaaaacaaaggtaaatactccgcgaatgttaaaatggaagtagaaaatactttaaaaaggctggaaacggtaatgaaaaagaaacttggcgatccaaacgatccgcttttggtttctgtccgctcaggagcggccgtatccatgcccggcatgatggataccattcttaaccttggaatcagcgataaatcggttaaagggcttgccgcgaagacaggcaacccccgtttcgcgtgggacgcgtaccgccgctttattcaaatgtacggcgacgttgtaatgggcgtcgagcatgatcattttgaagaagctattacttcagttaaaaaagcgaagaaaatcgagcttgataccgatttaacggcgaaagatctcgagcagcttgtcgaagaatataaaaaaatcgtaaagaaatataccggaaaagagttccctcaggcgcctttagatcaactttggggcgcgattaacgccgttttcggctcatggaatagcgaacgcgccatcagataccgtaaattggaagatatccgcgatcttaaagggactgcggtgaatgttcagtctatggtattcggcaatttcggcgacgattcgggcacgggcgtttgtttcagccgtgatcccagcaccggtattaatgaattttacggcgaatacttgatgaacgcgcagggcgaagacgtagtcgcgggcatcagaacgccggaaagaatcgcaactctcgcaaaaaagaatcccgccatttacaaacagcttgtaggaatcaaaaataagcttgaaaagcactttaaagacatgcaggacatggaatttaccgttcaacaggggattctatacattctgcagacaagaaacggtaaacgcgccggaaccgccgccgtaaaatgcgcggttgacatggtcgcggaaggcctaatcgacaaagaaaccgctattatgcgtgtaacaccggcgcaccttgaccagcttttacacccaatggtcgaaacacaggcaagaaaacaggcaaaattccttacaaagggtcttaacgcctctcctggagcaggcacgggcagaatagtttttaacgcgaaagacgctgaagcctggcaccaaagaggtgaaaaagttcttcttgtgcgtaaagatacaagcccggaagacataggcggtatggttgtttcgcagggtattcttacatcaacaggcggtatgacaagccatgcggctgttgtcgcccgcggtatgggaactccgtgtgtcgccggagcaaaaggcgtagttgttcagaataatatcgtttctatcggagacaatacgtaccatgaaggcgactggatcactatcgacggctctacaggcgaagtatacgacgggaaattgcctcttgtagcggcgacnatatcaaaagacatgaataccttccttaaatggtgcgatgatgtccgcgctaaagcggttcgcggtcaattaaaggttttaatgtcagaacaaacgccgatcagcctgaagacgcgaagcgcgcggttagtttcggcgctcagggcatag

SEQ ID NO: 46642 - protein, 534 aa, Unknown
  Obtained from environmental sample
  DOMAIN (373)...(472): PEP-utilising enzyme, mobile domain
  misc_feature (1)..(534): Xaa is any amino acid
MTNLGIPVPPGFTISTDVCAAYYENKGKYSANVKMEVENTLKRLETVMKKKLGDPNDPLLVSVRSGAAVSMPGMMDTILNLGISDKSVKGLAAKTGNPRFAWDAYRRFIQMYGDVVMGVEHDHFEEAITSVKKAKKIELDTDLTAKDLEQLVEEYKKIVKKYTGKEFPQAPLDQLWGAINAVFGSWNSERAIRYRKLEDIRDLKGTAVNVQSMVFGNFGDDSGTGVCFSRDPSTGINEFYGEYLMNAQGEDVVAGIRTPERIATLAKKNPAIYKQLVGIKNKLEKHFKDMQDMEFTVQQGILYILQTRNGKRAGTAAVKCAVDMVAEGLIDKETAIMRVTPAHLDQLLHPMVETQARKQAKFLTKGLNASPGAGTGRIVFNAKDAEAWHQRGEKVLLVRKDTSPEDIGGMVVSQGILTSTGGMTSHAAVVARGMGTPCVAGAKGVVVQNNIVSIGDNTYHEGDWITIDGSTGEVYDGKLPLVAATISKDMNTFLKWCDDVRAKAVRGQLKVLMSEQTPISLKTRSARLVSALRA

SEQ ID NO: 46643 - DNA, 987 bp, Unknown
  Obtained from environmental sample
  misc_feature (1)..(987): n is a, c, g, or t
gtggaagatctttcccgctgtttcggtctgttggcggcgcttaacgggggtaaggcgaaaccgccagaaaacataaatgcccttgggccaatgccttccaaaacagcttcatgcattgttctaaatagcgaaaaatccgatctccggagaaacggctttgcgtggagggcgaaatccgggcgggtagagattttcggcgaatcgcctcgcgggctatgcaacggcatctacagctttattaccgctatgggcgtaagctggcccgaaccgggcgaagaaatactcccgaaagccggagccggccttgtacgcgaaagcgccagtgagccctcccattttgacgaaaaaaatccacttgcctccccatggcggcgctttgtgccaaccggaaaaagcgggctgagaagaatgttggcaaaaagcgaagcttttaccgcgtgggcagggcggaaccgctatgacgctctggttatccccatggcggcttttgtttctgacgggcaaaagctaaagcagcttgataaatttgccagggactacggcattgctctggaagccggagggcacgatctcagctcgcttttgccccgccaggtattcttttttcaccgggattatttcaggatggaagacggcaaaaggaaaatggatcatcacttctgcccgacaaaccccggcgctttaaggcttatcggcaaagaggccgaaaaattgttcagggcggcgggcgaagtcaaacaatcagttcgcaaagtttttcacctttggccagataacggggcggaaaacgcgtggtgttcctgccccacctgcagggcgtttaccacgcaggaacagaaccgcattgccgttaatgctgccgcggacattctggcgactttaaaccccgacgcaatgataactttttacgaaaattccggcgagagcgganaaatccccataagaaagaatgtctataaattggagaagctgcctggcttagaataa

SEQ ID NO: 46644 - protein, 328 aa, Unknown
  Obtained from environmental sample
  misc_feature (1)..(328): Xaa is any amino acid
MEDLSRCFGLLAALNGGKAKPPENINALGPMPSKTASCIVLNSEKSDLRRNGFAWRAKSGRVEIFGESPRGLCNGIYSFITAMGVSWPEPGEEILPKAGAGLVRESASEPSHFDEKNPLASPWRRFVPTGKSGLRRMLAKSEAFTAWAGRNRYDALVIPMAAFVSDGQKLKQLDKFARDYGIALEAGGHDLSSLLPRQVFFFHRDYFRMEDGKRKMDHHFCPTNPGALRLIGKEAEKLFRAAGEVKQSVRKVFHLWPDNGAENAWCSCPTCRAFTTQEQNRIAVNAAADILATLNPDAMITFYENSGESGXIPIRKNVYKLEKLPGLE

SEQ ID NO: 46645 - DNA, 1077 bp, Unknown
  Obtained from environmental sample
  misc_feature (1)..(1077): n is a, c, g, or t
gtggtgagttttaagtttggcgaggaaaaggctctggaactattccaggtgatgaatgagaagctaggcattggcgaggaagaaacaagggcggctttcgagaaagccctggcaaaacaaaacgagtatttttctgcggcaaagaagatggngctacaggctcttgaatatgcccgcaaagcggatcgcccagttatcgcggttttgggccggccctataacgccttcacgcctgaagccaacatggggattccccggaagtttaccactcggggctattccatcgtgcctttcgatattcttccttttgaagacgaagaaatattttcaaatatgtactggtactacggtcagcaggatgttaaagccgcgagtttattaaaaaacgaggacaatgtttatataacttttgttacgaacttttcctgcgcgccggattctttcattctgcattatataaaatggatcatgggccaaaagccgtttttggtactggaactggattcacattccgccgatgccggagtggacacaagggtcgaagcctttttggacatcatcgacgggtaccgcgccaagaaaagcgagctggaagcggagcgctttgataacggctggaggtatgtttacgatccgtccgcttcttcgccggaagatcagctcaggcttgacaacgtaaaaagcggcgagaaggtgaggatacgcaacaacaagcgggttaagattttattatcgaacatgggcgcaatttccaccgagtatatgggcgccgcagtgcgaagctccggaatcaacgccgaagccctgcctgtcgcgaccgggaaaaccatacagatagcccgcgctcacgcttccggcaaagagtgcgtgccaagccacctggtacttggaagcgctcttcaatttttctggagcgaaaagtaccgcaaggacgagctataccttctctttgtgccgattaccaccggcccttgcagaacaggccaatattacattttctacgaaaacctcttcagggatctgcgattggaaaacgtggtggtctttatcctttcggcagacaattcctatacatga

SEQ ID NO: 46646 - protein, 358 aa, Unknown
  Obtained from environmental sample
  misc_feature (1)..(358): Xaa is any amino acid
MVSFKFGEEKALELFQVMNEKLGIGEEETRAAFEKALAKQNEYFSAAKKMXLQALEYARKADRPVIAVLGRPYNAFTPEANMGIPRKFTTRGYSIVPFDILPFEDEEIFSNMYWYYGQQDVKAASLLKNEDNVYITFVTNFSCAPDSFILHYIKWIMGQKPFLVLELDSHSADAGVDTRVEAFLDIIDGYRAKKSELEAERFDNGWRYVYDPSASSPEDQLRLDNVKSGEKVRIRNNKRVKILLSNMGAISTEYMGAAVRSSGINAEALPVATGKTIQIARAHASGKECVPSHLVLGSALQFFWSEKYRKDELYLLFVPITTGPCRTGQYYIFYENLFRDLRLENVVVFILSADNSYT

SEQ ID NO: 46647 - DNA, 993 bp, Unknown
  Obtained from environmental sample
  misc_feature (1)..(993): n is a, c, g, or t
ttggaagcgctcttcaatttttctggagcgaaaagtaccgcaaggacgagctataccttctctttgtgccgattaccaccggcccttgcagaacaggccaatattacattttctacgaaaacctcttcagggatctgcgattggaaaacgtggtggtctttatcctttcggcagacaattcctatacatgagcttggcggaggttttgcgcaggagatgtggaagggccttgtgctttccgattacctcaaggacatacagtgcgcgctcaaggcctgcgccgttgatccgaaaaaagctcaagcggaatatgaacactcctggcgcagggtcatgcacgcggtggagcacaatcccaaatacctgtggaaggaactaaaacatgtcgctaatgatgttaagaagattcccttaaagcgaaaagtcgttgactgcccccgcgttcttgtcgtgggcgagatttacgtgcgccgcgatgattttgccgtgggcgagctgaccgacctgatgagcgagaggggcattgtggttaaagtggcgggcatttccgaatggatacactacctggattttgtgcgtgaatacgcccttaataaattaatcaaactgcaaaagcccggcaagcggcttttttccaaaccctggaaagacctgaaaaaacttcagatagaggaatggtggaaacactcagtggaaaaaaaggtgctttccattctgctgccaacgggccttatccctgaaacgccccacgacatgcgcgagatcatgaagtacacggaggagcattttgtcaacctggagcttaattccgagatagccgtctcttccggttcagcggccgcggcgatggatgccggctattccggcatcgtgaacatcagccccttcgcctgccttataggccgtgtcatcgagggcctgttcaccccctgggcgcgggagcgcaactacccgatcctttcggtggaggtagacggcctcggccgatactga

SEQ ID NO: 46648 - protein, 330 aa, Unknown
  Obtained from environmental sample
  misc_feature (1)..(330): Xaa is any amino acid
MEALFNFSGAKSTARTSYTFSLCRLPPALAEQANITFSTKTSSGICDWKTWWSLSFRQTIPIHELGGGFAQEMWKGLVLSDYLKDIQCALKACAVDPKKAQAEYEHSWRRVMHAVEHNPKYLWKELKHVANDVKKIPLKRKVVDCPRVLVVGEIYVRRDDFAVGELTDLMSERGIVVKVAGISEWIHYLDFVREYALNKLIKLQKPGKRLFSKPWKDLKKLQIEEWWKHSVEKKVLSILLPTGLIPETPHDMREIMKYTEEHFVNLELNSEIAVSSGSAAAAMDAGYSGIVNISPFACLIGRVIEGLFTPWARERNYPILSVEVDGLGRY

SEQ ID NO: 46649 - DNA, 846 bp, Unknown
  Obtained from environmental sample
  misc_feature (1)..(846): n is a, c, g, or t
atgggttccgccctcgcgcgtgttaatgtcgtttacaaacgaaaacattatttcgttaaagccgtcgttgtactggacggcgcattcaatttcaatattgccgcccgcgccgtcgtcgcggctgccttcaagataaaccggctctttgtaaagcaccgttttgttttcgttcaggtattcgacaaaacttttaacaccgccctcgaacataaaatcgtgttctttgggcgtggtaagcctctcgtcgcggatagtgattttaaggcccctgttcaggaaggcaagctcgcgcaggcggttggaaagagcgtcaaagttatatgtcgtggtttcaaaaattatagagtcggctttccagcggattacggttccctgcctgtccggcgaatggcgataaggcaaacctttcgggtctatttctttcaccggtttttcggggacgccgattttgtagcgctgagtgtagactttcccgtcgaggtggacaaaagcttcgcaccactcggaaagggcgttcacgacggaaacgccgactccgtgaaggccgccggaaactttgtaagactttttgtcgaacttgccgccggcgtgaagccgcgtcattaccagctccagggcgctgactttttcggttgggtgtatgtccacgggaatgccgcggccgttgtcctctacccttacaatatcgttctcttccagaaccacaagtatattcgtacagaagccctgcatcgcctcgtccacggaattgtcgactacctcataaacaaggtgatgaaggccgtctattcccgtcgtccctatgtacatgcccgggcgcatgcggacaggctccaaaccttttaa

SEQ ID NO: 46650 - protein, 281 aa, Unknown
  Obtained from environmental sample
  misc_feature (1)..(281): Xaa is any amino acid
MGSALARVNVVYKRKHYFVKAVVVLDGAFNFNIAARAVVAAAFKINRLFVKHRFVFVQVFDKTFNTALEHKIVFFGRGKPLVADSDFKAPVQEGKLAQAVGKSVKVICRGFKNYRVGFPADYGSLPVRRMAIRQTFRVYFFHRFFGDADFVALSVDFPVEVDKSFAPLGKGVHDGNADSVKAAGNFVRLFVELAAGVKPRHYQLQGADFFGWVYVHGNAAAVVLYPYNIVLFQNHKYIRTEALHRLVHGIVDYLINKVMKAVYSRRPYVHARAHADRLQTF

SEQ ID NO: 46651 - DNA, 1140 bp, Unknown
  Obtained from environmental sample
  misc_feature (1)..(1140): n is a, c, g, or t
atggaaacggacgaccttcaaacgataaaaagttatcttgataaggcaaaggtcatgtcaaggcatttactggatgtaatcaatgatattcttgacatgtctaaaattgaagcgaataaatttgaacttttacacggtaattttaattttagaaatatgctttcaaaaaccattaatttaacgagctcccgcgccaaagaaaaagaaacgcatattgcaattaaagtgaatgaaaatattccgccattcataatcggagatgaactaaggctgtcgcaggttattacaaatctgatcaccaacgccataaaattctcgcctgaaaacggcaggattgagttgaacgcggaaaaattggaagagcgggacggcgaaataatccttaagatagaagttaccgacaacggcataggaatttcaccggaacagcagaaaaaacttttcactctttacaagcatacgaacgacgacgctctccaagaaatcggcagcactggcttggggttggctatttccaaacgtattgtagaacttatgcagggaaaaatatgggttgaatctgaacttggcaagggtgcaaaattcatatttaccttaaaagcaaaagaaggaatcgccaatgcggacaaggtttccaccgattcaaaagacaatcttgattttaagaaatattcaatattggtcgcggaagacgttgaaatcaacagggaaattctgttggcattcctggaaaagaccagcattgccattgattttgccgtgaatggcaaagaagccatttccaaatatacggaaaatcccgataaatacaacttgattctcatggacatcaatatgcccgaaatgaacggcgacgaagcgacaaaagcaattcgcgcttttgaagcgacaaaaaaaagcatggagtctccttcgaaaactgacaaacaaagttgctcgagtttcaccgaaggtgaaactcgaagcaataattggaatttgcgtaatcaaattccaattattgcaatgactgcggatgtctttcaagaagacattgataaatgcctgtcggcaggaatgaacgatcacatcgcgaaaccgattgttacggatgatttacacgcgaaattaaaaaaatatttgttatcatcggaatattga

SEQ ID NO: 46652 - protein, 379 aa, Unknown
  Obtained from environmental sample
  DOMAIN (224)...(371): Response regulator receiver domain
  misc_feature (1)..(379): Xaa is any amino acid
METDDLQTIKSYLDKAKVMSRHLLDVINDILDMSKIEANKFELLHGNFNFRNMLSKTINLTSSRAKEKETHIAIKVNENIPPFIIGDELRLSQVITNLITNAIKFSPENGRIELNAEKLEERDGEIILKIEVTDNGIGISPEQQKKLFTLYKHTNDDALQEIGSTGLGLAISKRIVELMQGKIWVESELGKGAKFIFTLKAKEGIANADKVSTDSKDNLDFKKYSILVAEDVEINREILLAFLEKTSIAIDFAVNGKEAISKYTENPDKYNLILMDINMPEMNGDEATKAIRAFEATKKSMESPSKTDKQSCSSFTEGETRSNNWNLRNQIPIIAMTADVFQEDIDKCLSAGMNDHIAKPIVTDDLHAKLKKYLLSSEY

SEQ ID NO: 46653 - DNA, 639 bp, Unknown
  Obtained from environmental sample
  misc_feature (1)..(639): n is a, c, g, or t
gtggaaacaggcaagcggcggctggagcatataaaaagcttcctgcgtttgcatgacgaaaaaccttccatcctggacatcggctgcgcctacggtccctttttggcggcggcggcagagtgcggtttttccccagtcggcgtagaaccggctgccgacgcggctcgctatgtgaaagaagagcttggtttcccctgttatcagggtttcttccccgccgctataaacggtctgagcggctttgatgcggtaactttgtggtacgtaatcgagcattttgaaggtgtgggggcggcgctccgcgagattcacgggcttttaaaagagggcggggtgctggctttttctaccccttctttttccgggatttcaggcagtaaatccctctcttcatttttgaagaacagccccccggaccatttcactgtctggagccccaaagtctgcgcctggattttacggcgctacggcttccggctctgcaaaatcgtggttactggccaccaccctgagcgctttccttttattggtcgttttgcagacccagcgaataaaggcctgctttaccgtttcctgcttttcataagccgccttttccgcctcggggacactttcgaagtctacgccgtgaaaggttga

SEQ ID NO: 46654 - protein, 212 aa, Unknown
  Obtained from environmental sample
  DOMAIN (25)...(115): Methyltransferase domain
  misc_feature (1)..(212): Xaa is any amino acid
METGKRRLEHIKSFLRLHDEKPSILDIGCAYGPFLAAAAECGFSPVGVEPAADAARYVKEELGFPCYQGFFPAAINGLSGFDAVTLWYVIEHFEGVGAALREIHGLLKEGGVLAFSTPSFSGISGSKSLSSFLKNSPPDHFTVWSPKVCAWILRRYGFRLCKIVVTGHHPERFPFIGRFADPANKGLLYRFLLFISRLFRLGDTFEVYAVKG

SEQ ID NO: 46655 - DNA, 1428 bp, Unknown
  Obtained from environmental sample
  misc_feature (1)..(1428): n is a, c, g, or t
atggcaaaaactacaaaagggaaaaaaacaaaattatccgacaaattgtttttcaagctgaaaaattgctgggaaggaattgataaaaagacggaaaaagaagttgaggaacttgccgagtcttacaaacaatttttaaatacgggaaagacagagcgcgaatgcactctggcggcttgcgaaattcttgagaaaaacggttttgtaaatatcgacactttaaaagataaaaaatttacggcgggcatgaaggtttatcagaatatacgaggaaagtccgtcattgccgccgtcgtcggaaagaaacccgtcattgagggctgtaacattctaggcgctcatgtagactctccccgccttgatttaaaacagaaccctctatacgaagaaagcgaacttgcgctttttgatactcactactacggcggcatcaaaaaataccagtggacaaccataccgctttccatgcacggcgtatttgtaaacgaagccggtaaaaagacgactatcaacatcggcgaggagtccggcgatcctgttttcacaattacagaccttctgccccaccttgcaagagagcagatggataaaaaagcgtcagtagtagtagaaggcgaagacttagatattcttgccggctcgcgtccctactcggataaagacgaaaaagaaaaagtaaaattgtacctgcttgatttactgaataaaaaatacggtattacggaaaaaaactttgcgagcgcggagattgaatttgttcccgccttcaaggcaagcgacgtagggttggacagaagtttaatcggctcctacggacacgacgaccgctgctgcgccttccccgccctgcaggctatcaccgctattgcgcgcgaaaaaggcgctccaaacaaaacattggtttgctatctttcagacaaagaagaaatcggttctgtcgggaacacgggcgcgcgttccgtcagctttgaaaattttatcgctctcctttgcggcggctctcaggcggacttacggctgtgcttctcgcactccgccatgctgtccgccgatgtcaacgccgcgtttgacccaacttacgcaagcgtgttcgacaaaaacaacggatcgtttatcgggaagggaattgtgctttcaaagtacacaggctcaggcggcaagagcggagcgagcgacgcanacgcggaattctgcgcgaaggtgcaggcgattatgagcaggaacaaagttcagtggcaattcggcgaattgggaaaagtagacaagggcggcggcgggacaatcgccttgtatgccgccaatttggggatagaagttatcgactgcggcgttcccgtgctgtcaatgcattcgccatttgaggtaatcagtaagattgatatttacacaacatataggggatatatcgcgtttttaaaagatgcataa

SEQ ID NO: 46656 - protein, 475 aa, Unknown
  Obtained from environmental sample
  DOMAIN (45)...(472): Aminopeptidase I zinc metalloprotease (M18)
  misc_feature (1)..(475): Xaa is any amino acid
MAKTTKGKKTKLSDKLFFKLKNCWEGIDKKTEKEVEELAESYKQFLNTGKTERECTLAACEILEKNGFVNIDTLKDKKFTAGMKVYQNIRGKSVIAAVVGKKPVIEGCNILGAHVDSPRLDLKQNPLYEESELALFDTHYYGGIKKYQWTTIPLSMHGVFVNEAGKKTTINIGEESGDPVFTITDLLPHLAREQMDKKASVVVEGEDLDILAGSRPYSDKDEKEKVKLYLLDLLNKKYGITEKNFASAEIEFVPAFKASDVGLDRSLIGSYGHDDRCCAFPALQAITAIAREKGAPNKTLVCYLSDKEEIGSVGNTGARSVSFENFIALLCGGSQADLRLCFSHSAMLSADVNAAFDPTYASVFDKNNGSFIGKGIVLSKYTGSGGKSGASDAXAEFCAKVQAIMSRNKVQWQFGELGKVDKGGGGTIALYAANLGIEVIDCGVPVLSMHSPFEVISKIDIYTTYRGYIAFLKDA

SEQ ID NO: 46657 - DNA, 711 bp, Unknown
  Obtained from environmental sample
  misc_feature (1)..(711): n is a, c, g, or t
ttgtttttccctgaaaattcaatagatatgatttttgccgatccgccgtatatgttatcaaatgatgggtttacatgcaaaagtggtaaaatggctaatgttaataaagggaaatgggataaaagtaagggttttgaagcagacacagtttttcacgataaatggatttccgcttgccgccgcattctaaaacccgaaggtacaatctggatttcaggtacataccacagtatttatcaatgcggttattttctgcaaaaaaataattttcatattttaaatgacattacttggttcaaacctaacgcttcgccaaatttaagttgtcgtttttttacagcatcgcatgaaacgcttatatgggcgcgtaaagataaaaaggcaagacatacgtttaattataaagaaatgaagaacggatttttccccgaggataaattaaaaaaagaaaatacgcagatgaggtcggtttggtcaatagcaactcctaaaaataatgagaaagaattcggaaaacatccggcgcaaaaaccattagacctcttaaaacgcattgtacttgcatcgactgataaaaatgacattgtgcttgatccgttttgcggcagcggaactacaggagctgcctgtatgtttgtaaaaaacagatcgtttattgggattgaaattgaaaaaaaatattgcgctttagcaaaaagaagattagagtaa

SEQ ID NO: 46658 - protein, 236 aa, Unknown
  Obtained from environmental sample
  DOMAIN (8)...(233): DNA methylase
  misc_feature (1)..(236): Xaa is any amino acid
MFFPENSIDMIFADPPYMLSNDGFTCKSGKMANVNKGKWDKSKGFEADTVFHDKWISACRRILKPEGTIWISGTYHSIYQCGYFLQKNNFHILNDITWFKPNASPNLSCRFFTASHETLIWARKDKKARHTFNYKEMKNGFFPEDKLKKENTQMRSVWSIATPKNNEKEFGKHPAQKPLDLLKRIVLASTDKNDIVLDPFCGSGTTGAACMFVKNRSFIGIEIEKKYCALAKRRLE

SEQ ID NO: 46659 - DNA, 741 bp, Unknown
  Obtained from environmental sample
  misc_feature (1)..(741): n is a, c, g, or t
atgactgagccgtttctgagcgtccgttctgtttcaaacgcctatatctcaagaccctggggcataatcggcaaaaaagaaaaaaagcccattctaaaaaacataagctttgaaatagagcggggagaaatcttcggcctggtaggtgaatcaggctgcggtaaaaccaccctcgcgaaatgtattcttggccttattgattacgagggagatatttttatcaatggcaaaaagtgggaagcgcgtccttcttttgccgaaaggagcctaagaaccgaaggtagaagcgcttttgatgttcaggcggttttccagaacccgtcttcttcgcttaatccggtaaaaacaataggctggattctggaagagcctttaagggcgcaccgcttgggcagtgttaaagaaagagataaccgcgtggacgaaatactcgaccttgtgggactggattcttcctacaaaaagcgaagaccggcggaactttcgtcgggacaaaaacagcgggtcgcaataggcttcgctttgatgctgaagcccggcctcattttggctgatgaaccggtcagcgctctggatgtttcggtggcggctcaagtgctgaaccttttccgcgacttgaacaagaggctgggcctggcgttgctttttatctcccacaacatggaaatggtacattacctatgcgacagggttgccgttatgcgaaatggcgggattactgacatttactcgcgtggttaa

SEQ ID NO: 46660 - protein, 246 aa, Unknown
  Obtained from environmental sample
  DOMAIN (42)...(237): ABC transporter
  misc_feature (1)..(246): Xaa is any amino acid
MTEPFLSVRSVSNAYISRPWGIIGKKEKKPILKNISFEIERGEIFGLVGESGCGKTTLAKCILGLIDYEGDIFINGKKWEARPSFAERSLRTEGRSAFDVQAVFQNPSSSLNPVKTIGWILEEPLRAHRLGSVKERDNRVDEILDLVGLDSSYKKRRPAELSSGQKQRVAIGFALMLKPGLILADEPVSALDVSVAAQVLNLFRDLNKRLGLALLFISHNMEMVHYLCDRVAVMRNGGITDIYSRG

SEQ ID NO: 46661 - DNA, 714 bp, Unknown
  Obtained from environmental sample
  misc_feature (1)..(714): n is a, c, g, or t
atggaagaagtccgcggaaaagaaatctcgatggtctttcaggaacctttttcctcgctgaacccgctaataaaaatcggctcgcaaataggcgaaggccttgcgctccacggggaaaaagacaaggcgttaattaatagccgcgcaaaagcgctcatggaaaagctcaggctacccgacacttacccacaccggctttcaggcggaatgtgccagctgcgcaatggattgggctatggcaatcatttgcgngcccgcgggcttttaatagcggatgaacctacaaccgcccttgaccatgacactcaaagcaagattctcgctttactaaaagaaataaaccgcgatacgggaacttccattttattcatttcacacgacatcgaagtgataaaagaactgtgcgggagggttcttgccatgtattcaggacgtattcttgaagagggaaacacacacgatattttttcaaaccccgcccatgaatacacccgcggccttttaaactccgtcccatcagccgccatgcgcggaaaggcgctggctgccatcccagggaaaatcccctcgctggaagaaggccgtccctcaggctgtcccttccatccccgctgcgcgaaagccatgccggaatgtaagggggattttcctcccgtaagaaaaatcggcgagaatcgcacaacccgttgtctactgggggaactgaatgactga

SEQ ID NO: 46662 - protein, 237 aa, Unknown
  Obtained from environmental sample
  DOMAIN (1)...(144): ABC transporter
  misc_feature (1)..(237): Xaa is any amino acid
MEEVRGKEISMVFQEPFSSLNPLIKIGSQIGEGLALHGEKDKALINSRAKALMEKLRLPDTYPHRLSGGMCQLRNGLGYGNHLRARGLLIADEPTTALDHDTQSKILALLKEINRDTGTSILFISHDIEVIKELCGRVLAMYSGRILEEGNTHDIFSNPAHEYTRGLLNSVPSAAMRGKALAAIPGKIPSLEEGRPSGCPFHPRCAKAMPECKGDFPPVRKIGENRTTRCLLGELND

SEQ ID NO: 46663 - DNA, 642 bp, Unknown
  Obtained from environmental sample
  misc_feature (1)..(642): n is a, c, g, or t
atggccgagattgggcatcgtggcgacatgcggcaccactcgctcgccctcaagaaagacggcagcctctgggcgtggggctggaacgaatacggtcagctaggcgtcggcgacaccgcagaccgaaatacccccgtccgtgtggggacgggcagtgactgggcgatggtcgcggcaggcagcgccggcacgctggcaatcagaacggacggcaccctgtgggcttggggggacaacggcgtgggcgagctaggcctcggcgacaccaacagccgcagagcccctgtccgtgtcggcatggcgggtaactgggcggcggtgtctgccggtctcggcggacgctcgctcgccgtcaggacggacggcagcctctgggcgtggggggtcaccaccctcggcgacaccggcaccagcagcgtccccatccgcgtcggctcagacaacggatgggcggcagtggcttccggcggcgggcactccttggccctcaaggcagacggcaccctgtgggcctgggggcggaactacgatggccaacttggcctcggcgacagtggtcctggcacggagcggaacaccccaaccttggtgggcacgggcttccgcgtccctggcgatgccttggcggtggcggtcaggtag

SEQ ID NO: 46664 - protein, 213 aa, Unknown
  Obtained from environmental sample
  DOMAIN (20)...(67): Regulator of chromosome condensation (RCC1)
  misc_feature (1)..(213): Xaa is any amino acid
MAEIGHRGDMRHHSLALKKDGSLWAWGWNEYGQLGVGDTADRNTPVRVGTGSDWAMVAAGSAGTLAIRTDGTLWAWGDNGVGELGLGDTNSRRAPVRVGMAGNWAAVSAGLGGRSLAVRTDGSLWAWGVTTLGDTGTSSVPIRVGSDNGWAAVASGGGHSLALKADGTLWAWGRNYDGQLGLGDSGPGTERNTPTLVGTGFRVPGDALAVAVR

SEQ ID NO: 46665 - DNA, 384 bp, Unknown
  Obtained from environmental sample
  misc_feature (1)..(384): n is a, c, g, or t
atgtttaaaaataacataaaaagagaaactgattttgtcgccagatttggcggtgaagaatttgtctgcgttttaccatttattaaaaaagatgaagcgtttgaattcgcaaaaacaatagtacaaaatgtcgaaaatatgaaaataccgcatcccgccagtttacattcaaaatatgtaacaatcagcgttggcatggcgagcgttgtgccaaataaaaataattctcattcgcaattacttgatgaagcggataaagcgttatattcagcaaaggaatcaggaagaaacagagtagtagaggcggcagcatcaggcacggaagcaaggagcaaagaacaattaacaataagcaataagcaatgtctcctgtatgggtggtag

SEQ ID NO: 46666 - protein, 127 aa, Unknown
  Obtained from environmental sample
  DOMAIN (2)...(98): GGDEF domain
  misc_feature (1)..(127): Xaa is any amino acid
MFKNNIKRETDFVARFGGEEFVCVLPFIKKDEAFEFAKTIVQNVENMKIPHPASLHSKYVTISVGMASVVPNKNNSHSQLLDEADKALYSAKESGRNRVVEAAASGTEARSKEQLTISNKQCLLYGW

SEQ ID NO: 46667 - DNA, 498 bp, Unknown
  Obtained from environmental sample
  misc_feature (1)..(498): n is a, c, g, or t
atgctttcaaacaaaaaccctagtccccgatccccagtccctaatttagtagtagagtctcttctcattccttctttttttctttatagttgccatatgtttactaccacagtgactccccgctttggggatgtggacatttttgggcatgtcaacaacacggtgccggtcttatggtttgaacttgcacgtaacccgctgttcaaaatgtttgattcggagatgaagcttagccgcgaaacttttcccctaatcatggcccacacggactacgattacctcgatcagattttttttcagaatgatgttgagatacggtcatggatttcccgtatagggaataaatccttcaccatgtatcacgaggcgtggcaggagggacggctctgcgtcaaatgcaacgcggtgattgtttattacgattataagaccgaggcagccaccccaatccccgatgataaaaagaaactgcttgaggaacacctactgcgtacataa

SEQ ID NO: 46668 - protein, 165 aa, Unknown
  Obtained from environmental sample
  DOMAIN (48)...(132): Thioesterase superfamily
  misc_feature (1)..(165): Xaa is any amino acid
MLSNKNPSPRSPVPNLVVESLLIPSFFLYSCHMFTTTVTPRFGDVDIFGHVNNTVPVLWFELARNPLFKMFDSEMKLSRETFPLIMAHTDYDYLDQIFFQNDVEIRSWISRIGNKSFTMYHEAWQEGRLCVKCNAVIVYYDYKTEAATPIPDDKKKLLEEHLLRT

SEQ ID NO: 46669 - DNA, 939 bp, Unknown
  Obtained from environmental sample
  misc_feature (1)..(939): n is a, c, g, or t
atggaagcccacaacaccgagcgttcaatcttcaaaaacatatccccaattgatcaccgttactcgctttcggaaagctccctttttgacgccatggttccgtggatttcggaagaagcggcgctgaaggcntgcgtcaagccggagattgcccttgtattgcccacctacagtccgggtaaagccacaccggatgtcagggcacagctagagaaagctggcaacagcgttgatccagccgaggtttacgcggaggaagaaaaaacccgccacaatatccgtgcccttgtgaacgtgctcaaaaaaaagctcccgacagaatattcccctttgatacaccttggggctaccagtgtcgatattcttgacacaagcctcgcctggcgcatccggggcgtgacgcgggaagtggcactacctgagctaaaaaaactggagttgctcctttgtgatctggcggaaaaagaagcggagacgcctcaggtgggcagaacgcacggccagcacgcgcttcccatcaccgtgggttttgcgattgcagagtatgtttcgcggctaggcaagtccattcttgaaatcaagcgccttgaaaaaaaccttaaaggcaagctcgccggtgctgttggttcttacaatgcaactgccatgatcgttaaagaccctgaagagctggagcggctgtacctggcggagctaggccttgagccttccgaacattctacccagcttgtagaacccgaatacctgttaagactgcttttggaattcaacaccgcttttgggatcatcgccaaccttgccgatgaccttcgcaatttacagcgcagcgaaataggcgaattccacgaaggcttttccgcacagcaggttggttcatcaaccatgccgcaaaaaagaaaccccgaattcagagcacgtcaaaagttggaactgcgataa

SEQ ID NO: 46670 - protein, 312 aa, Unknown
  Obtained from environmental sample
  DOMAIN (19)...(307): Lyase
  misc_feature (1)..(312): Xaa is any amino acid
MEAHNTERSIFKNISPIDHRYSLSESSLFDAMVPWISEEAALKACVKPEIALVLPTYSPGKATPDVRAQLEKAGNSVDPAEVYAEEEKTRHNIRALVNVLKKKLPTEYSPLIHLGATSVDILDTSLAWRIRGVTREVALPELKKLELLLCDLAEKEAETPQVGRTHGQHALPITVGFAIAEYVSRLGKSILEIKRLEKNLKGKLAGAVGSYNATAMIVKDPEELERLYLAELGLEPSEHSTQLVEPEYLLRLLLEFNTAFGIIANLADDLRNLQRSEIGEFHEGFSAQQVGSSTMPQKRNPEFRARQKLELR

SEQ ID NO: 46671 - DNA, 771 bp, Unknown
  Obtained from environmental sample
  misc_feature (1)..(771): n is a, c, g, or t
atgcggctttggcttggtttgagcaccctgagcattaccagggtctcgcagcaaaaaaagcccgcagcattgcggctaaataccgggaggaaattgatgtttgaaattgccctgtcttatgacgacgttctccttttaccagggtactctgaggtgcttccaaaagactgtgatatcaaaacaaagctctgtgccgatgtctatttgcacatacccattatttcggcagccatggatacggtaaccgaggaaaaactagccattgcccttgcccttgagggaggcgctggtgtaattcaccggaatctgagcccggaagtgcaggccaggcaggctggcaacgttaagcgctatctgaactggatcatcgagaatcccgtttgcgtaaaggaaaatgatctgattggcgatgtcaagttgcatctgagcagataccagttttcaagcgctcctgttttgggcaaaggaggaaagctggttgggattgtcaccggaagagaccttcgtttctgcaaggacgattcacacaaggtaggcgagataatgaccaaaaaccttgtggtggaacgggaagaagcctcggtcgaaagcgcaatggaaaagttcggcaaacacaggatcgaaaaactgccggttgtaaacagtcagggcgagctaaagggactcattaccatgaaggacatggagaaacgcgagctttacccaaacgccgccaccgacaaggcggggcgtcttgtagtgggcgccgcaatctctcccggccgattctga

SEQ ID NO: 46672 - protein, 256 aa, Unknown
  Obtained from environmental sample
  DOMAIN (36)...(245): IMP dehydrogenase / GMP reductase domain
  misc_feature (1)..(256): Xaa is any amino acid
MRLWLGLSTLSITRVSQQKKPAALRLNTGRKLMFEIALSYDDVLLLPGYSEVLPKDCDIKTKLCADVYLHIPIISAAMDTVTEEKLAIALALEGGAGVIHRNLSPEVQARQAGNVKRYLNWIIENPVCVKENDLIGDVKLHLSRYQFSSAPVLGKGGKLVGIVTGRDLRFCKDDSHKVGEIMTKNLVVEREEASVESAMEKFGKHRIEKLPVVNSQGELKGLITMKDMEKRELYPNAATDKAGRLVVGAAISPGRF

SEQ ID NO: 46673 - DNA, 1044 bp, Unknown
  Obtained from environmental sample
  misc_feature (1)..(1044): n is a, c, g, or t
gtggtatggccggaactgaaaaagctggaactgcttctttgcgatttagctgaaaaagaagcggagacgccccaggtgggcagaacgcacggtcagcatgcgcttcccattactgtgggtttcgcgatggcggagtatgtttcgcggcttggcaagtccattctggaaatcaggcaccttgaaaaaaaccttaaaggaaagctcgccggtgcggtgggctcctacaacgcgaccgcaatgatcgtaaaagaccctgaagagctggaacggctgtaccttgcggagcttggtcttgaaccgtccgaacactccacccagcttgtggaacccgaatatctgcttaggttgcttttggaattcaacaccgccttcgggatcatcgccaaccttgccgatgaccttcgaaatcttcagcgcagcgaaatcggggaatttcatgaaggttttgctgctgagcaggttggttcttcgaccatgcctcagaaaaggaacccatggaattccgagcacgttaaaagtttgtggaaagcttttatgccccgcgttatcgctttcttcatggaccaaatcagcgagcatcagagggatctttccaattcggcaagccagaggttcattgccgattacatcgccggtttcacccttgccgtcagccgcatggcgcaggttgtccgcggccttcagcttgaccgggagcggttgagcgcgaacctcaaggcggcgggaagcgccctgcttgccgagccggcttatattcttctggctgaaagcggcgttggcgacgcccacgagctgatacggaagatcacgctggcttccgaaaaagaaaatttgagctttgcccgggcgctggaaagggaaaaggaaaccctgtccgcaattgccgccaagatggccgagcttggattgataaaaaaagacggaaccgcttctgttactgatgcggctttggcttggtttgagcaccctgagcattaccagggtctcgcagcaaaaaaagcccgcagcattgcggctaaataccgggaggaaattgatgtttga

SEQ ID NO: 46674 - protein, 347 aa, Unknown
  Obtained from environmental sample
  misc_feature (1)..(347): Xaa is any amino acid
MVWPELKKLELLLCDLAEKEAETPQVGRTHGQHALPITVGFAMAEYVSRLGKSILEIRHLEKNLKGKLAGAVGSYNATAMIVKDPEELERLYLAELGLEPSEHSTQLVEPEYLLRLLLEFNTAFGIIANLADDLRNLQRSEIGEFHEGFAAEQVGSSTMPQKRNPWNSEHVKSLWKAFMPRVIAFFMDQISEHQRDLSNSASQRFIADYIAGFTLAVSRMAQVVRGLQLDRERLSANLKAAGSALLAEPAYILLAESGVGDAHELIRKITLASEKENLSFARALEREKETLSAIAAKMAELGLIKKDGTASVTDAALAWFEHPEHYQGLAAKKARSIAAKYREEIDV

SEQ ID NO: 46675 - DNA, 1560 bp, Unknown
  Obtained from environmental sample
  misc_feature (1)..(1560): n is a, c, g, or t
gtgagcgatacgggacatggcatgactcctgaacagttagacaggctgtttgatgattacacgcggtttaatacggacggcatacgcctaatcgaaggcacaggtcttggcatgggcatcaccaaaaactttatcgagatgatgaaaggcaagattgaagttaaaagcgaacctggaaaaggtacggagtttaccatccggattcctcaagggtatgtcgattcgggcgtgttgggtaaggaaggcgtaaataaccttctgcaattatgcgccggaagggaagtaaaacaaaaactgaatactgaaatcatccgtgaatatatgccctacggtaaagtattggtagtggacgatatggagccgaatctttatgtaatcggcatgcttctttctccttacggattgacaataactaccgttacaagcggacagcaggcgattgataaaattatgagcggcttgttatacgatattatttttatggattattacatgccggaaatggacggtacgcaggcgacaagtatattacgcaagcttgggtacgagaaacccattatcgcgttgaccgccaacgccttggtcggacaggaaaagttttttctggataacggctttgacgcctatattgcaaaacctattgatatacgccagcttgacactgcgctgaacaaatttgtccgtgacaaataccccgccgaaaccgtcgaggccgcccgaaaacttaaaaaccctaatgatgatgaagatgaagacctaccggatttaagcggcgtaaaagcgctggttgtggacgattttaagccgaatttgaacggggaagccgctatgctcaaagagtataaaatccaggtggattgcctgttaaacgggcaggaagcggttgaccgtataaaaagcggggagccaaagtacgatattgtttttatggacctcttgatgccggttatggacggcgaggaagcgaccaggctgatacgctccctgggtacggaatacgcaagtacagtaccgattatagcccttacggcaatgccggatggagatgccgccgagagggaaagaacgcttttggacagcggttttcagaaggttatgtacaaacccttcacctttgaaactgtagatgactttattaaagactggatgagtgataaaataaaaaactgtgcaataccacccgaaaaaaaggagaaaattatggaagtagacatacccggaatggacaatgaaaggataaggaaaatttacggtaaaaaatttaacatctatttggatgttctgcgttcatatctggacgttgtgcccaaatctcttgaagagatgagccaggttaccaaggaaacattgtcgagttacgttaccagcgtgcacggcgtaaaaagcgtcagcgacttcatcggcgcggaagaagcgcggaaaatggcccttgaactggagatgatgggcagggccggagacctttccggcgtactggcaaagaacggggcgttcattcaatacgcgaaagagcttatagtcaatgtagaaaaatatttggcgaagatagacgcanaatag

SEQ ID NO: 46676 - protein, 519 aa, Unknown
  Obtained from environmental sample
  DOMAIN (1)...(71): Histidine kinase-, DNA gyrase B-, and HSP90-like ATPase
  misc_feature (1)..(519): Xaa is any amino acid
MSDTGHGMTPEQLDRLFDDYTRFNTDGIRLIEGTGLGMGITKNFIEMMKGKIEVKSEPGKGTEFTIRIPQGYVDSGVLGKEGVNNLLQLCAGREVKQKLNTEIIREYMPYGKVLVVDDMEPNLYVIGMLLSPYGLTITTVTSGQQAIDKIMSGLLYDIIFMDYYMPEMDGTQATSILRKLGYEKPIIALTANALVGQEKFFLDNGFDAYIAKPIDIRQLDTALNKFVRDKYPAETVEAARKLKNPNDDEDEDLPDLSGVKALVVDDFKPNLNGEAAMLKEYKIQVDCLLNGQEAVDRIKSGEPKYDIVFMDLLMPVMDGEEATRLIRSLGTEYASTVPIIALTAMPDGDAAERERTLLDSGFQKVMYKPFTFETVDDFIKDWMSDKIKNCAIPPEKKEKIMEVDIPGMDNERIRKIYGKKFNIYLDVLRSYLDVVPKSLEEMSQVTKETLSSYVTSVHGVKSVSDFIGAEEARKMALELEMMGRAGDLSGVLAKNGAFIQYAKELIVNVEKYLAKIDAX

SEQ ID NO: 46677 - DNA, 1515 bp, Unknown
  Obtained from environmental sample
  misc_feature (1)..(1515): n is a, c, g, or t
atggccgacctgaaaatcataataaaccacgccgaatggaacgtgcccgccggcacctccgccctggcggccttgaaagaggcccaggccgccccggccaaagggcggcttttggccgcccgcttaaacggccggctcatcgaccttagcgcccccctggcggagaacggcgaactggccggggtggaccaggccgccccggaggccctggaccttttgcgccattccgtggcccatatcatggccgaggctgtccaggccatattccccaaggtcaaggtgaccatcggcccggccattgaaaacgggttttattacgacttcgacaagccggaacctttcaccccggacgacctggccagcattgaagcccgcatggccgagacggtcaaaaaagccgagcccttcatccgctcggaacttacccccctccaggccgtggatttcttcaaggccaagggcgaggacttcaaggtggagataatcgaagacctggtgcgggccgaccgcccggataaggtctccctttaccagctcggccccttcaccgacctttgccgggggtcccacctgcccgacgcctcctgggccggggccttcaaacttcaaagcgtggccggggcctactggcggggcgacgagcgcctgcccatgctgcagcgcatctacggcacggccttcttcaataaaaaggatttggaccatcacctccatctcctggaagaggcccgccgccgcgaccaccgccgcttgggccgcgaactggacctcttttccgtggccgatgaaatcggcggcggcctaattgtctggcacccctcgggagccctgctccgggcgaccttggaggaattcgagcgccaggaacacctccggcggggctaccaactggtcatgggcccccagattctccgcaccgacctttggaaaaagagcggccactgggacaactaccgcgaaaacatgtatttcacggagatcgacggccagggttacggcttgaaacccatgaactgcctggcccacatgttcgtctatcgctcccagttgcgctccttccgcgacctgcccctccggctcttcgaactgggcacggtgctgcgccatgagaaaagcggcgttctccacggcctgacccgggtgcgccagttcacccaggacgacgcccatctattctgcaccccggaaaacctggacgcggaaataaaaggcatcctggaacttacggccgacctgatggaggccttcggctttgaatacaccatagaactctccacccgcccggccaagagcataggctcggatgaagcctgggccctggccacctccgccctgaaaaaagccctggaggacagtaagctgccctacgccataaacgagggcgacggcgccttctacgggccgaaaatcgacgtcaagctcaaggacgccttgaaccggcgctggccagtgcgcaccatccagtgcgatttcaccctgccggaaacgatcgacttgacttacatggacccatga

SEQ ID NO: 46678 - protein, 504 aa, Unknown
  Obtained from environmental sample
  DOMAIN (174)...(223): Threonyl and Alanyl tRNA synthetase second additional domain
  misc_feature (1)..(504): Xaa is any amino acid
MADLKIIINHAEWNVPAGTSALAALKEAQAAPAKGRLLAARLNGRLIDLSAPLAENGELAGVDQAAPEALDLLRHSVAHIMAEAVQAIFPKVKVTIGPAIENGFYYDFDKPEPFTPDDLASIEARMAETVKKAEPFIRSELTPLQAVDFFKAKGEDFKVEIIEDLVRADRPDKVSLYQLGPFTDLCRGSHLPDASWAGAFKLQSVAGAYWRGDERLPMLQRIYGTAFFNKKDLDHHLHLLEEARRRDHRRLGRELDLFSVADEIGGGLIVWHPSGALLRATLEEFERQEHLRRGYQLVMGPQILRTDLWKKSGHWDNYRENMYFTEIDGQGYGLKPMNCLAHMFVYRSQLRSFRDLPLRLFELGTVLRHEKSGVLHGLTRVRQFTQDDAHLFCTPENLDAEIKGILELTADLMEAFGFEYTIELSTRPAKSIGSDEAWALATSALKKALEDSKLPYAINEGDGAFYGPKIDVKLKDALNRRWPVRTIQCDFTLPETIDLTYMDP

SEQ ID NO: 46679 - DNA, 621 bp, Unknown
  Obtained from environmental sample
  misc_feature (1)..(621): n is a, c, g, or t
gtggtcgcggcggcgggcctcttccaggagatggaggtgatggtccaaatcctttttattgaagaaggccgtgccgtagatgcgctgcagcatgggcaggcgctcgtcgccccgccagtaggccccggccacgctttgaagtttgaaggccccggcccaggaggcgtcgggcaggtgggacccccggcaaaggtcggtgaaggggccgagctggtaaagggagaccttatccgggcggtcggcccgcaccaggtcttcgattatctccaccttgaagtcctcgcccttggccttgaagaaatccacggcctggaggggggtaagttccgagcggatgaagggctcggcttttttgaccgtctcggccatgcgggcttcaatgctggccaggtcgtccggggtgaaaggttccggcttgtcgaagtcgtaataaaacccgttttcaatggccgggccgatggtcaccttgaccttggggaatatggcctggacagcctcggccatgatatgggccacggaatggcgcaaaaggtccagggcctccggggcggcctggtccaccccggccagttcgccgttctccgccaggggggcgctaaggtcgatgagccggccgtttaa

SEQ ID NO: 46680 - protein, 206 aa, Unknown
  Obtained from environmental sample
  misc_feature (1)..(206): Xaa is any amino acid
MVAAAGLFQEMEVMVQILFIEEGRAVDALQHGQALVAPPVGPGHALKFEGPGPGGVGQVGPPAKVGEGAELVKGDLIRAVGPHQVFDYLHLEVLALGLEEIHGLEGGKFRADEGLGFFDRLGHAGFNAGQVVRGERFRLVEVVIKPVFNGRADGHLDLGEYGLDSLGHDMGHGMAQKVQGLRGGLVHPGQFAVLRQGGAKVDEPAV

SEQ ID NO: 46681 - DNA, 369 bp, Unknown
  Obtained from environmental sample
  misc_feature (1)..(369): n is a, c, g, or t
atgggcgtcgtcctgggtgaactggcgcacccgggtcaggccgtggagaacgccgcttttctcatggcgcagcaccgtgcccagttcgaagagccggaggggcaggtcgcggaaggagcgcaactgggagcgatagacgaacatgtgggccaggcagttcatgggtttcaagccgtaaccctggccgtcgatctccgtgaaatacatgttttcgcggtagttgtcccagtggccgctctttttccaaaggtcggtgcggagaatctgggggcccatgaccagttggtagccccgccggaggtgttcctggcgctcgaattcctccaaggtcgcccggagcagggctcccgaggggtgccagacaattag

SEQ ID NO: 46682 - protein, 122 aa, Unknown
  Obtained from environmental sample
  misc_feature (1)..(122): Xaa is any amino acid
MGVVLGELAHPGQAVENAAFLMAQHRAQFEEPEGQVAEGAQLGAIDEHVGQAVHGFQAVTLAVDLREIHVFAVVVPVAALFPKVGAENLGAHDQLVAPPEVFLALEFLQGRPEQGSRGVPDN

SEQ ID NO: 46683 - DNA, 375 bp, Unknown
  Obtained from environmental sample
  misc_feature (1)..(375): n is a, c, g, or t
gtggagcatgatggncgtttttttaaggcgtcatgggtccatgtaagtcaagtcgatcgtttccggcagggtgaaatcgcactggatggtgcgcactggccagcgccggttcaaggcgtccttgagcttgacgtcgattttcggcccgtagaaggcgccgtcgccctcgtttatggcgtagggcagcttactgtcctccagggcttttttcagggcggaggtggccagggcccaggcttcatccgagcctatgctcttggccgggcgggtggagagttctatggtgtattcaaagccgaaggcctccatcaggtcggccgtaagttccaggatgccttttatttccgcgtccaggttttccggggtgcagaatag

SEQ ID NO: 46684 - protein, 124 aa, Unknown
  Obtained from environmental sample
  misc_feature (1)..(124): Xaa is any amino acid
MEHDGRFFKASWVHVSQVDRFRQGEIALDGAHWPAPVQGVLELDVDFRPVEGAVALVYGVGQLTVLQGFFQGGGGQGPGFIRAYALGRAGGEFYGVFKAEGLHQVGRKFQDAFYFRVQVFRGAE

SEQ ID NO: 46685 - DNA, 732 bp, Unknown
  Obtained from environmental sample
  misc_feature (1)..(732): n is a, c, g, or t
atgggccttgaaaatgccgagcttgcgtccattccttacgggcataccaacgaatttatccggggttttggaaaaaacgaagatgtttttttcaagaggctggccctgcaatacaatgctccgacaatccttctggacgttattcgctgcggcggtaactatgcgcttagccactgcattatcggcatggaagcggagatagtccgatcggtcggtaaaatccgtgaaaaaatgcaaaagggcaattccctgagtcagtggctggcaaggaagctgcatgcgatgctttattatttcagcgctttttccgtcattacagacaatgaggtaatgctccagcaatatgagcttgatattgatggggaaaaactttcaggagtttatcttgggcttcatatttataactctccatatataaacggtaatcagcacccggtaagaaactccctgccaaatgacggtatattggacatgattatacccaacgggcaggggaggcgccaggttttccgcatgcttcccttgtttttatcggggagcaaagagacgcttcccaggcattttatctataaacaactgcggaagataagcgtcagttccaataaaattttacggataaatctggatggtatagttttttttgaaacgggaattgaactggaactgctgccctccgcgctgcggtttgtagacgcgacaagacgcgggtataaaggggcgggagatgactag

SEQ ID NO: 46686 - protein, 243 aa, Unknown
  Obtained from environmental sample
  misc_feature (1)..(243): Xaa is any amino acid
MGLENAELASIPYGHTNEFIRGFGKNEDVFFKRLALQYNAPTILLDVIRCGGNYALSHCIIGMEAEIVRSVGKIREKMQKGNSLSQWLARKLHAMLYYFSAFSVITDNEVMLQQYELDIDGEKLSGVYLGLHIYNSPYINGNQHPVRNSLPNDGILDMIIPNGQGRRQVFRMLPLFLSGSKETLPRHFIYKQLRKISVSSNKILRINLDGIVFFETGIELELLPSALRFVDATRRGYKGAGDD

SEQ ID NO: 46687 - DNA, 831 bp, Unknown
  Obtained from environmental sample
  misc_feature (1)..(831): n is a, c, g, or t
atggttcatgtcgatcaatccatgtacgcgaaagggagatcgatatttgacattataaaggacaagaaactcaaagagctgttttatgaaattttatcatcgggcgggtcgtatcagtctatacatgaaatcactctgaacggcgtacagcacttttttgatatagtggtttttgttattaccagcgagacaagagggcgtcttgtaaatatcatagacattactccggtaatgaaggcgaaatttgaagccgaggccgcttccctgtccaaaaccgcgttcctcgccaccatgagccacgaaatccgcacccctcttaacgcaatcatcggcctttcggagatagagcttcagaaaaaactgcccaatgataccctgcaggatttgggaaagatacataactcgggcactacccttttggccattatcaacgacattctggacatttcaaaaatagaatcgggaagcctggaattgatacctgtggagtacgacgtgcccagcattatcaatgatactgtccagcttaatattatgcggattggctccaaggatataacgtttaaactaaaggttgatccgtctatgcctgtaatgctgtttggtgacgaactgcgggtaaagcagctgctcaataatctcctctccaatgcttttaaatacaccgacgcgggaagcgttactttaaccgttgactgggaaaaaaaggaaggcatcgcctgggttacattcgttgtaagagacaccggacgcggcataaggccggaagatatttcaaagctgttctccgaataccagcatcttgacccaaagggcaaaccgccctattga

SEQ ID NO: 46688 - protein, 276 aa, Unknown
  Obtained from environmental sample
  DOMAIN (202)...(276): Histidine kinase-, DNA gyrase B-, and HSP90-like ATPase
  misc_feature (1)..(276): Xaa is any amino acid
MVHVDQSMYAKGRSIFDIIKDKKLKELFYEILSSGGSYQSIHEITLNGVQHFFDIVVFVITSETRGRLVNIIDITPVMKAKFEAEAASLSKTAFLATMSHEIRTPLNAIIGLSEIELQKKLPNDTLQDLGKIHNSGTTLLAIINDILDISKIESGSLELIPVEYDVPSIINDTVQLNIMRIGSKDITFKLKVDPSMPVMLFGDELRVKQLLNNLLSNAFKYTDAGSVTLTVDWEKKEGIAWVTFVVRDTGRGIRPEDISKLFSEYQHLDPKGKPPY

SEQ ID NO: 46689 - DNA, 1122 bp, Unknown
  Obtained from environmental sample
  misc_feature (1)..(1122): n is a, c, g, or t
atggctatcaaaagaaacatactgctaaacccaggacccgctaccacaacggatacggtgaagatggcgcagattgtgccggatatttgcccaagggaaaaggaatttgcggatattttggaacagctccaaaaggatttggttcgcattgttcacggcagcgatgaatgcactgcggttctcttttgcggttcgggaaccataaatatggatgtttgcctcaattcgcttttgccagcaaataaaaagatactcgtgataaacaatggggcatatagcacaagagctgtggaaatatgcaaaagctataacctgccgcatatagagatgaaagtgccagtggacgaaagaccaaatttagccgctgtagaggaaatgctaaagaacaatcccgatattcatctggtttacacaactcacaacgaaacgggaactggcttgctcaaccccattcgagaaataggcgaactttcgcacagatataattgcgtattcacggtggacaccacttctacctacgctatgctcccaattgacatggaaaaagactgcatagatttttgcatggcttctgcgcaaaaaggcataatgggcatgacggggctgtcttatgttgtgggcaaaacgaaattgattgaggaatccaaaaattatcccaaacgttcttattattgcaatttatatctgcaatatgaatattttgttcgctataggcaaatgcaattcaccccacctgtgcaaacaatttacgctgcgaggcaagccattgaggaattttttaaagaaggcgagacgcagaaatatcaaaggcacgcacgggtaaatgaggctatccacaaagggcttaaagaactcggttttaaagaatttataaaaaaggaattacaggcaggcttggtagcatccgcaatatacccgaatgacaaaaattgggattttgaaaaagtccatgattattgctacgagcggggattcaccatttatccaggcaaaatttccggcatggagacttttaggctttgttcctttggggctatagatgtccctgatattgagaatttttttgcggtatttaaagaagcattggagcattgcaacgtagctgtgcctgttaaatactag

SEQ ID NO: 46690 - protein, 373 aa, Unknown
  Obtained from environmental sample
  DOMAIN (8)...(354): Aminotransferase class-V
  misc_feature (1)..(373): Xaa is any amino acid
MAIKRNILLNPGPATTTDTVKMAQIVPDICPREKEFADILEQLQKDLVRIVHGSDECTAVLFCGSGTINMDVCLNSLLPANKKILVINNGAYSTRAVEICKSYNLPHIEMKVPVDERPNLAAVEEMLKNNPDIHLVYTTHNETGTGLLNPIREIGELSHRYNCVFTVDTTSTYAMLPIDMEKDCIDFCMASAQKGIMGMTGLSYVVGKTKLIEESKNYPKRSYYCNLYLQYEYFVRYRQMQFTPPVQTIYAARQAIEEFFKEGETQKYQRHARVNEAIHKGLKELGFKEFIKKELQAGLVASAIYPNDKNWDFEKVHDYCYERGFTIYPGKISGMETFRLCSFGAIDVPDIENFFAVFKEALEHCNVAVPVKY

SEQ ID NO: 46691 - DNA, 492 bp, Unknown
  Obtained from environmental sample
  misc_feature (1)..(492): n is a, c, g, or t
ttggtattcctgtctgacgcaaaggcgaaagagaagggattgaaaattattcttgatataaaggggaaggatttaacggagagtttgaaatatcagccggatattgtgaagccgaatctttttgaatttgcagccgactttgcgcctgagttaataaagaataatgagttgataactatagatgattccgcaaatgaacggataaaatccgtagtaatggacatggcgcaaaaacacaagtgccgcgttatccttaccaatggcagccggaaaattttcgcggcaagcgcaaatgaattttttaaagttgaaatccagcccgtaaaagcgattaattccaccggctgcggagacgcgtttacggcaggacttgccgccgccttggaacctttggttccaggagaaagagcggactttcgcgaagcgattagcgaagggtgcagatgcggagcgctgaacgccgcccttgtcagaccgggagttgtaaagtaa

SEQ ID NO: 46692 - protein, 163 aa, Unknown
  Obtained from environmental sample
  misc_feature (1)..(163): Xaa is any amino acid
MVFLSDAKAKEKGLKIILDIKGKDLTESLKYQPDIVKPNLFEFAADFAPELIKNNELITIDDSANERIKSVVMDMAQKHKCRVILTNGSRKIFAASANEFFKVEIQPVKAINSTGCGDAFTAGLAAALEPLVPGERADFREAISEGCRCGALNAALVRPGVVK

SEQ ID NO: 46693 - DNA, 390 bp, Unknown
  Obtained from environmental sample
  misc_feature (1)..(390): n is a, c, g, or t
atgacaaactcattaaacacgatttttacttctctcaaacaggcgcagacaaagctggcggcgcagaatcgcgcaaacaaggacaaggctcttgccgccgcagccgccgcgattgacagggacagaaccgccatcttggaagcaaactcgcgcgatgtggaacaggcgcgaaacggcggcatgaaagagagtcttgttgaccgcctgcttcttaacgacaaacgaatagacggtattatagaagggatcgaaattgttatcagacaggaagaccctattggtaaagtgcaggcgggctggactcttcctaacggactgcagattgataaagttacagtccccctcggcgttgccgccattatttacgaatcgcgtccaatgttacggtag

SEQ ID NO: 46694 - protein, 129 aa, Unknown
  Obtained from environmental sample
  misc_feature (1)..(129): Xaa is any amino acid
MTNSLNTIFTSLKQAQTKLAAQNRANKDKALAAAAAAIDRDRTAILEANSRDVEQARNGGMKESLVDRLLLNDKRIDGIIEGIEIVIRQEDPIGKVQAGWTLPNGLQIDKVTVPLGVAAIIYESRPMLR

SEQ ID NO: 46695 - DNA, 804 bp, Unknown
  Obtained from environmental sample
  misc_feature (1)..(804): n is a, c, g, or t
ttgcggggatcgtcatcggcgctggagtcaaaccgggcgcttgtcgccgcgattaaaacggggctggagacgggcggcggtattcctgacgcggtggagttgtctgacaacgcgcaggcaaagcccggcagccatgaagatgtagatgaaatccttgccgccagaggctggattgacgtggtgttgccccgcggcggcagggaattgattcagcgggttgttcagaacgcgcgcattccggttatcgaaaccggcgagggtaattgccatatctacgtggagccaagcgccaatatggataatgccgtggaaattatagccaacgccaaactgcaaaaacccggcgcctgcaatgccgtggagactctgctggtacaccgcgggacacttggtcccttgatgctccggcttgtatcccggcttgccggagcggtcgaattccgctgtgactccgaatccagagccgcgataagagaggaagcattggttaatctgaaacttaaagacgcggtcgaggaagattggggtacggaatttcttgacgctgttcttgcgattaaaaccgttggttcctgccaggaggcgattgagcatatcaaccgttacgggacaaaacattcggaagcgatactgaccaatgatcttcattccgcacggcagttccgaaacagtgttgacgcggcctgcgtttacgttaatgcgtcaactcgttttaccgacggcggcgtgtttggttttggcgccgaactggggataagcacgcaaaaattcacacgcggggtccaatgggtctggaggctctga

SEQ ID NO: 46696 - protein, 267 aa, Unknown
  Obtained from environmental sample
  misc_feature (1)..(267): Xaa is any amino acid
MRGSSSALESNRALVAAIKTGLETGGGIPDAVELSDNAQAKPGSHEDVDEILAARGWIDVVLPRGGRELIQRVVQNARIPVIETGEGNCHIYVEPSANMDNAVEIIANAKLQKPGACNAVETLLVHRGTLGPLMLRLVSRLAGAVEFRCDSESRAAIREEALVNLKLKDAVEEDWGTEFLDAVLAIKTVGSCQEAIEHINRYGTKHSEAILTNDLHSARQFRNSVDAACVYVNASTRFTDGGVFGFGAELGISTQKFTRGVQWVWRL

SEQ ID NO: 46697 - DNA, 621 bp, Unknown
  Obtained from environmental sample
  misc_feature (1)..(621): n is a, c, g, or t
atgaagatcattggtcagtatcgcttccgaatgttttgtcccgtaacggttgatatgctcaatcgcctcctggcaggaaccaacggttttaatcgcaagaacagcgtcaagaaattccgtaccccaatcttcctcgaccgcgtctttaagtttcagattaaccaatgcttcctctcttatcgcggctctggattcggagtcacagcggaattcgaccgctccggcaagccgggatacaagccggagcatcaagggaccaagtgtcccgcggtgtaccagcagagtctccacggcattgcaggcgccgggtttttgcagtttggcgttggctataatttccacggcattatccatattggcgcttggctccacgtagatatggcaattaccctcgccggtttcgataaccggaatgcgcgcgttctgaacaacccgctgaatcaattccctgccgccgcggggcaacaccacgtcaatccagcctctggcggcaaggatttcatctacatcttcatggctgccgggctttgcctgcgcgttgtcagacaactccaccgcgtcaggaataccgccgcccgtctccagccccgttttaatcgcggcgacaagcgcccggtttga

SEQ ID NO: 46698 - protein, 206 aa, Unknown
  Obtained from environmental sample
  misc_feature (1)..(206): Xaa is any amino acid
MKIIGQYRFRMFCPVTVDMLNRLLAGTNGFNRKNSVKKFRTPIFLDRVFKFQINQCFLSYRGSGFGVTAEFDRSGKPGYKPEHQGTKCPAVYQQSLHGIAGAGFLQFGVGYNFHGIIHIGAWLHVDMAITLAGFDNRNARVLNNPLNQFPAAAGQHHVNPASGGKDFIYIFMAAGLCLRVVRQLHRVRNTAARLQPRFNRGDKRPV

SEQ ID NO: 46699 - DNA, 783 bp, Unknown
  Obtained from environmental sample
  misc_feature (1)..(783): n is a, c, g, or t
atgagagcagcaatattaactaatgaatacccgccgaacatttacggaggcgcaggcatacacgttgaatatttaacaaaggaactaaaaaatctctgtgaaatatccgtgcattgctttgcagatgcccatgttcgtagatttggcgaatttgaagacattagattcagaaaaatccttggaccattggatataaatttgcaatggatttctacaatgcgcgacatagacattgtgcattgccacacttggtattctcattttgccggagtgctggcaagccgcttgtatcaggttccccttgtgctaacaacacattcattggaaccgcacagaccttggaaatctgagcagcttggcaaaggtggctatgcaatgagttgctggattgagaaaagtgcctacaaaagcgcagacggaataattgccgttagcaaggatatgaagcaagatgttattgaactttacggagttgatgaaaagaaggtgagggttatttacaacggcatagacccagatttttaccacccaatttctgacgaagcaattttgaaaaaacacggcataaatccgcaaaggccttttgtgctttttgttggcagaataacaaggcaaaaaggcatttctcagcttattcaggccattccgaaaatagataaaaatgcccaaattgtgctttgcgctggcgcaccagataccccagaactcgcagaagagtgcaagaatttaatagcaaatgcaagtgaaaaaagagacggcataattggatctcggccgatctga

SEQ ID NO: 46700 - protein, 260 aa, Unknown
  Obtained from environmental sample
  misc_feature (1)..(260): Xaa is any amino acid
MRAAILTNEYPPNIYGGAGIHVEYLTKELKNLCEISVHCFADAHVRRFGEFEDIRFRKILGPLDINLQWISTMRDIDIVHCHTWYSHFAGVLASRLYQVPLVLTTHSLEPHRPWKSEQLGKGGYAMSCWIEKSAYKSADGIIAVSKDMKQDVIELYGVDEKKVRVIYNGIDPDFYHPISDEAILKKHGINPQRPFVLFVGRITRQKGISQLIQAIPKIDKNAQIVLCAGAPDTPELAEECKNLIANASEKRDGIIGSRPI

SEQ ID NO: 46701 - DNA, 480 bp, Unknown
  Obtained from environmental sample
  misc_feature (1)..(480): n is a, c, g, or t
atggacaatgcgattaaagacgagcgcgctgttgacgaatgttggattgttgaaagagaaaaacttgtagaggtagtgaaatcccttgattatgacgttttgatagacatcgtcggggtggattacctcggaatggaaaaccacaagggcaaacgctttgcggttatttattgccttaaaaataccaaaaatatgacacgtgtgcgtataaaggttcaggtggaagagcaggagaaaatccccactttgagcaaaatttatcccattgcagactggcaagaacgtgaagtttgggaccagttcggcataatatttgacgagcatcctaatttgaaaagaatattgaaccacgcagattttgaagggcaccccttgcgcaaagactatcccgccaaaaaacgccaatggctatctgaaaacgaccaaatgcaagatcaattagaaaaacgcttggaaaccttaggatacagggtcttgtaa

SEQ ID NO: 46702 - protein, 159 aa, Unknown
  Obtained from environmental sample
  DOMAIN (70)...(137): Respiratory-chain NADH dehydrogenase, 30 Kd subunit
  misc_feature (1)..(159): Xaa is any amino acid
MDNAIKDERAVDECWIVEREKLVEVVKSLDYDVLIDIVGVDYLGMENHKGKRFAVIYCLKNTKNMTRVRIKVQVEEQEKIPTLSKIYPIADWQEREVWDQFGIIFDEHPNLKRILNHADFEGHPLRKDYPAKKRQWLSENDQMQDQLEKRLETLGYRVL

SEQ ID NO: 46703 - DNA, 342 bp, Unknown
  Obtained from environmental sample
  misc_feature (1)..(342): n is a, c, g, or t
gtgctggctgtttcaggaacaataaccttcaagcaagcacccatactaaaacgcatttacgaacagatgatggaacccaaatgggtaatttcaatgggagcctgtgcctgctccggcggtttttacgactgctattgcaccgtgccgggcatagaccgcattattcccgtggatatttacataggaggctgcccaagccgccccgaagccttttttgacgcaatgctagatttacaagctaaaataaaaaaccagtcttatatggaagagagaaaaaagaaattaaaggaacagttggaaaatatcaaaaactggagaaataacgatggacaatgcgattaa

SEQ ID NO: 46704 - protein, 113 aa, Unknown
  Obtained from environmental sample
  DOMAIN (1)...(79): NADH ubiquinone oxidoreductase, 20 Kd subunit
  misc_feature (1)..(113): Xaa is any amino acid
MLAVSGTITFKQAPILKRIYEQMMEPKWVISMGACACSGGFYDCYCTVPGIDRIIPVDIYIGGCPSRPEAFFDAMLDLQAKIKNQSYMEERKKKLKEQLENIKNWRNNDGQCD

SEQ ID NO: 46705 - DNA, 960 bp, Unknown
  Obtained from environmental sample
  misc_feature (1)..(960): n is a, c, g, or t
ttgnaaataaacaaagaagccgcagtctcggcttttaaccgtggtatttccgccgctgccgccatagagcttttacagcggctgtcaggaaacaggatcgacggaaacacggcttttaccctgcttgattgggaaaaacgccataaggaagtagccttaagcaaagggctggtattgagcctttctcccgaacgcggctatcttgccgaaacaaaaccgctgtcaaaatatatcagcgcgaaactcgcgccgggaatatacttgatcccggaaaacatggaagaaaaggtatatgccgccctgaaaaaagccggtgtcacaatttttgccaggccggacagcgtcggcgcgcctaactgccgggctgatgacggcaatacgttctccgcggattcccgcatttatttcccccatattacgccccatactgaaaaaatccggcaatttatgtcggataaaaaagaggacgtaattaatacttcaacaactgtcgtatcgcaaagcaatgcgccatcgcagagcgatacgccgtcggcgtccgctttaattgaggggtttcattctataataaacaaaatgcatctcggggccgaacagagggaagaactgacggcgaggattgaccgccggctggtactgtgcgaatcacagttaaaagacgcggttgtccgttatgagaaacttgaggcgcggggcctggattacgcgggcaaaattatgattgcaaaacaggcgatagccaggcagtcgccggtggaagcaagctggccgggacggaaaaaacaggagagcgttattggaattccaacagcgctggaaaaaacagacggggaaagcgttctggtcatggaacaggcaggaaattctatacgtattccggggaatactatacgtattcccttggggaagatcaaccttctgcggcggatcaaaaaatccatttttgaaaataataattag

SEQ ID NO: 46706 - protein, 319 aa, Unknown
  Obtained from environmental sample
  SIGNAL (1)...(21)
  misc_feature (1)..(319): Xaa is any amino acid
MXINKEAAVSAFNRGISAAAAIELLQRLSGNRIDGNTAFTLLDWEKRHKEVALSKGLVLSLSPERGYLAETKPLSKYISAKLAPGIYLIPENMEEKVYAALKKAGVTIFARPDSVGAPNCRADDGNTFSADSRIYFPHITPHTEKIRQFMSDKKEDVINTSTTVVSQSNAPSQSDTPSASALIEGFHSIINKMHLGAEQREELTARIDRRLVLCESQLKDAVVRYEKLEARGLDYAGKIMIAKQAIARQSPVEASWPGRKKQESVIGIPTALEKTDGESVLVMEQAGNSIRIPGNTIRIPLGKINLLRRIKKSIFENNN

SEQ ID NO: 46707 - DNA, 951 bp, Unknown
  Obtained from environmental sample
  misc_feature (1)..(951): n is a, c, g, or t
ttgcaagcccaaaaagatgtgattttgaaattggcaggtatgttgaaggtttcgggtggaacagatttcataatagaatattttggcgaaggtgcaaaaacactttctgcaacaggaaaaggaacaatatgcaatatgggcgcagaaatcggtgctacttgcagcgttttcggttttgattcctctatggaaagatatttgcgcgcaacagacagagcagaaattgcagattccgctaaaaaaataatctcttatntgcgttgcgatgcagaggttgaagttgaaccggaaaaatattttgacaaggttatagaaattgatttaagcacattaaagccgcattataatggaccttttagccccgaccgttcttttacaattggtgaaatggaaaaatctctggaagaatttgaaagtccatcggagataagcgcagccttagtaggcagttgcacaaattcaagctacgaagaccttgccagagccgcttccattatcaaagatgcacaggcaaaaggcataaaacccaaagttccgctttacataaacccaggttccgaggcggtgcgggcaactgcggaaagagatggtattttgcgtacgttcacggattttggcgcaactgtatttgccaacgcttgcggtccctgcattggaatgtgggctagaaatgacataaaaaaaggtcaaaaaaatagcatagttcattcattcaaccgcaatttcaccggcagagccgatggcaacgagcaaacccacgcatttgtggcaagcccggaaatggcggttatagcatcgctttccggctctctgctttttaacccagaaacagataccataacaaataaaacttcggaaaaacataaattggcttggccctggggcgaagaattgcccgagaaaaattttgtctctaaccccgcgagttgtaaaaatttctgctggcgatag

SEQ ID NO: 46708 - protein, 316 aa, Unknown
  Obtained from environmental sample
  DOMAIN (1)...(269): Aconitase family (aconitate hydratase)
  misc_feature (1)..(316): Xaa is any amino acid
MQAQKDVILKLAGMLKVSGGTDFIIEYFGEGAKTLSATGKGTICNMGAEIGATCSVFGFDSSMERYLRATDRAEIADSAKKIISYXRCDAEVEVEPEKYFDKVIEIDLSTLKPHYNGPFSPDRSFTIGEMEKSLEEFESPSEISAALVGSCTNSSYEDLARAASIIKDAQAKGIKPKVPLYINPGSEAVRATAERDGILRTFTDFGATVFANACGPCIGMWARNDIKKGQKNSIVHSFNRNFTGRADGNEQTHAFVASPEMAVIASLSGSLLFNPETDTITNKTSEKHKLAWPWGEELPEKNFVSNPASCKNFCWR

SEQ ID NO: 46709 - DNA, 732 bp, Unknown
  Obtained from environmental sample
  misc_feature (1)..(732): n is a, c, g, or t
ttgtctctaaccccgcgagttgtaaaaatttctgctggcgatagctctgtgaaaattgcaatagaccacggcagcaataggcttcaaaagctggaaccctttgccccttggaatagcaaagatatttcaaacgcaagagttttgattaaggtaaaaggaaaatgcaccaccgaccacatttcacaagctggcgagtggctaaaatttagggggcatttggaaaatatttccggtaatcttttgataggtgcgcttaatgcttttaacgaagaaaaaaacaaagtgcgttttcaacctagcaatgccgagatgaccgtgccaaatgcagcaaaggcatataaaaccgcaaaagttccgagcataattataggagacgaaaattacggtgaaggctcaagccgcgaacacgctgctatggaaccgcgttttttgggcgttgtggcggttatagcaaaaagctttgctcgcattcacgaaacaaacctgaaaaaacagggaatgcttgcactttgttttgccgataaaaacgattacaataaaattttagaaaatgacatcttggaaatttcagggctttgcgaatttagtccgggctgtcaattcacgcttcttttgcgccacgcagatggaacaaatgaaaaaatccttttggagcagtcttacaacgaaagccagtgggaatggttcaaagctggcagtgcgctaaatgccttatgcaaaacttctccttga

SEQ ID NO: 46710 - protein, 243 aa, Unknown
  Obtained from environmental sample
  DOMAIN (45)...(175): Aconitase C-terminal domain
  misc_feature (1)..(243): Xaa is any amino acid
MSLTPRVVKISAGDSSVKIAIDHGSNRLQKLEPFAPWNSKDISNARVLIKVKGKCTTDHISQAGEWLKFRGHLENISGNLLIGALNAFNEEKNKVRFQPSNAEMTVPNAAKAYKTAKVPSIIIGDENYGEGSSREHAAMEPRFLGVVAVIAKSFARIHETNLKKQGMLALCFADKNDYNKILENDILEISGLCEFSPGCQFTLLLRHADGTNEKILLEQSYNESQWEWFKAGSALNALCKTSP

SEQ ID NO: 46711 - DNA, 669 bp, Unknown
  Obtained from environmental sample
  misc_feature (1)..(669): n is a, c, g, or t
atgtttaacgcggcaaaggtaaaaaacgaaattattgaatggatacgggattattttgaggataacggcaaagactgtaacgccgttgtcggcatctcgggcggcaaggacagttcagtaacggcagccctttgcgtacaggcgcttggtaaaaacaaagtttacggcgtattgatgccgcagggggaacagcacgacataaattattcacaggaacttgtctcttttcttggaataaaacattttgtaataaacataaaaaacagcgttgacgcccttcttgcgtcaataaaggaggctaacctttcgcttaacaggcaggctgttatcaacattccggcaagaataaggatgacctctctttacgccgtttccgccgctgtaaacggcagagtggcaaacacatgcaacttaagcgaggactgggtaggttacgctacaaaatacggcgacggagccggcgatttcggccttttgtcacggttaacggtgacggaagtaaaagaactgggcagggaattgggactgccggcgaaatttatagaaaaagtgcccgaagacgggctttccggctttccgacgaggaaaacctggggttcacttacgccgttttggacaaatatatccgcgagggcgtgtgcgagggcgtgtgcgaggacgcggcggtaa

SEQ ID NO: 46712 - protein, 222 aa, Unknown
  Obtained from environmental sample
  DOMAIN (27)...(175): ExsB
  misc_feature (1)..(222): Xaa is any amino acid
MFNAAKVKNEIIEWIRDYFEDNGKDCNAVVGISGGKDSSVTAALCVQALGKNKVYGVLMPQGEQHDINYSQELVSFLGIKHFVINIKNSVDALLASIKEANLSLNRQAVINIPARIRMTSLYAVSAAVNGRVANTCNLSEDWVGYATKYGDGAGDFGLLSRLTVTEVKELGRELGLPAKFIEKVPEDGLSGFPTRKTWGSLTPFWTNISARACARACARTRR

SEQ ID NO: 46713 - DNA, 1005 bp, Unknown
  Obtained from environmental sample
  misc_feature (1)..(1005): n is a, c, g, or t
atgcgaagttttgttgctggacattacgactcggacacggtttatataaacggcgttgaagtaggaaacacctgctaccgttatcctcctcgcaaatatgcctgtaaaggattaataaaaaaaggaaaaaacaggatcgtaatcagagttatctgcaataacggcgaaggcggcgttacgcgcgacaaacctttccgtatatttacggacaacgaaaccgtagaacttacgggaaaatggaaatatagaatcggagccgcttctccggtacgccctgaagattttttctttcagcgccttcctaccggcaattataacgccatgatcgcccctttattgaaatatccgttaaagggcgttatctggtatcagggcgaatccaacgattcaaatccggatgattacgaaaagttattccgtcttttaatacaggactggcgggaaaaatgcggcaataaagagcttcctttcctctttgtgcaattgcctgtctggaaaaagccgacggataatagcgaggactcgtcatgggccattatcagggaggcgcaggctgcggctctgtcccttcccgcaaccggcatggccgccgcccttgaactcggcgaatggaacgacttgcatccgttaaataaaaaagacgtaggcatccgcctttttctcgcggcggaaaaaacgttatttaaaattgaaaactcttctcccgggcctgttttacagcgtgttgaaaagcgcgaaggaaaactttttctttactttaacaactgcgcagacgggcttaaagtcgttcctgaaggggaaaaagcctatgtcagcgtaattgattcatatatgcaggttctatgtcccgcggaaatcgcggggaaagacgttatattcataaacatttctgctttacatgaacccaaaaaagttttatacgcatgggcggataacccttccgcaaggcagttgtacaacagcgacgggcttcctatgcttccttttaaagctgaaattatttaa

SEQ ID NO: 46714 - protein, 334 aa, Unknown
  Obtained from environmental sample
  DOMAIN (75)...(151): Domain of unknown function (DUF303)
  misc_feature (1)..(334): Xaa is any amino acid
MRSFVAGHYDSDTVYINGVEVGNTCYRYPPRKYACKGLIKKGKNRIVIRVICNNGEGGVTRDKPFRIFTDNETVELTGKWKYRIGAASPVRPEDFFFQRLPTGNYNAMIAPLLKYPLKGVIWYQGESNDSNPDDYEKLFRLLIQDWREKCGNKELPFLFVQLPVWKKPTDNSEDSSWAIIREAQAAALSLPATGMAAALELGEWNDLHPLNKKDVGIRLFLAAEKTLFKIENSSPGPVLQRVEKREGKLFLYFNNCADGLKVVPEGEKAYVSVIDSYMQVLCPAEIAGKDVIFINISALHEPKKVLYAWADNPSARQLYNSDGLPMLPFKAEII

SEQ ID NO: 46715 - DNA, 807 bp, Unknown
  Obtained from environmental sample
  misc_feature (1)..(807): n is a, c, g, or t
ttgcagatgaaagaagggagcaagattcagctccttgccccggtgatccgcggcaagaagggagagcaccagaagataatcgaggacgcgaaaaaagccggatttgcccgtgccaggatcgacggggtgccggttaaccttgacgaaaagataagccttgacaagcagaaaaagcacactattgaaatagtggtggatcgcctggttatgggagccggcataaggcagcgcttggctgagtcatgcgaggcggctttgcaggcggcggacggtgtgatgcttgttttatgccagagcccaaagggttctgaggggcccgaaggccctgttaccgagtattttttcagccagaaaaacgcctgcccggactgcggcgtctccataccggaattgcagcccaggctattttcatttaacaatccctttggcgcttgccccgcctgtacgggccttggaatcaaaatggaattcgatccctcgctaataattccaaatccctccctttcgtttaacgaaggaggggtcgtgccttacaacccggattccgcctggtaccgcagccgctttgaaagcatagcgcggcattttaagttcagcctggacacgcccctaaaggacattcccaaaaaagcgttgaacgcgatgatctacggcagcgacgatgaccttgaagttcactataaaaaccgcgagggcacttcccattttgattacacaccagattccctggcgtgcttgaagacctcaaaaggcggtacatggaaaccagctcgcctgggattaaggactggcttgaaaagtttatga

SEQ ID NO: 46716 - protein, 268 aa, Unknown
  Obtained from environmental sample
  misc_feature (1)..(268): Xaa is any amino acid
MQMKEGSKIQLLAPVIRGKKGEHQKIIEDAKKAGFARARIDGVPVNLDEKISLDKQKKHTIEIVVDRLVMGAGIRQRLAESCEAALQAADGVMLVLCQSPKGSEGPEGPVTEYFFSQKNACPDCGVSIPELQPRLFSFNNPFGACPACTGLGIKMEFDPSLIIPNPSLSFNEGGVVPYNPDSAWYRSRFESIARHFKFSLDTPLKDIPKKALNAMIYGSDDDLEVHYKNREGTSHFDYTPDSLACLKTSKGGTWKPARLGLRTGLKSL

SEQ ID NO: 46717 - DNA, 1800 bp, Unknown
  Obtained from environmental sample
  misc_feature (1)..(1800): n is a, c, g, or t
gtgcttgaagacctcaaaaggcggtacatggaaaccagctcgcctgggattaaggactggcttgaaaagtttatgagccagaagccctgcgaggaatgcgggggaaagagattgaaggccgaagttctggcggtaactgtcgggggcaggaacatctgggatttgactgggctttcggtaacggacacgctgaaattttttgaaacattgaagataaacaaaaccgaaaaaacaatagcccgccaaattttaaaggaaataaacgccaggcttggctttatgaaaaacgtcggtctggattaccttacccttgaacgaaaggccgccacgctttcaggcggggaggctcagcgcataaggctggccacgcagataggctcaagccttgtgggcgttctttacattctcgacgagccttcaattggccttcaccagcgggacaaccagcggcttatcgataccctgcttcatctgcgggatataggtaacaccctcatcgttgtggagcatgacgagcagaccctgcgcacggcggatcacatcgttgaccttggccctggagcaggagtccacgggggaagggtagtagcccagggcaagccttctgaggtgatgaaagtagaagaaagccttacaggccaatttctttcaggtgcgcttaaaatggagattccaaaaaagcgaagggaaggaaacggtttgagcttgcgcctaacgggggtgtcggagcataatcttaaaaacatcaatgtggaaattcccctgggcgtttttacctgcatcaccggtgtttcgggctcaggcaaatccactttgctttctgatgtgttgtttcccgccctatacaacagaatgttaggctctaactatttggaaggggaatataaaaagctggaaggggatgagcacatcgacaaggtaattgatatagatcaaagtcccattggccgcacccctcgttcaaacccgataacctacgttggaggctttacggccataagggatcttttcgcgaatcttccagattcaaaaatgcgcggctacaagccgggacgtttttcttttaatgtccgcggaggcagatgcgaaaactgcgaaggcgacggaacaatcaaaattgaaatgaattttttaccggacgtgtacattacctgcgacgtttgccacggcaagcgctttaacagggagactttggacatacactacaagggcaaaagcatcgcagacgttttggatatgactatagaagaggcggcggaatttttcgcgcccattccccagattgcccgtaaaatggataccctgctttctgtgggtctgggttacgtgaaactaggacagtccgcccttacgctttcaggcggcgaggcccaacgggttaagctcgccttggaactatccaagcgctccacaggcaaaaccttttacatccttgacgagcctaccaccggcctccacttcgccgatgtaaagcaactaatggaagtgatccagcgccttgtggatcaaggcaatacggtggcgatgatcgagcataacctggacgtgcttttgcaggcggatcacataatagacctggggccggaaggaggcgacaggggcgggcaagtaataattaccgggacgcctgaagaaagtggcgaatattcccgctcgtatacaggtaattatattaaggagcatttaaagagcacggcaggaagcccgcgtatgcccgcgcgtttaagcaaggggcggcggcaaatccaagtgaaaaaagcacctttcattttatttaacttctccttttcccgtttttaa

SEQ ID NO: 46718 - protein, 599 aa, Unknown
  Obtained from environmental sample
  DOMAIN (40)...(187): ABC transporter
  misc_feature (1)..(599): Xaa is any amino acid
MLEDLKRRYMETSSPGIKDWLEKFMSQKPCEECGGKRLKAEVLAVTVGGRNIWDLTGLSVTDTLKFFETLKINKTEKTIARQILKEINARLGFMKNVGLDYLTLERKAATLSGGEAQRIRLATQIGSSLVGVLYILDEPSIGLHQRDNQRLIDTLLHLRDIGNTLIVVEHDEQTLRTADHIVDLGPGAGVHGGRVVAQGKPSEVMKVEESLTGQFLSGALKMEIPKKRREGNGLSLRLTGVSEHNLKNINVEIPLGVFTCITGVSGSGKSTLLSDVLFPALYNRMLGSNYLEGEYKKLEGDEHIDKVIDIDQSPIGRTPRSNPITYVGGFTAIRDLFANLPDSKMRGYKPGRFSFNVRGGRCENCEGDGTIKIEMNFLPDVYITCDVCHGKRFNRETLDIHYKGKSIADVLDMTIEEAAEFFAPIPQIARKMDTLLSVGLGYVKLGQSALTLSGGEAQRVKLALELSKRSTGKTFYILDEPTTGLHFADVKQLMEVIQRLVDQGNTVAMIEHNLDVLLQADHIIDLGPEGGDRGGQVIITGTPEESGEYSRSYTGNYIKEHLKSTAGSPRMPARLSKGRRQIQVKKAPFILFNFSFSRF

SEQ ID NO: 46719 - DNA, 750 bp, Unknown
  Obtained from environmental sample
  misc_feature (1)..(750): n is a, c, g, or t
gtgcttggcggaaacggaactaacactacaggttataaacttgcatgggaaggtcttaatgtcatcgggcttcctaaaaccattgacaatgatattgtcggaaccgataaaacattcggttttgattcagctttgcatatcggcacggaagcaatagaccgcctccattcaacggcgcaaagccatagccgtgttatcgtaattgaactgatggggcacaaagccggatggctcgcgctctatgccggagttgccggcggcggcgatataattcttattcccgaaattccttacgatatacgcgccattggaaatcatcttgaacaacttgcaaaagcgggaaaaacattttcgatagttgttgttgcggaaggcgcgttatcaacaagagaagcggagatggataaaaaagacagaaaaaaataccgcagtgaaaacggtccttctgtggcgtatcgtgtcgcaaaagaaatcaatgaagaaacaggcatggaaacccgtgcgactgttttaggttatgtgcagcgcggcggcgttccctgcgcttcagaccgggtgcttgcgacaagtctcggaactgccgccgtggaacttctggctaagggcaattacgggcgcatggtcgccttaaacggcaatgacattgattccgtcgatttaagcgttcctgagggaaaagtgaaaacagtgccgcttgatcattatatgcttgataccgcaagaggagttggcacttgtctgggcgtttaa

SEQ ID NO: 46720 - protein, 249 aa, Unknown
  Obtained from environmental sample
  DOMAIN (2)...(201): Phosphofructokinase
  misc_feature (1)..(249): Xaa is any amino acid
MLGGNGTNTTGYKLAWEGLNVIGLPKTIDNDIVGTDKTFGFDSALHIGTEAIDRLHSTAQSHSRVIVIELMGHKAGWLALYAGVAGGGDIILIPEIPYDIRAIGNHLEQLAKAGKTFSIVVVAEGALSTREAEMDKKDRKKYRSENGPSVAYRVAKEINEETGMETRATVLGYVQRGGVPCASDRVLATSLGTAAVELLAKGNYGRMVALNGNDIDSVDLSVPEGKVKTVPLDHYMLDTARGVGTCLGV

SEQ ID NO: 46721 - DNA, 948 bp, Unknown
  Obtained from environmental sample
  misc_feature (1)..(948): n is a, c, g, or t
atgacttcaaagcatcttaccgtcagtgaacttacagaacagattcgcagctgccttgaaggctcttttacaactgtcatggttgagggtgaactgtcaaattgcaggccggcaagctccgggcatttgtatttcagtttgaaagattcaggcgcaaaaattgacgccgttatgtttaaaaacaaactcaggtctataaattttgaaccaaaagacggaatgctgcttaaggtacgcggaagcatttctgtttatgcgccgagaggaacttattcaattatatgcgatgaaatggaaatagccggagaaggtgaaatacttgcaatgctggaaaagagaaaacaaaaacttgccgcgcagggactgtttgacgctgaaaggaaaaagtccctgccccgctttcccgccgttgtaggcattgtcagttctcccacaggagccgctgtacgcgatattctcaatatacttgcaaggcgcgcgccgtgcgtcagggttataatccttcccgctcctgtccagggggaagaagccgcatcccgcattgcggcgcggataagacaggcaaaccattggaaacttgttgacgttctaattgtgggcagaggaggcggctctcttgaagaccttctgcctttttcagatgaagaagttgtccgagccgcatcggaatcggatattcccgttgtaagcgccgtagggcatgaaattgactgggcgctctgcgattttgctgcggacatacgggcgccgactccttccgctgcggcggaaattgtcagtacgcattacgctgtcgcgtcagactcggttaacacgctgaccgaagggctgaaaaccgttatgcgtacgcgcatggaaaaaatgcgtcttttgctgaaaccgtttgatccgcaggatttgggaataccgtttccgcgccattttacagccgcgcctgatccgccttga

SEQ ID NO: 46722 - protein, 315 aa, Unknown
  Obtained from environmental sample
  DOMAIN (26)...(101): OB-fold nucleic acid binding domain
  misc_feature (1)..(315): Xaa is any amino acid
MTSKHLTVSELTEQIRSCLEGSFTTVMVEGELSNCRPASSGHLYFSLKDSGAKIDAVMFKNKLRSINFEPKDGMLLKVRGSISVYAPRGTYSIICDEMEIAGEGEILAMLEKRKQKLAAQGLFDAERKKSLPRFPAVVGIVSSPTGAAVRDILNILARRAPCVRVIILPAPVQGEEAASRIAARIRQANHWKLVDVLIVGRGGGSLEDLLPFSDEEVVRAASESDIPVVSAVGHEIDWALCDFAADIRAPTPSAAAEIVSTHYAVASDSVNTLTEGLKTVMRTRMEKMRLLLKPFDPQDLGIPFPRHFTAAPDPP

SEQ ID NO: 46723 - DNA, 312 bp, Unknown
  Obtained from environmental sample
  misc_feature (1)..(312): n is a, c, g, or t
ttgatccgcaggatttgggaataccgtttccgcgccattttacagccgcgcctgatccgccttgacgacgcgaaagacgcgcttataaacgcaatttcggacaggaaagagaatttgcgcggaagaatagcgcttgccgccgcagtaatcgaggctgcaaaccctcttgcggcaatggaacgcggattttcggttgtgacggactcaagcggcaaattagtgcgcgattcaaaaaaagtaaaaaaaggggagcggctttttattcagccgcttaaaggaaaaataaacgcaatagtggaaagttgcgagtaa

SEQ ID NO: 46724 - protein, 103 aa, Unknown
  Obtained from environmental sample
  misc_feature (1)..(103): Xaa is any amino acid
MIRRIWEYRFRAILQPRLIRLDDAKDALINAISDRKENLRGRIALAAAVIEAANPLAAMERGFSVVTDSSGKLVRDSKKVKKGERLFIQPLKGKINAIVESCE

SEQ ID NO: 46725 - DNA, 348 bp, Unknown
  Obtained from environmental sample
  misc_feature (1)..(348): n is a, c, g, or t
ttgatgacggagaataattcccgcatctatgtccttccgccagaagaggcaaggcgcattgccgcgggcgaagtagtagaccgccccgccgcgctggttcgggaatttcttgacaacgcgatagacgctgccgccttcaacatagaaatttctgtcgaggaaggcggctgcaagaaagttgaagtttccgacgacggtgacggaatgatacgcgaagatttggaactttgcacgcttactcacgcgacaagtaaaattcgcaagttagacgatcttgacactgccgtaacgcttggtttcagaggggagcgcttgcgccgccgcgcgggtagcagagtggaaatgtaa

SEQ ID NO: 46726 - protein, 115 aa, Unknown
  Obtained from environmental sample
  DOMAIN (24)...(115): Histidine kinase-, DNA gyrase B-, and HSP90-like ATPase
  misc_feature (1)..(115): Xaa is any amino acid
MMTENNSRIYVLPPEEARRIAAGEVVDRPAALVREFLDNAIDAAAFNIEISVEEGGCKKVEVSDDGDGMIREDLELCTLTHATSKIRKLDDLDTAVTLGFRGERLRRRAGSRVEM

SEQ ID NO: 46727 - DNA, 624 bp, Unknown
  Obtained from environmental sample
  misc_feature (1)..(624): n is a, c, g, or t
ttgtatttgatattctttccatatttttatattataatatttatcatggattttactattgataatgaagaaaagaagattttattgtctcaagcgcgggagaccatagccgccgaactggaaagacgcaaacccgtttacggcgatattccggcaaacgcggattccgcgttgaataaacaatgcggcgcttttgttacccttcacaaaataaacggagcggaacatgatttgcgcggatgtataggcagaatggcggcaaaccagcctcttatagaaacaatccggcaaatggcgaaatcagccgcttttgacgatccccgctttccgcctctaaggcgcgaagaattggaaaaatgccaaatagagatttccgctctttcccctatgattccctgcgacaatccgcgcaaggtaaaagtcggcgttcatggtctttatctttcaaggggcgggcgttcgggcgttctgcttccgcaagttcctgtagaacaaggctggaatcttgacgaataccttgattatatttgtataaagccgggcttccgccgcactcctacgaagcgccggacgctcagcttcttacctttaccgccattgtcttcggagaggagtaatttctaa

SEQ ID NO: 46728 - protein, 207 aa, Unknown
  Obtained from environmental sample
  DOMAIN (23)...(198): AMMECR1
  misc_feature (1)..(207): Xaa is any amino acid
MYLIFFPYFYIIIFIMDFTIDNEEKKILLSQARETIAAELERRKPVYGDIPANADSALNKQCGAFVTLHKINGAEHDLRGCIGRMAANQPLIETIRQMAKSAAFDDPRFPPLRREELEKCQIEISALSPMIPCDNPRKVKVGVHGLYLSRGGRSGVLLPQVPVEQGWNLDEYLDYICIKPGFRRTPTKRRTLSFLPLPPLSSERSNF

SEQ ID NO: 46729 - DNA, 1575 bp, Unknown
  Obtained from environmental sample
  misc_feature (1)..(1575): n is a, c, g, or t
gtggaacgccgcctctctgaattttttacgactgaaaccgcaaaaaaagcggagcttatttcaagagagggggacgccgacccgctgattacaggccttgaatacgactctcgaaatataaaacagggaaacctatttttcgcgttaagcggtttgcacactaacggcagtctttttattgaagacgcaatttcccgcggggccttatgcgtaatacatgagaacgaggatataaaaaaaacaccgggtatagtttatttgaaagtaaaaaatccccgcttttccatgtctccgattgccgcgtctttttataattttccctcacagcggatgtatgtaacaggcgttacagggacggagggaaaaagcacaaccgtttatcttatctggcagttacttgtgttgatggggaaaaaagcggggttcttttcaacagtacagcgtagttttggaggggaggctatttggaacagcgaacatcaaaccacgccggaagcgcctgttgtacagcggcttctttgggaaatggcggataatggctgtgagtacgcggttgtagaagcaagctcacacggcttatcgccgagaacaaaccgattaggagacgtaaacttctgttcggcggttttcacaaatgtaacccacgagcaccttgagtttcacggaacatgngaacaatacagggaagacaaggcaaatcttttccgcgctcttgacaggtatattgaaatttatccgccggataatttttccggcttnaagcctttcggcgtaattaacgccgatgataaaagcgcaggctttttcgcgcaggcaactaagtgtaaatcatttacattcagccgcaatggcaatgacgcggatattatcgcggaaacaaccgaaaacagcgcacaaggcaacagttaccgtgttttaaataagcaactgaacgaacatatagaaatgaaagataatcttcccggttctttcaacataggcaatgttttagcggcctgtattacggtctcaaatttgttaaacgtaccgttacgcgaagttgccgcgtttgcgggcaaattaaaacccgtacgcggaaggatgaccgctataaacaagggacagccctttgagcttgtcgtagattacgcgcacacgccttcgtcttttatggctatattccccaccctaagagaacgcctagataaaacaaacggcagaataatcagcgttttcggctctgccggagagcgtgacacacaaaaacgcgccgaacagggaaaaatcgcaggccactactcggactttatcgttattacggacgaagacccgcggggcgagaaacaaatggacattctggaagagattgcaaagggagttgaaacaggcgaagacagtggaaaattcaggcgcgaagaaaatttgttccttatacccgaccgcccaagcgcgatacggaaagcgctgagcatggcgcataagggcgaccttgttctgcttttggggaaagggcatgagaactcgattatttacacggatcatgttatgccttatgatgagattgctgaagcggaaaaagcgttaggggagatttaa

SEQ ID NO: 46730 - protein, 524 aa, Unknown
  Obtained from environmental sample
  DOMAIN (29)...(104): Mur ligase family, catalytic domain
  misc_feature (1)..(524): Xaa is any amino acid
MERRLSEFFTTETAKKAELISREGDADPLITGLEYDSRNIKQGNLFFALSGLHTNGSLFIEDAISRGALCVIHENEDIKKTPGIVYLKVKNPRFSMSPIAASFYNFPSQRMYVTGVTGTEGKSTTVYLIWQLLVLMGKKAGFFSTVQRSFGGEAIWNSEHQTTPEAPVVQRLLWEMADNGCEYAVVEASSHGLSPRTNRLGDVNFCSAVFTNVTHEHLEFHGTXEQYREDKANLFRALDRYIEIYPPDNFSGXKPFGVINADDKSAGFFAQATKCKSFTFSRNGNDADIIAETTENSAQGNSYRVLNKQLNEHIEMKDNLPGSFNIGNVLAACITVSNLLNVPLREVAAFAGKLKPVRGRMTAINKGQPFELVVDYAHTPSSFMAIFPTLRERLDKTNGRIISVFGSAGERDTQKRAEQGKIAGHYSDFIVITDEDPRGEKQMDILEEIAKGVETGEDSGKFRREENLFLIPDRPSAIRKALSMAHKGDLVLLLGKGHENSIIYTDHVMPYDEIAEAEKALGEI

SEQ ID NO: 46731 - DNA, 375 bp, Unknown
  Obtained from environmental sample
  misc_feature (1)..(375): n is a, c, g, or t
atgggcgggtcgcatggtaaactcctgccgaccatacatcagattattccccttgtgaaagaaaagattcaggacgacctgtttgaaatcggcggcgaaaagagggttgacttaaaatttgaattcctgccttcaacgggggcggtttttgacatgctggtaccccagtatataaagggcgtaattttcggggcgatggtggaagcgcacgccagcgaacagagctcccgcatgaaggcgatggacgaggcttccaaaagcgccgaagacatgctcgcgtccctgaagataagttacaaccgcgcgcgacaggcgggcattacccaggaaatggctgagataagcgggggcgcgactgcgttagctgacaaataa

SEQ ID NO: 46732 - protein, 124 aa, Unknown
  Obtained from environmental sample
  DOMAIN (3)...(121): ATP synthase
  misc_feature (1)..(124): Xaa is any amino acid
MGGSHGKLLPTIHQIIPLVKEKIQDDLFEIGGEKRVDLKFEFLPSTGAVFDMLVPQYIKGVIFGAMVEAHASEQSSRMKAMDEASKSAEDMLASLKISYNRARQAGITQEMAEISGGATALADK

SEQ ID NO: 46733 - DNA, 1050 bp, Unknown
  Obtained from environmental sample
  misc_feature (1)..(1050): n is a, c, g, or t
atggctgaaaaagcgataattgccatgtcgggcggcgttgacagttctgtcgccgccgcccttatgcttgaacagggttatcaatgtgtcggcataacgcttaaactttacaagggtgaaagccgttgttgttcccttgcggacgtaaacgacgctaggaatgtggcttttagccttggcatggatcattatgtgctaaattttacggaagaatttgacaaacaggtaatccgccattttatagaaacttacgaacagggcgcgactcccaatccctgcattgaatgtaaccgccatatcaagtttaatctgctccttcttcgcgcgcgtcaacttgattttgactttcttgttacaggtcactacgcgcgtgtcgcaaaagatgtaaacggcagatatttacttttaaaagcgtcagatgaaaaaaaagatcaaagttatgtgctttattgcctaacccaaaaacaactccagtgttcgcgcttccctcttggcgggctttccaaaaatgaagtgcgtaaaatcgtcgaagataaaaaatttgtaaatgcggccaagggggagagcccggacatctgttttgtacctgacggccattatggcaattttattgaaagttacccggggcaaacatatccgcatggggacattatcgacatggtggggaaaaaaatcggcacgcacaaagggcttatccgctacactatcgggcaaaggcgcggacttggcgttgccgcaaatgttcctgtttatgtcacggataagtcagtggcggataataccgtaacgctggggactgatgacgctctttttcgtaaatcgctctccgccaaagagatcaaccttatcgcctgcgaagacttaaaaaaaccgttacgcgtaatggtaaaaactcgctacttgcaggccgcccaaaacgccacggcggagcaaacggggaatgacagtttacacattgaatttgattcgccccaacgcgcaattacgccggggcaggcggttgttatgtacgatggggatattgtagtcggcggcggaacgatagagtag

SEQ ID NO: 46734 - protein, 349 aa, Unknown
  Obtained from environmental sample
  SIGNAL (1)...(20)
  DOMAIN (3)...(348): tRNA methyl transferase
  misc_feature (1)..(349): Xaa is any amino acid
MAEKAIIAMSGGVDSSVAAALMLEQGYQCVGITLKLYKGESRCCSLADVNDARNVAFSLGMDHYVLNFTEEFDKQVIRHFIETYEQGATPNPCIECNRHIKFNLLLLRARQLDFDFLVTGHYARVAKDVNGRYLLLKASDEKKDQSYVLYCLTQKQLQCSRFPLGGLSKNEVRKIVEDKKFVNAAKGESPDICFVPDGHYGNFIESYPGQTYPHGDIIDMVGKKIGTHKGLIRYTIGQRRGLGVAANVPVYVTDKSVADNTVTLGTDDALFRKSLSAKEINLIACEDLKKPLRVMVKTRYLQAAQNATAEQTGNDSLHIEFDSPQRAITPGQAVVMYDGDIVVGGGTIE

SEQ ID NO: 46735 - DNA, 474 bp, Unknown
  Obtained from environmental sample
  misc_feature (1)..(474): n is a, c, g, or t
gtggtatatggctatataagagtcagtacagacaaacaaactgttgataatcaacggtttgagattgaacagttttgcgaaagaaataatctaggaattgatgaatggattgaagaaacgattagcggatgtaaaacacctgacaagcgcctgttgggttcgcttctggatgcggtaaaattaggcgatttaataatttgttcggaattgtcaagacttggaagaaatctttttatgatcatgtcgatacttaatcagctaatgatgaatgaagtaagaatatggacaattaaagacaattacaggttaggtgacaatatccaatcaaaagttttggctttcgcgttcggcctgtctgctgaaattgaacgtgaactgctttctcaaagaacaaaggaagccctttcgcgtaaacgctccgaaggtaaggttttgggcaggccttttggcagtaaatccaattatgtaaactaa

SEQ ID NO: 46736 - protein, 157 aa, Unknown
  Obtained from environmental sample
  DOMAIN (2)...(144): Resolvase, N terminal domain
  misc_feature (1)..(157): Xaa is any amino acid
MVYGYIRVSTDKQTVDNQRFEIEQFCERNNLGIDEWIEETISGCKTPDKRLLGSLLDAVKLGDLIICSELSRLGRNLFMIMSILNQLMMNEVRIWTIKDNYRLGDNIQSKVLAFAFGLSAEIERELLSQRTKEALSRKRSEGKVLGRPFGSKSNYVN

SEQ ID NO: 46737 - DNA, 477 bp, Unknown
  Obtained from environmental sample
  misc_feature (1)..(477): n is a, c, g, or t
atgaacgatgaccgtcgaggggcccaggggaaacttacgcagaaataccaccccgtcattacctttgagagcaaaggcgaggagataatcgtaagccgtgccaatgaagaaaaacaggtaaaggcctttcatggtctgtaccggaacctgctcaacaatatggtaaaaggggtttccgagggtttttccaaaacgctgataataaccggggtaggctaccgcgccgaggtgcagggcaagatgcttgtcatgaaccttggtttttcaaccgatgtttatgtcggcattcccagcgggattaacattgccgcagaaggcggcacaaaagttgttgtcagcgggattgacaagcagagggtgggggagcttgccgcgcaaatacgcaaactcaggccgcccgagccttacaagggcaagggtatccgctacgaggatgagcatatccggcgtaaagttggtaaatcgggcgttaaatag

SEQ ID NO: 46738 - protein, 158 aa, Unknown
  Obtained from environmental sample
  DOMAIN (1)...(61): Ribosomal protein L6
  misc_feature (1)..(158): Xaa is any amino acid
MNDDRRGAQGKLTQKYHPVITFESKGEEIIVSRANEEKQVKAFHGLYRNLLNNMVKGVSEGFSKTLIITGVGYRAEVQGKMLVMNLGFSTDVYVGIPSGINIAAEGGTKVVVSGIDKQRVGELAAQIRKLRPPEPYKGKGIRYEDEHIRRKVGKSGVK

SEQ ID NO: 46739 - DNA, 363 bp, Unknown
  Obtained from environmental sample
  misc_feature (1)..(363): n is a, c, g, or t
atgttgcaaaaaatgttggaaaaagaccggaaacggcttaaaagaaaagtgcatatccgcaaaaagatctccggcaccgaacagaggccgcggatgacggtaacgcggagcaaccgcaggctctccgtccagattattgacgacaccaaaggccataccctggcttccgcttccacgctggagaaggaactgcggaacattaaggccaccgtagccggcgcggcccagcttggcgaattattcggcaagcggcttctggaaaagaatattaaatccgtggtctttgaccgcaacggatatttgtaccatggcataatcaaggctttggccgacggaacccggaaagccgggatacagttctaa

SEQ ID NO: 46740 - protein, 120 aa, Unknown
  Obtained from environmental sample
  DOMAIN (7)...(120): Ribosomal L18p/L5e family
  misc_feature (1)..(120): Xaa is any amino acid
MLQKMLEKDRKRLKRKVHIRKKISGTEQRPRMTVTRSNRRLSVQIIDDTKGHTLASASTLEKELRNIKATVAGAAQLGELFGKRLLEKNIKSVVFDRNGYLYHGIIKALADGTRKAGIQF

SEQ ID NO: 46741 - DNA, 690 bp, Unknown
  Obtained from environmental sample
  misc_feature (1)..(690): n is a, c, g, or t
atgaataaggaaattgaagaagctgtaagcgctgctgtaagcgcggacgacgatgttgccgcagacattcaaacagaaaccgcggaaaccgatgtttccgtaacagaagcagcccccggcagacgatcctacggacgcggaggcgccaatggcgagggaaggggcgaaggccgcagaggccgcgggcgcgatcgtgacagggaatcggctgaaaaggaatttgttgaaaagctggtaaagctgaaccgcacggcaaaggttgtcaagggcggccggcgcttttcgttttccgcccttacggtcatcggcgaccgcaaaggcaatgtaggttacggtttcggcaaggcaaacgacgtttcagaggcaataagaaagagcattgacaaggcaaaacgcaacatgattaagctgcctgttataaaaggcacgatcccccacgaggttaccgggtatttcaaggcttcgcaggtgcttcttaaaccggcgcgctcgggaacagggattatagccggagggccggtgcgcgccatcatggaagcgggcggcgtaaccgatatactttcaaagtcaatcggcgcgtcaagccagtacaacgtggtcaaggcgaccttcgactgcatcagcaggatgatggacgcgaaaacgatagctaanaacaggggcaagtccctgaacgagctgtggggttga

SEQ ID NO: 46742 - protein, 229 aa, Unknown
  Obtained from environmental sample
  DOMAIN (148)...(221): Ribosomal protein S5, C-terminal domain
  misc_feature (1)..(229): Xaa is any amino acid
MNKEIEEAVSAAVSADDDVAADIQTETAETDVSVTEAAPGRRSYGRGGANGEGRGEGRRGRGRDRDRESAEKEFVEKLVKLNRTAKVVKGGRRFSFSALTVIGDRKGNVGYGFGKANDVSEAIRKSIDKAKRNMIKLPVIKGTIPHEVTGYFKASQVLLKPARSGTGIIAGGPVRAIMEAGGVTDILSKSIGASSQYNVVKATFDCISRMMDAKTIAXNRGKSLNELWG

SEQ ID NO: 46743 - DNA, 510 bp, Unknown
  Obtained from environmental sample
  misc_feature (1)..(510): n is a, c, g, or t
atggcgcacgattatgatttgcacgctccggcaggcgcgaacaaaaaaaagagaataattggccgagggcaaggctcgggtcggggaacaacggccggcaagggcaacaagggacagcaggcgcgttcaggcggcaagacttatgtcggttttgaaggcgggcagatgcccttgtacaggcggctcgcgcacagaggtttttctaattatccgttcaaacaggaatggcagatagtcaaccttggcgaaattgaaaaatgctttacagcgggcgaaaccgtggaacttgcgacccttcataaaaaagggcttgttaaaggcgttgatccaatcaaagttttggctaacggtgatttaaccaaaaaattaagttttaaggttgacggcgtttcagcttcggcaaaagaaaaaattgaaaaggcgggcggcgacgttaccgtaattcccgctcccgaaaaagcgcgtcctaagaataagagtaaaaaagcgaaagcaggtggaaagaaataa

SEQ ID NO: 46744 - protein, 169 aa, Unknown
  Obtained from environmental sample
  DOMAIN (112)...(143): Ribosomal protein L15
  misc_feature (1)..(169): Xaa is any amino acid
MAHDYDLHAPAGANKKKRIIGRGQGSGRGTTAGKGNKGQQARSGGKTYVGFEGGQMPLYRRLAHRGFSNYPFKQEWQIVNLGEIEKCFTAGETVELATLHKKGLVKGVDPIKVLANGDLTKKLSFKVDGVSASAKEKIEKAGGDVTVIPAPEKARPKNKSKKAKAGGKK

SEQ ID NO: 46745 - DNA, 1332 bp, Unknown
  Obtained from environmental sample
  misc_feature (1)..(1332): n is a, c, g, or t
atggctaatccccttgttggaatgttcaggattaaggaactccgggagcggatcctctttaccgccggaatgctggtcgtattcagaattggcgcggtgtttcccataccgggaatcaacgtccgggaactttccgcttatttcctttcgcagtcgaattcgggaaaccccatagttgattatctggacttcttcgcgggcggagcgttttccaatttctcggtgttcatgctgggtataatgccctatatctccatgtcgattatcatgcaattgctccttatcgtatttcccagcctgaaaaagatttcacaggaagacggcgggcgcaagaagatccagcaatggcagcgttacggaactgttgtggtctgccttatacaatccttcgccgtcacccagtacgccaaaagcatttcagccagcgttccgaatcttctcaatataggaatactgccctttacgctcatcgccatgcttacagtcaccacgggaaccatgttcctcatgtggataggcgagcagataaccaagcggggcataggcaacggcatatcgcttttgatcttcgccggtattgtggcgcgccttccccacgcggtatgggaacttggcggcagggtgcgcgacgggcagcttaacctggtgtttgtcatcgtggtactgctgatgttcgtggcggtggtcgccctggtcgtgttcgaacagcagggccagcgcaagattccggtaaattacgccaaacgcgttgtcggaaggaaaatgtacggaggcccgtccaactcctacatacctttcaagatcaacccgtcaggcgtcattccggttatcttcgcctcgtccatccttacgttccccttgcaaatagccacgaccgtcggcggcaacgtgccctggctcgcgaaggtggccaatatactgagcccccgcggcacggtttacaatatatcgtatgttttgttgataatattcttcgcgtatttctacacgcaggtgtcgcttaaccccatagaaatcgcgaagcagattagggagaacggcggttccattcccgggatcaggacggatcgcatagaggaataccttacgaagatcctcaaccgcatcgttcttcccggctcgctttatctggcgtttatcgcggttattccgaccattatacaatgggcgtttaagttcccatcgtcaatttcatacttgttgggaggcacgtcgctcctaatcatggtaggcgttgacctggacaccatgagccagatcgaggggcttttgaagatgcaccaccacgaaggcctgaccaggaagggaaggctgcgtggccgtaacctgtaa

SEQ ID NO: 46746 - protein, 443 aa, Unknown
  Obtained from environmental sample
  DOMAIN (74)...(419): eubacterial secY protein
  misc_feature (1)..(443): Xaa is any amino acid
MANPLVGMFRIKELRERILFTAGMLVVFRIGAVFPIPGINVRELSAYFLSQSNSGNPIVDYLDFFAGGAFSNFSVFMLGIMPYISMSIIMQLLLIVFPSLKKISQEDGGRKKIQQWQRYGTVVVCLIQSFAVTQYAKSISASVPNLLNIGILPFTLIAMLTVTTGTMFLMWIGEQITKRGIGNGISLLIFAGIVARLPHAVWELGGRVRDGQLNLVFVIVVLLMFVAVVALVVFEQQGQRKIPVNYAKRVVGRKMYGGPSNSYIPFKINPSGVIPVIFASSILTFPLQIATTVGGNVPWLAKVANILSPRGTVYNISYVLLIIFFAYFYTQVSLNPIEIAKQIRENGGSIPGIRTDRIEEYLTKILNRIVLPGSLYLAFIAVIPTIIQWAFKFPSSISYLLGGTSLLIMVGVDLDTMSQIEGLLKMHHHEGLTRKGRLRGRNL

SEQ ID NO: 46747 - DNA, 804 bp, Unknown
  Obtained from environmental sample
  misc_feature (1)..(804): n is a, c, g, or t
atggccgaggatgaagatgagactattgcgacttttaatcttacaaataacaccgttatttttgttgaaaacggtcaaaggattaaaaaaggcgatactctggcaaaactcgttaaactgccgaatattcgttttaactggggagtcttaaccggacggggctttcaaatttggcagggattcggaaacagcgcgtttatttccattaccgctacgctgttaagcatttacttttcggcgatgaccgcttacggcttacaggtctaccggtttaagggaaggcttttattgtggacggtaatccttatcgtaataatgctgcccagttcgctttccattatcggtttttatcaatttatgtccacattaaagctgcgcgacagttatattccgcttattattccgggcatagccgcggcgggaacggttctgtttttgcggcagtacatgacgtctgttctaagcaccgatcttattgacgcggcgcgtattgacggcgcgaacgagtaccgcatattcaacattattattcttcctattatgcttcccgcgcttgccgctcagtcgatatttacctttgtaggttcatggaacaactttattactccgtttattctgctttccagcgagaaaaagtatacactgccaatgcttgttcaaaacctgcgcggcaacatttaccgcgccgaatacggagcgatttatcttggaatagccgtttctcttttaccgattataatcttctactcattcatgtcccggtttataatttccggcctaacaatgggcggcttgaaagaatag

SEQ ID NO: 46748 - protein, 267 aa, Unknown
  Obtained from environmental sample
  DOMAIN (57)...(262): Binding-protein-dependent transport system inner membrane component
  misc_feature (1)..(267): Xaa is any amino acid
MAEDEDETIATFNLTNNTVIFVENGQRIKKGDTLAKLVKLPNIRFNWGVLTGRGFQIWQGFGNSAFISITATLLSIYFSAMTAYGLQVYRFKGRLLLWTVILIVIMLPSSLSIIGFYQFMSTLKLRDSYIPLIIPGIAAAGTVLFLRQYMTSVLSTDLIDAARIDGANEYRIFNIIILPIMLPALAAQSIFTFVGSWNNFITPFILLSSEKKYTLPMLVQNLRGNIYRAEYGAIYLGIAVSLLPIIIFYSFMSRFIISGLTMGGLKE

SEQ ID NO: 46749 - DNA, 660 bp, Unknown
  Obtained from environmental sample
  misc_feature (1)..(660): n is a, c, g, or t
atgggactttcctggagcggcgaaattcgtttttatcacgcggggttaagcagagaggaaaaagccggcgttgaaaaatggtttatcaacaatccggaagcggttctctgcgccacctgcgcctacggaatgggagtggacaaagccgacgtgcgcaccgttattcacagggactgcgctccctcagtagaggcatacttgcaggaagcaggcagggcgggacgcgacggagggcagtcaagcgcttttctcctatggggcccggaagacgaagcgtctctttcaagggcaaaaacggaagcggataaaagcagggtctcggcgcttttgcgctacgcaagggacacaacccattgcaggcgtcactcgcttctttccctgctaaattatgactcaggcggcgaagtgccggaaaaactctgctgcgacgtctgcgaaaaaaaagcgtccgccgttttaagggaggaaacaacggtattaacttttttccaaaaaaacaaaagacgctacacccccgaaaaagccgccacaattttagcgtcgagcaaacccctacattggcaggaagaagaagcgtcggcggttattaattatttgataaaagatggaaagcttaaaaagtgcaaacgatttccctggaagaataaaattactttataa

SEQ ID NO: 46750 - protein, 219 aa, Unknown
  Obtained from environmental sample
  DOMAIN (1)...(77): Helicase conserved C-terminal domain
  misc_feature (1)..(219): Xaa is any amino acid
MGLSWSGEIRFYHAGLSREEKAGVEKWFINNPEAVLCATCAYGMGVDKADVRTVIHRDCAPSVEAYLQEAGRAGRDGGQSSAFLLWGPEDEASLSRAKTEADKSRVSALLRYARDTTHCRRHSLLSLLNYDSGGEVPEKLCCDVCEKKASAVLREETTVLTFFQKNKRRYTPEKAATILASSKPLHWQEEEASAVINYLIKDGKLKKCKRFPWKNKITL

SEQ ID NO: 46751 - DNA, 594 bp, Unknown
  Obtained from environmental sample
  misc_feature (1)..(594): n is a, c, g, or t
atgtctgattggctttattcggatacggtcaaggagcattttaccaatccccgcaacgtccttttggaagacgagggttctttttcgtataacgcaagggggcagacaggaaacataaaatgcggggatcagatgctgatgctccttaaaattgataatgatgttatcaccgacgtgcgctggagaacctacggatgcgccagcgccattgcgtcaacaagcatgttatctgaaataataaagggtatgaaaattgaggatgcctacaaggtaaggccggaagaccttgttgaaaaactgggcggcctgccctcatacaagatccactgctcagtactgggcgacaaggccctccgcgccgccattgacgactatctctccaaaaccggaagatcgggattgttacaggaagcggtcaccgagatttgccactgcctgagcatcaccgacaaagacattgaaaacgccttccaaaacggcgcgcgcagttgggaagatttgcagcaggccaccaagatcggcaccgtttgcggaaactgcaaaacaaaagcgctggatctgctgcacggcctggaacacatctacgggatgtaa

SEQ ID NO: 46752 - protein, 197 aa, Unknown
  Obtained from environmental sample
  DOMAIN (140)...(192): BFD-like [2Fe-2S] binding domain
  misc_feature (1)..(197): Xaa is any amino acid
MSDWLYSDTVKEHFTNPRNVLLEDEGSFSYNARGQTGNIKCGDQMLMLLKIDNDVITDVRWRTYGCASAIASTSMLSEIIKGMKIEDAYKVRPEDLVEKLGGLPSYKIHCSVLGDKALRAAIDDYLSKTGRSGLLQEAVTEICHCLSITDKDIENAFQNGARSWEDLQQATKIGTVCGNCKTKALDLLHGLEHIYGM

SEQ ID NO: 46753 - DNA, 1167 bp, Unknown
  Obtained from environmental sample
  misc_feature (1)..(1167): n is a, c, g, or t
atgaacgataaaagaaccatctacatagattacaacgccaccacccccctaaggccggaaataaaagccgccatgatagaaaacatggaactttacggcaacgcgtccagcatgcacggctcaggcagggcggcccgcgccggagtagagcaggcgcgtaaggcgatagcttcacttattggagcaacagacggaacaatagttttcacttcaggcggctccgagtcaaataatacggtatttcaaaccatgcgcctattagcgaaagacaatacccgcaatgagtttattatttccgcaatcgaacacccctgcgtattaaactccgcgttaagccttaaaaaagaaggctttaacgtaaaaatcctgcctgtagatgaatacggaaagctcaaaatggacgagttaaaagccgcccttaatgataaaacgctttttgtctcaataatgacggctaacaatgaaatcggcactgttcaggatattaaagaaataaccgctttggtaaaaaaagccggcgcttttatgcacacggacgcggtgcaggccgtgggaaaaatgccgctggacgtaaaagaaataggggcggattaccttaccatgtccgcgcataagatttacgggccaaaaggcgtaggcgctttgtatgtaaaaaaagacgcgcccttgttcccgcttattcacggcggccatcaggaagacgggcttagggcgggaacttacaacagccccgccatcatgggtttcggaaaagccgcggaaattgcaaccgccgaaatcactcaatacggcaaagaaatttcctcccttcgcgataaattgcgcagggggcttttggaaaaagttcccaacattaagataaacggccacttaaaggatgtccttcccaacacgctcaatgtttctttccccggcgcggagggcgagtctattcttctctccatggacatgcagggcatagaagcgtctaccggttccgcctgcgcgtcaggcagccttgagccgtcccatgtacttatggcgacagggcttgagccggagcttgcgcacggctcgatccgtttcagcctgggctgggggatcaccgtggaagatgttgattatataatagaaacattgccgcctatattcgcccggctgcgggcaatgggagggatttatgtctga

SEQ ID NO: 46754 - protein, 388 aa, Unknown
  Obtained from environmental sample
  DOMAIN (10)...(306): Pyridoxal-dependent decarboxylase conserved domain
  misc_feature (1)..(388): Xaa is any amino acid
MNDKRTIYIDYNATTPLRPEIKAAMIENMELYGNASSMHGSGRAARAGVEQARKAIASLIGATDGTIVFTSGGSESNNTVFQTMRLLAKDNTRNEFIISAIEHPCVLNSALSLKKEGFNVKILPVDEYGKLKMDELKAALNDKTLFVSIMTANNEIGTVQDIKEITALVKKAGAFMHTDAVQAVGKMPLDVKEIGADYLTMSAHKIYGPKGVGALYVKKDAPLFPLIHGGHQEDGLRAGTYNSPAIMGFGKAAEIATAEITQYGKEISSLRDKLRRGLLEKVPNIKINGHLKDVLPNTLNVSFPGAEGESILLSMDMQGIEASTGSACASGSLEPSHVLMATGLEPELAHGSIRFSLGWGITVEDVDYIIETLPPIFARLRAMGGIYV

SEQ ID NO: 46755 - DNA, 453 bp, Unknown
  Obtained from environmental sample
  misc_feature (1)..(453): n is a, c, g, or t
ttgcttttttccagcagtattttcttatttatatttcttcccggtgtgatttttatatattatgttttattacacaatattaagaaacgtaatttttttctttttattgccagtctctttttttatgcatggggagaaccgtattttgttataataatgtttctttccattattgccaattattttttcgctttgtgggtttccgcagttaaaggccgcagtgagttttatgccggtgtttgtataacatgcatgattttttttaatctttttattcttttcatgttcaagtattttggattctttatggaatctgttaataccgtctttcaccttaaattatatgttccgcaaatacgtctgcctattggtatatctttttttacttttcaggctatgtcttatgtatttgatgtatatcgtgaaaaaatagaaccgcaaaaaaacccgtaa

SEQ ID NO: 46756 - protein, 150 aa, Unknown
  Obtained from environmental sample
  misc_feature (1)..(150): Xaa is any amino acid
MLFSSSIFLFIFLPGVIFIYYVLLHNIKKRNFFLFIASLFFYAWGEPYFVIIMFLSIIANYFFALWVSAVKGRSEFYAGVCITCMIFFNLFILFMFKYFGFFMESVNTVFHLKLYVPQIRLPIGISFFTFQAMSYVFDVYREKIEPQKNP

SEQ ID NO: 46757 - DNA, 861 bp, Unknown
  Obtained from environmental sample
  misc_feature (1)..(861): n is a, c, g, or t
atggtcgatatagagactttcctagggcatagggacaagtttgaggcctacaaagccgaccacgccgttatgaagaaacacctcaacgagcgggcgtgggacggcgattggtacgtgagctactacaacgccgacggcacgcctctggggtctaacagcaacagcgacggcaagatatacctatacacgcaagcgtggccggttctcgcggatatcgccacggaggatcacgggcgcacggcgctggactccgcccgcaagatgctaaacacgaagaaggggttaaagctctccacgcccggcttcaacggctacgacccgtcgaagggcggcataaccacctacccgccgggggccaaggaaaacggcggcatattcctccacaccaatccgtgggtgatgatcgccgaagcggtaatgggcgacggcaaccgcgcatacgagtactacaaccagatcaatccggccactaaaaacgatattatagacgaatacgagtgcgagccatacgtctacccgcagaacatcttgggcgacgagcacccgctcttcggcctggcgcgtaacagctggctgtcgggaacgtcgtcgtggacgtatcaagcggcgagccgctacataatgggtctgcgcccgcagatggacggcctcctggtcgatccgtgcgtcccgtccgattggaagaagttctccgtggagcgcaatttccgcggatgccgctacgtgataaacgttgagaatccgggccgcgtctgcaagggcgtaaaatcaatatccgttgacgggaaagcgcttgacaagcccgtcgtccccgcctttacggacgggaaaacgcacgaagtcaacgtggtgatgggctga

SEQ ID NO: 46758 - protein, 286 aa, Unknown
  Obtained from environmental sample
  misc_feature (1)..(286): Xaa is any amino acid
MVDIETFLGHRDKFEAYKADHAVMKKHLNERAWDGDWYVSYYNADGTPLGSNSNSDGKIYLYTQAWPVLADIATEDHGRTALDSARKMLNTKKGLKLSTPGFNGYDPSKGGITTYPPGAKENGGIFLHTNPWVMIAEAVMGDGNRAYEYYNQINPATKNDIIDEYECEPYVYPQNILGDEHPLFGLARNSWLSGTSSWTYQAASRYIMGLRPQMDGLLVDPCVPSDWKKFSVERNFRGCRYVINVENPGRVCKGVKSISVDGKALDKPVVPAFTDGKTHEVNVVMG

SEQ ID NO: 46759 - DNA, 489 bp, Unknown
  Obtained from environmental sample
  misc_feature (1)..(489): n is a, c, g, or t
atgctggaaaaggctggtcttgttcaatatgaggtttccaattttgccctgcccgataaaacctgcgcccacaatacacggtattggcgtatggaaaactggctgggcatcggccccgccgcatcgggtacgattattaatgacgcaagcggcaacggcaggcgcttcacctatccggcggacatcaacgcctatcttgccgcaacggaacctcgcattcgttctgcccgcatagaagaactggacaaagccaaccttatccgggaaagcctgctcatgggtttccgttgccgcgcggggcccgacccactgatcttcaaacagcgtttcggctgtaacattgaggactgcatccctgaaactatcgcccgctggcgcgggcggggcttttttgaaacgggacaggacagcggcagccttgccccttcacgcgaaggactgctgtttttgaacgcttttcttcgtgacgcttttggggagttggaatga

SEQ ID NO: 46760 - protein, 162 aa, Unknown
  Obtained from environmental sample
  DOMAIN (26)...(148): HemN C-terminal region
  misc_feature (1)..(162): Xaa is any amino acid
MLEKAGLVQYEVSNFALPDKTCAHNTRYWRMENWLGIGPAASGTIINDASGNGRRFTYPADINAYLAATEPRIRSARIEELDKANLIRESLLMGFRCRAGPDPLIFKQRFGCNIEDCIPETIARWRGRGFFETGQDSGSLAPSREGLLFLNAFLRDAFGELE

SEQ ID NO: 46761 - DNA, 1149 bp, Unknown
  Obtained from environmental sample
  misc_feature (1)..(1149): n is a, c, g, or t
atggaagaaacagcgtctttgttttcatcaattgacaccgcatgggtgctcatagcggcggctcttgtattctttatgcaagcgggcttcgctatggtagaaacaggttttacgagggcgaaaaacgcgggaaatatcgtcatgaaaaacttgatggatttctcaatcggcacacctgtttattggttggttggtttcggtatcatgttcgccggaagcggcaagtttatcggcggactcgactttatggtcaggggaaattacgacgacacgttccccactatggcattcctgattttccagacagtgttctgcgcaacagcggctacaatcgtatcgggagcaatggcggaaagaacaaagttctcttcttactgtatntacagctgnatcatcagcgcttttgtttacccggtttccggtcactggatatggggcggcggctggctcgcacagctcgatttccatgattttgccggttctacagccgtacacatggtcggcggtgtagcggctctggtcggcgcaaaaattgtcggtccacgtattggcaagtattcccaatcgggcgaatcacgcgctattccgggtcacagcttaacgctcggcgcactcggtgttttcattctctggttctgttggttcggttttaatggcggttccactgtttgcatgacaggcgatgaaaacattgtttcagccagcaaaattttcgttacaacaaatctggcggctgctacagcggcggtctttacaatgatcatcacatggatacgctacaaaaaacctgatgtgtcaatgacactgaacggcgctcttgccggtcttgtcgctattaccgcaggatgcgacgccgtatcacctttcggcgcattcatgattggtattatagcggcgattgttatcgtattcggtattgagtttgtagacaaagtattaaaagttgacgatcctgtcggcgctatcggagtacacggtattgccggagcggcgggaacaattcttaccggtatattcgctcttgacggcggactggcatacggcggcggctggagaatggttggggttcaggctctcggcgtggtctcggtagcggcatgggtagcggtaacaatgggcatgtcttacggtaatcctcggccgatctga

SEQ ID NO: 46762 - protein, 382 aa, Unknown
  Obtained from environmental sample
  DOMAIN (14)...(376): Ammonium Transporter Family
  misc_feature (1)..(382): Xaa is any amino acid
MEETASLFSSIDTAWVLIAAALVFFMQAGFAMVETGFTRAKNAGNIVMKNLMDFSIGTPVYWLVGFGIMFAGSGKFIGGLDFMVRGNYDDTFPTMAFLIFQTVFCATAATIVSGAMAERTKFSSYCXYSXIISAFVYPVSGHWIWGGGWLAQLDFHDFAGSTAVHMVGGVAALVGAKIVGPRIGKYSQSGESRAIPGHSLTLGALGVFILWFCWFGFNGGSTVCMTGDENIVSASKIFVTTNLAAATAAVFTMIITWIRYKKPDVSMTLNGALAGLVAITAGCDAVSPFGAFMIGIIAAIVIVFGIEFVDKVLKVDDPVGAIGVHGIAGAAGTILTGIFALDGGLAYGGGWRMVGVQALGVVSVAAWVAVTMGMSYGNPRPI

SEQ ID NO: 46763 - DNA, 696 bp, Unknown
  Obtained from environmental sample
  misc_feature (1)..(696): n is a, c, g, or t
gtgataacaaccggggaatgttgcttttataaaaaagatttgaccgaaaatctgggaaaaattccctatgtattgaggccggataacctgaaccgcgaagcccccgggcttggttcgcgaatttacaacataggcggggaaaaaccaccgtctataaaagcggctgttgcagttcttctgggtcaaagcggcttcggcaggattcacggcaacaaccctttttcggccctctccgcccttctggaaagacttcgccaggaaactccctttgtgattctcgatttccattcccaagccactgcgaaaaagcagacattctttgccatggccgacggtctctgttcccccgttattggttctcatactcctgttcaaaccgcctatgagcggatcctccctgggggaaccgctgtcataacccatgccgggcgcaccggtagtattgagtcggtcggcgggaacgacaggcacagccagattaatgagtacctttcccgaattcccgactggaccaaagacgcctggcaaaaaccggaactgcacggagtttttatcgaaattgccgaaagcggcgccgaaaacggaaaggccctttcgattgaacgcatacgagccagcgcgccttctgttattgttgaaagcgaaaatgacatacccgaagatgacgccgtcaacgcgggggacgttcatgactga

SEQ ID NO: 46764 - protein, 231 aa, Unknown
  Obtained from environmental sample
  misc_feature (1)..(231): Xaa is any amino acid
MITTGECCFYKKDLTENLGKIPYVLRPDNLNREAPGLGSRIYNIGGEKPPSIKAAVAVLLGQSGFGRIHGNNPFSALSALLERLRQETPFVILDFHSQATAKKQTFFAMADGLCSPVIGSHTPVQTAYERILPGGTAVITHAGRTGSIESVGGNDRHSQINEYLSRIPDWTKDAWQKPELHGVFIEIAESGAENGKALSIERIRASAPSVIVESENDIPEDDAVNAGDVHD

SEQ ID NO: 46765 - DNA, 378 bp, Unknown
  Obtained from environmental sample
  misc_feature (1)..(378): n is a, c, g, or t
atggcatccggcgctattgcgtggatggcaggcggcacaggccaggatgtccagaacgcggcgtctatggctttgcaggccaatataggtataccctgcgatcctatcccaggcgggttggaatttccctgcctgacccgtacagtccgggcggcggttactgcccccctatacgcggatatggcccttgccggtattaacccgcttattccgtaccatgaaatgctagccctcattgaacgaaccagaaccctctatcccgatgctgtcagcggcccggattgcggcactaactgtaccgctaccgcggaacgctgtcagcgctttctggcggatgaagtaatggaaggcaaattaaagtgggaagccggaaagtaa

SEQ ID NO: 46766 - protein, 125 aa, Unknown
  Obtained from environmental sample
  misc_feature (1)..(125): Xaa is any amino acid
MASGAIAWMAGGTGQDVQNAASMALQANIGIPCDPIPGGLEFPCLTRTVRAAVTAPLYADMALAGINPLIPYHEMLALIERTRTLYPDAVSGPDCGTNCTATAERCQRFLADEVMEGKLKWEAGK

SEQ ID NO: 46767 - DNA, 525 bp, Unknown
  Obtained from environmental sample
  misc_feature (1)..(525): n is a, c, g, or t
atggatattctggcctcaagcggcgcaaccatagcccattgccctgtcagcaacttaaaattatcgtctggtattgcgccagttatgaaaatgcgagagcatggtttgaatgtggctctgggaacagacggcgtttgctcaaacaacaaccatgacatgttcgaagagatcaaaatcgccgccttattgcaaaagtatctaaccggcgacccgtcggcgttgcccgcctatgaagctataaaaatggcaacggtaaacggtgcagcggggcagggccgcgaagctgaaaccggcaggattgcccccggctacgacgccgacattataatgctggatttggacgcccctcatcttttcccgctaaacgacccgttagccgctgtcgcatacgcggccaggggcagcgatgtgtgcatgacaatggtacagggcagtgtactctaccaaaatggcgaatacaaaacgatagacgtggaaaaagtttgccatgaggtggaaaattacgtcattcccaggcttaaataa

SEQ ID NO: 46768 - protein, 174 aa, Unknown
  Obtained from environmental sample
  misc_feature (1)..(174): Xaa is any amino acid
MDILASSGATIAHCPVSNLKLSSGIAPVMKMREHGLNVALGTDGVCSNNNHDMFEEIKIAALLQKYLTGDPSALPAYEAIKMATVNGAAGQGREAETGRIAPGYDADIIMLDLDAPHLFPLNDPLAAVAYAARGSDVCMTMVQGSVLYQNGEYKTIDVEKVCHEVENYVIPRLK

SEQ ID NO: 46769 - DNA, 990 bp, Unknown
  Obtained from environmental sample
  misc_feature (1)..(990): n is a, c, g, or t
atgaatttcgatccaaactttgttccctatccttcgacacgttaccccgtatacgcgcgggaaggcatggttgcgacttcttcgccccaggcatctctggcagggcttgaggctttaaggcagggcggaaatgccattgacgcggcggtggcagcggcggcggctattaccgtaacggaaccggcgtccaacggcatagggagcgacgcctttgccatagtctgggcaggcggaaagctttacggccttaacgcttccggcaaggctccggctaatatctcatgggaaattccccctaacggtcagggagtcgcggcgcttgcagccctcaacatccttggcaatctagaatttaccgcccgtgaaacccccgataccttccataggcaatgggaagccatgaaactggcttttagcgatgtgctggctcatgttacggattcccggtttatgaaagaagattaccgcgaatggctcaagcctgaatacggaaaaaagagggcttccgaaatcggagaaagagcctgcatacccgagcctttacatcaaccaaaagaaggcacggtttatcttgccactgctgacggcgacggaaacatggtttcgtacatacaaagcaactacatgggctttggcagcggcgttgtaattcgcggaacaggtattgcccttcaaaatcgcggtgcagacttttctcttgattcccgtgcgcctaacgcgctggctccgggtaaaaagagctaccacactatcatccccggttttcttaccaaagacgggaaagccgttggtccttttggggtcatgggtgggtatatgcagccccagggtcatgtccaggtgataaccaacatgctggattttggccttaacccccaacaggccctggatgccccacgctggcagtggatcgagggtcggaaaatccatgtggaaccgggctttaattccgaaattgtccatgcccttgcaaaccggggcacgaggtaa

SEQ ID NO: 46770 - protein, 329 aa, Unknown
  Obtained from environmental sample
  DOMAIN (36)...(329): Gamma-glutamyltranspeptidase
  misc_feature (1)..(329): Xaa is any amino acid
MNFDPNFVPYPSTRYPVYAREGMVATSSPQASLAGLEALRQGGNAIDAAVAAAAAITVTEPASNGIGSDAFAIVWAGGKLYGLNASGKAPANISWEIPPNGQGVAALAALNILGNLEFTARETPDTFHRQWEAMKLAFSDVLAHVTDSRFMKEDYREWLKPEYGKKRASEIGERACIPEPLHQPKEGTVYLATADGDGNMVSYIQSNYMGFGSGVVIRGTGIALQNRGADFSLDSRAPNALAPGKKSYHTIIPGFLTKDGKAVGPFGVMGGYMQPQGHVQVITNMLDFGLNPQQALDAPRWQWIEGRKIHVEPGFNSEIVHALANRGTR

SEQ ID NO: 46771 - DNA, 1065 bp, Unknown
  Obtained from environmental sample
  misc_feature (1)..(1065): n is a, c, g, or t
atggaaaacattgaccgctcaattggccagcggtatttccgggagttagcggtgaaaaaaagtatttccagtgtgattgcaactattattattacaggcttgattttaggcttaataggccttggaactttcactgttattaaaaggattcggcctgatttggcggcatccattgtggcgcgaattcccggcggggtagtgcaagcactcgtcgggaacgcgctaggcggacaaaggcaggccaggggggtgcaagtagtcggcggaaaccagcggaacgcttcagtggtgcgggtaacgccggtggtactgagcacaatagaaaacagcgtggtaataaacggcgacgtgctggctgtaaatcaggtttccattttccccaccgttgccggaaaggtaacaagaacaaattaccaggttggagacgctattaaacagggagcggtagttgctatggttgatccctcgcgtcccggtcaggtttactcggaaagccccgtggtgagtacaatcggcgggactgtattgcagtcgccggtacacaaaggagacaccgtttcaacccagaccgctgtattggttgtgggcgatctttcctctctgatggtggagacttttgtgccggaaagattcagcggcgcagcccagcgagggcttaaagcccagctttctctcgccgcctttcccggtgaaacttttgaagctgccgtgcaggaagtcagtcctgtgcttgatccctcgagcagaaccgtacggatacgccttggcttcacaggtcagatggatgccagaaataaagcgggaatgtacgcgacggtgagccttgttacgaattcccgccggaatgtgccggtgattccacgtgtggcggttatcaatacttacgggtcatggattgtgtttaccgtggatgacagaaacatcgcaaagcgcgtggtagtttcacttgggcttgaaaacgagaactacgtcgaagttttggacgggcttgaagtaggggataaagtagtcagcgccggccagaatttcctgaccgatggcgatcctgtccgggtagtggaatga

SEQ ID NO: 46772 - protein, 354 aa, Unknown
  Obtained from environmental sample
  misc_feature (1)..(354): Xaa is any amino acid
MENIDRSIGQRYFRELAVKKSISSVIATIIITGLILGLIGLGTFTVIKRIRPDLAASIVARIPGGVVQALVGNALGGQRQARGVQVVGGNQRNASVVRVTPVVLSTIENSVVINGDVLAVNQVSIFPTVAGKVTRTNYQVGDAIKQGAVVAMVDPSRPGQVYSESPVVSTIGGTVLQSPVHKGDTVSTQTAVLVVGDLSSLMVETFVPERFSGAAQRGLKAQLSLAAFPGETFEAAVQEVSPVLDPSSRTVRIRLGFTGQMDARNKAGMYATVSLVTNSRRNVPVIPRVAVINTYGSWIVFTVDDRNIAKRVVVSLGLENENYVEVLDGLEVGDKVVSAGQNFLTDGDPVRVVE

SEQ ID NO: 46773 - DNA, 1398 bp, Unknown
  Obtained from environmental sample
  misc_feature (1)..(1398): n is a, c, g, or t
atgactatttccgaatattcggttaagcacccggtaacaataattatgatctttgccctggttataggtatggctattaccatgcttcccaccctggcggtagatcttttcccatctgttcaaaatccggttctttcggtctcggtgggttttcctggagcgggacctacggacgttgaaaagaacgtaacagaacgccttgagagggcgctggccggttcacggaatcttgtcaatatgacaagcagttcacaatttgaaagttgttttgtcaatcttcaattcgcctacggtacgaacatggacaaggctgcggctgacacccaaaccctcgtaagccgtctggcaaattccctgcccgacggagcgggaactccggttgtaaggcgttttgattcgtccgcttcgcccatcatgcgcctttcggtcaggggcaactatcctccggatcagttaaggattttcgcggaagatgaaattcaatcgcaaatagaacgtattgaaggggttgccctcgctgaagtgacgggcggtactacgcagatagtcagggttgcggtgtcgctgaaccgcctggcggcttttaaccttaccatgtctgatgtaagcaacgcccttaggggtcagaatatacttgccggtggtgggaacctcctgagaggaaccagggaataccagatcatgactcaggaggagctggtcagcctgaatcagataaagcggcttgtggttaaaacaatcaacatgggcgctataggtcccagtcagccaaaccgctcccatgtggtcaggctggaggacatcgccgacgtaagcctcagttacaacgaaaatgccgcccgtgtttacaataacgggcagagcggagtctacatccagattacaggcgaggctaacagtaaccaggtgcagctatccggtcgtgtaagagcggctttagccggaattaacaataaactgccacagggtattactctggaagtgttgtcagataataccaccatgatcacggcaactttggatcaggtatataagaacgctattcagggggcgtttttagccatgctggttctttttgtttttcttcggaatataaagggaaccctgattatcggccttgccattcccatttccattctgcttactttaatgtgcatggccgtttttggttttaccctgaacctcctgactttgaccggtcttgtcatgggtttgggcatgaccgtggatggctccatagtcatacttgaaaatatccataactaccgcctgcgcggcgcaaagccggaaattgccgcgatacttggaagcagggaaatgttaagggcgatcattgcttcatcggcaacaactctttgcgtgtttatttcccctaatgatttacaagaaccagcttga

SEQ ID NO: 46774 - protein, 465 aa, Unknown
  Obtained from environmental sample
  DOMAIN (3)...(465): AcrB/AcrD/AcrF family
  misc_feature (1)..(465): Xaa is any amino acid
MTISEYSVKHPVTIIMIFALVIGMAITMLPTLAVDLFPSVQNPVLSVSVGFPGAGPTDVEKNVTERLERALAGSRNLVNMTSSSQFESCFVNLQFAYGTNMDKAAADTQTLVSRLANSLPDGAGTPVVRRFDSSASPIMRLSVRGNYPPDQLRIFAEDEIQSQIERIEGVALAEVTGGTTQIVRVAVSLNRLAAFNLTMSDVSNALRGQNILAGGGNLLRGTREYQIMTQEELVSLNQIKRLVVKTINMGAIGPSQPNRSHVVRLEDIADVSLSYNENAARVYNNGQSGVYIQITGEANSNQVQLSGRVRAALAGINNKLPQGITLEVLSDNTTMITATLDQVYKNAIQGAFLAMLVLFVFLRNIKGTLIIGLAIPISILLTLMCMAVFGFTLNLLTLTGLVMGLGMTVDGSIVILENIHNYRLRGAKPEIAAILGSREMLRAIIASSATTLCVFISPNDLQEPA

SEQ ID NO: 46775 - DNA, 1170 bp, Unknown
  Obtained from environmental sample
  misc_feature (1)..(1170): n is a, c, g, or t
ttgcggcgggaagaaggtgatcctcatactcaatcccgaaaaacttttggaaggcgcgcaatgattaacactcttattgttgacgacagcgccctggcgcggagtattctccgcgattttcttgagggcgatgaaaatttcaacattatcggcgaagccgtagacggggaagacggcgttcagaaaatactctcccttaatcccgacctggtaacgctggatctcgaaatgcccaaaatgaacgggcttgaggtgatcgaagcggtaatgaaaaaaaccgttgttcccattgtggtaattaccagccatgacacggcgaaaaacgcctacgaggctaccgttaagggcgccctggaattttatcccaaagacacgttctccgcgtccttaacccccgaaaaacaacagcagatctatgaaaccctgaaacgtataagcggagtcaaggcggcgtggaaaaaaaacccttcgaccccttcgaccctttcgacaagctcaggggccgaaggggcgttccctgagcctgtcatttcgacgggctcaatgaccggaaataattcgggcgctgagcctgtcgaagcgcgcgatataaaaaaacgaaagatagacgcggtagtcctggcgtcgtccacaggcggacccaaggcgttgtcaagatttttttcgcttttgcccggcaattttccggcgcccataataatagtccagcataattcttcgggctttgacaaaagtttcgcccaatggcttgacgcttacacggctttgagagtgaaacttgccgaggaaggggaaaccccgaagcccggcatcgtgtatatcgcccaaaccgacaaacatcttgagcttcgcataacggacgggcaaatgattctgcgctataacgacgacgaacctgaaaacaaccagaaacccgcggcggacgttctgttcaggacggcggcggaagctcttaaagaagcgcttgtttccgtggtgcttacgggcatgggcagcgacggcggggccgggacgaggatggttaagaacatggggggaattaccattgcccaggatgaggcgtcttcccttatctacggcatgccgaaagccgcggcggaaaccggctgcctggacatggcgctgcccctggacatgatacccgctgaactggcgaggctggcggaatga

SEQ ID NO: 46776 - protein, 389 aa, Unknown
  Obtained from environmental sample
  DOMAIN (22)...(143): Response regulator receiver domain
  misc_feature (1)..(389): Xaa is any amino acid
MRREEGDPHTQSRKTFGRRAMINTLIVDDSALARSILRDFLEGDENFNIIGEAVDGEDGVQKILSLNPDLVTLDLEMPKMNGLEVIEAVMKKTVVPIVVITSHDTAKNAYEATVKGALEFYPKDTFSASLTPEKQQQIYETLKRISGVKAAWKKNPSTPSTLSTSSGAEGAFPEPVISTGSMTGNNSGAEPVEARDIKKRKIDAVVLASSTGGPKALSRFFSLLPGNFPAPIIIVQHNSSGFDKSFAQWLDAYTALRVKLAEEGETPKPGIVYIAQTDKHLELRITDGQMILRYNDDEPENNQKPAADVLFRTAAEALKEALVSVVLTGMGSDGGAGTRMVKNMGGITIAQDEASSLIYGMPKAAAETGCLDMALPLDMIPAELARLAE

SEQ ID NO: 46777 - DNA, 435 bp, Unknown
  Obtained from environmental sample
  misc_feature (1)..(435): n is a, c, g, or t
atggctgaagacacaacaatcgagaaattcctgatcttcacgatacaggaaaaatggtacgccctgccggcgaagacaataagcgaagttacggtcctggaagaagtctttcccctgcccctggcgccattgtatgtaaagggcattatcaaccgttattccataccttacgcgctcatagatataaaattcctccttattaatgatagttctaacgcccggaaaatgatcgtctttaaggaagaaatagacaaactcgccttcctcattgacgatgtggcggatattgcggatatacccaccgggcagctgatgaaaatagaacaggaagacacggccttaataagcgctttctttgaatggaaaggcagccatatcctgtgccttgacatcggagaaattctcaacctgattagaaaagactttgaacagtga

SEQ ID NO: 46778 - protein, 144 aa, Unknown
  Obtained from environmental sample
  DOMAIN (9)...(139): CheW-like domain
  misc_feature (1)..(144): Xaa is any amino acid
MAEDTTIEKFLIFTIQEKWYALPAKTISEVTVLEEVFPLPLAPLYVKGIINRYSIPYALIDIKFLLINDSSNARKMIVFKEEIDKLAFLIDDVADIADIPTGQLMKIEQEDTALISAFFEWKGSHILCLDIGEILNLIRKDFEQ

SEQ ID NO: 46779 - DNA, 972 bp, Unknown
  Obtained from environmental sample
  misc_feature (1)..(972): n is a, c, g, or t
ttgtcacgggagagcctacgcgttgacaaagcgcgtgataaattttatgagttcagaattgaaaaacttccggtagtggacggggaaagaaaactgaccggtcttataacggtaacggatatggaaaaacatgaaaatttcccaaatgcggcaactgataaatcaggcaagctcattgtaggcgcggcaatttctcctcaggattttaacgcgcgccttccgcttttgataaaagcaaaggttgattttgtcgttgttgataccgcgcacggcgattcaaaaaatgtaatggaagcgatacgtcaaattaaaaaagaatacaatattcccatcattggcggaaatgtagcgactaaagacggaacaaaaaaattaatagcatcaggggcggacgcagtaaaggtaggcattgggccgggatcaatctgcacgacgcgggttgtcgcgggaataggcgttccgcagtttacggcggttttggattgcgccgaagaagcgtcaaaaacaaaaactccgataatcgcggacggcggcattaaattttcaggggatattacaaaagcgataggcgcgggagcgggtgtcgtgatgattggtaaccttttcgccgggttaaaggaagctcccggaaacgagattctttttgacggtagaatttacaaagagtaccgtgggatgggaagcatgggggcgatagcggacggctctggagaccgttatcaacttggcaaggatgaagaacccgtacccgaggggattgaagggcgcgtcccatacaagggggagcttcgcacttacatgaaccagcttatcgcggggttacgaaaaggcatgggttactgcggatgtaaaagtatcgcggaacttaatgggtataaaaagtttgtaaaaattacagcggcgggcttaagggaaagccatccgcatgacattacaataacgcaggaagcgccaaattatacgcgatcttga

SEQ ID NO: 46780 - protein, 323 aa, Unknown
  Obtained from environmental sample
  DOMAIN (14)...(309): IMP dehydrogenase / GMP reductase domain
  misc_feature (1)..(323): Xaa is any amino acid
MSRESLRVDKARDKFYEFRIEKLPVVDGERKLTGLITVTDMEKHENFPNAATDKSGKLIVGAAISPQDFNARLPLLIKAKVDFVVVDTAHGDSKNVMEAIRQIKKEYNIPIIGGNVATKDGTKKLIASGADAVKVGIGPGSICTTRVVAGIGVPQFTAVLDCAEEASKTKTPIIADGGIKFSGDITKAIGAGAGVVMIGNLFAGLKEAPGNEILFDGRIYKEYRGMGSMGAIADGSGDRYQLGKDEEPVPEGIEGRVPYKGELRTYMNQLIAGLRKGMGYCGCKSIAELNGYKKFVKITAAGLRESHPHDITITQEAPNYTRS

SEQ ID NO: 46781 - DNA, 948 bp, Unknown
  Obtained from environmental sample
  misc_feature (1)..(948): n is a, c, g, or t
atggcaacaactgaattaaacgcgctgagtaaagcgcaagcgtatcaactggcggacattaccaaaaccccgccgcaattcggcgcgattacaccgcgttggcttacgcgttttttggaattcaagggattggacgccggtatttaccgcgtaaacaaagtagtcgaaggagaaacgccgcttgatattctctgctcatcggaaaaaaagggaccggaacttcccgaaggttatgtacagtatcaaccaaagcccagagaatatactctcaactcaatttctacaattatcaacgtagataccgccgtggaagatgtgttttcttctccttacgatcagacaaaagaacaattacatttggcgattgaaagtttgcgagagagacaggaaagccaaatcatcaacaatgatgattacggcttgttaaaaaatatttccgacaaccagcgcataagacccggaaaacaaagcgggttccccatgcccgacgatctggacgaattactctcaaaagtgtggaaagaaccggcgttctttttggcccacccgcgggctgttgccgcttttcagcgtgaatgtacacgcaggggcgttccccccgctaccacgtcgctttttggcggcacatttatactgtggcgcggcattccgatagtgcctacggagaaactgtttgtggacggcctcaaaaaccccaagagcaagggcggcaaaaccaatattcttttggtgcgtaccggagaagcgaaacgaggtgttatcggcctgtaccagacaggtttgcagaacgagcagggcagggggctttccgtgcgtttcaggggagtggacaacaaagggcttggatcctatctcctgtcgctgtattgctcagccgcaattctttcagacgacgccatagccgtgcttgaggatgtggaagtgggtaattactatgattactcctaa

SEQ ID NO: 46782 - protein, 315 aa, Unknown
  Obtained from environmental sample
  misc_feature (1)..(315): Xaa is any amino acid
MATTELNALSKAQAYQLADITKTPPQFGAITPRWLTRFLEFKGLDAGIYRVNKVVEGETPLDILCSSEKKGPELPEGYVQYQPKPREYTLNSISTIINVDTAVEDVFSSPYDQTKEQLHLAIESLRERQESQIINNDDYGLLKNISDNQRIRPGKQSGFPMPDDLDELLSKVWKEPAFFLAHPRAVAAFQRECTRRGVPPATTSLFGGTFILWRGIPIVPTEKLFVDGLKNPKSKGGKTNILLVRTGEAKRGVIGLYQTGLQNEQGRGLSVRFRGVDNKGLGSYLLSLYCSAAILSDDAIAVLEDVEVGNYYDYS

SEQ ID NO: 46783 - DNA, 522 bp, Unknown
  Obtained from environmental sample
  misc_feature (1)..(522): n is a, c, g, or t
ttgaggatgtggaagtgggtaattactatgattactcctaatgattacggtctgcctgatccaaaggaacttgaacaatgggcgctaccctatttccccgaatttcagggaaacagggctgacgacgcgcaagccgcatattctcccgttgtcgcgccgtatgcaagcgcgcctgtcggcaccctatccgaaggtggttataaaggttctcctttggggacaggcgggtttaacgtaaaccgtatccgccaggattttcccatcctgagcgaaaaggtcgcgggcggcaatccgcttgtctggcttgacaacggcgccacaacgcaaaaacccaacgcggtggtagaccgtatttcgtatttttaccggcacgaaaaatcaaacgtcccaccggggggcgcacgacttggccgcccgttcccacgacgcttacgaagcggcgcgggaaacaatagcgaaatttttaggcgctccgtcaaaagacaatatcgtttttgtgcgcggaacaacggagggaattaa

SEQ ID NO: 46784 - protein, 173 aa, Unknown
  Obtained from environmental sample
  misc_feature (1)..(173): Xaa is any amino acid
MRMWKWVITMITPNDYGLPDPKELEQWALPYFPEFQGNRADDAQAAYSPVVAPYASAPVGTLSEGGYKGSPLGTGGFNVNRIRQDFPILSEKVAGGNPLVWLDNGATTQKPNAVVDRISYFYRHEKSNVPPGGARLGRPFPRRLRSGAGNNSEIFRRSVKRQYRFCARNNGGN

SEQ ID NO: 46785 - DNA, 759 bp, Unknown
  Obtained from environmental sample
  misc_feature (1)..(759): n is a, c, g, or t
atgagcgaagctggagtttcttctgttcttactcaatcaaatgaaaaaaccggaatttgttttgcgtgtaatctgggagataaaatcaggttcgcggcgtatcccggcgcagccctcgaactgaccgaagccgatatcaaagatgaattgatagacaataccgaagctgttgtattggacggatacattctggaccgccgatctcttgtgcttaatattttgatgagagcaagccataagggaatacctgtcgcactggatgtagcttcgattatgcaggtgaaaagcaaggctgaagaaatactcacatacagccgcagttttccgttgtttgtttttatgaatgcggacgaggcaattactttttttaacactatcagaaaagccagggacgaagattttccgccaacagaaaaagaaaaggaagaaatgattctgcgggatgtctgccctatgctgaaaatcattacggacggcgagatatatccggttattgtcgtaaaactgggaggccggggcgcaatggttattgcggggggcaatgtctaccgtgaagaaacctttacggttattccgcatgacccaatcggagcgggagacgctttctgcgccgctttcatttccgcatggatacggggcaaatccctttctgagtgcgccgctctcggcaacaaggtagcgagagaaatcctgcaagtgttaggtacgcatattaaaagcgggaaacttaaatctttcgcaaaagcgctcaaaaattaa

SEQ ID NO: 46786 - protein, 252 aa, Unknown
  Obtained from environmental sample
  misc_feature (1)..(252): Xaa is any amino acid
MSEAGVSSVLTQSNEKTGICFACNLGDKIRFAAYPGAALELTEADIKDELIDNTEAVVLDGYILDRRSLVLNILMRASHKGIPVALDVASIMQVKSKAEEILTYSRSFPLFVFMNADEAITFFNTIRKARDEDFPPTEKEKEEMILRDVCPMLKIITDGEIYPVIVVKLGGRGAMVIAGGNVYREETFTVIPHDPIGAGDAFCAAFISAWIRGKSLSECAALGNKVAREILQVLGTHIKSGKLKSFAKALKN

SEQ ID NO: 46787 - DNA, 405 bp, Unknown
  Obtained from environmental sample
  misc_feature (1)..(405): n is a, c, g, or t
atgaaaaatattatcaaatttagaattacaggttttcttacaatgctggcggtaattgccgctttcgcagcggcggcaatgctgttgtggaacgctcttatgccgcagattttcgccatgcctgcgctgacttactggcaaacggtcggattaatgctgttggcgaggatacttttcggcggactgatacatgacatggcgcacggcggacgcaggggaaggggagacgggtatatgtttcatcacggaaacaaactccgcgaaaaatggatgaacatgagcgccgaagaacgcaaagaattcatggaaaaggaaaaagattttttcaagtttcataaagactattcgcgctttaacggtttcttcggcggcggcgaagacaaaaaggacgacgggaatgagtaa

SEQ ID NO: 46788 - protein, 134 aa, Unknown
  Obtained from environmental sample
  SIGNAL (1)...(25)
  misc_feature (1)..(134): Xaa is any amino acid
MKNIIKFRITGFLTMLAVIAAFAAAAMLLWNALMPQIFAMPALTYWQTVGLMLLARILFGGLIHDMAHGGRRGRGDGYMFHHGNKLREKWMNMSAEERKEFMEKEKDFFKFHKDYSRFNGFFGGGEDKKDDGNE

SEQ ID NO: 46789 - DNA, 726 bp, Unknown
  Obtained from environmental sample
  misc_feature (1)..(726): n is a, c, g, or t
atggaagcgcattcgggtttgtccggtttaataattgaaaatcttgaaattgagaaagaagacggtttgcacagttatgacggaatgtggtcgtcaagtttaactgactccacaagcaagggaaagccggatattgaagcggttgatcttactacacgtttgcacgatttaaccaatattctggaatgtacgacaaaaccgataatttttgacggcgacacaggcggtcagcatatttccttcacggtaaaaactcttgagcgaaacggtatatccgcagtaattatcgaagataaaaccggtcttaaaagaaattctctctttggaaccgacgttaatcaagaattatgccccattcccgaattctgcgacaaaattaaagccggtaaaaaggcgcaggttacaaaagaatttatgattatcgcgcgtcttgaaagtttgattgccggtttccccgtctctcacgcaatggaaagagcgcatgcttttgtcgacgcaggcgctgacggcgttatgatacatagcaaagaaaaatcaggcgacgacattaaagaattttgttcgctcttccgcgccgactatcctcacgtgccgattgttcttgttcctacgacgtataacaaatttacagagaaagaacttgcctcttggggcgcgaatattattatctatgcaaaccatatgctccgctccgcgtatcccgcaatggtcaataccgcaagatga

SEQ ID NO: 46790 - protein, 241 aa, Unknown
  Obtained from environmental sample
  misc_feature (1)..(241): Xaa is any amino acid
MEAHSGLSGLIIENLEIEKEDGLHSYDGMWSSSLTDSTSKGKPDIEAVDLTTRLHDLTNILECTTKPIIFDGDTGGQHISFTVKTLERNGISAVIIEDKTGLKRNSLFGTDVNQELCPIPEFCDKIKAGKKAQVTKEFMIIARLESLIAGFPVSHAMERAHAFVDAGADGVMIHSKEKSGDDIKEFCSLFRADYPHVPIVLVPTTYNKFTEKELASWGANIIIYANHMLRSAYPAMVNTAR

SEQ ID NO: 46791 - DNA, 696 bp, Unknown
  Obtained from environmental sample
  misc_feature (1)..(696): n is a, c, g, or t
ttgattttaagaattaacaggcggataaagaccgccaaggaaacaatttattacatagaagattgttacgggcaaaggtatatcggctgcggcatggacggcaagcacataacgataaaaggaacgccgggaaacgcgcttggcgcttatcttgacggcggaattattgaagtgcacggcaacgcgcaggacgcggtcggcgataccatgaacgacgggaaaataatcattcacggcaacgccggagacgcgcttggttacgccatgaggggcggctgtatttttgtaaagggagatgccggatacagaacgggcatacacatgaaggaatacagggaaaaaaaaccggtaatagtcatcggcggcaaagcgggcagttttttgggcgaatatcttgcgggcggactgattgtggtgcttggcatagattcacaggacgttccggtttggtattttaccggaaccggaatgcacggcggaaaaatttttatcaggacggataaggaactttcggggctgccggaacaggttaccgagaaagttgcggacgaaagtgaacttcaggaaattgaaccttatgtttgtgagtttgcggaccttttcggcatggacgccgggaagcttttgaaagaccggtattatgtgttaaaacccaatgcgaaaaatccgtacaaacaactctataccgcaaattaa

SEQ ID NO: 46792 - protein, 231 aa, Unknown
  Obtained from environmental sample
  DOMAIN (5)...(203): GXGXG motif
  misc_feature (1)..(231): Xaa is any amino acid
MILRINRRIKTAKETIYYIEDCYGQRYIGCGMDGKHITIKGTPGNALGAYLDGGIIEVHGNAQDAVGDTMNDGKIIIHGNAGDALGYAMRGGCIFVKGDAGYRTGIHMKEYREKKPVIVIGGKAGSFLGEYLAGGLIVVLGIDSQDVPVWYFTGTGMHGGKIFIRTDKELSGLPEQVTEKVADESELQEIEPYVCEFADLFGMDAGKLLKDRYYVLKPNAKNPYKQLYTAN

SEQ ID NO: 46793 - DNA, 570 bp, Unknown
  Obtained from environmental sample
  misc_feature (1)..(570): n is a, c, g, or t
atggaaagcgctcttgttgtttcaaattcggaaaaagatattgctttttataccgctgttttgaacgcggcatccattaatcaaattacatgtttaaaatcatgcgacagcgcccgcggtctcatccctgcacaggatttcgatttagtaattgttgacgcgcctcttcgcgatgaatccggcgaaagtttttcccgtcatgtcgcttccaaaggcgtatcgcaggcgctgctccttgtaaagagtgaattttttgattcggtatccgctgcctgtgaggaggacggagttctggtaatttcaaaacctgtagacaaagccgttttctggtcagcgctgttacttgcaaaatcggttcaaaacagggtgaggcgtatacaggctgaaaacacgcagcttaaacaaaaaattgaggacatacgcattattgaccgcgctaaatgcctgttaatctcttctatgaaaatgagtgaacaggaagctcaccggtatatagaaaaacaggcgatggatatgcgttcatcaagaagaattgtggcggaagggatattaaagagatatgaaaattga

SEQ ID NO: 46794 - protein, 189 aa, Unknown
  Obtained from environmental sample
  DOMAIN (129)...(184): ANTAR domain
  misc_feature (1)..(189): Xaa is any amino acid
MESALVVSNSEKDIAFYTAVLNAASINQITCLKSCDSARGLIPAQDFDLVIVDAPLRDESGESFSRHVASKGVSQALLLVKSEFFDSVSAACEEDGVLVISKPVDKAVFWSALLLAKSVQNRVRRIQAENTQLKQKIEDIRIIDRAKCLLISSMKMSEQEAHRYIEKQAMDMRSSRRIVAEGILKRYEN

SEQ ID NO: 46795 - DNA, 315 bp, Unknown
  Obtained from environmental sample
  misc_feature (1)..(315): n is a, c, g, or t
gtgcaggacgcgctgtgtacaacggggctggaagacacgtcagctttccctcacgctttaagcgcggcagaccgtacaaagacggttattgcctgtatccttgcgatggattgtaaaattataatctttgacgaaatagatgtcggaatggattacagagaatgccgcaaaatcatgaatttggcaaaggagcttcattccaatggctatacgattatttttgttacgcataacatatctctggtatgtgaatacgcgcaaaggttgataaaaatggaaaaaaacggaatagtaagtgatatgaggcgtgtttaa

SEQ ID NO: 46796 - protein, 104 aa, Unknown
  Obtained from environmental sample
  DOMAIN (1)...(96): ABC transporter
  misc_feature (1)..(104): Xaa is any amino acid
MQDALCTTGLEDTSAFPHALSAADRTKTVIACILAMDCKIIIFDEIDVGMDYRECRKIMNLAKELHSNGYTIIFVTHNISLVCEYAQRLIKMEKNGIVSDMRRV

SEQ ID NO: 46797 - DNA, 639 bp, Unknown
  Obtained from environmental sample
  misc_feature (1)..(639): n is a, c, g, or t
atggggctgtgccgccttgtaaatgactatgtaattgaaataacaaagcgttatcccggcaggcttaccggttttatttcagtttcacctaacgcaaagggagttgaaaaggaaatagaccggtgtttttccgcaggtcttaggggagtcggcgaattgtatcctgacgggcagggtttcaatattgaaaatgaaaaagaaacccgcgcttttacaggcgcttgtattgagcgcaatataccgttgatcctccatgttaacgaacctgtcgggcactattatatcgggaaaaacgatatcccgctgaaaaaaatagagcggtttgtcaataacagccggaatcttagaataattcttgcccactggggcggcggtcttttattttacgaaaccatgaaagaaataaaggaaaaattccgcgatgtgtactatgacaccgccgctacgccgtttctctacgattcgcggatataccgcgccgctgaagcgctcggtctttgtacaaaaattctttttggcagcgatttcccccttctgccccctacaaactatctgcccgctcttgaggagagcggcctttcccccgatgataaacagctcatactcggcggaaatgcacagaaacttttaaagatttaa

SEQ ID NO: 46798 - protein, 212 aa, Unknown
  Obtained from environmental sample
  DOMAIN (2)...(212): Amidohydrolase
  misc_feature (1)..(212): Xaa is any amino acid
MGLCRLVNDYVIEITKRYPGRLTGFISVSPNAKGVEKEIDRCFSAGLRGVGELYPDGQGFNIENEKETRAFTGACIERNIPLILHVNEPVGHYYIGKNDIPLKKIERFVNNSRNLRIILAHWGGGLLFYETMKEIKEKFRDVYYDTAATPFLYDSRIYRAAEALGLCTKILFGSDFPLLPPTNYLPALEESGLSPDDKQLILGGNAQKLLKI

SEQ ID NO: 46799 - DNA, 861 bp, Unknown
  Obtained from environmental sample
  misc_feature (1)..(861): n is a, c, g, or t
gtgacagtattcgcgcagaatataaccgattttgaatttaaccctgagggtggaattattacaggctacataggtttcgctcgagatgttgtcatccctgagagaatcgacggtattacggtaacttctattggtaattccgtgtttagggacaaaaatttaaccagcgtatccattccggacaatattaagaatatcggccccaatgcgtttaccggcaacaagctggaaaaagttgtaattggcaatgaagttgatatgatgacatcggcgtttccgcccgattttatcaacaaataccttgatgagccgcggagggcaggcgggacttattcgttcaatgacgataattgggactacaatcccgcgggtataaggtatctgacgccggaaaatgtcgtggccgatacttcacagcaggcgcagaatgtgagcccgattaatattgtcatccacaattatgtggggaaacagcctgaacaatttatggacggaaccatgccgcaggcggattattacgccccttcttccactccttcttcttccacgccctcttcctcttcttcaccctccgccgcccagcagccttccagacagtcggtaggcaacgcgacagtaatgcccggcctgccggatcctaacaccaataaaaggtaccgcctccaggttggcgcgtttaacagccagaatgccgcagagcatacgttcaggagccttcaggacgcgggctttaatccggtctatgaacattcgcagaatttttacagggtcgttatcgctgatgttcccgcggccagtgtagccagcacgatacagcgccttgtgtcaatcgggattaatcaggtttgggttagggaataa

SEQ ID NO: 46800 - protein, 286 aa, Unknown
  Obtained from environmental sample
  DOMAIN (215)...(286): Sporulation related domain
  misc_feature (1)..(286): Xaa is any amino acid
MTVFAQNITDFEFNPEGGIITGYIGFARDVVIPERIDGITVTSIGNSVFRDKNLTSVSIPDNIKNIGPNAFTGNKLEKVVIGNEVDMMTSAFPPDFINKYLDEPRRAGGTYSFNDDNWDYNPAGIRYLTPENVVADTSQQAQNVSPINIVIHNYVGKQPEQFMDGTMPQADYYAPSSTPSSSTPSSSSSPSAAQQPSRQSVGNATVMPGLPDPNTNKRYRLQVGAFNSQNAAEHTFRSLQDAGFNPVYEHSQNFYRVVIADVPAASVASTIQRLVSIGINQVWVRE

SEQ ID NO: 46801 - DNA, 810 bp, Unknown
  Obtained from environmental sample
  misc_feature (1)..(810): n is a, c, g, or t
atggataacgccaaacaggccgaatacactgaaaagacagtctctttaaactcgtctgtcgagcagctgctcaaggacgcccaggatgtcgaggcggctctgaaagagggaaccatacctgagcctgagtttatgaaaataaaactgtcaatttccatgcttaccctcgtgtcgaattatctggcaatgaaccagatttacatgttgatatttaataagcaaaatgaaaatctgctgaatgaagcgagaaaatcaattcacagatgccttgctttccttgaagaggttgtcaccaacattattgacgcgccgttttccgattacgcggaggggcttgcgaagattgaggctgtcagccccctccagcgctattcccttgtcgagaaaatcggccagcagttaaataacctgaaagaggcttacggaaaaaattcaaaatgggcgaacactattttggattttgaagggcgttatgccattgtcgcgaaaaatttgatcaatctgcgcgattattttgtcaacagcgattttgaatcgccgcattatgaacctacgatccgccacataagaaaggtcagggagcttctggagcagtccgcggacgggtaccggaagaaatacgagctttccacaaaagccattgatgattttcaaaaaggcataaattacctttcagctttaaaacggctggatatttttaccggggatcaggagtcggctgtgaccaataaaaagaaaatcgaaacatggacggccaagatgaaggcggacgcggaaaagcaaaagaatgagcaggcggccagaaagtaa

SEQ ID NO: 46802 - protein, 269 aa, Unknown
  Obtained from environmental sample
  misc_feature (1)..(269): Xaa is any amino acid
MDNAKQAEYTEKTVSLNSSVEQLLKDAQDVEAALKEGTIPEPEFMKIKLSISMLTLVSNYLAMNQIYMLIFNKQNENLLNEARKSIHRCLAFLEEVVTNIIDAPFSDYAEGLAKIEAVSPLQRYSLVEKIGQQLNNLKEAYGKNSKWANTILDFEGRYAIVAKNLINLRDYFVNSDFESPHYEPTIRHIRKVRELLEQSADGYRKKYELSTKAIDDFQKGINYLSALKRLDIFTGDQESAVTNKKKIETWTAKMKADAEKQKNEQAARK

SEQ ID NO: 46803 - DNA, 657 bp, Unknown
  Obtained from environmental sample
  misc_feature (1)..(657): n is a, c, g, or t
atgagggcgctggaaaaagatgtcgcgtccagagccgctgttctgcgccaaaaaaggacggctgccgccggaaccctgggacagcggataaccggaatacttaagcggcttggaatgcccaacgcccggttttccccctctataaccgcaaaaacccagcagggccaggacggccgatcgaccgttgtctgcggcccctggggagcggaagaagtcgagtttcttatttccgcgaatacgggcgagccgcttaaagacctttccaggattgcgtcgggcggggaactgtcacgggtcatgcttgcgataaaatcagtcttgtcagcgactgatagcgttgagactttgatttttgatgaaatcgacgcgggcattggcggggaagtcgcccttgccgtaggggaatatcttgaaaaaatgggggagagccggcagatattctgcgttacccacctcgcgagcatagcggtgcgcgccggcaatcattttaaggtggaaaaacggacggaagacggccgtacttttacgggagtcggccccttgagcgcggacggcaggagaagagaaatcgcaagaatgttgtccggggacggaggcggggcggctctcgcgcatgccgatgatctaattgccagatatggcaaagcgggagggtaa

SEQ ID NO: 46804 - protein, 218 aa, Unknown
  Obtained from environmental sample
  misc_feature (1)..(218): Xaa is any amino acid
MRALEKDVASRAAVLRQKRTAAAGTLGQRITGILKRLGMPNARFSPSITAKTQQGQDGRSTVVCGPWGAEEVEFLISANTGEPLKDLSRIASGGELSRVMLAIKSVLSATDSVETLIFDEIDAGIGGEVALAVGEYLEKMGESRQIFCVTHLASIAVRAGNHFKVEKRTEDGRTFTGVGPLSADGRRREIARMLSGDGGGAALAHADDLIARYGKAGG

SEQ ID NO: 46805 - DNA, 558 bp, Unknown
  Obtained from environmental sample
  misc_feature (1)..(558): n is a, c, g, or t
ttgccggcgcgcaccgctatgctcgcgaggtgggtaacgcagaatatctgccggctctcccccattttttcaagatattcccctacggcaagggcgacttccccgccaatgcccgcgtcgatttcatcaaaaatcaaagtctcaacgctatcagtcgctgacaagactgattttatcgcaagcatgacccgtgacagttccccgcccgacgcaatcctggaaaggtctttaagcggctcgcccgtattcgcggaaataagaaactcgacttcttccgctccccaggggccgcagacaacggtcgatcggccgtcctggccctgctgggtttttgcggttatagagggggaaaaccgggcgttgggcattccaagccgcttaagtattccggttatccgctgtcccagggttccggcggcagccgtccttttttggcgcagaacagcggctctggacgcgacatctttttccagcgccctcatggccgctttgaggttttcccggttctcctcaatgttggataaagcctctatctcggcttcagctgtggcgcggtaa

SEQ ID NO: 46806 - protein, 185 aa, Unknown
  Obtained from environmental sample
  misc_feature (1)..(185): Xaa is any amino acid
MPARTAMLARWVTQNICRLSPIFSRYSPTARATSPPMPASISSKIKVSTLSVADKTDFIASMTRDSSPPDAILERSLSGSPVFAEIRNSTSSAPQGPQTTVDRPSWPCWVFAVIEGENRALGIPSRLSIPVIRCPRVPAAAVLFWRRTAALDATSFSSALMAALRFSRFSSMLDKASISASAVAR

SEQ ID NO: 46807 - DNA, 1989 bp, Unknown
  Obtained from environmental sample
  misc_feature (1)..(1989): n is a, c, g, or t
atgctgtggatcaacgctcctgtctttgaaggcgggcgggcaatcggcattgtcgggacaggcatagaccttacaggatttattgactctctgtatgcggactttgacccttccatgcccttctatctgttcaataaattatcagaaataacaggagcgcgggatcattctctggtaattaacaagaaaacaataaacgattactttggggaggcgggagcttttattcttaaatcagcagagcaatccggcaaagttccgcaaacattttatcttggcaacagcgaatatgtcgtgggaagtattgaaagcctggactggcatatcaccgccattcttcccattaccgcctcggacaccctgaacagcggagtaaccatattcttcatggtaatgctggcggttatagcggtcattctcattatttcttttatatttatcagcagccttctcaaacccatgcgttacatgatacaaacgctggatcaaatagctaaaaaccgggacctcacccggcggcttaaattcaagcaccatgacgaaatcggaacagtgggtgatttttttaaccgtacttttgaagaattcagaattcttgtagggacaataaaatataaaatcaatgggcttaaccataccagttttgagctttccgacaatatgagcaaaacctcgacagccgtagagaagatttcgtctaaccttgacagcatggaaaaccttgtagtcaaacaggaaaacggcgcgttagtagcaggcgaggcggtaggggctattaaaacaaatattgacagccttaacaaaatgatagagcaacaggctgaaagcgtagataagtcttcttccgcaatagaggaaatgacagccaacattcattcggtaacacagacgcttgcggaaaacagcaagaatgtcgatgttttagtcgaagcatcggaaaatggcaaaacaggactccagaccgtcgcgcaggagatacgggaaatagcccatgattccgaagggttgctggaaataaactcggtgatgaacaatatcgcaagccagaccaacctgctttcaatgaacgccgcgattgaagcggctcatgccggagaagtcggcaaaggctttgccgtagtcgccgatgaaatccgcaaacttgccgagtcgtcaagcaagcagtcaaaaaccaccgctacaatgctaaaaaaaataaaagcgtccatagacaacattacaaaatcgtctaatgacgtattagaccgttttggcgcaatagactcaagcgtaaaaacagtttccgaacatgaacaaaatatccttaatgcgatgcaggagcaggaaatcggagggaagcaaatactggaatccataggtatattgaaagacataacccattcggtaaaaaaagggtctgatgacatggcaaaatcaggcgaaactttagtcaaggaaactgacgatttcataaaaaccagtcaggaaacggcggaaggcatgaacgagatactgataggcattaaccagataaaatcttcggtgaaccatgtaaatgaaatgagtcatgaaaacaacagtaactttgaattgttaaaacaggaaacggataaatttaatgatactgtcggtaacgaaaaacaaaaagttcttatcgtagatgacgacagtattcatctagaaatggtggaagcggtattacagagtgagtatgaaatagctaccgccaaatccggcaaagaagcgttaggtttattctatcaaggacttgttccccaattagtattattggacttaataatgccggatatggacggttggaatatttacaaaagaataaaagcaataagcggcttacacgacaccccgatagcattttttacatcttcaaacgatccaaaagacataaagcacgctcaggaaatgggcgcagttggtttcattaaaaagccatacgataaagacgacctggtacgcagagtcggacaaatcttaaaaaatgaaaagtaa

SEQ ID NO: 46808 - protein, 662 aa, Unknown
  Obtained from environmental sample
  DOMAIN (128)...(198): HAMP domain
  misc_feature (1)..(662): Xaa is any amino acid
MLWINAPVFEGGRAIGIVGTGIDLTGFIDSLYADFDPSMPFYLFNKLSEITGARDHSLVINKKTINDYFGEAGAFILKSAEQSGKVPQTFYLGNSEYVVGSIESLDWHITAILPITASDTLNSGVTIFFMVMLAVIAVILIISFIFISSLLKPMRYMIQTLDQIAKNRDLTRRLKFKHHDEIGTVGDFFNRTFEEFRILVGTIKYKINGLNHTSFELSDNMSKTSTAVEKISSNLDSMENLVVKQENGALVAGEAVGAIKTNIDSLNKMIEQQAESVDKSSSAIEEMTANIHSVTQTLAENSKNVDVLVEASENGKTGLQTVAQEIREIAHDSEGLLEINSVMNNIASQTNLLSMNAAIEAAHAGEVGKGFAVVADEIRKLAESSSKQSKTTATMLKKIKASIDNITKSSNDVLDRFGAIDSSVKTVSEHEQNILNAMQEQEIGGKQILESIGILKDITHSVKKGSDDMAKSGETLVKETDDFIKTSQETAEGMNEILIGINQIKSSVNHVNEMSHENNSNFELLKQETDKFNDTVGNEKQKVLIVDDDSIHLEMVEAVLQSEYEIATAKSGKEALGLFYQGLVPQLVLLDLIMPDMDGWNIYKRIKAISGLHDTPIAFFTSSNDPKDIKHAQEMGAVGFIKKPYDKDDLVRRVGQILKNEK

SEQ ID NO: 46809 - DNA, 1017 bp, Unknown
  Obtained from environmental sample
  misc_feature (1)..(1017): n is a, c, g, or t
atgtcgtcctccgccattgaggaaatgacagctaacattcattcggtaacgcagacgcttatagaaaacggcaaaaatgtcgctgttttaaccgaagcgtctgagaacggcaaaacgggacttcagacagtagcgcaggaaatactggaaatagcgcatgattccgaagggttgctgcaaataaactcattgatgaacaatatagcaagccagaccaacctgctttcgatgaacgcggcgattgaagcggcgcacgcaggagaagcgggcaaaggttttgccgtagtcgccgatgaaatccgcaaacttgccgagacatcgggaaaacagtcaaaaaccaccgccacgatgctgaagaaaataaaagcgtccatagacaacattaccaaatcctccgccgatgtacaggcgcgttttggagcgatagactcaagcgttaaaacagtttccgaacatgagcagaatatccgcaatgccatggaagagcaggaaataggcggaaggcagatattggaatccataggacggttaagggacataacctactcggttaaaaaaggctctgacgacatggaacaatcaggcgaaactttggttgaagaaacggatgaatttataaaaataagcaaagaaacggtagacggcatgaacgaaataatggcgggtattaatcagataaatgtttcgataaaccatgtcaacgaaatgagtattgagaacaacaataactttgaatcggtaaaacaggaaactcaaaaatttaatgttactgacgataacgaaaagaaaaaaatcctcatggtagacgacgatgaaatccatcttgaaatggtggaatcggtattacaaaccgattatgatattgtaaccgccaaatcaggcaaagaagcgcttggcttattctatncaggtcttgttcccgcattaattttattagacttaataatgccggacatggacgggtggaatacatacaccagaataaaagcaatagcggcttacacgataccccgatag

SEQ ID NO: 46810 - protein, 338 aa, Unknown
  Obtained from environmental sample
  DOMAIN (4)...(212): Methyl-accepting chemotaxis protein (MCP) signaling domain
  misc_feature (1)..(338): Xaa is any amino acid
MSSSAIEEMTANIHSVTQTLIENGKNVAVLTEASENGKTGLQTVAQEILEIAHDSEGLLQINSLMNNIASQTNLLSMNAAIEAAHAGEAGKGFAVVADEIRKLAETSGKQSKTTATMLKKIKASIDNITKSSADVQARFGAIDSSVKTVSEHEQNIRNAMEEQEIGGRQILESIGRLRDITYSVKKGSDDMEQSGETLVEETDEFIKISKETVDGMNEIMAGINQINVSINHVNEMSIENNNNFESVKQETQKFNVTDDNEKKKILMVDDDEIHLEMVESVLQTDYDIVTAKSGKEALGLFYXGLVPALILLDLIMPDMDGWNTYTRIKAIAAYTIPR

SEQ ID NO: 46811 - DNA, 417 bp, Unknown
  Obtained from environmental sample
  misc_feature (1)..(417): n is a, c, g, or t
atgtcccttaaccgtcctatggattccaatatctgccttccgcctatttcctgctcttccatggcattgcggatattctgctcatgttcggaaactgttttaacgcttgagtctatcgctccaaaacgcgcctgtacatcggcggaggatttggtaatgttgtctatggacgcttttattttcttcagcatcgtggcggtggtttttgactgttttcccgatgtctcggcaagtttgcggatttcatcggcgactacggcaaaacctttgcccgcttctcctgcgtgcgccgcttcaatcgccgcgttcatcgaaagcaggttggtctggcttgctatattgttcatcaatgagtttatttgcagcaacccttcggaatcatgcgctatttccagtatttcctgcgctactgtctga

SEQ ID NO: 46812 - protein, 138 aa, Unknown
  Obtained from environmental sample
  misc_feature (1)..(138): Xaa is any amino acid
MSLNRPMDSNICLPPISCSSMALRIFCSCSETVLTLESIAPKRACTSAEDLVMLSMDAFIFFSIVAVVFDCFPDVSASLRISSATTAKPLPASPACAASIAAFIESRLVWLAILFINEFICSNPSESCAISSISCATV

SEQ ID NO: 46813 - DNA, 711 bp, Unknown
  Obtained from environmental sample
  misc_feature (1)..(711): n is a, c, g, or t
ttgaggatatttaggataaataaaggcatggaaatagcaaagagcggtataataatttcaagcgacgcagaggcggttaatttccgtgaaatccgcatggggaatatcgcgcccaatacgctttaccgcagcagccatcccataaaagacgacaagcaggaacgggttatatccctgtacgcgtcggaagcgcggattgccgcggtaataaatttaaccgactttgattctgaaatgaaaagaaaggctttttttgccccctggtacaatcagctcctcaaaaacaacagggttattgccctgggaatggatttcggcctgaccggtgaaaactttcaaaaaaaattaaagaaaggcctgctgtttatcatcaataccgaaggcccctggcttattcattgttacgccggagtagaccgcacgggttttttcgcaattgttctggaatcccttatgggcgcgacactgggcgagattatcaacgattaccttcaatcatttaacagtatatttacttcgaatatttacggcgcggtaaacaagggggattctcttgtagtgatgcagcttttatccgctatgggcgattatatgccggtaaacgatcaaaatttgtgtacaatcgccgaaaggtatctgattaccgccattaaactttccgccgcggaaattgaactgcttaaaagaaaattatcagggaatacaaaataa

SEQ ID NO: 46814 - protein, 236 aa, Unknown
  Obtained from environmental sample
  misc_feature (1)..(236): Xaa is any amino acid
MRIFRINKGMEIAKSGIIISSDAEAVNFREIRMGNIAPNTLYRSSHPIKDDKQERVISLYASEARIAAVINLTDFDSEMKRKAFFAPWYNQLLKNNRVIALGMDFGLTGENFQKKLKKGLLFIINTEGPWLIHCYAGVDRTGFFAIVLESLMGATLGEIINDYLQSFNSIFTSNIYGAVNKGDSLVVMQLLSAMGDYMPVNDQNLCTIAERYLITAIKLSAAEIELLKRKLSGNTK

SEQ ID NO: 46815 - DNA, 1305 bp, Unknown
  Obtained from environmental sample
  misc_feature (1)..(1305): n is a, c, g, or t
atgacaaaaatcacaaagacagtataccttggaatgcggggggatattgttcatcccggaataatcaacattatccgtaagggcgcaatacttggcgaattaacagttggacttttaacagatgccgctatcgcgtcgcataaacgcctgccatatctaacatatgaacagagaaaagacgttattgaaaatgtaaagggcgtagcgcgtgtaataccgcaggaagaatggagttatgtacctaatttacgaaagttaaaacccgactatatcattcacggagacgattggaaaagcggtcctttgcaaaaagaacgcgatgaagtttttgcggtaatgaaagaacttggcggcgaagttatagaaattccttatactgcgggaattaattcatcttcgatcaatgaggcgatacgttctattggaacaacaccggacattcgattaaaaacacttcgcagactccttgagacaaaaaaaattgtaaggattatggaagctcattcaggtttgtccggtttaataatagaaaatcttgaaattgagaaagaagacggcttgcacagttttgacggaatgtggtcgtcaagtttaacagactctacaagcaagggaaaacccgatattgaagcggttgatcttactacccgtttgcaggacttaacaaatattttagaatgtacgacaaagccgataatttttgacggcgacacaggcggtcaacattttgctttcaccgtaaaaacacttgagcgaaacggagtatccgcagtcataatagaagacaaaactggtcttaaaagaaattctctttttggcaccgacgttaatcaggaattatgttccattcccgacttctgtgacaaaattaaagccggtaaacaggcgcaggttacaaaagaatttatgatcatcgcgcgtctggaaagtttaatagcgggcttccccgtctcacacgcgcttgaaagggggcgcgcttttgtcgacgtcggcgctgacggcgttatgatacatagcaaagaaaaaacaggcgatgacattaaagaattttgttcgcttttccgcgccgaatatcctcatgtaccgctggtgcttgttcctacaacgtataataaatttacagaaaaagaacttgcctcatggggcgcgaatatcattatctatgcaaaccatatgctccgttccgcgtatccggcaatgttgaacaccgcaaaaatgatcttacaaaacgagcgttctcttgaagtggattcggtttgtatgccaataaaagaaatacttgaattaattcccggcggtaaataa

SEQ ID NO: 46816 - protein, 434 aa, Unknown
  Obtained from environmental sample
  DOMAIN (9)...(137): Cytidylyltransferase
  misc_feature (1)..(434): Xaa is any amino acid
MTKITKTVYLGMRGDIVHPGIINIIRKGAILGELTVGLLTDAAIASHKRLPYLTYEQRKDVIENVKGVARVIPQEEWSYVPNLRKLKPDYIIHGDDWKSGPLQKERDEVFAVMKELGGEVIEIPYTAGINSSSINEAIRSIGTTPDIRLKTLRRLLETKKIVRIMEAHSGLSGLIIENLEIEKEDGLHSFDGMWSSSLTDSTSKGKPDIEAVDLTTRLQDLTNILECTTKPIIFDGDTGGQHFAFTVKTLERNGVSAVIIEDKTGLKRNSLFGTDVNQELCSIPDFCDKIKAGKQAQVTKEFMIIARLESLIAGFPVSHALERGRAFVDVGADGVMIHSKEKTGDDIKEFCSLFRAEYPHVPLVLVPTTYNKFTEKELASWGANIIIYANHMLRSAYPAMLNTAKMILQNERSLEVDSVCMPIKEILELIPGGK

SEQ ID NO: 46817 - DNA, 1017 bp, Unknown
  Obtained from environmental sample
  misc_feature (1)..(1017): n is a, c, g, or t
gtgggcattgaaccgcgcaccatttcgttctcctttagcgaatacggaactgtcggcgctcttgttcaggccctcggcgcggttgaaggcatggaagtcaagaacagtattcctgaaggaagcagttcacaatggctggtacgcagcgcgcaggggaatccacagttggggagcatcccctatccggtgcattatttagatccccaaagccaggaaataaaaattgaaacagtgcgcgaagccctggccagtatggggcagggcatttcggttcagaatcttgggcagcctcgggatcgccattttatgatccgccttcaggataagggaatagagaaaggagattccgccgaaggcggaacggcagccgaagcccccggcgagaggattaccaggattctggaaaactatttcggaaccggcgaggtagtggtactccgttcagattatgtcggctcgcgtttttccaaaaacctcaccgatcagtcggggattttgataggatttaccctgctgttggtattgatttacgcgtccatccggtttaagccgcaatacgccattggcgcggtactcggcattatccatgactgccttgttataatatcctttgttgtctggaccagaatggaattcaacaccaccaccatcgccgccattctcacgatactcggttattcgatcaacaacaccattgttattttcgacaggatgagggaaaaccgccgtctttaccctgatgatgtttttgtaaccatacttaaccgttccttgacggaaacgttaagcagaacaattataacaacattaacaacaatgctggcggttctttcactgttcatctttacaaccggttccatgaaggattttgccctggccctccttgtcggccttgtatcaggcgtttacacaacaaccttcattgccaccggctttgtgtatctctgggataaagaaaaaacaaaacgggccaggaagaaagccattgctcctgcggctaaagccgcgattgcctga

SEQ ID NO: 46818 - protein, 338 aa, Unknown
  Obtained from environmental sample
  DOMAIN (133)...(319): Protein export membrane protein
  misc_feature (1)..(338): Xaa is any amino acid
MGIEPRTISFSFSEYGTVGALVQALGAVEGMEVKNSIPEGSSSQWLVRSAQGNPQLGSIPYPVHYLDPQSQEIKIETVREALASMGQGISVQNLGQPRDRHFMIRLQDKGIEKGDSAEGGTAAEAPGERITRILENYFGTGEVVVLRSDYVGSRFSKNLTDQSGILIGFTLLLVLIYASIRFKPQYAIGAVLGIIHDCLVIISFVVWTRMEFNTTTIAAILTILGYSINNTIVIFDRMRENRRLYPDDVFVTILNRSLTETLSRTIITTLTTMLAVLSLFIFTTGSMKDFALALLVGLVSGVYTTTFIATGFVYLWDKEKTKRARKKAIAPAAKAAIA

SEQ ID NO: 46819 - DNA, 360 bp, Unknown
  Obtained from environmental sample
  misc_feature (1)..(360): n is a, c, g, or t
atgataataattcgagctaaagtcctgggtttctgcatgggtgttaggcgggcagttgagcttgcctgtaaccagacagatagtcccggaaaagtttatacactcggccctttgatccacaacccacaggctcttgaagatttaaaacagcggggcattgaaatactggatgaaaacaagctgccagaaaacctttccggcgctgttgtaattatccgggcccacggcataagcccccatacagaagcggaactgcgcaagctgggggcccttgttgttgacgcgacctgcccaaaagtaaaagctagccagttaaaggcagcgtctctcgcaaaacatgatacaggctcggccatctga

SEQ ID NO: 46820 - protein, 119 aa, Unknown
  Obtained from environmental sample
  DOMAIN (3)...(119): LytB protein
  misc_feature (1)..(119): Xaa is any amino acid
MIIIRAKVLGFCMGVRRAVELACNQTDSPGKVYTLGPLIHNPQALEDLKQRGIEILDENKLPENLSGAVVIIRAHGISPHTEAELRKLGALVVDATCPKVKASQLKAASLAKHDTGSAI

SEQ ID NO: 46821 - DNA, 849 bp, Unknown
  Obtained from environmental sample
  misc_feature (1)..(849): n is a, c, g, or t
gtggcagaggagatgtttgcccgtttggaacacaattgcaaagattttggcattcgcttttttggtccagataccgaagaacaaggcgttatacacatagttggtcccgaagagggagttacccagcccggaatgacaatagcctgcggagatagccacacggcaacccacggggcttttggttccatagcttttggcataggttcttcgcaagtcgcagacgtgcttgcctctcaaacgctggcgatgagccctttgaaagttcgcagaattaaatttacaggcaaacttggcaaaggtgtttttccaaaagatgccgcccttgcatacataaacaaacttggtgtaaatggcggggttggctatgcttatgaatttgctggaaatgttgttgaagaaatggatatggaaggcagaatgaccttgtgcaacctagccattgaaggcggagcgcgagttggctactgcaatcccgaccaaaaaacttttgactttttgaaagacaagccatattcacccaagggcgaggcttgggacaaagccgttgaaaactggaaaagcgttgccagcgaccccagtgcggtttatgacgatgaagttgaaattgactgcaacaaacttgcgccatttgtaacctggggcataacccctgagcaaagcgttatggtgaatgaaaaaatccccgaaggcacaggcgaagcctacgattacatgggtttcaagggtggaacgcccattgctggaattcccatagatattgcttttgtgggcagttgcacaaatggcaggttgggagacttaaaagctgccgccgaaattttgaaaggcaaaaagggaacccaaatgtga

SEQ ID NO: 46822 - protein, 282 aa, Unknown
  Obtained from environmental sample
  DOMAIN (1)...(281): Aconitase family (aconitate hydratase)
  misc_feature (1)..(282): Xaa is any amino acid
MAEEMFARLEHNCKDFGIRFFGPDTEEQGVIHIVGPEEGVTQPGMTIACGDSHTATHGAFGSIAFGIGSSQVADVLASQTLAMSPLKVRRIKFTGKLGKGVFPKDAALAYINKLGVNGGVGYAYEFAGNVVEEMDMEGRMTLCNLAIEGGARVGYCNPDQKTFDFLKDKPYSPKGEAWDKAVENWKSVASDPSAVYDDEVEIDCNKLAPFVTWGITPEQSVMVNEKIPEGTGEAYDYMGFKGGTPIAGIPIDIAFVGSCTNGRLGDLKAAAEILKGKKGTQM

SEQ ID NO: 46823 - DNA, 606 bp, Unknown
  Obtained from environmental sample
  misc_feature (1)..(606): n is a, c, g, or t
ttgccgcgggtcgggacagtgcgtcatagtcagggctttttctcggtcgccactacctgccacaactgcggcggcgagggctacataattgaaaaaccctgtaatgattgcggcggatcgggaactcagaagaagcggcaaaaaattatggttaatattcccgcaggcgtagaaaacggcaaacgtgtggtaattcccaaacagggcgacgcaggtcccaacggcggaccgccgggagacttatacgtttttataagagtgaaaccgcacgaatattttgaacgtcaagcgattgatctttattgcgccgttcctatctcgataactcaagcggcgctcggcgcggacattcacgttacgacgcttgacaacaagacaataaaagtaaaagtaccggcgggtattcaaaacggaaaaatgctccgtatccataacgagggcgtgccgatgggtaatcaaagaggcaatctctacatcaaactttttgtgcaaatccccgaaaaactttcccgcaaaggcaaagaactccttgaagaacttgccaaaattgaggggcagaacgacagccccaaacctattccgctatcacagcttggggatgtgtaa

SEQ ID NO: 46824 - protein, 201 aa, Unknown
  Obtained from environmental sample
  DOMAIN (2)...(48): DnaJ central domain (4 repeats)
  misc_feature (1)..(201): Xaa is any amino acid
MPRVGTVRHSQGFFSVATTCHNCGGEGYIIEKPCNDCGGSGTQKKRQKIMVNIPAGVENGKRVVIPKQGDAGPNGGPPGDLYVFIRVKPHEYFERQAIDLYCAVPISITQAALGADIHVTTLDNKTIKVKVPAGIQNGKMLRIHNEGVPMGNQRGNLYIKLFVQIPEKLSRKGKELLEELAKIEGQNDSPKPIPLSQLGDV

SEQ ID NO: 46825 - DNA, 330 bp, Unknown
  Obtained from environmental sample
  misc_feature (1)..(330): n is a, c, g, or t
atgataaaaggggaagggtgttttgtttatttgaataaagggcttgccggtacttgcacagggaaaaaaggagcgtatttaatcggcgaagcggcaggaatgatcagcccaagttctttggaaggaatcagctattccatggaaagttccaaaatattagcggaaataattaacaagggaattaaaaacatagggaataaatattataacaggacattagggataagattaaaactactgcttaaaatatttaaaatgccgtttatgtataacaggtttttaagactgctggtaatgaaaagcgggataaaggcgattaagaataagtga

SEQ ID NO: 46826 - protein, 109 aa, Unknown
  Obtained from environmental sample
  misc_feature (1)..(109): Xaa is any amino acid
MIKGEGCFVYLNKGLAGTCTGKKGAYLIGEAAGMISPSSLEGISYSMESSKILAEIINKGIKNIGNKYYNRTLGIRLKLLLKIFKMPFMYNRFLRLLVMKSGIKAIKNK

SEQ ID NO: 46827 - DNA, 921 bp, Unknown
  Obtained from environmental sample
  misc_feature (1)..(921): n is a, c, g, or t
atggtcgctccgccgctatgcaaatacatttcccccgatctggaaaaattcctgccgcccttaacagcttccgataaaaccgcgggaaaggtaagcaagaccgccgcttcactttacggaattaacgagggagtaatcgtttcttcaggcggcggtgacaatatgatgagcgcaatcggcacgggcgctgtccgtgacggtttcctttccatgagcctcggtacatcaggcacgcttttcggtttttcaaaaaagcccgtgattgatccgacaggcaacctcgcggcgttttgttcgtcttcaggcggctggcttccgcttctctgtaccatgaactgtactgtagcaagcgaagaattccgagggcttttgggactggacgttaaagcgtttgacgcggaagcagaaaaagcgccgataggcgctgacggaatagtgattctcccgttcttcaacggagagcgcactccgaacctgcccaatgggagagcgagcgttaacggaatcaccgcggcaaacttcaaaaaagaaaaccttgcgcgtgcagcgcttgagtcggcaatcttcggaatgagaatcggtcttgacggctttttggaactcggtttcaaaccgaaagaaatacgcctgacgggaggaggggcaaaaagtccgatctggcaaagcattgcagctaacgtcatgaacctgcctgtgcgcatccccgcaggctcggaagcggcggcaatgggaggagctatacaagctctttggtgcttgcagaaaagcgaaggtatgaaaactacgattgaaaatctggctgacgaacacgtagcgttaggcgatacggtaaaacctgacaaaaagaatgcgcaaaaatacaatgaggcttactctgtatattcacggtatcttggggctttaagtcctatctataaataa

SEQ ID NO: 46828 - protein, 306 aa, Unknown
  Obtained from environmental sample
  DOMAIN (63)...(288): FGGY family of carbohydrate kinases, C-terminal domain
  misc_feature (1)..(306): Xaa is any amino acid
MVAPPLCKYISPDLEKFLPPLTASDKTAGKVSKTAASLYGINEGVIVSSGGGDNMMSAIGTGAVRDGFLSMSLGTSGTLFGFSKKPVIDPTGNLAAFCSSSGGWLPLLCTMNCTVASEEFRGLLGLDVKAFDAEAEKAPIGADGIVILPFFNGERTPNLPNGRASVNGITAANFKKENLARAALESAIFGMRIGLDGFLELGFKPKEIRLTGGGAKSPIWQSIAANVMNLPVRIPAGSEAAAMGGAIQALWCLQKSEGMKTTIENLADEHVALGDTVKPDKKNAQKYNEAYSVYSRYLGALSPIYK

SEQ ID NO: 46829 - DNA, 393 bp, Unknown
  Obtained from environmental sample
  misc_feature (1)..(393): n is a, c, g, or t
ttggaggttaaaatggcggattatttcgttggggcaaaagaatatttccccgaaatcaagaaaatcaagtacgaggggccgaaaagcaaaaacccccttgcgttcaagtattatgatcctgaaaagacaatcggcggtaaaaagatgaaggatcatctgcgctttgcgattgcgtattggcacagtttctgcggagacggcggagacccgtttggtcccggcacgcacatcttcccgtggaatacggaagcgaaagacgcaatggacgccgccgacagaaaaatggacgccgcttttgaattcattacaaaaataggcgctgaattttacgcgtttcatgacagagacatagctccagaaggctcaagtcccgccgaaagcgaaaaaacctga

SEQ ID NO: 46830 - protein, 130 aa, Unknown
  Obtained from environmental sample
  misc_feature (1)..(130): Xaa is any amino acid
MEVKMADYFVGAKEYFPEIKKIKYEGPKSKNPLAFKYYDPEKTIGGKKMKDHLRFAIAYWHSFCGDGGDPFGPGTHIFPWNTEAKDAMDAADRKMDAAFEFITKIGAEFYAFHDRDIAPEGSSPAESEKT

SEQ ID NO: 46831 - DNA, 501 bp, Unknown
  Obtained from environmental sample
  misc_feature (1)..(501): n is a, c, g, or t
atgcgctgcgagatcgccgcgtccctgcttcacgatcctgaagttctctttcttgacgaaccgacaatcggccttgacgctgtttccaagctggcagtacggcgtataatcgcggatttgaaccgcgaacggaaaatcacggtgatactgacctctcacgacatggacgacattgaggccctcaccgaccgcatactcctcatcggcaaggggagcctgctctacgatggcgcattgggcgcgctccgttcccgctacgacagtctcaggcggctggagctgcactacgagggcgattccgcgtcgctgcccgaacctgccggaaccaggatcgtttcacaaaaggaaaagcacgtggtttacgaagtagataccggcgtcatcggcgtttcctctgccttgcgcgttttgggggagagcctcgacataagggacatgagcgcgggcagccgtcccatcgaggagcttatcgcctcgctgtaccttgaaaggaacctctga

SEQ ID NO: 46832 - protein, 166 aa, Unknown
  Obtained from environmental sample
  misc_feature (1)..(166): Xaa is any amino acid
MRCEIAASLLHDPEVLFLDEPTIGLDAVSKLAVRRIIADLNRERKITVILTSHDMDDIEALTDRILLIGKGSLLYDGALGALRSRYDSLRRLELHYEGDSASLPEPAGTRIVSQKEKHVVYEVDTGVIGVSSALRVLGESLDIRDMSAGSRPIEELIASLYLERNL

SEQ ID NO: 46833 - DNA, 1629 bp, Unknown
  Obtained from environmental sample
  misc_feature (1)..(1629): n is a, c, g, or t
atgtcggcgaacgaaatgcggccttatcttgcgatcttcaaaatccggctaatcgcggggatgcagtaccgtgccgccgcctgggccggcgtagcaactcagtttttctggggggccatacagctcctcgtgttccgcgctttttacgaaagctcaaccgcgccgccgccgatgaatctggatcagcttgcggatctgatctggcttcgtcaggccttcctagcgcttgtcatgctctggagcatggacaacgaattactggaactgattgcctctggcaatgtggcttatgaacttgcaaggccgctttcgctttatttgttctggttcagccgcgttctggcgttcaggattgcccgcacagtgctccgttgctttcccattttcatcatcgcgtctttcttgcccggttcttggggcttccatcttccccgcgaccttcaggccctcgccctgttcattccctcccttatccttgccgcctttcttgccgccgccctctccatgatcatctgcctgcttacttttgtttcccttaatccgcacggggcaaggctctttatgggcgtaaccggagaattcctaatgggcgcggtaatacccattccttttatgccacccctgctgcagcggataactgcccttctgcctttccgttacactgcggattttccttttcgcgtttactccgggcacattgccgggtctgaggccctgctcggtttgaccgcgcagatcttttggcttgtggctctggttggcatcgggctttggggtttcaaagcnggcgttgaagcgtcttgtgatacaggggggctgatggggcgcaataaattcatctacttcagatatttgtccatgagcctgaaggcgatcctcgaataccggctctccgcatggtttgtagtcgcgggccaaagtctttccatgctctttgcctttatcggccttgacttgatgtttagacgtttcgggaacctggcgggctggagtttcgcggaggccgccctctgtttcggcgtaacatacacggccttttcactttcagaatgtatcgcccgcggttttgattctttttcccggatggttattcagggcgaattcgaccgtgtgctgctgcggccccgcagtaccatcattcaggtactgggtagtaaaaccgacatcacccgtttgaacaaaactgttttgggcattgtcattctttgctccattgtccccggaacgggcatagtctgggacttcccgaaaataatcaccctggtactgatggttctgggaggcgcggcggtttttaccggtgtttttattctgggagccactgtgtgttttttcacgttagagggacttgaagtgatcaacatcttcaccgacggcggaagggaactggccagctaccccctgccggtttacggcaagtggatagcccgcttcttcacgtttatcattccctttggctgcatgaactaccttccgcttctctacctcactggccgcacggcaacccagggcatctttttacccgcctgggtctatatgctcgtgccgctgctcggctttgcgttcatcctgccatgcgttcttgtctggcgcttcggggtagggcactacagctccgcagggtcgtga

SEQ ID NO: 46834 - protein, 542 aa, Unknown
  Obtained from environmental sample
  DOMAIN (304)...(542): Protein of unknown function (DUF990)
  misc_feature (1)..(542): Xaa is any amino acid
MSANEMRPYLAIFKIRLIAGMQYRAAAWAGVATQFFWGAIQLLVFRAFYESSTAPPPMNLDQLADLIWLRQAFLALVMLWSMDNELLELIASGNVAYELARPLSLYLFWFSRVLAFRIARTVLRCFPIFIIASFLPGSWGFHLPRDLQALALFIPSLILAAFLAAALSMIICLLTFVSLNPHGARLFMGVTGEFLMGAVIPIPFMPPLLQRITALLPFRYTADFPFRVYSGHIAGSEALLGLTAQIFWLVALVGIGLWGFKAGVEASCDTGGLMGRNKFIYFRYLSMSLKAILEYRLSAWFVVAGQSLSMLFAFIGLDLMFRRFGNLAGWSFAEAALCFGVTYTAFSLSECIARGFDSFSRMVIQGEFDRVLLRPRSTIIQVLGSKTDITRLNKTVLGIVILCSIVPGTGIVWDFPKIITLVLMVLGGAAVFTGVFILGATVCFFTLEGLEVINIFTDGGRELASYPLPVYGKWIARFFTFIIPFGCMNYLPLLYLTGRTATQGIFLPAWVYMLVPLLGFAFILPCVLVWRFGVGHYSSAGS

SEQ ID NO: 46835 - DNA, 417 bp, Unknown
  Obtained from environmental sample
  misc_feature (1)..(417): n is a, c, g, or t
atgaaaattaaagatgtaatagaatggattcaaattgccgaggatgatttgtattctgctaaaattctatatgaacaaactcgtaaaccatatgaaataatttgttatcattgcgctcaatcaatagaaaaatatttgaaaggattcttagcatataatgacattataccagagaaaacacataatttacttttattacttgaattgtgtatagaaaaagataataatttcgagaatgttagaacagaatgtagtttgttaaataggtttacaaatgaaatacgttatccacataggatagaaataaataatgaagatgcaaatcattcaattaaagcagtagaacgtattaaagatattgaaccaataaaaaaaataatcaatattgttaataattttgataaaaataattactga

SEQ ID NO: 46836 - protein, 138 aa, Unknown
  Obtained from environmental sample
  DOMAIN (6)...(126): HEPN domain
  misc_feature (1)..(138): Xaa is any amino acid
MKIKDVIEWIQIAEDDLYSAKILYEQTRKPYEIICYHCAQSIEKYLKGFLAYNDIIPEKTHNLLLLLELCIEKDNNFENVRTECSLLNRFTNEIRYPHRIEINNEDANHSIKAVERIKDIEPIKKIINIVNNFDKNNY

SEQ ID NO: 46837 - DNA, 1485 bp, Unknown
  Obtained from environmental sample
  misc_feature (1)..(1485): n is a, c, g, or t
ttgatttggacggttcccaaaaaattcatatattttatccaaataaccatagggatgaggtatgcgaatatggcaataatatccgtcaagtcattaagaaaattcgccaataatacgttccttgttttttcctgtatccttttcctgattattgccttgtcggccattacggcatattcaatttccgcgcgtcaaatcaactattcttttattgaacagcagctttccatagcgtctgaaacaatacggctgcgtttggcaaccgcagtagacagcgaacttgctcttgtgtcgaaaatggcggatactccggtaatcaggcagtattttatgaatccttccgatccggttcttaaatcccgggcggacgatgaatttgccctttatcaggaacatttcaataataaaatgctttactgggttaatgacgtggataaaatattttattcaacaggaaacgctccgtatgttgtcaatcccgatgatcccaaggattattggtacaatttaacattatacaaaacagaaaaatatatttttaacattaattataatcctgatttggagcaaatctatctttgggtcaatgttccggtatttgtaaaaacggacatgggtaaaaaacctatagggctgattggcacgggcgtaaatcttactgacttttcaaattttattgcttccagttatcatgaatttgatgaaaatatcacgacatatatgttcaataaatacaatgaaataacttcgtctgcggattatgaattggttcaaaataaagtccgccttgatgaacacttaagtcttaccggaaaagaattgattaaggtcgcgcaggagctttccgacggtgaaagccggagcttcatctacgataaaagaatctatctgataaacttcatccagtctatggaatggtatctgaccgtaagttatcctgcgccgggtttgttgtccctgaataacgccatgaataccgtatttttcagtatgttgttccttattttgttcttgttcatcattattaatgtttatattgcccgctctgaaaacgcgatagcgaaacaaaatttacaattgattgaagcaaaccgaaagactgaatccgcttctcgggcaaaaagcgacttcctcgcgaaaatgagccacgaaatccgcacgcccatgaacgcgattataggcatgacggaacttctgctgaggggggaactctcaagcgaagccagaagttatacgcaggatatcaaacaggcggggaataaccttgtttcgataattaacgatattcttgatctttcaaaaatcgaagcgggaaaactggaaattgttcccggtaaatatatgctttcatctttgatcaacgatactgtcaatattatccgcactaggcttaaggaaaaaccgatacggttttttaccaatatcgacgggaatattcccaacagccttatcggagatgaggtgcgtctgcgccagatctcctaa

SEQ ID NO: 46838 - protein, 494 aa, Unknown
  Obtained from environmental sample
  DOMAIN (373)...(438): His Kinase A (phosphoacceptor) domain
  misc_feature (1)..(494): Xaa is any amino acid
MIWTVPKKFIYFIQITIGMRYANMAIISVKSLRKFANNTFLVFSCILFLIIALSAITAYSISARQINYSFIEQQLSIASETIRLRLATAVDSELALVSKMADTPVIRQYFMNPSDPVLKSRADDEFALYQEHFNNKMLYWVNDVDKIFYSTGNAPYVVNPDDPKDYWYNLTLYKTEKYIFNINYNPDLEQIYLWVNVPVFVKTDMGKKPIGLIGTGVNLTDFSNFIASSYHEFDENITTYMFNKYNEITSSADYELVQNKVRLDEHLSLTGKELIKVAQELSDGESRSFIYDKRIYLINFIQSMEWYLTVSYPAPGLLSLNNAMNTVFFSMLFLILFLFIIINVYIARSENAIAKQNLQLIEANRKTESASRAKSDFLAKMSHEIRTPMNAIIGMTELLLRGELSSEARSYTQDIKQAGNNLVSIINDILDLSKIEAGKLEIVPGKYMLSSLINDTVNIIRTRLKEKPIRFFTNIDGNIPNSLIGDEVRLRQIS

SEQ ID NO: 46839 - DNA, 1866 bp, Unknown
  Obtained from environmental sample
  misc_feature (1)..(1866): n is a, c, g, or t
atggtgttaaatcaaaatgacaatctgccggatcggggcggacccgcgcgaagcggccctaacggttttaccatcgttttttttctgataatagccgctttgtttcttacgttttttataaggggagcatccaggataagggaaatcccttattcggactttaaccgttttgtggaacagaaccagattgaatccgttgtcattcacgaaaacaacataatggatatttttctgaaaggagcgtccgcgcaggacggcgcccagcttaggacgcgtattccttataatgatcctaatcttctgcctggcctgcgggaaaaaaacattgttgtttcgggagcgcccgtaaagtttaccccgctccaagtgttatttgacatactcccgtggattatcgtttttgccattcttatactgatattaagaaatatgcagggcgccggagcgaggaatttccatttcggaaagagcagggcgaaacgttatcaggaagaagggaaaaaagtcagttttactgatgtcgcgggacaaaaagacgcgaaatttgagcttgaggaagtagttgaatttttaaagaaccctcaaaaatttacaaagatgggggcgcgtataccaaagggcgtgcttcttgtcggtatgccgggaacgggcaaaacattgatggcgcgttctgttgccggagaggcgggcgtggctttctttcacatgtccggctcggactttgtggaaatgtttgtcggcgtcggggcgagccgcgtaagggatctttttgagcagggaagaaggaacgccccctgtatcatttttattgacgagcttgacgcggtcgggcgcactcgcggcgcgggttacggcggcggccatgacgagcgagagcagacattaaaccagttgttggttgaaatggacggttttgactcaaaggacggagtaataattttagccgccacaaaccgtcccgacgtgctggatccggcacttctccgtccgggccgcttcgacaggcaggtggttatcgcgatgcccgatatcaaagagcgcgaggctatactgcaaatacacgcttcaaagattcaaatggacaagacgattgatcttacccgtatcgcgagagctacgcccggaatgagcggcgcggatatcgccaatcttgtaaacgaagcggctctttttgccgccagaaaagacaagaacgaagtgcagatgtccgattttgaagaggcaagggacaaggtgttgatgggagttgcgcgcagaactcttgtggtatccgacaaggaacgcaggatgaccgcaattcacgaggccggacacgctctgcttcattatttccttaagaacgcagaccctcttcacaaggttaccataattccgcacgggcgcgcgctgggcgcttccctttcacttcccgaagaagacacttacagccgctcaaaaggctggatagaggaccgcatcgccatctgttacggcggctggcttgcggaaaaacttttttataacgaaactactaccggaaccaaaaacgacatacagcaggctacggaaatggcgcgtaacatggtttgcgagtggggcatggccgatagtcttggtcctgtagcctacggacaggaagacgagcccatttttatagggaaagaaatcgccaggcataaggattattccgaggataccgcccagcgcatagacagtgcggttacggagattcttgaacgcgcaagaaataacgcttccaaaattttagaaagccgtaaaacgggactggaaaaacttgcggacgctctgcttgcgcgcgaaacattaatagacgacgaagtcagggaaatcttaggtcttggcccaaaagggagctctgaattatga

SEQ ID NO: 46840 - protein, 621 aa, Unknown
  Obtained from environmental sample
  DOMAIN (207)...(341): ATPase family associated with various cellular activities (AAA)
  misc_feature (1)..(621): Xaa is any amino acid
MVLNQNDNLPDRGGPARSGPNGFTIVFFLIIAALFLTFFIRGASRIREIPYSDFNRFVEQNQIESVVIHENNIMDIFLKGASAQDGAQLRTRIPYNDPNLLPGLREKNIVVSGAPVKFTPLQVLFDILPWIIVFAILILILRNMQGAGARNFHFGKSRAKRYQEEGKKVSFTDVAGQKDAKFELEEVVEFLKNPQKFTKMGARIPKGVLLVGMPGTGKTLMARSVAGEAGVAFFHMSGSDFVEMFVGVGASRVRDLFEQGRRNAPCIIFIDELDAVGRTRGAGYGGGHDEREQTLNQLLVEMDGFDSKDGVIILAATNRPDVLDPALLRPGRFDRQVVIAMPDIKEREAILQIHASKIQMDKTIDLTRIARATPGMSGADIANLVNEAALFAARKDKNEVQMSDFEEARDKVLMGVARRTLVVSDKERRMTAIHEAGHALLHYFLKNADPLHKVTIIPHGRALGASLSLPEEDTYSRSKGWIEDRIAICYGGWLAEKLFYNETTTGTKNDIQQATEMARNMVCEWGMADSLGPVAYGQEDEPIFIGKEIARHKDYSEDTAQRIDSAVTEILERARNNASKILESRKTGLEKLADALLARETLIDDEVREILGLGPKGSSEL

SEQ ID NO: 46841 - DNA, 933 bp, Unknown
  Obtained from environmental sample
  misc_feature (1)..(933): n is a, c, g, or t
atgagtattgctagatatttggataaaataagagaagttgatgagaaacgagcgcgtgaaatttacaaacatcgcttttgttatatttttttggcgccttacgcaattgcatttattcttttttttgtagcgccgctggtgatttccgttttttacagttttacatatttcaatattctggagccgccgaaatttatcgggcttcgcaactacattaatctcctgcttgcagacgacgtgtttttaattgcaatgaaaaacacatttataatggcggcaattacagggccggtcggttatatagctgcttttttgtttgcgtggtttatcaatgaactgccacgctacatccgcgctctggtaacgctgatattttacgcgccctcaatttccggcgcggtgtatatgatctgggcgattattttctccggcgacgcttacggctacattaacgggcttttgatgcatctggggattttatccgagccaaagctctggctgaccgatcccaaattcatgatgccggttatgttaatcgtcattttatggatgagtttgggaacgggatttttggcttttatagcgggattaagcaccattgacgtaacgctctacgaagcgggtctggtggacggcataagaaaccgctggcaggaactgtggtacattaccctgcccaatatgaagggaatgttgatgttcggcgcggtcatggcgattacccaatctttcggcgtcgccgatgtcaccgtagccctggcgggattccccagcaccgattacgcggtgcataccgtggtgaatcatctggttgattacggctcgattcgttttgagatgggttatgcgtcagccatcgcgactctgctgtttttaaccatgattatctgcaatacgctggtgcaaaaattactgcgccgcgtggggacgtga

SEQ ID NO: 46842 - protein, 310 aa, Unknown
  Obtained from environmental sample
  DOMAIN (81)...(310): Binding-protein-dependent transport system inner membrane component
  misc_feature (1)..(310): Xaa is any amino acid
MSIARYLDKIREVDEKRAREIYKHRFCYIFLAPYAIAFILFFVAPLVISVFYSFTYFNILEPPKFIGLRNYINLLLADDVFLIAMKNTFIMAAITGPVGYIAAFLFAWFINELPRYIRALVTLIFYAPSISGAVYMIWAIIFSGDAYGYINGLLMHLGILSEPKLWLTDPKFMMPVMLIVILWMSLGTGFLAFIAGLSTIDVTLYEAGLVDGIRNRWQELWYITLPNMKGMLMFGAVMAITQSFGVADVTVALAGFPSTDYAVHTVVNHLVDYGSIRFEMGYASAIATLLFLTMIICNTLVQKLLRRVGT

SEQ ID NO: 46843 - DNA, 1029 bp, Unknown
  Obtained from environmental sample
  misc_feature (1)..(1029): n is a, c, g, or t
atgccgcagggcgaagttatcaactacgctgtccgtaaagctgtcgtggatatttccaaattaagcggctacaatgatgttgtaaaggattttagctccagcgtaattgttccgtttacttttcttggcggcgtatacggccttccggaaacacagtatttccatgtaatgtactaccgtaaggatatttttgaggaacttgatattgggcttcccgatacatgggatgacttaatcaatatcctgcctatcattcaaaaaaacaacatgaatgtaggtatcccttctgtagcaaccagtgttcaggcaaatatcgacttttcaaactttctcgcgcatctgttccagcgcggcgggcggctttacaatgaggaaggttcccgtacattactaagcactgaaaccgcgattgaagctttcgacgtatacacaaagttttacacgcattataaaactccaattatttatgacttcattaaccgttttcgtaccggagaaatgccgctggcttttgccgactatacatggtttaacaccctggaagtatttgcccctgaaatacgcgggctttggggcttcgcgagaatgcccggtttattgaagggcgacggctcaatagaccgctctgtatcaacaggaactctcgcttccatgattctttccagcgcaaaacgtcctgacctggcatgggaatttatgaaatggtgggtcagttccgaaacccagttaatgtttgggcgtgagctggaaagcattatgggcgccgccgcgcgttatccaaccgccaactatgaagcttttagacggctttcatggggttcggaacaaatggcagtgcttgatgaacagagggcatggacagtcggtataccggaagtacccggcggttattttgtcagccggcatatcgtcaatgcggtacgtaaaatattaaacgaaggtcaggatactcgtgaaacattgcttgattatacaatcactatcaacgatgaattgaccaagaagcgtaaagaattcggtcttgagtag

SEQ ID NO: 46844 - protein, 342 aa, Unknown
  Obtained from environmental sample
  misc_feature (1)..(342): Xaa is any amino acid
MPQGEVINYAVRKAVVDISKLSGYNDVVKDFSSSVIVPFTFLGGVYGLPETQYFHVMYYRKDIFEELDIGLPDTWDDLINILPIIQKNNMNVGIPSVATSVQANIDFSNFLAHLFQRGGRLYNEEGSRTLLSTETAIEAFDVYTKFYTHYKTPIIYDFINRFRTGEMPLAFADYTWFNTLEVFAPEIRGLWGFARMPGLLKGDGSIDRSVSTGTLASMILSSAKRPDLAWEFMKWWVSSETQLMFGRELESIMGAAARYPTANYEAFRRLSWGSEQMAVLDEQRAWTVGIPEVPGGYFVSRHIVNAVRKILNEGQDTRETLLDYTITINDELTKKRKEFGLE

SEQ ID NO: 46845 - DNA, 1104 bp, Unknown
  Obtained from environmental sample
  misc_feature (1)..(1104): n is a, c, g, or t
atgaactttaaagagagaagagagaaaaaagcatttttggctttggcaaatggtagcgtatttcacggctattctgttggtgccccattggatacttgcggcgaagcggttttcaacacaggtttgagtggctaccaagaaattttaagcgacccttcttatgcggggcaatttgtggttatgaccgcacccgaaataggtaactacggcgttaataaagaggatatggaatcgcgaaaatttttcgcagccggttttgtcatcagagaattgaacgaaccttcaaattggcgcagccaagaatctttgaaagatgcccttattcactacaacattcccgcaatagcaggcatagatacacgtatgctcactttggaactccgcgaaagcggtgcacaaaaagcctttttatgcaccagcggtaacctgagcgcagacgaagccattgctcaggcgaacgcttggcagggaatagacaaccaagactacgcaagcaaagtaacttgcgaaaaggcttatgaatggaactccgatggcgatttgcatattgttgcttatgattttggaattaaatacaatattttgagaaatttgcaactagctggaatgcgagttagcgttgttccctcaaaaacaagtgcggaagatgttttagcaatgaagcccgatggcgtgtttctctccaatggtccaggcgaccctgccgctgttggctatgctattgagaacgtgcgaaaattgcttggcaagattccaattatgggaatttgtttaggtcaccagattatagggcttgcactcggcggcaaaactcaaaaactcaaattcgggcatcacggttgcaaccatccagttatggacacttctagcaactgcattgaaatttcctcacaaaaccacaactacatgattatgccacagggaattgaagacaaggctgagataacatacctaaacctaaacgatggcagcgttgaaggtttgaagctgaaaaacgaaaatgtattttccattcaattccaccccgaagccgcaccaggtcctcatgattctttgcatttgttcaagaagttcagggaaaatatcacccccggacataaatga

SEQ ID NO: 46846 - protein, 367 aa, Unknown
  Obtained from environmental sample
  SIGNAL (1)...(27)
  DOMAIN (183)...(343): Peptidase C26
  misc_feature (1)..(367): Xaa is any amino acid
MNFKERREKKAFLALANGSVFHGYSVGAPLDTCGEAVFNTGLSGYQEILSDPSYAGQFVVMTAPEIGNYGVNKEDMESRKFFAAGFVIRELNEPSNWRSQESLKDALIHYNIPAIAGIDTRMLTLELRESGAQKAFLCTSGNLSADEAIAQANAWQGIDNQDYASKVTCEKAYEWNSDGDLHIVAYDFGIKYNILRNLQLAGMRVSVVPSKTSAEDVLAMKPDGVFLSNGPGDPAAVGYAIENVRKLLGKIPIMGICLGHQIIGLALGGKTQKLKFGHHGCNHPVMDTSSNCIEISSQNHNYMIMPQGIEDKAEITYLNLNDGSVEGLKLKNENVFSIQFHPEAAPGPHDSLHLFKKFRENITPGHK

SEQ ID NO: 46847 - DNA, 885 bp, Unknown
  Obtained from environmental sample
  misc_feature (1)..(885): n is a, c, g, or t
ttgtacgaagcaccgcttatgctccacaaaaacggcttggacaatgttgtttgccgagaattgaaattcaccgcaccagaaccggatttgagcgaatggcaaaatatgatgcaaaaagttgcaacaagaaacagagaagtttgcattgccattgtaggaaaatatgtgcaactccacgatgcttatctctccattattgaaagtttgaaccacgcgggatttgaagtgggtgcaaatgtgaaaataagctggatagacagcaaaaacataactaatgaaaacgcaggagaaatactaagcggaatagacggaatgattgttccgggtggttttggagataggggcattgacggaaaaatagccgcttgccgctatgcaagagaaaacaatgtgccgtatttgggtatttgcctaggtatgcaaattgccgttattgaatttgcgcgcaatgtttgcgaactcaaagatgctcattcaagcgaatttgacgaaacctctccgcaccgcgtaattgaccttatgcccgaccaagcaggtttagtgggtagcggcggcactatgcgtttgggtgcctacccttgcaaaaccgccccaggttccctattaaacaaactctacggccgtgacgaaataagcgaaaggcaccgccaccgctttgaattcaacaacgaataccgcgaagctctcacgagcaaaggtcttgtgatttgcggaacatctctaaacggcaaccttgttgaagcaatagaactgccaagagacagcttttttgtgggggttcaatttcaccccgaattcacaagccgcccgaataaaccgcatccgttgtttgtgggcttgttgagggcggcaatcagcacgagaggaggcagcaatgaactttaa

SEQ ID NO: 46848 - protein, 294 aa, Unknown
  Obtained from environmental sample
  DOMAIN (49)...(265): Peptidase C26
  misc_feature (1)..(294): Xaa is any amino acid
MYEAPLMLHKNGLDNVVCRELKFTAPEPDLSEWQNMMQKVATRNREVCIAIVGKYVQLHDAYLSIIESLNHAGFEVGANVKISWIDSKNITNENAGEILSGIDGMIVPGGFGDRGIDGKIAACRYARENNVPYLGICLGMQIAVIEFARNVCELKDAHSSEFDETSPHRVIDLMPDQAGLVGSGGTMRLGAYPCKTAPGSLLNKLYGRDEISERHRHRFEFNNEYREALTSKGLVICGTSLNGNLVEAIELPRDSFFVGVQFHPEFTSRPNKPHPLFVGLLRAAISTRGGSNEL

SEQ ID NO: 46849 - DNA, 789 bp, Unknown
  Obtained from environmental sample
  misc_feature (1)..(789): n is a, c, g, or t
gtgcctaaaggcgtgaataccgaatggttcaaagactcaagcttttgggagcagtacgctcccattatgtttgatgatgcgcactggaaagaagttccgtctgttgccgacgcgattacccgtcttgccaattttgatttttacggcgaaacatcaaaaccccaagtaaatacaaatcccaaagttctggacctttgctgcggtttcggcaggataagcgcggaacttgcccgcaggggattttccgtaaccggcgttgacatcaccgaaagttaccttcaaaccgcgaaggaagaagccggtcatgaaaaactgaatatcgaatatataaaagcggacgcaagggaatttgtcagaaaggacttttttgatcttgcggtaaatatgtatatttcattcggttattttgaaaagcatgaagacaatcttctgatggttcgcaacgcgtacgaatccctgaaaaacggcggctcatttatcattgaaactttaggaaaggaaatcgctgtccgcgattttacagacagagaatggtttgaacgcgccggttttatggtgcttaccgaatatgaagttttggactcatggacatttttaaaaaatcgttggatactgattaaagacggtaaaaaaatcgaaagagttttttctcaaaggctctattcggcgtctgaattaaggtcgttgatgcttgaagcgggttttcccaaagtagatattttcggcgattgggacgaaagcccttacgacaagcgggcggctaaacttattgtaatagggagaaaataa

SEQ ID NO: 46850 - protein, 262 aa, Unknown
  Obtained from environmental sample
  DOMAIN (26)...(262): ubiE/COQ5 methyltransferase family
  misc_feature (1)..(262): Xaa is any amino acid
MPKGVNTEWFKDSSFWEQYAPIMFDDAHWKEVPSVADAITRLANFDFYGETSKPQVNTNPKVLDLCCGFGRISAELARRGFSVTGVDITESYLQTAKEEAGHEKLNIEYIKADAREFVRKDFFDLAVNMYISFGYFEKHEDNLLMVRNAYESLKNGGSFIIETLGKEIAVRDFTDREWFERAGFMVLTEYEVLDSWTFLKNRWILIKDGKKIERVFSQRLYSASELRSLMLEAGFPKVDIFGDWDESPYDKRAAKLIVIGRK

SEQ ID NO: 46851 - DNA, 300 bp, Unknown
  Obtained from environmental sample
  misc_feature (1)..(300): n is a, c, g, or t
atgaacatttttacgcgggattttcatttttccagtgtaaagcaaaaggggataattctcaagttgatttttaaattttccgatattaatagtatgaaacgttatagtattaaatgcataccgggcagcacagagtaccttgatattttaaaagagctggataatgaatatcttgttcgtttcacccgcaataacaacggacacaaaaaaacgacggaagagaccattacacggcatctttttaatgtttgcgtacagaccggatatctcaatccaatgctggaagcatcggttgcctaa

SEQ ID NO: 46852 - protein, 99 aa, Unknown
  Obtained from environmental sample
  misc_feature (1)..(99): Xaa is any amino acid
MNIFTRDFHFSSVKQKGIILKLIFKFSDINSMKRYSIKCIPGSTEYLDILKELDNEYLVRFTRNNNGHKKTTEETITRHLFNVCVQTGYLNPMLEASVA

SEQ ID NO: 46853 - DNA, 696 bp, Unknown
  Obtained from environmental sample
  misc_feature (1)..(696): n is a, c, g, or t
ttggacaggctggaatgcgccggaattgatataaatatgggctgcagcgctccattaatccgaaaaacaggctccggagccgcctggatgacctctattgaccgcgcaggagagcttatttcttgtgtaaggccgtttgtgaaacgccgtttaagtgtaaaattacgcattggttataaagatgattttgagtatttagtgcggttctgccaacgccttgaagctgagggaacagagctaattaccctccatccccggctggttaccgaaaaatttaaacgtcttgcccgatgggaatatgtcggcgctttaaggaaagaattgaaaatccccgtagccggaaacggagacatagctgacgcgcaggaactggttaggcgggcgggcggcccttgtgatgctgttatggtaggacgggctgcggtccgccaaccgtggatttttgcacaggcagctctgtccccagcttcaagctctgtccccaatatcgaggaaacaggacttcgttttcttgagcttttagctcaataccagccgcccgattttcacttttccagagcaatacggtttttcggctttttctgcgataacctgaaatgggggaattatctaaaaactcagataaaccgcgaaaaaactttatccggcatagagcgggtgtggcgggaacattttaaagacggcagtgtaacctga

SEQ ID NO: 46854 - protein, 231 aa, Unknown
  Obtained from environmental sample
  DOMAIN (2)...(230): Dihydrouridine synthase (Dus)
  misc_feature (1)..(231): Xaa is any amino acid
MDRLECAGIDINMGCSAPLIRKTGSGAAWMTSIDRAGELISCVRPFVKRRLSVKLRIGYKDDFEYLVRFCQRLEAEGTELITLHPRLVTEKFKRLARWEYVGALRKELKIPVAGNGDIADAQELVRRAGGPCDAVMVGRAAVRQPWIFAQAALSPASSSVPNIEETGLRFLELLAQYQPPDFHFSRAIRFFGFFCDNLKWGNYLKTQINREKTLSGIERVWREHFKDGSVT

SEQ ID NO: 46855 - DNA, 1806 bp, Unknown
  Obtained from environmental sample
  misc_feature (1)..(1806): n is a, c, g, or t
atggcacaaaccccgtttatccgtaacttttgcataatcgcgcacatcgatcacggcaaatcaacgcttgcagaccgtcttattcaaaaagccaacattgttgatgaccgcaattttcaggatcagatacttgacaatatggatattgagcgggaacgcggcatcacaatcaaaagtcaggccgttaccctgccctacacggcaaaggacggcaatgaatacatactcaatttggtagacacgcccggacatgttgatttcagttatgaggtaagccgcgcgattaactcctgcgaaggcgcccttctccttgtggacgcgactcagggcgtgcaggcgcagactttatccaatatgttccttgcgcttgaacataatcttgagatagtgcctgttataaataaaattgatatgcaggcggcggacattccaagagttaaaaagcaaatagataaagacctggggcttgactcggatactgccgtattggtttccgcaaggcagggcaccgggattgacgaacttttagaggcaatagtgcagagaattcccgctccttcaggcaaaacggattctccgttacgcgcccttatctttgactgccactacgatccctaccgaggcgtaatcgtacacctgcgcctttttgacggaaaaataaaaaaaggaatgaaaatttcttttatgtccagcggctccgtttacgaagtggaaaccgccggcgtttttaaacttgcccttgtcgagacaggcgagctttccgcaggggatgtcggttatataatcgcaagcataaaaaccgtaagcgatgtgcgcgtaggcgacaccgtaacaggcacggacaacccctgcgcccagcccctgcccggtttccgtgaggtgaaacccgtcgtattctcttctatctaccccgtagactccaacgattacgaagaattgcgcgcaagcatggaaaagctaaaacttaacgacgcttcattaatttatgaaaaagattcatccgccgcccttggctttggtttccgctgcggctttctcggccttttgcatcttgaagttatccaggaacggcttgaacgggagtttaatcaatcggtaattttcacggcaccgtccgtaaaatacaaggtgcgcctgcgaaacggcgatgaattaatgattgacaatccgttggactaccccgacgaaggcaggattgaaggagctgaagagccatatatccgggcttcgataattacgccttcaggctatcttggaaacatcatgacgctttgtcttgaaaaacggggcgtacaaaccaacatgacttaccttgatgaaaaacgcgtcgagatggtttatgaaatgcctctttcagaagtgttatttgatttttacgaccgtttaaaaagtatcagcagcggttatgcgtcatttgattatgatatttttggttataaaccgactgaacttgcgaaaatggatattttattgaacggcaaggcggttgacgctctttcacaacttgtattcaagggtaacgcgtataaccgggcgcgaaaagtctgcgaacgtcttcgtgacgaaatccccaggcagcaatttaaaataccgattcagggagcgataggcagtcagataatcgctagggaaactgtcaacgcgcttcgcaaggacgtactcgcaaaatgctacggcggggacattacgcgcaagagaaaacttcttgaaaaacaaaaagaaggtaagaagcgcatgaaaatggtaggagatgttgagcttcctcaaagcgcgtttcttgcggtacttaaaatcaaggacgagtaa

SEQ ID NO: 46856 - protein, 601 aa, Unknown
  Obtained from environmental sample
  DOMAIN (8)...(137): GTPase of unknown function
  misc_feature (1)..(601): Xaa is any amino acid
MAQTPFIRNFCIIAHIDHGKSTLADRLIQKANIVDDRNFQDQILDNMDIERERGITIKSQAVTLPYTAKDGNEYILNLVDTPGHVDFSYEVSRAINSCEGALLLVDATQGVQAQTLSNMFLALEHNLEIVPVINKIDMQAADIPRVKKQIDKDLGLDSDTAVLVSARQGTGIDELLEAIVQRIPAPSGKTDSPLRALIFDCHYDPYRGVIVHLRLFDGKIKKGMKISFMSSGSVYEVETAGVFKLALVETGELSAGDVGYIIASIKTVSDVRVGDTVTGTDNPCAQPLPGFREVKPVVFSSIYPVDSNDYEELRASMEKLKLNDASLIYEKDSSAALGFGFRCGFLGLLHLEVIQERLEREFNQSVIFTAPSVKYKVRLRNGDELMIDNPLDYPDEGRIEGAEEPYIRASIITPSGYLGNIMTLCLEKRGVQTNMTYLDEKRVEMVYEMPLSEVLFDFYDRLKSISSGYASFDYDIFGYKPTELAKMDILLNGKAVDALSQLVFKGNAYNRARKVCERLRDEIPRQQFKIPIQGAIGSQIIARETVNALRKDVLAKCYGGDITRKRKLLEKQKEGKKRMKMVGDVELPQSAFLAVLKIKDE

SEQ ID NO: 46857 - DNA, 627 bp, Unknown
  Obtained from environmental sample
  misc_feature (1)..(627): n is a, c, g, or t
atggcgggcaagtttatagtttttgaaggcgttgatggctccgggactactactcaggccatgctgctgcatgactatctgttatctgaatcaaaaaaagcgatactcacatcagagccttcacccgggccagtcggctgcctgattcggcttactcatacaaaaaggatcaccagcaccgcaaacaggcgtagtagggagcggtacctgtcgtgtttgtttgccgcagacaggaacgatcatttgtttaacgatgaaaacggcattttaaagcagatagagtcggattattttgtaatatctacgcggtactttttatcgtcgctcgcttatcatgtttttacagaagacgattacaattttatttattcgttgaataaggattttccgctgcctgattataccttctttcttacttgccccatagaatgttccctggaaaggatagcatcgtcaagattgccggatataaacgaagagaaaacaaatttgcttagggtattaaagaattacgaaaatgctatttccatgtacaaaggtaaaatttctcaaattgacggaaccagaaaacctaaagaggtaaatgcggaaattatatcagttttgcaaagcaacgggattatttag

SEQ ID NO: 46858 - protein, 208 aa, Unknown
  Obtained from environmental sample
  DOMAIN (8)...(198): Thymidylate kinase
  misc_feature (1)..(208): Xaa is any amino acid
MAGKFIVFEGVDGSGTTTQAMLLHDYLLSESKKAILTSEPSPGPVGCLIRLTHTKRITSTANRRSRERYLSCLFAADRNDHLFNDENGILKQIESDYFVISTRYFLSSLAYHVFTEDDYNFIYSLNKDFPLPDYTFFLTCPIECSLERIASSRLPDINEEKTNLLRVLKNYENAISMYKGKISQIDGTRKPKEVNAEIISVLQSNGII

SEQ ID NO: 46859 - DNA, 915 bp, Unknown
  Obtained from environmental sample
  misc_feature (1)..(915): n is a, c, g, or t
atgatgggcggcagtatctgggttcagtccgagatcggaaaaggctcaacctttacctttactgttcggctacagcgaggcaaagaaaaaagacaggaactcctctccgctgatgtaaattggaagaacgtccgcatcatggcgatagacgatgatccggatattttggcgtatttcaacgaaattacgcaaaggttcggcgtattctgcgataccgctgccagcggagatgaagcgattgcccttgtgaccaagaacggagattatcatatctactttgtggactggaaaatgccgggtatggacggtattgaactgacttacaagctgaaagcgcgcgcgtcaggaaactccgtagttataatgatatccgccgccgaatggacaacggttgcggacgaggcaaaaaaagcaggggtggacaaattcctttccaagcctctgtttccgtcctcaatagcggacataataaacgaatgtctgggcatagacaagcggcatttggaagaagcgcaaatcaatatcgatagcttatttgcggggcgccgcattcttttggcggaagatgtggaaattaaccgcgagattgtactggcgctgcttgagccgtcaaaacttgagattgactgcgctgaaaacggcctggaagctgtccgtatgttcagcgaagccccggaaaaatacgatatgatcttcatggatctgcagatgcctgatatggacggctatgaagcgacgcgcagcatcagggcgctggatacgcctaaagccaaaaccatcccgattgtagccatgaccgctaacgtattcagggaggatattgaaaaatgtctcgctgccggtatgaacagccatgtcggcaagccgctggatttcgatgaagtcataaaaacccttcactcattttttggttag

SEQ ID NO: 46860 - protein, 304 aa, Unknown
  Obtained from environmental sample
  DOMAIN (44)...(158): Response regulator receiver domain
  misc_feature (1)..(304): Xaa is any amino acid
MMGGSIWVQSEIGKGSTFTFTVRLQRGKEKRQELLSADVNWKNVRIMAIDDDPDILAYFNEITQRFGVFCDTAASGDEAIALVTKNGDYHIYFVDWKMPGMDGIELTYKLKARASGNSVVIMISAAEWTTVADEAKKAGVDKFLSKPLFPSSIADIINECLGIDKRHLEEAQINIDSLFAGRRILLAEDVEINREIVLALLEPSKLEIDCAENGLEAVRMFSEAPEKYDMIFMDLQMPDMDGYEATRSIRALDTPKAKTIPIVAMTANVFREDIEKCLAAGMNSHVGKPLDFDEVIKTLHSFFG

SEQ ID NO: 46861 - DNA, 525 bp, Unknown
  Obtained from environmental sample
  misc_feature (1)..(525): n is a, c, g, or t
atgggacaggatagggacggctgcctttttctattggtaaccggaacccgtgattactggttcagtacgtcgggcaggggcaaaaaattatatacttccaccgcgttaagtaaactgaatgacgacattgtaaagttacttaaaaaaggcagatactacgaagcattccaggctttcctgaatgattcaaaagaatttcttgctcttaatgcaaggggcggcaggacatataacttcttccatagatggaattatgcttcggtattcgtagcatggcttctgtccctgttaataggctttatagttgtgcaatcatggaaaaagaaaatgaacactgcccttccacagactcaggccgccgcctatgtggttcccggaagcctcgcgtttaatgtgaaaacagaaactttcttatacagcattgttaataaaagcccccgcaatgacgatagttcccaaggaggcggcggttctcataccagttcttcaggcaggagtcacggcggaggcggcggcaaatattga

SEQ ID NO: 46862 - protein, 174 aa, Unknown
  Obtained from environmental sample
  misc_feature (1)..(174): Xaa is any amino acid
MGQDRDGCLFLLVTGTRDYWFSTSGRGKKLYTSTALSKLNDDIVKLLKKGRYYEAFQAFLNDSKEFLALNARGGRTYNFFHRWNYASVFVAWLLSLLIGFIVVQSWKKKMNTALPQTQAAAYVVPGSLAFNVKTETFLYSIVNKSPRNDDSSQGGGGSHTSSSGRSHGGGGGKY

SEQ ID NO: 46863 - DNA, 1995 bp, Unknown
  Obtained from environmental sample
  misc_feature (1)..(1995): n is a, c, g, or t
ttgtgttccttattccccgaaaatctgcctgacagttccacagtaccgatagtcgtctgtgatgatactgccacaaatccagaagcggtttttcaggcgctctatgccataaatatcatggcagttatcgccgcgccgctttatgttgacggacgcttttggggcgtaatgtgtgtggagcaaggtcatacaccgcgcaagtggacgcaaaacgaaaaggaatttgtcgctatgacggcaagtactattgcgggcataattatgcgcgacatctataccataaaactaaaggaagccctgaataaggcgatggaggcaagcaaggcaaaaagcgatttcctctccagcatgagccacgaaatgcgcacgccccttaatgcgataaccggcatgacaacaatcggcaagaatgcgaaagacatggaacgtaaagactatgcgctaggcaagatagaaaacgcgtcaacgcatctgcttggcgttattaatgacgtactcgatatgtcaaaaatcgaggcgaaaatgctggagctttcacccggtgaatttaattttgagaaaatgctgcaaaaggttgtcgctgtagtaaatttccgcgtggacgaaaaaaggcaaaaacttgttgttcacattgacaataaaattccaaaaatactgatagccgatgatcaacgcctcgcccaggtcattgccaatctcctgagcaatgctgtcaaattcacgcccgaagaaggctccattatccttaatgcgaattttttgggagaagaaaacggcatttgtactataaaggttgacgtgagcgatacgggaatcggaataaacgatgaacagcanaaacgcctcttcagttctttcatgcaagcagagagcagcacgacacngcaatacggcggtacggggctgggtctcgcgatttccaaaagcatcgtcgagatgatgggcggcaatatttgcgtacaatcggaactcgaaaaaggctcgacatttacctttaccgttcagacaaagcgcggagcggaagacaaacaaaagcgtttaccggatatcaattttaacgatgtccgtattatggcggtagatgacgatccggatattttaacatatttccttgatataatgcgaagatacggcatatcatgcgagaccgccgaaagcggggaaaaagcgcttgaaatcgtagataaaaaaggcggctaccatatctattttattgattggaaaatgccggttatggacggtatacggcttacacgtgaaataaaagcgcgaaaacccgaaaattcggtcgtgataatgatttccgcggccgaatggagcgcgattgccgaagaagcgaaagcggcgggcgttgataaattcctgtccaagccgctgtttccttccgccatcgtggaaacaatcaatgaatgtctgggcgttgacaaacaacaggtggaaaaatcgcaggatgagaaaattgacggaatatttgaaggacggcgcatactgctggttgaagacatggaaattaaccgtgaaatagtaatggccctttttgaaacgacaaaattggaaatagactgcgccgaaaacggcatagaagccgtccgtaaatttaccaaagcttctgacaaatacgactttattttcatggatatacaaatgccggaaatggacggctacgaagcgacacggcgtatccgcgctatcgaggcggaacaatacaaagcccccgccggtattgccggaaaaaaagctgtcaacaacgacagcatgaattccggcaaaggtgaaaataaattacagttattggaacaaacaaagagaattccgataattgcaatgaccgccgacgttttcaaagaggacattgaaaaatgtctcgccgccggtatggacagccacattggcaagcctttggacttcgatgaagttataaacaggcttaacctgtatttgggagtgaagaagattaaagaaaacataggaacgaagtatgcggcggcagtttaa

SEQ ID NO: 46864 - protein, 664 aa, Unknown
  Obtained from environmental sample
  DOMAIN (109)...(174): His Kinase A (phosphoacceptor) domain
  misc_feature (1)..(664): Xaa is any amino acid
MCSLFPENLPDSSTVPIVVCDDTATNPEAVFQALYAINIMAVIAAPLYVDGRFWGVMCVEQGHTPRKWTQNEKEFVAMTASTIAGIIMRDIYTIKLKEALNKAMEASKAKSDFLSSMSHEMRTPLNAITGMTTIGKNAKDMERKDYALGKIENASTHLLGVINDVLDMSKIEAKMLELSPGEFNFEKMLQKVVAVVNFRVDEKRQKLVVHIDNKIPKILIADDQRLAQVIANLLSNAVKFTPEEGSIILNANFLGEENGICTIKVDVSDTGIGINDEQXKRLFSSFMQAESSTTXQYGGTGLGLAISKSIVEMMGGNICVQSELEKGSTFTFTVQTKRGAEDKQKRLPDINFNDVRIMAVDDDPDILTYFLDIMRRYGISCETAESGEKALEIVDKKGGYHIYFIDWKMPVMDGIRLTREIKARKPENSVVIMISAAEWSAIAEEAKAAGVDKFLSKPLFPSAIVETINECLGVDKQQVEKSQDEKIDGIFEGRRILLVEDMEINREIVMALFETTKLEIDCAENGIEAVRKFTKASDKYDFIFMDIQMPEMDGYEATRRIRAIEAEQYKAPAGIAGKKAVNNDSMNSGKGENKLQLLEQTKRIPIIAMTADVFKEDIEKCLAAGMDSHIGKPLDFDEVINRLNLYLGVKKIKENIGTKYAAAV

SEQ ID NO: 46865 - DNA, 1443 bp, Unknown
  Obtained from environmental sample
  misc_feature (1)..(1443): n is a, c, g, or t
atgggcgacctgggtttcccgatgtttggctttgccaggcagtttaaaaaagcgccggcccagatcgcgcagatggttgcggagaaattgcctggttccgcagcggacgggccatatgtaaacatacgccttaaccggagcgaaattaccagggatattctttcagagttacttggcagcgcgaatgagcaaggcggatcgattgtgggaaggccccctacccttgctggcaagcgggtcatggttgaattttccagccccaacaccaacaagcctctccacctcgggcaccttcgcaacgacgtgctgggcgaaagtatctcccgaatcctctcagcctgtggtgcggaagtccgcaaggtttgcatcatcaacgacaggggcattcacatctgcaagtccatgcttgcctacaaagagcagggcgaaggcaaaaccccggaatccaaaggaataaaaagcgatcgcttcgtgggggactggtatgtacgtttcagccagggcttaaaagaagaagcggaaacgctcgaaagggaaaaaggtcttaacaaaaaagaagccgaagcccaggcacctatgctacttcgggcgcaggaactgctccgccaatgggaagccggggacagcgaaactgtggaactctggaaaaagatgaacgcctgggccatcgatggctggaaggaaacctacaagcgtaccggcgtctcattcgatcaatactattacgagagccagacctacctgcttggcaaggatgaaattttaaagggccttgaaaaaggttttttttaccgccaggaagacggcgctgtcgcggtggatcttacggaagaaaaactggataaaaaaatcctcctgcgaagcgacggcacttcgatttacataacgcaggatttcggaaccgccatcaaacgccacaaagactggccttttgacaagttggtctacgtggtcggctcagagcagcagtaccattttaaagtactcttcgtcctcttggagaagctgggctatgaatgggcgaaaaacctctaccacctttcctacggcatggtgaacctgccggaaggcaagatgaaaagccgggaaggcactgtcgttgatgcggacgacctaattgacagtttacgtgacatggctttggaagaaatacgcgacaaagaaagggaagaggcgctgggcgacccggaggaaacagcagaaaagatcgcacttggggcccttcattactttctcctacaagtttccccaaccagggatatactctttgaccccaaagaatccctttcgtttaacggaaacacagggccgtatttacagtacatgggcgcccgtatttcatccctcttgcgtaaggccgaagaaaagacaggcattgctgccgggccgccgcagctcgagctcctctctggcgacgccgaatggagctggtactcgcgataa

SEQ ID NO: 46866 - protein, 480 aa, Unknown
  Obtained from environmental sample
  DOMAIN (53)...(425): tRNA synthetases class I (R)
  misc_feature (1)..(480): Xaa is any amino acid
MGDLGFPMFGFARQFKKAPAQIAQMVAEKLPGSAADGPYVNIRLNRSEITRDILSELLGSANEQGGSIVGRPPTLAGKRVMVEFSSPNTNKPLHLGHLRNDVLGESISRILSACGAEVRKVCIINDRGIHICKSMLAYKEQGEGKTPESKGIKSDRFVGDWYVRFSQGLKEEAETLEREKGLNKKEAEAQAPMLLRAQELLRQWEAGDSETVELWKKMNAWAIDGWKETYKRTGVSFDQYYYESQTYLLGKDEILKGLEKGFFYRQEDGAVAVDLTEEKLDKKILLRSDGTSIYITQDFGTAIKRHKDWPFDKLVYVVGSEQQYHFKVLFVLLEKLGYEWAKNLYHLSYGMVNLPEGKMKSREGTVVDADDLIDSLRDMALEEIRDKEREEALGDPEETAEKIALGALHYFLLQVSPTRDILFDPKESLSFNGNTGPYLQYMGARISSLLRKAEEKTGIAAGPPQLELLSGDAEWSWYSR

SEQ ID NO: 46867 - DNA, 2088 bp, Unknown
  Obtained from environmental sample
  misc_feature (1)..(2088): n is a, c, g, or t
gtgtatttctggaatatgataggctccggcgtaggcgggttgtttattgttttatttatgttttttcttccgccgcagtaccttttactgcctgttctcgccctaacgataatcgccgcccttttaagctcgtgccgcagggaaggtaaattaactttcccgatcccttatgttatcggtctttgtataacaacattcggttcgattattctcgcgttcttctgcggcaatatcaggatttcagattacaaggacataagttacgtgcgaagatacgcggattccacccttgtccaccattcaaacgggcccgccggcgagtatcatgtctacgcgtcaaggtatttccattttgcgcccggactttcagataacgcggttttaagcattgaaaaccttcccactcagctttactggggattatttatcgacggttccggtccaatcggaataatggggcacttaaaagaagacgaaaaggtttacatggattatcttccgatggcggccccctacgtcatgattacggaaccggacgttttgcttgtaaatatgagcggcgggataaacgcgaatgtcgccctgtacaacggagcgcgttccatcgacattaccgagccgtcccctgaaataatccatcttttgcgaaaagatgtttccgtctcccgttttacgggcaatcttcttgataatgaaaaaataaatgtaatcaggggagaaggcagatcgcattgcgttaacaatgagggttcttacgatttaatcgaattaagcctggttgattctgtcggccttactgattcaggaggatacgcggtacacgaagattttaagtacactgtagaggcctttaaggattatttcagcggacttaaagacggcggcattctttcaataaccgtctgggacaggctgaatccgcccaggaacgtaccgcgcctttttaacacaataatcagcgcgatgaatgaagccggttttgaagagcctgaaaaatgtttttattcattcgggcttttgcgatctacttcgactatccttgtcaaaaaaggcgcgttcacgccgcgcgatcttaacgacctgaataaatttatcaaaaaatgttcttttgatcttttttacgctccggaagcggatttatcgttgcgcgattttgatatacttatggcaagctaccgcaatcagtttgttgattccggcgcggaagaagaaaaaatagaaacagtcacaaatgcggatatgtacagaaccataattccgcttttgttcgcgggagaagcgaataaaatagaagacgcctatatttttgacatccggcctgtttcagattcacggccttattacacagggtttttaaaaatggacgaactgccgatgtacctggatcagcttcgggatatttctgaagaatggggatacctgcttctctttgcaatgctgattcaagcgtgtatattcggccttattgtaattttaatccctgttatcggcaaaagaaaaaccctgttcgaaaaaagaaggggaaccattggggtaattctttattatgccggactcgggcttgggtatatgctcatagaaatttaccttatccagcgtcttgcggtgtttctttccaacccgacttattcaacaagcatggtgattaccgtaatgctaatttcttccgctcttggaaacattgtaagctctctttttaaacgctacagggtttttgtcgttccgatagcgtgcgttttgattgcgggagggtttttattttacattttcggtttaaatgacttccttgctaggtactattcttctcccatgatgacgcggtttttggtctcggcgttaattatcgccgttccggctttttttatgggcattccgtacccaaacggcctggccagccttcaggaaacaaaaccgcatctcttaccctgggcatggggaatgaacggaggcctttcccttgtcggaagcgcgatggcccgccttctttccgtagccagcggttttcccgtgcttttaaagctgggaattgggatatatttaatggtgggcgttcttttcccgatcaatcaaaagttgacccagtattaa

SEQ ID NO: 46868 - protein, 695 aa, Unknown
  Obtained from environmental sample
  misc_feature (1)..(695): Xaa is any amino acid
MYFWNMIGSGVGGLFIVLFMFFLPPQYLLLPVLALTIIAALLSSCRREGKLTFPIPYVIGLCITTFGSIILAFFCGNIRISDYKDISYVRRYADSTLVHHSNGPAGEYHVYASRYFHFAPGLSDNAVLSIENLPTQLYWGLFIDGSGPIGIMGHLKEDEKVYMDYLPMAAPYVMITEPDVLLVNMSGGINANVALYNGARSIDITEPSPEIIHLLRKDVSVSRFTGNLLDNEKINVIRGEGRSHCVNNEGSYDLIELSLVDSVGLTDSGGYAVHEDFKYTVEAFKDYFSGLKDGGILSITVWDRLNPPRNVPRLFNTIISAMNEAGFEEPEKCFYSFGLLRSTSTILVKKGAFTPRDLNDLNKFIKKCSFDLFYAPEADLSLRDFDILMASYRNQFVDSGAEEEKIETVTNADMYRTIIPLLFAGEANKIEDAYIFDIRPVSDSRPYYTGFLKMDELPMYLDQLRDISEEWGYLLLFAMLIQACIFGLIVILIPVIGKRKTLFEKRRGTIGVILYYAGLGLGYMLIEIYLIQRLAVFLSNPTYSTSMVITVMLISSALGNIVSSLFKRYRVFVVPIACVLIAGGFLFYIFGLNDFLARYYSSPMMTRFLVSALIIAVPAFFMGIPYPNGLASLQETKPHLLPWAWGMNGGLSLVGSAMARLLSVASGFPVLLKLGIGIYLMVGVLFPINQKLTQY

SEQ ID NO: 46869 - DNA, 306 bp, Unknown
  Obtained from environmental sample
  misc_feature (1)..(306): n is a, c, g, or t
gtgttgagttgtctgatggatattttctcggccattctggtcggtcttcccctgattattccactggggcacgtttacggtatcgatcctgtccatttgggcattatttttattgtcaatctggaagtcggtttccttaccccgcctgtggggatgaatcttttcctggcaagctaccgcttcaaaaggcctttcacggagatttgcaggtttgtgctgcctttcctggtggtgcagttggctgtggtgttgcttgtaacttatgtgcctgcgctttccacggcacttacgggactgtttagatag

SEQ ID NO: 46870 - protein, 101 aa, Unknown
  Obtained from environmental sample
  misc_feature (1)..(101): Xaa is any amino acid
MLSCLMDIFSAILVGLPLIIPLGHVYGIDPVHLGIIFIVNLEVGFLTPPVGMNLFLASYRFKRPFTEICRFVLPFLVVQLAVVLLVTYVPALSTALTGLFR

SEQ ID NO: 46871 - DNA, 1284 bp, Unknown
  Obtained from environmental sample
  misc_feature (1)..(1284): n is a, c, g, or t
atgcagttttgggttagaaaaaatgaatttggtgttcaagcacttgagatagacaaagtacctcaaaatgatattggggtagccattttaatcagcaaaatgtgcaaatctgcggaagaagtagcaaaagatatcgcacgtttaagcgaaccccgtattattcctacagaacctttgaatgattctcgtgacggcaagaaatacaaaactgtcaaaatcgggattcaaatttggatggcagagaatttgaactacaatgcaaacggttcaaaatgctacgaagataaccctgccaactgcgacaaatatggcagattatataattgggaaacggccatgaaagtctgcccaaacggttggcatttgcctaacaatgcagagcgtaataaattaattacctctgtcggtggtaaaaatacggctggtaaacatttgaaggcaaaaagtggttgggctgaagatggcaacggtacagatggttatggattttcagctattccaagcgacggtgggaaatccggcgtatggtggagttccacgaaagtccattccgacgatgacaattatgcctacaaatggtttatgggtggctacccagatgtggactggcgtatagacaataagattagtttttgttccgtgcgttgcgtanaggatgaactagcanaccaagccacgaaagcaaaaaaacctattaaagccacagaaccttcaaaagattctaaacatagcaaaaaagaagaaggtcttttaaatgattcccgcgatggcaaaaggtacaaggtggtaaagataggcacacagacttggatggcggagaatttaaactacaacgcaaatggctcaaagtgctatagcaatcaggagagcaactgccaaaaatacggaaggctctataactggaaaactgcaaaaacggcttgccccaatggatggcatttgccgagcgatgcggactggaatgttttgatgaaatttgtcaatccaagctgttctgacaataaagattgtgctggtgctggcacaaagctaaaggctacgagtggctggaataaaaatggcaacggcacagatgcattcggattttcggctctgcctggcggctacggcggttccgatggcagtttcagcagtgtcggcgactacggctactggtggagtgctagcgaggacgatagcaacggcgcctacgaccggattatgtactatatcagcgaggacgcaggctacaactactaccgcggtaagagctccttgcaaagtgttcgttgtctgcaggactga

SEQ ID NO: 46872 - protein, 427 aa, Unknown
  Obtained from environmental sample
  misc_feature (1)..(427): Xaa is any amino acid
MQFWVRKNEFGVQALEIDKVPQNDIGVAILISKMCKSAEEVAKDIARLSEPRIIPTEPLNDSRDGKKYKTVKIGIQIWMAENLNYNANGSKCYEDNPANCDKYGRLYNWETAMKVCPNGWHLPNNAERNKLITSVGGKNTAGKHLKAKSGWAEDGNGTDGYGFSAIPSDGGKSGVWWSSTKVHSDDDNYAYKWFMGGYPDVDWRIDNKISFCSVRCVXDELAXQATKAKKPIKATEPSKDSKHSKKEEGLLNDSRDGKRYKVVKIGTQTWMAENLNYNANGSKCYSNQESNCQKYGRLYNWKTAKTACPNGWHLPSDADWNVLMKFVNPSCSDNKDCAGAGTKLKATSGWNKNGNGTDAFGFSALPGGYGGSDGSFSSVGDYGYWWSASEDDSNGAYDRIMYYISEDAGYNYYRGKSSLQSVRCLQD

SEQ ID NO: 46873 - DNA, 489 bp, Unknown
  Obtained from environmental sample
  misc_feature (1)..(489): n is a, c, g, or t
ttgatcagatcggccgaggcttctgcctgcgttgggtataaaagtattttctttatcggaagaaatattgattacgctatctcgctggaaggttcgctcaaactaaaagaaatttcttacattcactcggaagcatacgcgggaggcgaattaaagcacggaactatttcccttatagaagaagatactcttgttgtagcaatttcaaactgtacttcgctctatggaaaaattatgagcaatgtggaacaagtcatcagccgaggcgctaaggttctgcttatcggcagttgtccggcggacgattcaaaagcggaaaaaaaatcagacgatagagtttatacgattgctctgccgaaatgcgcggatttattctccccttccctatcggttattttattacagcttttcgcctactatgtagccgcgaataaggggcttgatattgataagccgcgaaatcttgccaagagcgtcaccgttgaataa

SEQ ID NO: 46874 - protein, 162 aa, Unknown
  Obtained from environmental sample
  DOMAIN (7)...(148): SIS domain
  misc_feature (1)..(162): Xaa is any amino acid
MIRSAEASACVGYKSIFFIGRNIDYAISLEGSLKLKEISYIHSEAYAGGELKHGTISLIEEDTLVVAISNCTSLYGKIMSNVEQVISRGAKVLLIGSCPADDSKAEKKSDDRVYTIALPKCADLFSPSLSVILLQLFAYYVAANKGLDIDKPRNLAKSVTVE

SEQ ID NO: 46875 - DNA, 573 bp, Unknown
  Obtained from environmental sample
  misc_feature (1)..(573): n is a, c, g, or t
atgggaagtgctttaatcatatccggttcagaaaaagatacttctgttttttctgcgttgttaaacgaggctgacatttccgtaattaaatgcgcacagtcatgtgagagcgccaataaactgcttttaaaacaaaatttcgacttggtaattatcgatcctcctctttcagatgaatcgggagaaagtttttcgcggtatattgccggcaagggaatgtctcaggttattctcactgtaaaagaagaatccccgggttatgtatttgaagaatatgagaaagacggtattttgacaatttccaaaccaattgataaaattggttttagaacggcgttatccaccataaaagccgttcaaagcagagtaagacaggtacaggaagaaaatgcgcagttaaagcaaaaaatagaggacatacgtataattgaccgtgcaaaatgtttgttaatttcttatatgaaaatgagtgagcaggaatctcatcggtatattgaaaaacaggctatggatatgcgctcgtcaaaaaagattgtcgctgaggggatattaaaaagatatgaaaacttntag

SEQ ID NO: 46876 - protein, 190 aa, Unknown
  Obtained from environmental sample
  DOMAIN (2)...(114): Response regulator receiver domain
  misc_feature (1)..(190): Xaa is any amino acid
MGSALIISGSEKDTSVFSALLNEADISVIKCAQSCESANKLLLKQNFDLVIIDPPLSDESGESFSRYIAGKGMSQVILTVKEESPGYVFEEYEKDGILTISKPIDKIGFRTALSTIKAVQSRVRQVQEENAQLKQKIEDIRIIDRAKCLLISYMKMSEQESHRYIEKQAMDMRSSKKIVAEGILKRYENX

SEQ ID NO: 46877 - DNA, 801 bp, Unknown
  Obtained from environmental sample
  misc_feature (1)..(801): n is a, c, g, or t
atgaaaacttntagaaaactgaatgaggaatgcgctgttttcggagtcagtttgaatactgatgaagccgccggtattacatataacggtctgctttcgcttcaacaccgagggcaggaaggcgcgggaatcgcggtcgcttttaaccgaagcattatatgccataaagacgtagggctggtaagcgaagttttttcaggcgaagaatttaaaaaactgcctaaggggaatgtagccgtcgggcatacgcgttattcgacaaccggaaataatacaaaagaaaatgtaggtccgtttgttacggaatatttaacgggcagaattgcaacggcgcataacggaaatattacaaacgcttctgaaattcgcggcgagttggcaaagctcgggatttatttcaacgcgaccagcgacagtgaagttgtctcctcgttaatcgcgtattttataacaaaagaaaaaagctctattgccggcgttaccgccgccgcaggctatttaaaaggagcgttttccctcatcatagcgacaagcaaaaataaactgatagttgtccgcgatccaaacggcttccgtcccctttgcatcggaaaaaatgcgacgggctgcgttgtcgcttctgaaacctgcgctcttgacgcctgcggttttgaatatgtgcgcgatgttctgcccggtgaagttttaattatcgaaaggggcgagataacgcaggaaggcgtcaaactggaaaaaaaagaatctaatcacgggctttgtatttttgaatatgtctacttcgcccgtcccgattccggatga

SEQ ID NO: 46878 - protein, 266 aa, Unknown
  Obtained from environmental sample
  DOMAIN (11)...(209): Glutamine amidotransferases class-II
  misc_feature (1)..(266): Xaa is any amino acid
MKTXRKLNEECAVFGVSLNTDEAAGITYNGLLSLQHRGQEGAGIAVAFNRSIICHKDVGLVSEVFSGEEFKKLPKGNVAVGHTRYSTTGNNTKENVGPFVTEYLTGRIATAHNGNITNASEIRGELAKLGIYFNATSDSEVVSSLIAYFITKEKSSIAGVTAAAGYLKGAFSLIIATSKNKLIVVRDPNGFRPLCIGKNATGCVVASETCALDACGFEYVRDVLPGEVLIIERGEITQEGVKLEKKESNHGLCIFEYVYFARPDSG

SEQ ID NO: 46879 - DNA, 792 bp, Unknown
  Obtained from environmental sample
  misc_feature (1)..(792): n is a, c, g, or t
gtggacagcttcctccccgtggaggaacgctacgagtttttgcggaaatcctcatacaaagagaaccccgacaacggcgagggcttcaggatccgcaccgcgaagatgcgggggcaactctcccaggggcttctgatcccctattcggccttctccgagcttcagggcctaaacgagggcgacgacgtgacggagaagctccgggtcaaaaagtggttcgtccccgaaaccaacaccgccggcggggtggtcatcggcgaacgcccccacggaatcccgacctccgacgaaacgcggatccagtccgccccggagatgctcgacgaactcaaaggcaaaccctactacataaccacgaagatggacggcacctccggcaccgtctactatatcgacggaaaggtcggctgctgcagccgcaacaaggagatcaaagacgaagagacctcgctctactggacgccgacctacaggcacggcctcaaggacaagctggccgcgtacggtaagaacatcgtgctgaccggagagatatgcggccccggaatacagaagaacaaactaaagttgcaacgcgttgaatggtacgtattcgacgcgatagacgtggactccggcaagtatcttccctacgacgatatgtgcaagctatgcaacgacttaggcgtttccaccgtccccttggaagagcgtggggagagcttcgcgtacacattggaaacgcttttggaaaagcgaaaggcaagtacccgagcgggcaagaaaaggaaggtatcgtcgtacgggacgtaa

SEQ ID NO: 46880 - protein, 263 aa, Unknown
  Obtained from environmental sample
  misc_feature (1)..(263): Xaa is any amino acid
MDSFLPVEERYEFLRKSSYKENPDNGEGFRIRTAKMRGQLSQGLLIPYSAFSELQGLNEGDDVTEKLRVKKWFVPETNTAGGVVIGERPHGIPTSDETRIQSAPEMLDELKGKPYYITTKMDGTSGTVYYIDGKVGCCSRNKEIKDEETSLYWTPTYRHGLKDKLAAYGKNIVLTGEICGPGIQKNKLKLQRVEWYVFDAIDVDSGKYLPYDDMCKLCNDLGVSTVPLEERGESFAYTLETLLEKRKASTRAGKKRKVSSYGT

SEQ ID NO: 46881 - DNA, 408 bp, Unknown
  Obtained from environmental sample
  misc_feature (1)..(408): n is a, c, g, or t
atgccggtgtccatcaataaatcctggacgtccctcagccggcactccttgccatttatccgatattcgctccccgactctcggaacagcctcctagatatggtcatctccagcatggcctcagggcgcacaacatcgggcatctcaagcgtcagttttacttcggccatgttcatggccttcctttcgctagtccccgcaaacaccacgtctgccatctcagtgccgcgcagcaggctggcgcgttgttctcccagcacccatgccagcgcatcggagatgtttgacttgccgcacccatttgggccaacgacagccgtcatccccccggggaagaccagtttttgggggtcggcaaaggatttgaacccatgcaattcaagtgaaagaaggcgcattaattactaa

SEQ ID NO: 46882 - protein, 135 aa, Unknown
  Obtained from environmental sample
  misc_feature (1)..(135): Xaa is any amino acid
MPVSINKSWTSLSRHSLPFIRYSLPDSRNSLLDMVISSMASGRTTSGISSVSFTSAMFMAFLSLVPANTTSAISVPRSRLARCSPSTHASASEMFDLPHPFGPTTAVIPPGKTSFWGSAKDLNPCNSSERRRINY

SEQ ID NO: 46883 - DNA, 894 bp, Unknown
  Obtained from environmental sample
  misc_feature (1)..(894): n is a, c, g, or t
gtggccagcatctataggaatctgaaagcaggacgtaccatatccggggcatccaccatcacgatgcaactggcacggctggtgcatccccactcgggcggtatgcggggaaaaatcattgaagcctgggacgctatccggcttgaagccaacctttcaaaaaaagaaatcctcgagctgtacctgaacagcattcccttcggcagtaacatcgaggggctggccgcaataaccagggccaggtttggcagctctgtcagagagctggacgacaacagggctgcgctccttgcgtcggttcctaggcgtccgcttctttacgatcccgccttaaaccctgaggcagctgtttccgccgccatggccctgtccgcccgatgccgcctggatttaagggaagaagagctctggcaagcggcaatggaggccgctatacccacatctaaccaggatgatccaagggctccgttcttcgctccccactttaccgagcgccttgccagaatggagccgaaaaaggtgactaccttcggttcattggtcaccaaaagtaccctcgacctcgcatcccagcttttcgccgaagaagagctggccctggaaatctcgctcctttcgaacaagcggataagcaacggggcaatcatggcaatagaaaacgaaacaggcgcggtgagggtatacgtcggttcaggctcctggtttaacgaagaggcttcgggaaagattgacggtgtccgttttcgggcgcaacccggctcttgcctaaagccttttctctatgcgatggctttggacacgggcttcagtccgaacgaaatcatgccggatcttcccacnggttttcggaagcagggaagcctacgttccctcgaatttcaacaaccgctttaa

SEQ ID NO: 46884 - protein, 297 aa, Unknown
  Obtained from environmental sample
  DOMAIN (1)...(113): Transglycosylase
  misc_feature (1)..(297): Xaa is any amino acid
MASIYRNLKAGRTISGASTITMQLARLVHPHSGGMRGKIIEAWDAIRLEANLSKKEILELYLNSIPFGSNIEGLAAITRARFGSSVRELDDNRAALLASVPRRPLLYDPALNPEAAVSAAMALSARCRLDLREEELWQAAMEAAIPTSNQDDPRAPFFAPHFTERLARMEPKKVTTFGSLVTKSTLDLASQLFAEEELALEISLLSNKRISNGAIMAIENETGAVRVYVGSGSWFNEEASGKIDGVRFRAQPGSCLKPFLYAMALDTGFSPNEIMPDLPTGFRKQGSLRSLEFQQPL

SEQ ID NO: 46885 - DNA, 1218 bp, Unknown
  Obtained from environmental sample
  misc_feature (1)..(1218): n is a, c, g, or t
atgcgatggctttggacacgggcttcagtccgaacgaaatcatgccggatcttcccacnggttttcggaagcagggaagcctacgttccctcgaatttcaacaaccgctttaacgggcctgtgcggctcagaatcgccctggcctcttcgctcaacattcctgctgtttacgtcctggagcggctgggcgttcgtgcttttgaggagtacctggtcagcctgggttttgattccataagggaaaccataggaacgcatggcacgggcctcgcccttggcaacgccgaggtgagccttgaggaaatggtgcgggccttctccgtttttccgcgcatgggttcgccggtggaattccgctggacggaagacgggaaacctgtccaggcaacgaaggaacaggctacaccgtccgtcatgtccccatacgcggcctggatgattgccgacatactctcggacaggtcaagccgcttcgtgggcttcggccccgccccgtctctggcgactccttttgaatcaatgttcaaaaccggaacggccaaccagtttcagcacatctgggctttgggtgcgacaaggcgttttaccgtgggcgtctggatgggaaatttttcaggcgagacaatcattggcagtacgggaagctccatccccgccaggattgtggcaaaactcctcggcgttttggaagattccgccgggcaggaaaaggcgcaaagaagcacgagtaaggcaacagaaaacctggcaggccctgtgccgcagggaacaacggaagtgcaaatctgtgccctttcgggaatggcggctggcccctactgcaccggacttaccagggaatttatacgcaacgagaaaattcccacagtctgcaactggcacacacaggctggcctcttttacccaggcgaataccgctcgtggctgagcgaaaggttccgttcaggcggcgtaaggcaggaagggacaggccgcataaggacgccggtaacaggagcggtgttttaccttgacccgtcgctgcctgccgaggcgcaggcgctgcgggtcgaaaccacaggcttcagcgaaagcgcgcttatctttgttgacggagaactggccggcagccttaaccacgccggagtttacgcgcttccacttttgcggggacggcatagcatcacagtggcggataacgaaggaagttccgcctcggcggactttgaagtgaagtaa

SEQ ID NO: 46886 - protein, 405 aa, Unknown
  Obtained from environmental sample
  DOMAIN (313)...(402): Penicillin-Binding Protein C-terminus Family
  misc_feature (1)..(405): Xaa is any amino acid
MRWLWTRASVRTKSCRIFPXVFGSREAYVPSNFNNRFNGPVRLRIALASSLNIPAVYVLERLGVRAFEEYLVSLGFDSIRETIGTHGTGLALGNAEVSLEEMVRAFSVFPRMGSPVEFRWTEDGKPVQATKEQATPSVMSPYAAWMIADILSDRSSRFVGFGPAPSLATPFESMFKTGTANQFQHIWALGATRRFTVGVWMGNFSGETIIGSTGSSIPARIVAKLLGVLEDSAGQEKAQRSTSKATENLAGPVPQGTTEVQICALSGMAAGPYCTGLTREFIRNEKIPTVCNWHTQAGLFYPGEYRSWLSERFRSGGVRQEGTGRIRTPVTGAVFYLDPSLPAEAQALRVETTGFSESALIFVDGELAGSLNHAGVYALPLLRGRHSITVADNEGSSASADFEVK

SEQ ID NO: 46887 - DNA, 1263 bp, Unknown
  Obtained from environmental sample
  misc_feature (1)..(1263): n is a, c, g, or t
atggcttcgatcttgtcagtattaagcgaagggttttcatgccctgtaagggatgtcctttgggggcatgtgtatttcaccccggaacttgccgcgcttgccgaatctccagccttcatgcggctgcaccgcattttacagcttggcccggtacaccaaatctatcctggcgctacccacacccgcgccagccattcaatcggggtctatcacctgggacggaggctgctgcaaaaccttgtggaacgcggcggcgagggctgggtaagccgggaaggggtaatggccttcctctgcgcctgcctgcttcacgacctgggccattttccctatacccattcactgaaagaactgcccttgcgctcgcacgaatcgcttaccggaacaataatcctttcggagccaataaaaagcctggtcgccgccagcggcgcggacccggcgctgacagcggcgatagtggacaaggaactctccgccgaggataaagagctgcttttctaccggaaactcctgtccggatgccttgacccggacaaactggactatttgaaccgcgatgcccggtactgcggcgtcccttacggggttcaggacgtagatttcatcctttcacgccttatccctaaccttaacaggggagccgacatcgattcccggctgatccccaatgtggaggcgatacttttcgcaaaatacctgatgtaccggacggtttactggcaccggcaggtacgttccgctacctctatgatcaagaaagccctgctggagggcatggaaaaaggggctatagccggagaagagctgtacaaccttgacgatcagagcctgtttttcctgttgaaagagaaaaaaaccaacaggaagcttgcgccagcggtacgggacggcaggctctattctgtagctgcggaaattcctttcaaccaacaggatcatgccggtttgaaggacattgccagaaggtctttctacgaagagcagctcgccggagaattccgccgtgcgggcatcccgcttggcgatgacgaccttatcattgacgtgcctgagccggtctcatttgggacaggcctttttgttctggacgaagaccgcagttttgcggaaagttccagcgccttcaagacaacaacactggattcttttgtaaaaacactgtatacgataaggatatttattaatccggatttttacgaaaaagtagagacattaccgaaactatctgatatacttaatacggggaaattgtgttcctga

SEQ ID NO: 46888 - protein, 420 aa, Unknown
  Obtained from environmental sample
  DOMAIN (62)...(160): HD domain
  misc_feature (1)..(420): Xaa is any amino acid
MASILSVLSEGFSCPVRDVLWGHVYFTPELAALAESPAFMRLHRILQLGPVHQIYPGATHTRASHSIGVYHLGRRLLQNLVERGGEGWVSREGVMAFLCACLLHDLGHFPYTHSLKELPLRSHESLTGTIILSEPIKSLVAASGADPALTAAIVDKELSAEDKELLFYRKLLSGCLDPDKLDYLNRDARYCGVPYGVQDVDFILSRLIPNLNRGADIDSRLIPNVEAILFAKYLMYRTVYWHRQVRSATSMIKKALLEGMEKGAIAGEELYNLDDQSLFFLLKEKKTNRKLAPAVRDGRLYSVAAEIPFNQQDHAGLKDIARRSFYEEQLAGEFRRAGIPLGDDDLIIDVPEPVSFGTGLFVLDEDRSFAESSSAFKTTTLDSFVKTLYTIRIFINPDFYEKVETLPKLSDILNTGKLCS

SEQ ID NO: 46889 - DNA, 894 bp, Unknown
  Obtained from environmental sample
  misc_feature (1)..(894): n is a, c, g, or t
gtggaagccgcaaataagctcaccgaagacaacaagaaaaaccttgacaaccagataaagtggatagaaaagaaagccgctgcggagggcaaggcgacagaaagcatagaagtccaaaaggaaatcatggacgcgcaggtaaatgcctatcaaaaccagcttaaaatcctgcaagacataattgacggtacaggggaagaagagactgagcgcaggaaagcattacaggcgcaatgggatcaatacaaagcggaattacaaacagccacggcgcagaaaaacagattagacgaaatgcttaaaaaacaggaagagcttaacagaaaaatcaaagagatgtacgaaaacgcggtaatcactgtcgatacatcctattatgaagctgaattaaacaggttaacaaatttacaaaaaatagcgtcaagaaaaggcggcgaagagctaataaaaataaaccagcagattgcggatcataagttgagttacgcgttaaaaaaacaaaaagaggaacatgacgcggcaattaaaaatctggaagaacaaatagccgaacaggaaaaaatagagggggaagccgccgaaaagaaaaggcaggaattggaagatacaataaagattttgcaacagggttttcacatagaacaggtaaaaaagaccggggaaatatattctgaaatgtttgattctattaccggcccccatagaatacaacaaattaaagccttagaagaagctatggtggaagccttagcaaaattagtacctagtgatgattttaacttcccggatttagaattgcccaatattgatgattttgccgattttgaggagtacttaaaagcggtagaaaccgcgacaggggaatacggcgggaaaaatagcggaacagcttag

SEQ ID NO: 46890 - protein, 297 aa, Unknown
  Obtained from environmental sample
  misc_feature (1)..(297): Xaa is any amino acid
MEAANKLTEDNKKNLDNQIKWIEKKAAAEGKATESIEVQKEIMDAQVNAYQNQLKILQDIIDGTGEEETERRKALQAQWDQYKAELQTATAQKNRLDEMLKKQEELNRKIKEMYENAVITVDTSYYEAELNRLTNLQKIASRKGGEELIKINQQIADHKLSYALKKQKEEHDAAIKNLEEQIAEQEKIEGEAAEKKRQELEDTIKILQQGFHIEQVKKTGEIYSEMFDSITGPHRIQQIKALEEAMVEALAKLVPSDDFNFPDLELPNIDDFADFEEYLKAVETATGEYGGKNSGTA

SEQ ID NO: 46891 - DNA, 1320 bp, Unknown
  Obtained from environmental sample
  misc_feature (1)..(1320): n is a, c, g, or t
atggatatgcccattgaggctaacacaaatgatgaattaggcatgctggcccgggcctttaacaaaatgacaagcgaccttaaaaactccatcgaggaaaacgcccgtgagcgcgcggaaaaagaacggattggcgccgagcttggcgtggcggctgcgatacaggccagtatgcttcccaatattttcccgcccttccctgaaagaaccgaatttgacctttatgcttccatgcttccggcaaaggaggttggcggtgatttttatgatttctatttaattgataaggataaccttgcggtggttgtcgcggatgtttcaggcaagggcgttccggccgcgttattcatgatgattacgaaaaccatgctcaaagactcaagtcctggtaacagccttaaaaatgtttttgaatctgtaaacaaaaaattatgcgaaggcaatgaagcggaaatgttcgttacggcgtttatgggtatttacaacatcccaagcggaagatttgtgtttgtcaacgccgggcataatccgccgcttctaaaaaaacgcggaagcggttatgagtttttggaaactgaccccggntttgttttggcgtggatgaaaaacgcgaaatataaagaaaaggaaatcagccttgaacctggcgacgttctggttttatatacggacggcgtaactgaagcgaggaaccagcggaaggaacttttcggcgaacagcggctgcttgacgcgctgaacgcaaacaggggtgccgagcttaaagatctgctgccggccgtcaagcgggaagttgataatttcgaggatggagcagagcaggccgatgatattaccatgcttgccctgaagataaacagcgagagttccggcgaaccgccaaaagacatgatgaaaaagctggaacttgaagcaagccttgaaaatctgaataaggcgcttgcctttgtcaatacggagctggaacagcacgaatgtccccaggacatacagggaaaaatagaaattgccgtggaagagatttttgtaaacatcgcgagttatgcctacagcccgggcaatggcaatgctgtcatatttatttccgttgccgacaatatagtaatccggtttgaagatacgggcaggccctataacccccttgagaagcccgagccggatttggacaaaccgctgatggatcgtgacataggcggcttgggcgttttccttgtcagaaagctgatggacaatgttgaatatacgcgtgttgggaataagaatgtgctggtgatgacaaagaaattaggcatgaggagtgaagaagaaattaggaattag

SEQ ID NO: 46892 - protein, 439 aa, Unknown
  Obtained from environmental sample
  DOMAIN (95)...(286): Stage II sporulation protein E (SpoIIE)
  misc_feature (1)..(439): Xaa is any amino acid
MDMPIEANTNDELGMLARAFNKMTSDLKNSIEENARERAEKERIGAELGVAAAIQASMLPNIFPPFPERTEFDLYASMLPAKEVGGDFYDFYLIDKDNLAVVVADVSGKGVPAALFMMITKTMLKDSSPGNSLKNVFESVNKKLCEGNEAEMFVTAFMGIYNIPSGRFVFVNAGHNPPLLKKRGSGYEFLETDPGFVLAWMKNAKYKEKEISLEPGDVLVLYTDGVTEARNQRKELFGEQRLLDALNANRGAELKDLLPAVKREVDNFEDGAEQADDITMLALKINSESSGEPPKDMMKKLELEASLENLNKALAFVNTELEQHECPQDIQGKIEIAVEEIFVNIASYAYSPGNGNAVIFISVADNIVIRFEDTGRPYNPLEKPEPDLDKPLMDRDIGGLGVFLVRKLMDNVEYTRVGNKNVLVMTKKLGMRSEEEIRN

SEQ ID NO: 46893 - DNA, 1497 bp, Unknown
  Obtained from environmental sample
  misc_feature (1)..(1497): n is a, c, g, or t
atgaacgtatacctgaccgacaaaaatccgcccgtcgtgcggctctacgatctgaacccctacaccgagaccgcggtaatagagggcaataaagagcagacaagaaaggatgccgccaatccgcaggccataggaagcaacatagtaaggggcggcctgtacaacgacggcagcgccagggcgatggtacgctccggcttcattgatccgcgcggcagttccacggctctggatccaaagaacggcgtgtacttccaggacgtaaccccgagttcaccctggcagttgatcgacggggcggaaccgccggcttcaaatctgaaggtggaaggcgacgccgtgggtaccggcactacgccggataaggtcagcggcaagatcatcctgcgcggccttgcctgggacgatcagttggttaaaacgataacgcttgacttaaacggcgcttcaacgcccatcctccaactggatgagacgtcgccggctggcagtgcgacaaggggtaaaatggtggcgacggcaggtaatgaaaacaaggcctttgttgttgaagaactccactggaagaccggccattcggttgaatgggcctatatctgggataccagcgccatcagccccggcaacgcgacagtaacggtgtcggcaacagacaggaacggacccctctcaagcggcgccgccattaccgtggatgatgaaacctccgatccctcgaccagcaagaaattccacagtaaagtcaccgtcactatagtgccctacatcaccggctttgaaagggatgcgaaattcgtaaccaaacgctcattgcagggctggtacagcttctatcagggcgaaaccagcattaaggtaaagggatataattttggaaccggcggcacgaatagcataagcttgaatggtatagacgtaggaaccgtgacagttaattccgctacggaacgtacctttagcatacccggcgggggagcctcgggcgcgataaacatgacagctaacagtgtggcggcttacaataactataccgatatcgcaaacgtaatcgactacataaagaccaggtcctggaacagggaattcagcgcttatacgccgggctccgacctgtggatcaacaggcactacgcccatatctggcggactactgtaacggatggttcaagtcccaatacctatataggcacgtctaccagcagttccggacttgatcatccgggcatggcgctggaatatacgggcagcggcgcgccgctccacggaacttggggggtttacggaaacgccaattcgtattacggaacaaataccggcatttccaatgcgcttcatagcgggacgccgggcgaacccttcatcaccccggacatcagcatttttagcggcggaggcaccgacgccgcaaatatagggtataccttccaggctgacggcaaggcgcagattttagtcagggcaagagttactactcaagtaggcactcggccgatctga

SEQ ID NO: 46894 - protein, 498 aa, Unknown
  Obtained from environmental sample
  misc_feature (1)..(498): Xaa is any amino acid
MNVYLTDKNPPVVRLYDLNPYTETAVIEGNKEQTRKDAANPQAIGSNIVRGGLYNDGSARAMVRSGFIDPRGSSTALDPKNGVYFQDVTPSSPWQLIDGAEPPASNLKVEGDAVGTGTTPDKVSGKIILRGLAWDDQLVKTITLDLNGASTPILQLDETSPAGSATRGKMVATAGNENKAFVVEELHWKTGHSVEWAYIWDTSAISPGNATVTVSATDRNGPLSSGAAITVDDETSDPSTSKKFHSKVTVTIVPYITGFERDAKFVTKRSLQGWYSFYQGETSIKVKGYNFGTGGTNSISLNGIDVGTVTVNSATERTFSIPGGGASGAINMTANSVAAYNNYTDIANVIDYIKTRSWNREFSAYTPGSDLWINRHYAHIWRTTVTDGSSPNTYIGTSTSSSGLDHPGMALEYTGSGAPLHGTWGVYGNANSYYGTNTGISNALHSGTPGEPFITPDISIFSGGGTDAANIGYTFQADGKAQILVRARVTTQVGTRPI

SEQ ID NO: 46895 - DNA, 1182 bp, Unknown
  Obtained from environmental sample
  misc_feature (1)..(1182): n is a, c, g, or t
atgatacagcgtaacccttgtatagcgaaccttaaagcgggatatctctttcccgaaatcgccaagaggcggcgtgaatacgctagcgcccatcccggcgcgaagatcatcagccttggggtggggaacacgacggaaccgattctgccccacgttaataatggccttgtggaaggcgcgaagcggcttggcacgcttgaaggctattcaggttatcaggacgaggggcttcaagcgcttcgagaaaagatttccgctgttttttacggtggtaaatttaacgctaatgaaatttttatttcagacggggcgaagtgcgacataggcaggctgcaactgctttttggaaggtcaacgcgggtggcggttcaggatccttcgtatcccgtgtatgtggacggctcggttttgatcggagccgccggcggcgccgctcttagcggttatgaaggcatagtctatcttccctgtacgaaggctaatggttttttcccggatctttcccggttcccgtcaaaaagccttttgtatttttgttcgccgaataatccaaccggcgccgtggcagacagggaacagcttgaggttcttgttaaaacatgccttgaaaaaaaagccattgtcgtctttgacgcggcctacagtgaatacatccgtgacccgaaacttcccaaaagcatttttgagattgaaggctcaaagcagtgcgccattgaagtgaattctttttccaagaccgccggatttaccggcgtgcgcctcggctggacagtggttcccgccgggcttaaatatgaaggcggcgagagcgtcaacgcggactggaaccgcgtttgttccacaatattcaacggggcctccaatatagcgcaggccggcgggcttgccgcgttagacggcgagggcctgaaggaaatcagggctcttaccgatttttatctcggcaacgcccgtctgatacgcgaggccctgcacggcatgggcgtagaaaccacggggggtgacaattccccgtatatatgggcttattttcccggcagggacagttgggaagtcttttcacaactgctcgaaaaatgccaggtagttacaacccccggagccgggttggccccgcgggggacggctatatccgcttctccgcctttggccaccgcgccgactcggccgaatctgacctag

SEQ ID NO: 46896 - protein, 393 aa, Unknown
  Obtained from environmental sample
  DOMAIN (34)...(387): Aminotransferase class I and II
  misc_feature (1)..(393): Xaa is any amino acid
MIQRNPCIANLKAGYLFPEIAKRRREYASAHPGAKIISLGVGNTTEPILPHVNNGLVEGAKRLGTLEGYSGYQDEGLQALREKISAVFYGGKFNANEIFISDGAKCDIGRLQLLFGRSTRVAVQDPSYPVYVDGSVLIGAAGGAALSGYEGIVYLPCTKANGFFPDLSRFPSKSLLYFCSPNNPTGAVADREQLEVLVKTCLEKKAIVVFDAAYSEYIRDPKLPKSIFEIEGSKQCAIEVNSFSKTAGFTGVRLGWTVVPAGLKYEGGESVNADWNRVCSTIFNGASNIAQAGGLAALDGEGLKEIRALTDFYLGNARLIREALHGMGVETTGGDNSPYIWAYFPGRDSWEVFSQLLEKCQVVTTPGAGLAPRGTAISASPPLATAPTRPNLT

SEQ ID NO: 46897 - DNA, 1038 bp, Unknown
  Obtained from environmental sample
  misc_feature (1)..(1038): n is a, c, g, or t
atgctggctgaaatggccggcattactggcgagaatataatgttctcctccaatgagactccggcgagggaatacgaactggcccgccagcttggcgcggtgatcaatctggacgatttgacccacattgaattccttgagaagaccgccgggtttacccagttgatttccctgcgctataaccccggcccccttaaagaaggaaacgcgatcatcggcaagccggaagaggccaagtacggacttacccgcgaacagattatcaagggttatgccctgcttaaggataaaggcatcaggcgtttcggcctgcataccatggtggcttccaacgagctttccattccctaccatgttgaaacagcccgtatgctgtttgaactcgcggcggaaatactgaagaagaccggcgtaaaaatcgaatttgtaaacctcggcggcggcgtgggcattccctacaagccggaagaggaagcggttgattacaatgttcttgccttgggtatacaaaaagcgtataacgacatactcaaacccgccggcctggagcctcatatccatacggagtgggggaggactattaccggcccttacggctggctggtggcgcgggctatacataaaaaagaaatttaccgcaattacatcgggcttaacgcgtgtatggcggatcttatgcgccccgcgctttacggcgcttatcatcacatcaccgtccccggcaaggaaaacgatccgttaagcgaaacttatgacgttgtcggcagcctgtgcgaaaacaacgataaatttgccatacagcgcaagctgccgaaaattaccgtgtcggcggaaacccctgacaacaagggcgaccttgtggtgatccatgacgcgggggcgcacggcagggcgatgggctttaactacaacggcaaactgcgctgcggagaactgctgatgaggcaggataaatcgatcatcatgatacgccgggccgagaccacgaatgattatttcgcgactcttgatcttgcgggcctgaaaaaatttacttaa

SEQ ID NO: 46898 - protein, 345 aa, Unknown
  Obtained from environmental sample
  DOMAIN (1)...(197): Pyridoxal-dependent decarboxylase, pyridoxal binding domain
  misc_feature (1)..(345): Xaa is any amino acid
MLAEMAGITGENIMFSSNETPAREYELARQLGAVINLDDLTHIEFLEKTAGFTQLISLRYNPGPLKEGNAIIGKPEEAKYGLTREQIIKGYALLKDKGIRRFGLHTMVASNELSIPYHVETARMLFELAAEILKKTGVKIEFVNLGGGVGIPYKPEEEAVDYNVLALGIQKAYNDILKPAGLEPHIHTEWGRTITGPYGWLVARAIHKKEIYRNYIGLNACMADLMRPALYGAYHHITVPGKENDPLSETYDVVGSLCENNDKFAIQRKLPKITVSAETPDNKGDLVVIHDAGAHGRAMGFNYNGKLRCGELLMRQDKSIIMIRRAETTNDYFATLDLAGLKKFT

SEQ ID NO: 46899 - DNA, 2415 bp, Unknown
  Obtained from environmental sample
  misc_feature (1)..(2415): n is a, c, g, or t
ttgggtttctctatcgagcaacttgtagggcttgatgaaataaaaaaggatttatccgaattgcaggcgatccttgaagggatgaagcagagcaataaaggcacccgttttccttacgacacaatcatcatcggcgcttccggaaccgcaaagacgctcatctccaatctcattgccgatctgttttttaagttcggcatgatcacaaaaggcaagcctgaaaaagtagacggcgcgagtctcaacggactgtccaaaaaagatatagacagccttttttcaaaagcaaagggcgggatgctttttgttgacaacgcccaaaagctcctggattccgatggcaaggcaatgccgactttttcccatttcattgacgcgatggacgccaacaaggatgaccctcttgtgcttatggcgggccttcctgtcggcctgcgggaaatggtaaaaagctccgaatcggcaaacaagcaaatagtcaatcgttttgaaaagatatttattatcccagattatacgccggaccagtatgtaaaaattaccgagaacgaattgaaaaaacaaagctttacattcagccccgaattttccgagaaactcctccagcggttccgttacctctacaaggaactaaagaagccggtcaacagcattaaatccgtaaacggctaccttgccattaaagaagcccaggcaataacgggctgttactacctgagaaaagcttccgacaaaataattctaccggaggatattaaagggcaggttgaagaaaagaaaagcttgcagganatcatggcggagcttgacgccattatcggtatgaccgcgttaaaaaaagaaatcaagagcctttacacgcaattaaaccagatcgccgaaatggaaaagaaaggcgtcaaacaggacaagcccgcccagcattttgtcattaccggcaatccgggtaccggcaaaaccacggtggcaaggctgcttggaaaaatatttgaagggcttggcctgctggattccggccatgttgttgaagtagacagaagcaagctggtcgcgggttatgtaggccagactgcgcctcttaccaacaatgcctgcgatcaggcggcgggagggctcctttttattgacgaagtgtacacgttaaaacaaaatgacagcgacagtttcggccaggaatgtatcgacaccctgcttaaacggatggaagacgaccggggcaagttcatggttatcgttgccggatacaaaagcccgatggagaaattccttacagccaatgagggcttaaaaagcaggtttacaaaatactttaaccttgaagattataacccggaagaactcgccgcgatatttgaatctcttgccaagaaacagcattttatagtaccgccggagacaagggttaaggttgtagctttctttgaagacaggtgcgcgcggaaaaccaaagattttgccaacggaagggaagcgagaaaccttatggacgaagcgaggaagaatcaggcggaacgtttgtcttcggctgatatagcttccttgtcaaaggaagatacccttacatttcttcctgaagatattcccggcacgactgccgataaaatggtttccattgacgaggcgctcaaagacctcaacacgctggtggggcttaaatcggtcaaagacgcggtaataaaaataaccaactctttgcaggcccaaaaacttaccggcgaaacggaagcgcttgccaagcactttgtttttactggcacccccggcacggggaaaacgactgttgcgcggataatgggcgacgtgttcaaggcagtaggaatgcttcccaccaacaatntgatagaagcggacagggggaaactggtggcatcctatgtaggccagacagccaagctggtggcgcagcagtgcgacaacgcaatgggcggcatcctttttattgacgaagcttactcgctgaaacaggggccgcaggacagtttcgggcaggaagcggtggatacgcttcttaagcggatggaagacgacaggggcaaatttgtggttatagccgccggttacacaaaagagatgaatgaatttttggcgtccaacagcgggtttaaatcaaggttttcggattacatcaactttgacgactacaatacgtccgaaatgcgggaaatttttatgggaatgtgcaaaaagagaaaaatcgaatttgcccccggctttgacgaggcgctgaaaaaaaggctggaaggattgtatgccggaaggaacgcccagtttgccaatgcccgcacggtaaggcagttgtttgacaagacaagggagaacgtatccggcagggtgcttgccatgcggaaaagcgaagaagagctaaagcgcgaaatattgatcattcgcccggaagatctggatatgaccgtatag

SEQ ID NO: 46900 - protein, 804 aa, Unknown
  Obtained from environmental sample
  DOMAIN (580)...(764): ATPase family associated with various cellular activities (AAA)
  misc_feature (1)..(804): Xaa is any amino acid
MGFSIEQLVGLDEIKKDLSELQAILEGMKQSNKGTRFPYDTIIIGASGTAKTLISNLIADLFFKFGMITKGKPEKVDGASLNGLSKKDIDSLFSKAKGGMLFVDNAQKLLDSDGKAMPTFSHFIDAMDANKDDPLVLMAGLPVGLREMVKSSESANKQIVNRFEKIFIIPDYTPDQYVKITENELKKQSFTFSPEFSEKLLQRFRYLYKELKKPVNSIKSVNGYLAIKEAQAITGCYYLRKASDKIILPEDIKGQVEEKKSLQXIMAELDAIIGMTALKKEIKSLYTQLNQIAEMEKKGVKQDKPAQHFVITGNPGTGKTTVARLLGKIFEGLGLLDSGHVVEVDRSKLVAGYVGQTAPLTNNACDQAAGGLLFIDEVYTLKQNDSDSFGQECIDTLLKRMEDDRGKFMVIVAGYKSPMEKFLTANEGLKSRFTKYFNLEDYNPEELAAIFESLAKKQHFIVPPETRVKVVAFFEDRCARKTKDFANGREARNLMDEARKNQAERLSSADIASLSKEDTLTFLPEDIPGTTADKMVSIDEALKDLNTLVGLKSVKDAVIKITNSLQAQKLTGETEALAKHFVFTGTPGTGKTTVARIMGDVFKAVGMLPTNNXIEADRGKLVASYVGQTAKLVAQQCDNAMGGILFIDEAYSLKQGPQDSFGQEAVDTLLKRMEDDRGKFVVIAAGYTKEMNEFLASNSGFKSRFSDYINFDDYNTSEMREIFMGMCKKRKIEFAPGFDEALKKRLEGLYAGRNAQFANARTVRQLFDKTRENVSGRVLAMRKSEEELKREILIIRPEDLDMTV

SEQ ID NO: 46901 - DNA, 1035 bp, Unknown
  Obtained from environmental sample
  misc_feature (1)..(1035): n is a, c, g, or t
atggccgagccggcgattattccccgaagcatagcaagcgccagtatgttagctaccatctttacgcagaagtttgaaacgcacctgccgtatttcaggcaggagaaacagtttggacagataggggtaacgataagccgacaggacatggcgaactggcagcagcaggtatatgacaagctgaaaccgttattcattttattaacggcgatgataaaaaccgggccggtgctgcggatggatgagacgccggtgcaggtaatgggcgaggaagggaaggaaggtacgcaaaccagctatatgtggcttgccctcggcgggccgcctgacaaaacagtggcatggtacgaataccatccgacccgttcaggatataacgcgaaatcgtttctggaggggtattcaggttatttgcaaacggacgggtataaaggctatgacagcgcggtgaaagacatacccggcgttgttcatgtagggtgcttcgcgcatgccaggaggaagtttattgaagcggcggaagtagataaaaactccaaatcagcgcaggaagggataaagcatatccgcacactgtacgatattgagcatgaattacgggaaacgataaaggataaccatgacttgttcctgtccgaacgaaaagcccgcgccgggccggtgcttgagcaattcaaggcgtggcttgagaaacggaaaggtgaagtgcctccgtcgctgcttctgggaaaggcaatagagtacagccttacgcagtgggacaagctggtgaggtatctggaaagcccgtatcttacgcctgacaacaacgcgtgtgagaacgcgatacggccttttgtcttaggccggaaaaactggttattttgccaaagtcctgacggagcaaaaagttcctgcggcatgtacacgcttatagaaacggctaaacagaacgacattaaaccatttgagtatttgactgtcctgtttgagaaagccccgttggcttcttcgcctcaagactgggaaaacctcctcccctggaatattttttaa

SEQ ID NO: 46902 - protein, 344 aa, Unknown
  Obtained from environmental sample
  DOMAIN (2)...(155): Transposase IS66 family
  misc_feature (1)..(344): Xaa is any amino acid
MAEPAIIPRSIASASMLATIFTQKFETHLPYFRQEKQFGQIGVTISRQDMANWQQQVYDKLKPLFILLTAMIKTGPVLRMDETPVQVMGEEGKEGTQTSYMWLALGGPPDKTVAWYEYHPTRSGYNAKSFLEGYSGYLQTDGYKGYDSAVKDIPGVVHVGCFAHARRKFIEAAEVDKNSKSAQEGIKHIRTLYDIEHELRETIKDNHDLFLSERKARAGPVLEQFKAWLEKRKGEVPPSLLLGKAIEYSLTQWDKLVRYLESPYLTPDNNACENAIRPFVLGRKNWLFCQSPDGAKSSCGMYTLIETAKQNDIKPFEYLTVLFEKAPLASSPQDWENLLPWNIF

SEQ ID NO: 46903 - DNA, 405 bp, Unknown
  Obtained from environmental sample
  misc_feature (1)..(405): n is a, c, g, or t
gtggcccccttttattggaaattagcacccccccggggggtggcattggtgggttattaccccgcgggaaccaattggctgttaaattcttcaggggggggcgggaggaatccattgccctaccaaggggacggaccctggtgcgggcaatggaaaaagatttcaggtttgtccataccggaattgaaagcggacggcggcgcaagccgcgacaatttcctgatgcagtttcaggctgatatttccggctgcgcgataatccgccctgtaatccgcgaaaccaccgccctgggcgcagcctgtcttgccggtatagcgacaggtttttggaaaggcactgatgaactggaaagccgctggaaaagcgacgccgttttcagcccttccatggatattcaaaagtaa

SEQ ID NO: 46904 - protein, 134 aa, Unknown
  Obtained from environmental sample
  DOMAIN (2)...(133): FGGY family of carbohydrate kinases, C-terminal domain
  misc_feature (1)..(134): Xaa is any amino acid
MAPFYWKLAPPRGVALVGYYPAGTNWLLNSSGGGGRNPLPYQGDGPWCGQWKKISGLSIPELKADGGASRDNFLMQFQADISGCAIIRPVIRETTALGAACLAGIATGFWKGTDELESRWKSDAVFSPSMDIQK

SEQ ID NO: 46905 - DNA, 594 bp, Unknown
  Obtained from environmental sample
  misc_feature (1)..(594): n is a, c, g, or t
atgttccgccgtctcttcggcggcggcagagcggaactgcggctctccgacccgaaccatgtgttggaatcgggcatagaaattttcgcccagccgcccggaaaaaaactggaacacctaagtctgctctcaggcggcgaatgttcaatgacagcggtagcccttttattcgccacctacatggtaaagccaagccccttctgtctcttggacgaaattgacgccgcccttgacgaacaaaacgtcgggcgctttgttcaccttcttaacgagttcagcgactcaagccaattcatcataattacacacaacaaaaaaacaacatccggggcgggaacgctcatcggcgtaaccatgcaagagtccggcgtaacaaaagttatctcagcccgattcaagcagggcgaacttgacgtagcggactcatcgccgccgcaaaccgagttatgggacgccgacggcaagtttgaagaagaagacgtagcgccggaagcgggaagggagctgcccgtcggcgttaacgacccgaagaaagtaacagatgcgcagttaagaccgattaggtcgcgcacgacgaatgggacgaatcaatag

SEQ ID NO: 46906 - protein, 197 aa, Unknown
  Obtained from environmental sample
  DOMAIN (1)...(126): RecF/RecN/SMC N terminal domain
  misc_feature (1)..(197): Xaa is any amino acid
MFRRLFGGGRAELRLSDPNHVLESGIEIFAQPPGKKLEHLSLLSGGECSMTAVALLFATYMVKPSPFCLLDEIDAALDEQNVGRFVHLLNEFSDSSQFIIITHNKKTTSGAGTLIGVTMQESGVTKVISARFKQGELDVADSSPPQTELWDADGKFEEEDVAPEAGRELPVGVNDPKKVTDAQLRPIRSRTTNGTNQ

SEQ ID NO: 46907 - DNA, 906 bp, Unknown
  Obtained from environmental sample
  misc_feature (1)..(906): n is a, c, g, or t
gtggcgaacgcgatacttgacggaaccgacgcgatcatgctttcgggcgaaacatcggcgggagcgtatcccgtggaatctgtaaaaacgatggacagaatagcgtgcgtaattgaacagtcggatgaattccgtttccgcatgagaaatttacacaatgaatgtcatgccgaagtacataatccaaaagataaccttggtattataatgtcgcgcgcgggtgttgaaatcgccgcggaggtaaacgcgaaagccattgttacgcccacgcgcagcggtaatacggcgcgaattttaagcgtattcaggccggaagagcctatttttgccgtaacaacagatgagcgctccgagcgcattatgcagttatactggggcgttactacatgcctaagaccgaaggttgacgattctgaatccatgataaacgacactatgaagattgtttcagataccggagttgccggtataacggataaagtagtgcttattgccggtcttccgcttgaaagcccgaacatgataaacaatgtccgcgttgtcattatagggacggttctcgcgcgttcaagcgccggcggtttcgctaatcccgacattacccgcgcacagggcaagataatccatgccgtgacacccgacgaagcccgtaaaaaaatcatgtcagcaggcaaaggcagtatactcatttgcaaagagcttaccgaagactacatatccgttataagcatggtaagcggaatcatttgcgaaggggtctcggtaatcggtgaagaaaaactgcgcatcttcaaccccaatcttgtctggcttacccacatcagagaagccgcaaaaaaactggaacacggattaacggtaacaatagacggaaaagaactgcttgtttacgaaggcgcgatttaa

SEQ ID NO: 46908 - protein, 301 aa, Unknown
  Obtained from environmental sample
  DOMAIN (70)...(182): Pyruvate kinase, alpha/beta domain
  misc_feature (1)..(301): Xaa is any amino acid
MANAILDGTDAIMLSGETSAGAYPVESVKTMDRIACVIEQSDEFRFRMRNLHNECHAEVHNPKDNLGIIMSRAGVEIAAEVNAKAIVTPTRSGNTARILSVFRPEEPIFAVTTDERSERIMQLYWGVTTCLRPKVDDSESMINDTMKIVSDTGVAGITDKVVLIAGLPLESPNMINNVRVVIIGTVLARSSAGGFANPDITRAQGKIIHAVTPDEARKKIMSAGKGSILICKELTEDYISVISMVSGIICEGVSVIGEEKLRIFNPNLVWLTHIREAAKKLEHGLTVTIDGKELLVYEGAI

SEQ ID NO: 46909 - DNA, 1875 bp, Unknown
  Obtained from environmental sample
  misc_feature (1)..(1875): n is a, c, g, or t
atgagcgacagcagaaatcctcccggcagggggttgggggtacgcggaccgggaatgagcagaggcggtcccggaggaatgtacgccgccatgggagcgaaggctaaagacttcaaaggcaccatgaggcagcttgccgcttaccttaagccatttcgcataacaattatcatcgtttggattttagctcttgtttccactgcctttacgattgtcggcccccgcgttatgggaatggttacggacgaaattatagccggaatttcacggcaggcatccggggcgggccttgttgacttcggcaggatcgcgaagatacttgtcatacttttaagcctttaccttgtaagcgcgtttagttcctggatacagggatttttaatgaccgccgtcagcgttaaagttacctacacactaagagacgacatcaacaaaaaaattcaccgcctgcctttcaagtattttgacggcgttacccacggcgaagttctttcccgtcttaccaacgatgtggacaccgttaaccagaccctcaccatgagccttacacaaattattacatcgatcagctcggttgtgggaatattatgcgtcatgttctcggtaaactggatacttaccgtcatatcaatttgttttctctctcttactatagtttcgataaccctgatagtgaagcagtcccaaaaattcttcaaagcccagcagaaatgccttgggaacgttaacggccatattgaggaaatgttttccagccacatagttgtaaaagccttttgcggcgaagaagattccgtaaagaccttcgattccctgaacaaagaactttacaaatccgcgtggaaagcaaatttcctttccggccttatgatgcctatcacagcttttgtcggcaatttaatttacgtcgtggtttgcgccgccggcggctttttcgttctgcgcggcatgatcagcataggcggcgttcaggcttttcttcagtacatacgctcgttcaaccatccgctgaccaacatcgccaatatttcaaacatactccagcagaccgcggcggctgccgaaagggtttttgaatttctcgctgaaaccgaggagatacccgatcccgccgaagccgcgccgccgccttcccacctaagcccggtggtctttgatcacgtccgattcggctacgatccggaaaagcccgtaatcggggatttttgcgcccgcatagagccgggccaaaatatcgccatagtgggaccgacaggcgctggcaagaccacgattgtaaaactgctcatgcgtttttatgacgtaacgggcggctcaatttcgattggcgggaacgacatccgcgcctttaagcggcaggatctccgttcgctcttcggaatggtattgcaggacacatggcttttctcgggaacaattgctgataacatacgctacagccggacagaggcatccgacgccgaaacggaagatgccgctaaagccgcgcaggtagaccactttgtgcgaacccttccgggcggctacagcatggttctgaacgaggaaagcgataatatttccgccgggcaaaaacagcttctcaccattgcgcgcgtgattctcgcgaatcccgggatgctcatccttgacgaagcgacaagcagcgttgatacccgcaccgaacggctcatccagaaagccatggatctgttgatgaaaggccgcaccagcttcattatcgcccaccgtctatccaccatacgccacgcggatcttattctggtattaagaaacggcgagattgttgagcaggggaaacaccgggaacttctggaacgccggggcttctacgcggaactttacaacagccaattcacgggcagaacaatatag

SEQ ID NO: 46910 - protein, 624 aa, Unknown
  Obtained from environmental sample
  DOMAIN (56)...(337): ABC transporter transmembrane region
  misc_feature (1)..(624): Xaa is any amino acid
MSDSRNPPGRGLGVRGPGMSRGGPGGMYAAMGAKAKDFKGTMRQLAAYLKPFRITIIIVWILALVSTAFTIVGPRVMGMVTDEIIAGISRQASGAGLVDFGRIAKILVILLSLYLVSAFSSWIQGFLMTAVSVKVTYTLRDDINKKIHRLPFKYFDGVTHGEVLSRLTNDVDTVNQTLTMSLTQIITSISSVVGILCVMFSVNWILTVISICFLSLTIVSITLIVKQSQKFFKAQQKCLGNVNGHIEEMFSSHIVVKAFCGEEDSVKTFDSLNKELYKSAWKANFLSGLMMPITAFVGNLIYVVVCAAGGFFVLRGMISIGGVQAFLQYIRSFNHPLTNIANISNILQQTAAAAERVFEFLAETEEIPDPAEAAPPPSHLSPVVFDHVRFGYDPEKPVIGDFCARIEPGQNIAIVGPTGAGKTTIVKLLMRFYDVTGGSISIGGNDIRAFKRQDLRSLFGMVLQDTWLFSGTIADNIRYSRTEASDAETEDAAKAAQVDHFVRTLPGGYSMVLNEESDNISAGQKQLLTIARVILANPGMLILDEATSSVDTRTERLIQKAMDLLMKGRTSFIIAHRLSTIRHADLILVLRNGEIVEQGKHRELLERRGFYAELYNSQFTGRTI

SEQ ID NO: 46911 - DNA, 1947 bp, Unknown
  Obtained from environmental sample
  misc_feature (1)..(1947): n is a, c, g, or t
gtgagagtattatcgctgatcatcagttatgaggacggccaatacattcttgagccgctcagggatcgcatagtgggtcgctacactctggaaagggtcaagcatcccataaccggggacatcattgttaatgtcaaccaggaaataaccaaagagattgccgctcaaattgaggaagcggggatagaatctgtgtacatccgggcggtacttacctgcgaggccgagcatggcatttgcagaatgtgttacggccggaacctggctacaaacaggactgtggacataggcgaagctgtcggaaccattgcggcccaatccataggccagccgggaacccagcttactatgcggaccttccatacaggcggtgttgctttcaatatcagcgaggaaaaccgcatattccttaaacaccctgtatacatcaaagatataaccggcgctcacgtagacaaggttgatgaagaaaccggcgagccaaccggagttatgcttttcaccaggaagggtcacgcgactgtaagcagaattatggaaaggcatcagctggacagtcgcgatgaactccttgttgaaaacgatcagagggtaattcgcggggttccgattattaaacggggaagggagcagatcctttccaaggaaaacgcccttgcaatggtgatcaagaacggtaaggagacaacgctttatctgattggtcaggatcagaaaatagaaatcagaaacggttccgaagtcattataaagaaaggcgatgtagttgaggcggaaaaaaccatcgccacttttgatacgttctccgatccgattattgccgaagtcggcggaaccgtccgctacgaggacattattccgggcacaaccctcagggaagaaattgacgaggaaaggggagttgaaaggcgtataaccgacatccagcagctcgaaaagcagcccaggatccttatcgttgatgacgaggataaccaggtcgcttcctacttcctccccggcggggccatcttgcaggttgacgagggcgagaagatcagggcggggcgtacaatcgcgaaaacccttaaggagtcaactcaggcaatggacattacatcgggccttcccagggtaaatgagctctttgaagcccgcaagcccaaaagccctgcggttttggccgaggtctcaggcgttgtccgctttaagaacatcatcaagggcaagcgtattataattgttgaagacgcctttgggaaagaatacaagcacctaattccaatgaccaaacggcttttggtacgcgacggcgacagcgtggaagccggtgagccgctctgcatgggcgctatcaacccgcatgacatcctccacatactcggcgaatcaaaccttcagcgctatcttatgaacgaaattcagcaagtgtacaaccttcagggcgtgtccatcaacgacaagcacgtcggcgtgattatccgccagatgatgaggaaggtcgaaatcctgcgggtaggagacaccaggtttatctacggtcaactggttgataaatacgcctttaaggaagagaacaaccgtgtcattaacgaaggcgggcagcccgctgttgcaaggcctgtgttccagggtatatcaaaagcggccttaaatatcgattctttcctttccgccgcaagtttccaggaaacaacaagggtgcttaccaacgcggctattgccggttccaccgactacctccggggccttaaggaaaatattatcatcggtcatcccattcctgccggtaccggcatgaagcgctacagggacgtaaagctctttgacgaggacaaccaggatatggacgaatacttaagcgaaatcctggaaaggcgcaagctcgaaaaagccgcggagcttaccagcgatgacttctcggttgaggataatgagccagaggcagaagcggacaacgaggattag

SEQ ID NO: 46912 - protein, 648 aa, Unknown
  Obtained from environmental sample
  DOMAIN (61)...(552): RNA polymerase Rpb1, domain 5
  misc_feature (1)..(648): Xaa is any amino acid
MRVLSLIISYEDGQYILEPLRDRIVGRYTLERVKHPITGDIIVNVNQEITKEIAAQIEEAGIESVYIRAVLTCEAEHGICRMCYGRNLATNRTVDIGEAVGTIAAQSIGQPGTQLTMRTFHTGGVAFNISEENRIFLKHPVYIKDITGAHVDKVDEETGEPTGVMLFTRKGHATVSRIMERHQLDSRDELLVENDQRVIRGVPIIKRGREQILSKENALAMVIKNGKETTLYLIGQDQKIEIRNGSEVIIKKGDVVEAEKTIATFDTFSDPIIAEVGGTVRYEDIIPGTTLREEIDEERGVERRITDIQQLEKQPRILIVDDEDNQVASYFLPGGAILQVDEGEKIRAGRTIAKTLKESTQAMDITSGLPRVNELFEARKPKSPAVLAEVSGVVRFKNIIKGKRIIIVEDAFGKEYKHLIPMTKRLLVRDGDSVEAGEPLCMGAINPHDILHILGESNLQRYLMNEIQQVYNLQGVSINDKHVGVIIRQMMRKVEILRVGDTRFIYGQLVDKYAFKEENNRVINEGGQPAVARPVFQGISKAALNIDSFLSAASFQETTRVLTNAAIAGSTDYLRGLKENIIIGHPIPAGTGMKRYRDVKLFDEDNQDMDEYLSEILERRKLEKAAELTSDDFSVEDNEPEAEADNED

SEQ ID NO: 46913 - DNA, 423 bp, Unknown
  Obtained from environmental sample
  misc_feature (1)..(423): n is a, c, g, or t
atgatgacagagtataactgcttcccgcttttgactcttgattattacggaaaggggaatttgtatatactcaacgtgccaaatgattttggcgatctgtattcgcttcccagggaagttacagggtacataaacaaggttttcgccaatggcggcccgtatatacaaagcaatcccagaatatgcatgttcatgtatgataatgatattattggcatatactcgcaaaagccttatgccgacgacgttgaaattatactgcccgggaagtactccatggtgcgcgatattgaaacgggcgaggagattgcgctttttagcgattcagtaaaggaaaggttctttgacgagccggaggtaccgctcaaaacggcgcgggtaaatatctttggcggcacttaccggtttttcaggttaacgtag

SEQ ID NO: 46914 - protein, 140 aa, Unknown
  Obtained from environmental sample
  misc_feature (1)..(140): Xaa is any amino acid
MMTEYNCFPLLTLDYYGKGNLYILNVPNDFGDLYSLPREVTGYINKVFANGGPYIQSNPRICMFMYDNDIIGIYSQKPYADDVEIILPGKYSMVRDIETGEEIALFSDSVKERFFDEPEVPLKTARVNIFGGTYRFFRLT

SEQ ID NO: 46915 - DNA, 966 bp, Unknown
  Obtained from environmental sample
  misc_feature (1)..(966): n is a, c, g, or t
atgatcagatcggcacgaggtggactctggaaaaaaatgaacgcctgggccatcgatggctggaaggaaacctacaagcgtaccggcgtctcattcgatcaatattattacgaaagccagacctacctgcttggcaaggatgagattttaaaaggccttgaaaagggtttcttttaccgccaggaagacggcgctgtcgcggtggatcttacggaagaaaaactggataaaaagatcctcctgcggagcgacggcacttcgatttacataacgcaggatttcggaaccgccatcaaacgccacaaagactggccttttgacaagctggtctatgttgttggctccgagcagcagtaccatttcaaggtgctttttgtccttttggaaaagttgggctatgaatgggcaaaaaacctctatcacctttcctacggtatggtgaacctgccggaaggcaagatgaaaagccgggaaggcactgtcgttgacgcggacgatctgattgacagtctgcgggacatggccctggaagaaatacgtgacaaggaaagggaagaagcgctgggcaatccggaagaaacagcggaaatgatcgcccttggggcccttcattactttctcctgcaagtttcacctaccagagatatactcttcgaccccaaagaatccctttcgttcaacggaaacacagggccgtacttgcagtacatgggtgcccgcatttcatcccttttgcgtaaggccgaagaaaagacgggcatagccgctgagtcgccacagctcgagctcctgtcaggcgacgccgaatgggagctggttaagaccctggaagcctacaacgacgccgttgccaacgccgcagaaaacatggatccttcgcttgtggctggttaccttttacgaactggccaaggcgttcagccgcttttaccacgactgccagattctgggtgcggaagagcgtga

SEQ ID NO: 46916 - protein, 321 aa, Unknown
  Obtained from environmental sample
  DOMAIN (234)...(317): DALR anticodon binding domain
  misc_feature (1)..(321): Xaa is any amino acid
MIRSARGGLWKKMNAWAIDGWKETYKRTGVSFDQYYYESQTYLLGKDEILKGLEKGFFYRQEDGAVAVDLTEEKLDKKILLRSDGTSIYITQDFGTAIKRHKDWPFDKLVYVVGSEQQYHFKVLFVLLEKLGYEWAKNLYHLSYGMVNLPEGKMKSREGTVVDADDLIDSLRDMALEEIRDKEREEALGNPEETAEMIALGALHYFLLQVSPTRDILFDPKESLSFNGNTGPYLQYMGARISSLLRKAEEKTGIAAESPQLELLSGDAEWELVKTLEAYNDAVANAAENMDPSLVAGYLLRTGQGVQPLLPRLPDSGCGRA

SEQ ID NO: 46917 - DNA, 570 bp, Unknown
  Obtained from environmental sample
  misc_feature (1)..(570): n is a, c, g, or t
atggaaagcgcattgatagtttcgcactcggaaagagacaccgttctttttgtagagttgttacacgcggcttccattcatcaaataagtttccaggagtcctgtgacagcgcgcgaaggcttatgttaaaacaggattttgatttagtgattgtcaacgcgccgcttagggatgaatcaggggagatcttttccaggcatatcgctaccaaaggcgtgtcccaggtaatccttctggtaaagagtgaattttttgattctatatccgcggtctgtgaggccgacggtgttctgataatttcaaaaccgatggacaaatttattttttggtcagccttgtccctagtcaaatcggcccaaagcagaataaaacgtatacaagctgaaaatattcaattaaaacaaaaaatcgaggacatacggattattaaccgcgcgaaatgtatattaatatcttttatgaaaatgagtgaacaggaagctcaccggtatatagaaaaacaagcaatggatatgcgctcgactagaagaattgtcgcggaggggatattaaaaagatatgagaattga

SEQ ID NO: 46918 - protein, 189 aa, Unknown
  Obtained from environmental sample
  DOMAIN (129)...(184): ANTAR domain
  misc_feature (1)..(189): Xaa is any amino acid
MESALIVSHSERDTVLFVELLHAASIHQISFQESCDSARRLMLKQDFDLVIVNAPLRDESGEIFSRHIATKGVSQVILLVKSEFFDSISAVCEADGVLIISKPMDKFIFWSALSLVKSAQSRIKRIQAENIQLKQKIEDIRIINRAKCILISFMKMSEQEAHRYIEKQAMDMRSTRRIVAEGILKRYEN

SEQ ID NO: 46919 - DNA, 642 bp, Unknown
  Obtained from environmental sample
  misc_feature (1)..(642): n is a, c, g, or t
ttgaaaagctttggtgttcgctttgatgccaccagcgatagcgaggttgtatcgtcattgatagcgtattgcataaccaaaactcaaagcgcaatactcggtgtagtcaaagccactgatttattagagggtgctttttcacttgttattgcaagcggcaagcacaagctcatcgcggttcgcgacccaaatggatttcgccctctttgcattggggaaaatgaattcggatgtgctgttgcatctgaaagctgcgcccttgatacctgcggttttaagtttgttagagatgtgcaaccaggtgaagttgttgttattgaaaatggaaaaatagcctatcagggaaaactcgcagaaaagaacaaaatgggtgggctatgtatttttgaatatgtgtactttgcaagaccagattccattatagattctttaagcgtgtatgaggctcgctacaatatgggttataggctcgcagaggaatatcctgttgatgccgatgtcgtatgcggagttccagattccggtttggatgccgcaagtggatatagcgcaaaaagcggaatacctttggcagcaggctttgtgaaaagccgctatgtaggcagaagttttattttatccaacccaagctcaacgaattag

SEQ ID NO: 46920 - protein, 213 aa, Unknown
  Obtained from environmental sample
  misc_feature (1)..(213): Xaa is any amino acid
MKSFGVRFDATSDSEVVSSLIAYCITKTQSAILGVVKATDLLEGAFSLVIASGKHKLIAVRDPNGFRPLCIGENEFGCAVASESCALDTCGFKFVRDVQPGEVVVIENGKIAYQGKLAEKNKMGGLCIFEYVYFARPDSIIDSLSVYEARYNMGYRLAEEYPVDADVVCGVPDSGLDAASGYSAKSGIPLAAGFVKSRYVGRSFILSNPSSTN

SEQ ID NO: 46921 - DNA, 963 bp, Unknown
  Obtained from environmental sample
  misc_feature (1)..(963): n is a, c, g, or t
ttgattttgaaagtcttttactttaatgacattgaggcgataaagaaaaacaggctggatgagtgcaatcacggtataggtatatatggcgaactatgggatagattccaaaaagacttaagggccaatgactgcgattattgggcacagttttatgaaaacctgttcaaaaacggctttaccgttgacaaagaacagcttaaacaacgccatcttggcgtacctgacgagataaaggccgagggcgcggcagcggtaggacgttatcttggggggttgggcgaagagatagaacgtcttaacgaagcgcgcataataatcctgggtgaaaaaggcgcgggcaagacaagccttgccagaagattgcttaatattgacgcggaaatgccaaaagaatatgaaagtaccgaaggcgtggtaacatccctttggcgcttcaagggtaaagacggcgctgatgtaaacgcgcatatttgggatttcgcgggccactccattacccacgcggtacatcgttgttttatgtccgcaaggtgcctgtacatatatgtgtacaacggacgcatagagcgcgataatgatcccgcttattggctggaacagatacgcatacacggcggtaactcaccgatattattcctgataaatgaaaaagacgaccacagggccgacattgccgaaaataccctgaaagatgaatacccttcgattgtggattattaccgtgtagatataggcagtgaagataaaacaaaactggaagggttccgccgcacagttatgaatacggtgagcaacaatccctcctggaatagtcaagttgtctcgatggaagcgtataagataaaggacaaactacggaaactttttgataaaacaaaagacccccatattacccgtgaacaatttgacgagattgcgaagaactgcggcgcatctaccggacgcatagaggatatctaa

SEQ ID NO: 46922 - protein, 320 aa, Unknown
  Obtained from environmental sample
  DOMAIN (103)...(219): Miro-like protein
  misc_feature (1)..(320): Xaa is any amino acid
MILKVFYFNDIEAIKKNRLDECNHGIGIYGELWDRFQKDLRANDCDYWAQFYENLFKNGFTVDKEQLKQRHLGVPDEIKAEGAAAVGRYLGGLGEEIERLNEARIIILGEKGAGKTSLARRLLNIDAEMPKEYESTEGVVTSLWRFKGKDGADVNAHIWDFAGHSITHAVHRCFMSARCLYIYVYNGRIERDNDPAYWLEQIRIHGGNSPILFLINEKDDHRADIAENTLKDEYPSIVDYYRVDIGSEDKTKLEGFRRTVMNTVSNNPSWNSQVVSMEAYKIKDKLRKLFDKTKDPHITREQFDEIAKNCGASTGRIEDI

SEQ ID NO: 46923 - DNA, 474 bp, Unknown
  Obtained from environmental sample
  misc_feature (1)..(474): n is a, c, g, or t
atgattcgcgatatggtaaaggatgtaaatgaacagtataaaaaggcttatccgactgaaacgcggcttcttatcgaaggcataggaatgcaggaacatcacaatacaggcgtttcggctaacgcgataaaaactacattgaatatgtttaaagcattgggagtaaaaatatccgtaagtgagcttgatgttttaatagtgtcttatcaggaatttgagagttccggcggtcacgggcctaacaaacaagattcaattaaaggagataaaaggactaacggtttaaaaaaacaagcagaactatacggcgaatacttcaaagtatatctggaattcagcgacatcattgagcgcgtgtcattttggggcgtcactgacgataaaagctggcgatccgtcggattaccgcttttatttgacccggacggaaatgccaaagaagcctacgacagcgtaattaaagcgttaaaataa

SEQ ID NO: 46924 - protein, 157 aa, Unknown
  Obtained from environmental sample
  DOMAIN (1)...(156): Glycosyl hydrolase family 10
  misc_feature (1)..(157): Xaa is any amino acid
MIRDMVKDVNEQYKKAYPTETRLLIEGIGMQEHHNTGVSANAIKTTLNMFKALGVKISVSELDVLIVSYQEFESSGGHGPNKQDSIKGDKRTNGLKKQAELYGEYFKVYLEFSDIIERVSFWGVTDDKSWRSVGLPLLFDPDGNAKEAYDSVIKALK

SEQ ID NO: 46925 - DNA, 678 bp, Unknown
  Obtained from environmental sample
  misc_feature (1)..(678): n is a, c, g, or t
atggggatagaaatagattccccgcaaagaaactacaaagacgcaaacggtaaaaacgaaataatctgcgccgtctcccagtttaccctaatggcgggatttaaagagccaaaagaaatatacgcttccctaggcgcggtttcagcggagcaaaaggatcttattaaaaaattaaactctttttatccggaagacccgggtgttttttcgcccctttaccttaaccttattacattacagccgggacaggggctttttattccggccggagtgcctcacgcgtatataagcggttttggcgtagaattgatgaccaactcagacaatgtaatacgctgcggtcttacgcaaaaacatactgatactgacgagtttaaaaaaatcatgtcgcctgttccttttgttccgcaaattatcactccttgcggcgaatcgcaggtttgctatccgctgccgggggaagatttctctctcttttacattcacagcggcggcgatgctgcgtcttttcgcgaaagcaattttgccgtcttcattgtaacggaaggcgaattaaaaacagaaaaccgtcattttaaaaaaggcgaatcattttatttttcgtccgataaagacgccccgcttttattgaaagggaatttttccctgtttgccgcgtgtataacgggaacggaatga

SEQ ID NO: 46926 - protein, 225 aa, Unknown
  Obtained from environmental sample
  misc_feature (1)..(225): Xaa is any amino acid
MGIEIDSPQRNYKDANGKNEIICAVSQFTLMAGFKEPKEIYASLGAVSAEQKDLIKKLNSFYPEDPGVFSPLYLNLITLQPGQGLFIPAGVPHAYISGFGVELMTNSDNVIRCGLTQKHTDTDEFKKIMSPVPFVPQIITPCGESQVCYPLPGEDFSLFYIHSGGDAASFRESNFAVFIVTEGELKTENRHFKKGESFYFSSDKDAPLLLKGNFSLFAACITGTE

SEQ ID NO: 46927 - DNA, 489 bp, Unknown
  Obtained from environmental sample
  misc_feature (1)..(489): n is a, c, g, or t
gtgtataacgggaacggaatgaaaatacttgtagacgccgattcctgccctaaacccgcaagagagcttgtgctaagaagggcaaaaaaacttaaaactggaattatttttgccgcaaacagacagataccccaaacaggcggggcggaaatggagatttgccccgttaaggaaaattccgccgatgaccgtatagtagagcttgccgtaaaaggcgatcttgtaataacgcgggatgtccctctcgcgaagcggcttgtagaaaagtcggtaaccgtaattgacgaccgcgggcgcgtattcacggcggacaatataaatgagcttttatccattcgcaactttaaagtcaaccttgctgatagcgggcttgaaatagagagaaacgcaaattacgggaaaaaagaacttaaaacgcttgccgacgcgctggacaggacattgaccgctatgctgcgtcttcggggtagcgattctgagtctgtttaa

SEQ ID NO: 46928 - protein, 162 aa, Unknown
  Obtained from environmental sample
  DOMAIN (7)...(150): Uncharacterized BCR, YaiI/YqxD family COG1671
  misc_feature (1)..(162): Xaa is any amino acid
MYNGNGMKILVDADSCPKPARELVLRRAKKLKTGIIFAANRQIPQTGGAEMEICPVKENSADDRIVELAVKGDLVITRDVPLAKRLVEKSVTVIDDRGRVFTADNINELLSIRNFKVNLADSGLEIERNANYGKKELKTLADALDRTLTAMLRLRGSDSESV

SEQ ID NO: 46929 - DNA, 942 bp, Unknown
  Obtained from environmental sample
  misc_feature (1)..(942): n is a, c, g, or t
ttgaataaatttcctctttataataaaatattattatatggaagtttacacaagggggttgccgcccttaagattgcttttggagtgaatatgagttatgaaactgaatttaaaaatattattcaactggactcggaattaaatcaaatacaggattatgatctgctgctggaaaggatactttttgagtcaagaaaagtcgtcaatgccgacgcgggctcaatttatattacagtccctacggaaaacaaggaagaaggaagggaaaaattatcaataaaatattcacaaaatgacactattcaaaaaaatatgccgcccgggcaaaaaatgatctattcaatcttttcagttcttataaatgaaaaatccatttcgggctattgcgcgcttcaaagaaaattgatcaatattcccgatatgtacagcattccgcctgaagctccctataaattcaattcatcttttgacggaataacaggttacaagacggtttccactctgaccattcccctaatcgccacagacaaaaggctgatgggcgttatccaggttatcaacacaaaagacaaggacggaaatattattccgttctccacggatgatgaaataatccttacgcattttgcgacaaacgccactatggtgctccaaagagcgtacatcacaagggcgatgattttgcgcatgattaaaatgtcggaactgcgcgatccaaaagaaacaggcacccatgtaaaccgcgtagcangttacgctgtagaaatttatgacagatgggcttatcatcataaggtttcgattgaggaaaaagataaattcagggattcgctaaaaatcagctcaatgcttcatgacgtgggcaaggtggcgatttcggacacgattcttaaaaaacccgccgttttacgccggaagatatcagatcatgcagaaccataa

SEQ ID NO: 46930 - protein, 313 aa, Unknown
  Obtained from environmental sample
  DOMAIN (52)...(217): GAF domain
  misc_feature (1)..(313): Xaa is any amino acid
MNKFPLYNKILLYGSLHKGVAALKIAFGVNMSYETEFKNIIQLDSELNQIQDYDLLLERILFESRKVVNADAGSIYITVPTENKEEGREKLSIKYSQNDTIQKNMPPGQKMIYSIFSVLINEKSISGYCALQRKLINIPDMYSIPPEAPYKFNSSFDGITGYKTVSTLTIPLIATDKRLMGVIQVINTKDKDGNIIPFSTDDEIILTHFATNATMVLQRAYITRAMILRMIKMSELRDPKETGTHVNRVAXYAVEIYDRWAYHHKVSIEEKDKFRDSLKISSMLHDVGKVAISDTILKKPAVLRRKISDHAEP

SEQ ID NO: 46931 - DNA, 1224 bp, Unknown
  Obtained from environmental sample
  misc_feature (1)..(1224): n is a, c, g, or t
gtgccgttgcaatgggactcatccttgaccttgcgggaaatcctcaaacagcatcccaagggaaaagagtacgcttttatccttgagcgtgagccggttcacccgctgttaactgattcaaagggcggcgtgctatcgtatccgcccatcatcaattcaaatgatttgggcgcggtgcaggttggcgatacggacatctttgtggaattgaccggctccgacatcgcccaggtaacgctggcggcttccatcgtcgcctgtgaccttgcggataacggtttttccattgaacctgtggaagtcgaatacgaatatgacactccctttggcagaaatatcgttttcccatattattttcaggagcctgttttctgttcccttgcgagaatagaaaaattcctcggcgacaaactctcaggcgatgaatgtgtgaaagcgcttaaccgtatgggcgtaagggccgaaaagtcaaacggcgcagaacggggttccttgaacagcgctgaaggcgtcattgcctggccgcccgaataccgcaacgattttcttcacgccgccgatgtcgccgaagacgtgatgataggccggggcctcggctcgttcaaaccggaacgcccgggcgatcccaccgtaggccgcctcagccccatcactttgttcagccgccaggtaaaggaaatctttatcggtatgggctatcaggagatgatatacaactacctcggctcgcgcaaagatttggtcgaaaaaatgcgtggcgcgggggatcgtattatccgtatcgccaaccccatgaccgagaattacgagtatgtccgcgattcggtaatcgcctccctcatggaaagcgaatctgtttcgggcaattcggtatacccgcataaaattttcgagattggcaaaatcgcgtaccttgacagcgcggacaattccggcactgtaacccgtcagtacgcgggcttccttcacgccgacaaagaggcgaacttcaacaccgccgcgggccagatgcagaccctgttctactatctttcccgcgagtacgaggttgaggaatccgacgatccgcgttttattccgggccgcgccgccgcgatcctgtacaatggccgcaaaataggcgtattcggcgagatacaccccgaagtcctggaaaactggggcataaccatcccctgcaccgcgggggaatttgatatagaacaattaacaattaacaattaa

SEQ ID NO: 46932 - protein, 407 aa, Unknown
  Obtained from environmental sample
  DOMAIN (189)...(407): tRNA synthetases class II core domain (F)
  misc_feature (1)..(407): Xaa is any amino acid
MPLQWDSSLTLREILKQHPKGKEYAFILEREPVHPLLTDSKGGVLSYPPIINSNDLGAVQVGDTDIFVELTGSDIAQVTLAASIVACDLADNGFSIEPVEVEYEYDTPFGRNIVFPYYFQEPVFCSLARIEKFLGDKLSGDECVKALNRMGVRAEKSNGAERGSLNSAEGVIAWPPEYRNDFLHAADVAEDVMIGRGLGSFKPERPGDPTVGRLSPITLFSRQVKEIFIGMGYQEMIYNYLGSRKDLVEKMRGAGDRIIRIANPMTENYEYVRDSVIASLMESESVSGNSVYPHKIFEIGKIAYLDSADNSGTVTRQYAGFLHADKEANFNTAAGQMQTLFYYLSREYEVEESDDPRFIPGRAAAILYNGRKIGVFGEIHPEVLENWGITIPCTAGEFDIEQLTINN

SEQ ID NO: 46933 - DNA, 840 bp, Unknown
  Obtained from environmental sample
  misc_feature (1)..(840): n is a, c, g, or t
ttgtggcccctggatattactgaaaatgcaggcagtcattttggctacatcatggatttacggcccacacagtacaagagtttttcgctttttcttttggcaaaggaaaaatttaccagcgttaccgcaattacaaatacctgccttcagataacagaagcgtttcgtggactgcacaattcaggctacagctatcaggatttaaacgacggcaattttttcgtcaacccaaaaaacggcgatgtgctgatttgcgacaacgataacgtggcggaatacgggaagaatctgggcatagccggaaaatgccgctacatggcaccggaggtcgtgcttggcaaggccccgcccagcatacataccgataaattttctctttcggtcgtgctttttcttttattgatgaacaatcacccctttgaaggaaagcgttcatatccgccgtgcatgacagaagcccttgagcgaaaaatctacggcgaacagccgctattcattttcgacaaggacgatgactcaaacgcgcctgtccccggaataaacagcaatgcaatcaaacgctggcccttatatccgccatacatacgcgacaaattccaggaagctttcagccaggaagctctaatggatccttcaaagcgcgttattgaaaaagaatggctgaaagtttttgcccgccttcgcagtgagatatacaagtgccgaaattgcggagagatctttttcgcggacgcggtgaatggcaccccctgccccttctgcggaaaggaacagctctttgaaaagtacatcggctttccaagtttaatgtcgctttgcacgagcgtacaaactttatga

SEQ ID NO: 46934 - protein, 279 aa, Unknown
  Obtained from environmental sample
  misc_feature (1)..(279): Xaa is any amino acid
MWPLDITENAGSHFGYIMDLRPTQYKSFSLFLLAKEKFTSVTAITNTCLQITEAFRGLHNSGYSYQDLNDGNFFVNPKNGDVLICDNDNVAEYGKNLGIAGKCRYMAPEVVLGKAPPSIHTDKFSLSVVLFLLLMNNHPFEGKRSYPPCMTEALERKIYGEQPLFIFDKDDDSNAPVPGINSNAIKRWPLYPPYIRDKFQEAFSQEALMDPSKRVIEKEWLKVFARLRSEIYKCRNCGEIFFADAVNGTPCPFCGKEQLFEKYIGFPSLMSLCTSVQTL

SEQ ID NO: 46935 - DNA, 843 bp, Unknown
  Obtained from environmental sample
  misc_feature (1)..(843): n is a, c, g, or t
ttggaggctccgccgatctcaaaggacccaacgcaggggcattccaacgccgtagttatttcggcctcggatcgaagcggccgctatattcatttcggcatccgcgaattcgccatggcggctatctccaacgggatttcccttcacggcggtttccgtcccttctgctctaccttcatggtcttttccgattacctgcgtccggccctgcgcctttctgccctaatgaaacagccggtgatttatgtgcttacccacgattcaatttacgtgggggaagacggccccacccatcagccggttgaacaccttgccgccctcagggccatgcccaatgtaagggtgctgcgccccgccgatgcggaagaaaccgccgaagcctgggatatggcaatggaaaggaaagacggcccaattgtgctggcccttacaaggcagaacaccgtagtctttgccaaaaaagattccgaatggaagaacaagctccgcacaggcgcttacatcgtcaaaaagcctgccgggcctgtcgatgtggttcttattgccaccggttccgaagtgaacaccgccctggcagccgcagagctatcgggaaaaaatgtgcaggtggtttcaatgatcagcagggaactctttgagtcccagagcgaagccgtcaggaacagcgtcgttcctccgggcgtgagaacggttgtctgcgaagccgccgtccgccagggctgggaacgctgggcaaaacccgaagacatcttcacaatcgaccgcttcggcgaatctggcccctacgagaaagcggcggagtctcttgggtttacggcgaaggcgctggcgggaattatatga

SEQ ID NO: 46936 - protein, 280 aa, Unknown
  Obtained from environmental sample
  DOMAIN (166)...(276): Transketolase, C-terminal domain
  misc_feature (1)..(280): Xaa is any amino acid
MEAPPISKDPTQGHSNAVVISASDRSGRYIHFGIREFAMAAISNGISLHGGFRPFCSTFMVFSDYLRPALRLSALMKQPVIYVLTHDSIYVGEDGPTHQPVEHLAALRAMPNVRVLRPADAEETAEAWDMAMERKDGPIVLALTRQNTVVFAKKDSEWKNKLRTGAYIVKKPAGPVDVVLIATGSEVNTALAAAELSGKNVQVVSMISRELFESQSEAVRNSVVPPGVRTVVCEAAVRQGWERWAKPEDIFTIDRFGESGPYEKAAESLGFTAKALAGII

SEQ ID NO: 46937 - DNA, 1428 bp, Unknown
  Obtained from environmental sample
  misc_feature (1)..(1428): n is a, c, g, or t
atggacaaaaacgctttggaaaaagtagcgctttctgtgcgctcactcgcgatggacgcgattcaaaaggcaaattcgggacaccccggcgtggtgcttggcgccgccgaattgggggcgatgctttacggagaaatactccgccacgatccttccgactccaggtggcccgaccgcgatcgttttgtgttgtcggctggacatggttctatgtttctttattccctgttgtatctttccggctattccggcatgacaatagacgcgattaaatctttccgccaggtcggctctgccgcggcggggcaccccgagtacggcgccgcggagggcattgaaatgaccaccggcccgctggggcagggatttgccaccgcggtgggcatggccgtcgcggaaacaatgcttgccgcgcgcttcaatacgcccacgcgcaaaatcgtggatcactatacctatgtgctgtccggcgacggctgtttacaggaaggcgtctccggcgaggcaagttctttggcgggtcatctgggtttgggcaagctcattgtctattacgatttccacaagatcacgattgacgggtctaccgacctttcctttacagagaacgctgccaaacgttacgaagcttacggctggcaggttctttccggctcaatgtacgattttgaggaaatagcgaaactgaccgctcaggcaaaggccgaaacganaaagccgagcctcatcatcctgacttccgttatcggcaagggtgcgccaaacaaacagaacactgccgacgtccacggcatgcccctggggatggaagagttggcccttgcgaggaaagccctgggtattccaggtgatccgggtactttgaatttttatgttgccccggaggctgaagcttattttaaggccaaacgtgatgagtggaaaaagacaagggaaaagtggcttgccgagtttgatgcttgggcgaaggagaatcccgacaaaaaaaaggaatgggacgctttttattccggcaaggccgtgaaagcggcgctgccttcctttgccgtgggagataaaatcgccacgcgcagtgccggcaacaagacccttaacgccatagccaacgtcaatcccaatctggttggaggctccgccgatctcaaaggacccaacgcaggggcattccaacgccgtagttatttcggcctcggatcgaagcggccgctatattcatttcggcatccgcgaattcgccatggcggctatctccaacgggatttcccttcacggcggtttccgtcccttctgctctaccttcatggtcttttccgattacctgcgtccggccctgcgcctttctgccctaatgaaacagccggtgatttatgtgcttacccacgattcaatttacgtgggggaagacggccccacccatcagccggttga

SEQ ID NO: 46938 - protein, 475 aa, Unknown
  Obtained from environmental sample
  DOMAIN (100)...(245): Thiamine pyrophosphate enzyme, C-terminal TPP binding domain
  misc_feature (1)..(475): Xaa is any amino acid
MDKNALEKVALSVRSLAMDAIQKANSGHPGVVLGAAELGAMLYGEILRHDPSDSRWPDRDRFVLSAGHGSMFLYSLLYLSGYSGMTIDAIKSFRQVGSAAAGHPEYGAAEGIEMTTGPLGQGFATAVGMAVAETMLAARFNTPTRKIVDHYTYVLSGDGCLQEGVSGEASSLAGHLGLGKLIVYYDFHKITIDGSTDLSFTENAAKRYEAYGWQVLSGSMYDFEEIAKLTAQAKAETXKPSLIILTSVIGKGAPNKQNTADVHGMPLGMEELALARKALGIPGDPGTLNFYVAPEAEAYFKAKRDEWKKTREKWLAEFDAWAKENPDKKKEWDAFYSGKAVKAALPSFAVGDKIATRSAGNKTLNAIANVNPNLVGGSADLKGPNAGAFQRRSYFGLGSKRPLYSFRHPRIRHGGYLQRDFPSRRFPSLLLYLHGLFRLPASGPAPFCPNETAGDLCAYPRFNLRGGRRPHPSAG

SEQ ID NO: 46939 - DNA, 492 bp, Unknown
  Obtained from environmental sample
  misc_feature (1)..(492): n is a, c, g, or t
ttgcttgaatgtttctatgtggcaataaaagataatgaaattatcggaatggttacctgtatgggtaaaggtgaagcttgtattaaattagattttaaaacaattgttaaatatatagggctattcaggggattaattataaatttttatttaaaacagtttttaaaaggatttccaaaactcgatgaaaaaacggcattaattgaatatctggctgttgatacaaaacatctaagaaaaggtattgcttcaacacttattaaatcattatttacattaaccgaatatgaaaattatttattagaagtaatgggaacaaacacaaaagctattaaattgtataccaaattaggttttaaaattgcatatataataccatattttccaaaaacatatttcggcatgaagtatacaaaagaagaaaataattggataaataatatacatgcaaacgtcgctcacctccagaacattaaaggccatttgccttaa

SEQ ID NO: 46940 - protein, 163 aa, Unknown
  Obtained from environmental sample
  DOMAIN (6)...(120): Acetyltransferase (GNAT) family
  misc_feature (1)..(163): Xaa is any amino acid
MLECFYVAIKDNEIIGMVTCMGKGEACIKLDFKTIVKYIGLFRGLIINFYLKQFLKGFPKLDEKTALIEYLAVDTKHLRKGIASTLIKSLFTLTEYENYLLEVMGTNTKAIKLYTKLGFKIAYIIPYFPKTYFGMKYTKEENNWINNIHANVAHLQNIKGHLP

SEQ ID NO: 46941 - DNA, 690 bp, Unknown
  Obtained from environmental sample
  misc_feature (1)..(690): n is a, c, g, or t
atgcagatggtttttcaaaatcctttttcttcttttaacgccaagattagcattggcggagcgcttatggaagtatgccgtttttatggcatgagtgttcccgaaagccgtgaaaaaattgagcggctgttaagtgatattggcctatccaatgacatgcttaaccgctggccgcgtgaactttcgggcggccagcttcaacgccttgccattgcaagagctattatcggtgaaccttcccttcttattgccgatgaacctctgtccgccctggacgtgtcagttcaagcgcaactactaaatctgcttgatgatattcgcgccagccgttctatggcgatgatttttatttcccatgatatgaccgttgtggaatatttctgcgacagggttgcggttatgtatctgggtaaaataatggagttgatttccgcggttgaattgtcacataactctatgcatccctatacccgatctctcagagcgagcgcgccccggcttgatgtttttaaagactccgtcaaagaaaatgcggctccgccggtcagtggagaaacgccgaatccacagacgctcattaaaggctgcccttttgccccacgctgtccgcaggcaacactcagttgctccgaagctttgcaggaacttcgggaagtttcggctgggcattgggtaagatgtcatttataa

SEQ ID NO: 46942 - protein, 229 aa, Unknown
  Obtained from environmental sample
  DOMAIN (140)...(209): Oligopeptide/dipeptide transporter, C-terminal region
  misc_feature (1)..(229): Xaa is any amino acid
MQMVFQNPFSSFNAKISIGGALMEVCRFYGMSVPESREKIERLLSDIGLSNDMLNRWPRELSGGQLQRLAIARAIIGEPSLLIADEPLSALDVSVQAQLLNLLDDIRASRSMAMIFISHDMTVVEYFCDRVAVMYLGKIMELISAVELSHNSMHPYTRSLRASAPRLDVFKDSVKENAAPPVSGETPNPQTLIKGCPFAPRCPQATLSCSEALQELREVSAGHWVRCHL

SEQ ID NO: 46943 - DNA, 870 bp, Unknown
  Obtained from environmental sample
  misc_feature (1)..(870): n is a, c, g, or t
atgtgtatagcgcgcgacataacggggcgcaaaacaatggcaaaggaaatcgcactgcaggcttccctgcttaaaaccataattaactcccttcccgacagcgtattttgcaagaatctggagcttaaatacactctgtgcaacaaatacatggcggatttattcggcagagaaatgaatgaaatcctgggacacaatgatatgcaagcttttggttttacaaaagaagctatggagcttgcaaataacgcggacaggatagccctgaacgaatgccggcaggtatcctttgaggaatggatggtatgcggggacggaaccaaacggctttttgaaaccgtaaaagtgccgcttattctggacgaagaaatagtcggaattttgggcataggccgcgatataacccagcgcaaggcaatggaagaggaagtaagagcggcttcagtcgccaagtccgatttccttgccaatatgagccatgaaatccgcacgccgcttaacgtggttatcggccttacggatctggtgctggaagacggctccctttccaaagaagttacggaaaacctgataaaaattaacaacgccggaagcacgcttttaagcattgtgaacgacattcttgatttctcaaaaatcgaagcgggcaagctgcaaatatctccggttgaatattatatgtccagtctgttgaacgacgttattacccttgttgttacgcgcataggggagaaaccgataactttcaatcttaatatccctgataaccttccgaataaactgtacggcgacgatctgcgggttaaacagatattaaccaacctcctgagcaattcagccaagtacacacacaggggaagcatagagtaa

SEQ ID NO: 46944 - protein, 289 aa, Unknown
  Obtained from environmental sample
  DOMAIN (22)...(134): PAS fold
  misc_feature (1)..(289): Xaa is any amino acid
MCIARDITGRKTMAKEIALQASLLKTIINSLPDSVFCKNLELKYTLCNKYMADLFGREMNEILGHNDMQAFGFTKEAMELANNADRIALNECRQVSFEEWMVCGDGTKRLFETVKVPLILDEEIVGILGIGRDITQRKAMEEEVRAASVAKSDFLANMSHEIRTPLNVVIGLTDLVLEDGSLSKEVTENLIKINNAGSTLLSIVNDILDFSKIEAGKLQISPVEYYMSSLLNDVITLVVTRIGEKPITFNLNIPDNLPNKLYGDDLRVKQILTNLLSNSAKYTHRGSIE

SEQ ID NO: 46945 - DNA, 900 bp, Unknown
  Obtained from environmental sample
  misc_feature (1)..(900): n is a, c, g, or t
gtggcggatattcctcttgntcacagacnntccttcgcgtttatatcaaaatcatatgtcccaaacctcgcaataagccagattcccaacacaattatcggcatccgcagaaacagtacatatgaggaagtttttcgaaagatgtttccggatcacaagtattctattgaatatgactcccaggaagaagtttggagctcgttaaaactggataacgaagttgatgttattttcggctgcaacagaaggttaattacttacaccaactattatgaggatgccggctatagattaaatttaattctcaattatacatttgacgcctctatgggtttcaacaaaaacgccgccgttcttaaatcaattaccgataaagcccttggcattatcaacgtaaataatatttcgaaccaatggatgcataaatcctacgattaccggaaaaaattgacggaagcccagcgcccctggtttatcggcgccgcgggtttgtttctcacagtgcttgttcttacgctgtttttcctatataaaagcagaagtttcggcaaacagcttgaaacgcttgtaaagcacagaacaagcgaactttcattgaagacctcgcagcttcaaatgatgatcgattcaattcccgatcttatattttgcaaagatacagagcttagatatacgcaatgcaacaagatctttgaagaatttatcggcgtcagtgaaacggagctgttcggcaagaccgacaaggaaggcttgtggctgtcatcagattcggagaaaagaatatccgcagtggaagaagccgtacttaaggataagaatgtcgcaaaatatgaagagtatgtttcatctatcgcaccaanaagggatattactttgaaaccattaaagccccgcttataa

SEQ ID NO: 46946 - protein, 299 aa, Unknown
  Obtained from environmental sample
  misc_feature (1)..(299): Xaa is any amino acid
MADIPLXHRXSFAFISKSYVPNLAISQIPNTIIGIRRNSTYEEVFRKMFPDHKYSIEYDSQEEVWSSLKLDNEVDVIFGCNRRLITYTNYYEDAGYRLNLILNYTFDASMGFNKNAAVLKSITDKALGIINVNNISNQWMHKSYDYRKKLTEAQRPWFIGAAGLFLTVLVLTLFFLYKSRSFGKQLETLVKHRTSELSLKTSQLQMMIDSIPDLIFCKDTELRYTQCNKIFEEFIGVSETELFGKTDKEGLWLSSDSEKRISAVEEAVLKDKNVAKYEEYVSSIAPXRDITLKPLKPRL

SEQ ID NO: 46947 - DNA, 594 bp, Unknown
  Obtained from environmental sample
  misc_feature (1)..(594): n is a, c, g, or t
atgacggcaaaactttccgcggaaacactgagtaaacttcagcctaaccgaaaagctttaattttaaagcgaatggcgcatcagagcgaagttgcgccggaagtgcttgaacaggtgtccgaggcgttaagagaaaaaataaggaatgtcagcgccggttccaatgacataaaaattgacgggatgcaggccttaaccgcgattttaaaacacggggattattcctttggcgataaattaataaatgagatagaaaaggacgatcctaaaatcgggcagaatttaaaagaaaaactttacactttagatgatgttttacttgcgattgaccgtcccattcaggataaattatcaacaatgtcggatcgggatattgccattttattaaagggcaggggaaatgaattttacgaaaaaataatgtcctgcgtttcagcaggacgcagaaaaacaatccgtgaagaaaatgagattcttggagctgtgccaaaacgcgattgcgattcggttgcaagggaatttcttacatggtttagattcgcccgtgaaaacggagaaattttgctttatagcgacgaggatgtagtcttatga

SEQ ID NO: 46948 - protein, 197 aa, Unknown
  Obtained from environmental sample
  DOMAIN (81)...(190): FliG C-terminal domain
  misc_feature (1)..(197): Xaa is any amino acid
MTAKLSAETLSKLQPNRKALILKRMAHQSEVAPEVLEQVSEALREKIRNVSAGSNDIKIDGMQALTAILKHGDYSFGDKLINEIEKDDPKIGQNLKEKLYTLDDVLLAIDRPIQDKLSTMSDRDIAILLKGRGNEFYEKIMSCVSAGRRKTIREENEILGAVPKRDCDSVAREFLTWFRFARENGEILLYSDEDVVL

SEQ ID NO: 46949 - DNA, 375 bp, Unknown
  Obtained from environmental sample
  misc_feature (1)..(375): n is a, c, g, or t
ttgcgtttcagatacagtgaagaaaacggcaggctggttaaaaaggccgttgtttataccgtcgatgagcacgggatcagcattgatgatgttgataaagaagcgataagcatagttcacaggctgaaagaggcgggctacgacagttacattgtcgggggcgcggtaagggatctgctcctgaagaaaaagcccaaagactttgacatagtcagcgaggcaatccccacgcggataaaaaagattttccgcaattcccgcataatcggaaggcgcttcaagctggtccatgtgtactttggcccgaggatttttgaggtctcgactttccgctccttaaaaacggccttaccagcaatacgttcggctcgataa

SEQ ID NO: 46950 - protein, 124 aa, Unknown
  Obtained from environmental sample
  misc_feature (1)..(124): Xaa is any amino acid
MRFRYSEENGRLVKKAVVYTVDEHGISIDDVDKEAISIVHRLKEAGYDSYIVGGAVRDLLLKKKPKDFDIVSEAIPTRIKKIFRNSRIIGRRFKLVHVYFGPRIFEVSTFRSLKTALPAIRSAR

SEQ ID NO: 46951 - DNA, 648 bp, Unknown
  Obtained from environmental sample
  misc_feature (1)..(648): n is a, c, g, or t
atgaacgccctgttttacgatcctgggcagcaaacagtcgtagactatgtcggcggcataaaggatataaaggccaggctggtcaggcccattatccccctttcaaagatttttacagacgatccggtgcggatgatccgcgcggtaaaatacggggcggccacggggtttaccctgcccttttcactcagatggaagatcagaaaacagtcccatttggtttccgcaatttcgccttcacggcttaccgaagaaattttcaagataatccactctccgcaggcggcccgtatagtcgaagccctggacgcgatgggcttatacgcctacctccagcccgaggccgcaaaactgatgagggaaccaggatcgtttcgcggccgctatctgcgaagtttggcggccatgagcaaacctggtttcaagaacctgcccggagaagcgctaggagcgctgataaacgactatcttgaggacattaccgactgggatcggggcatcattgaaaattacagggcaagctacggcgcggcaaggaatttcgtgctcccgatgaatcccccgcgttatgagatcgattatgcggtgcgccgttttttcgccgcccacggcaagaccgtaaaaaagtcacatattattaacaaatga

SEQ ID NO: 46952 - protein, 215 aa, Unknown
  Obtained from environmental sample
  DOMAIN (1)...(121): Poly A polymerase family
  misc_feature (1)..(215): Xaa is any amino acid
MNALFYDPGQQTVVDYVGGIKDIKARLVRPIIPLSKIFTDDPVRMIRAVKYGAATGFTLPFSLRWKIRKQSHLVSAISPSRLTEEIFKIIHSPQAARIVEALDAMGLYAYLQPEAAKLMREPGSFRGRYLRSLAAMSKPGFKNLPGEALGALINDYLEDITDWDRGIIENYRASYGAARNFVLPMNPPRYEIDYAVRRFFAAHGKTVKKSHIINK

SEQ ID NO: 46953 - DNA, 633 bp, Unknown
  Obtained from environmental sample
  misc_feature (1)..(633): n is a, c, g, or t
gtgttccttatagatacttatgacaccttaaaatccggcatagtaaacgcgattaaggccggaaaaaaattgaatgaacaggggaagaaattcggagtgcgccttgattccggggatattgaatacctttccaccgaagtaaggaaggcgctggatgaagccgggtttaacgacgcgagcataaccgtatccaacgaattggatgaaactattgttgaaactatggtgaggatgggggctccggttgacacttggggcgtcgggacgaatatggtcacgggcggcaacgacgcggcccttaccggcgtatacaaaatggcggcctgcgaggataaaaacggcaatatgacgccggtgatgaaattttcagacaaccccgaaaagaccaccaatccgggcgtcaagcaggtatggcggctgaaggacgatcaaggcgcgccgcttgccgacgtgctggccctggacggccctgacgaggttgaatcttttgaattgggcagccgctgctgtttctggcacacttccggggactaccggcattttttacatgaaatcgggtcggaaccgcagccgctcctgaaactgcgcctgaacaaggggcagcgccagggggccgcggctctcgttagctga

SEQ ID NO: 46954 - protein, 210 aa, Unknown
  Obtained from environmental sample
  misc_feature (1)..(210): Xaa is any amino acid
MFLIDTYDTLKSGIVNAIKAGKKLNEQGKKFGVRLDSGDIEYLSTEVRKALDEAGFNDASITVSNELDETIVETMVRMGAPVDTWGVGTNMVTGGNDAALTGVYKMAACEDKNGNMTPVMKFSDNPEKTTNPGVKQVWRLKDDQGAPLADVLALDGPDEVESFELGSRCCFWHTSGDYRHFLHEIGSEPQPLLKLRLNKGQRQGAAALVS

SEQ ID NO: 46955 - DNA, 588 bp, Unknown
  Obtained from environmental sample
  misc_feature (1)..(588): n is a, c, g, or t
atgataaaatatgtagacaaaatggactcggcggatctcacgatggatgaaattatgcatccatcaggctgggtgttgctcggcttcatcaccgatccccgcacagggcttggcaggattcgcaatttcaccataagcaacctggatcttatgaaaaaactgtcaaaggctacttttcaaaaacccattgatgagatcctcgcgatgcccgatgttaaagaacgtatagatacctattttgaacagcacaacctttttattgaaatggcgaaaaaatacgcaaaagccgaaggaaacgccattgtttgcgatatgcggaatatcgatacaatatacgccggcaaccgttttctgctttatacgctcttccccaaacaaaacatttccgtttgggtggtagacgggaaaaagaaggtcaacacggtaattaccgtaggttatagcatcataaacaaaaccgctacggtcgatgtaggcagtttaatgctaaaatacggcggcggcgggcacaaggcagtaggtacctgccaggtggcttatgagaataccgataaaattctcagtgaaattatagccgctgtaaaataa

SEQ ID NO: 46956 - protein, 195 aa, Unknown
  Obtained from environmental sample
  misc_feature (1)..(195): Xaa is any amino acid
MIKYVDKMDSADLTMDEIMHPSGWVLLGFITDPRTGLGRIRNFTISNLDLMKKLSKATFQKPIDEILAMPDVKERIDTYFEQHNLFIEMAKKYAKAEGNAIVCDMRNIDTIYAGNRFLLYTLFPKQNISVWVVDGKKKVNTVITVGYSIINKTATVDVGSLMLKYGGGGHKAVGTCQVAYENTDKILSEIIAAVK

SEQ ID NO: 46957 - DNA, 1278 bp, Unknown
  Obtained from environmental sample
  misc_feature (1)..(1278): n is a, c, g, or t
gtgaagtattcaaatctggcgaatcttgccattatagcctgcccgggcggcgaggtatttgcggatgaagtaattatccacctgagaaagctataccgtcacaagaacgaaacgctttgcgcaggatctttcaaacgctataatttaagcctcgacaaggtaaatgaacagatcaattttataagcgagatagccgggttcgagaccggcgcgcgttcgggaagccgccatgttccaaagataaaactacaggtaaaattcacccgctttccaaacggggaagtcaaggctgaaatacaggaatcaatacggggcaaggatgtctatattttccaggatgttgaaaaccatttccccgtgcgtttttccggttataaagatgggatcgcgctgtcgattaacgaccacctgctgacgctttttgtcaccattgacgcggcgcagagggcgggggccggtcatataactctggtgatccccaactacccttacgcgaggcagcacaaggcaaagggcagggaaggccttgccgccagccgcataggaaagatgtttgagagccttggggtcggtaccattatctccctggacatacactcccgcgatattatcaattcttttaacaggatgaggctggagaacctgcacgcaagctaccagataataagaacgctgttctcaatggacggagtcctcaatgacgattttgtcgtggtctccccggacaccggcgcggttgacagaaataaatttttcgcgtcggcgttaaagaagccgcttgccctgctgtacaaggaacgggattattcaaagttcatcgccaacgcgctggagagtaatatctcccaaatgcggcttttgggcaatgtgtcggacaagacggtttttatggccgacgaccttcttggcaccggggcgacgctgattaagggcatgaagctgctcaaggaaacggcgcccgcaggtaatctgctccatagcctgccccttttctccggcaacgcggtatcctattttgacgaagcgtataaaaacggactattctacaggcttatcggaacaaacgcggtgtaccaggaagaagtccttaagcgcgaatggtacatcaatgtaaatatatctggactctttgccaaagttatttccaggctgcatcagaaactgtctatttccagccttctggacaaccgggaggtcatcagccgcctgatggtggatgccaaggaaccggaacggcagcagcacgaattgcctttcaatcaagaaataaacgaataa

SEQ ID NO: 46958 - protein, 425 aa, Unknown
  Obtained from environmental sample
  SIGNAL (1)...(21)
  DOMAIN (207)...(349): Phosphoribosyl transferase domain
  misc_feature (1)..(425): Xaa is any amino acid
MKYSNLANLAIIACPGGEVFADEVIIHLRKLYRHKNETLCAGSFKRYNLSLDKVNEQINFISEIAGFETGARSGSRHVPKIKLQVKFTRFPNGEVKAEIQESIRGKDVYIFQDVENHFPVRFSGYKDGIALSINDHLLTLFVTIDAAQRAGAGHITLVIPNYPYARQHKAKGREGLAASRIGKMFESLGVGTIISLDIHSRDIINSFNRMRLENLHASYQIIRTLFSMDGVLNDDFVVVSPDTGAVDRNKFFASALKKPLALLYKERDYSKFIANALESNISQMRLLGNVSDKTVFMADDLLGTGATLIKGMKLLKETAPAGNLLHSLPLFSGNAVSYFDEAYKNGLFYRLIGTNAVYQEEVLKREWYINVNISGLFAKVISRLHQKLSISSLLDNREVISRLMVDAKEPERQQHELPFNQEINE

SEQ ID NO: 46959 - DNA, 405 bp, Unknown
  Obtained from environmental sample
  misc_feature (1)..(405): n is a, c, g, or t
atgaaaaagcttcccgaaaaagctttgttcattatctttttcgcgcttgctttttctcaatttccaaaaaacgctttgctccatgcccagggcattgacggtaccgacctggatactgtccgcgcaagggaagaattccgcataggtgtacaggcttattatcgcttttcgtataacgaagccatcctttcttttgagagggcgctttcataccggccgggcgagcctttgatccttgactggcttggaaaagcttattatcgctccggcattgaaaacaccgctttcagggcctggcaggcggcagcagcagcctacgggcttttcgtcaggccagggaatgttgatctcaagccgtatggagacgctgcggaaccgccgtatcctgtttccggtagccgatga

SEQ ID NO: 46960 - protein, 134 aa, Unknown
  Obtained from environmental sample
  SIGNAL (1)...(19)
  misc_feature (1)..(134): Xaa is any amino acid
MKKLPEKALFIIFFALAFSQFPKNALLHAQGIDGTDLDTVRAREEFRIGVQAYYRFSYNEAILSFERALSYRPGEPLILDWLGKAYYRSGIENTAFRAWQAAAAAYGLFVRPGNVDLKPYGDAAEPPYPVSGSR

SEQ ID NO: 46961 - DNA, 927 bp, Unknown
  Obtained from environmental sample
  misc_feature (1)..(927): n is a, c, g, or t
ttgcgctaccaaggtggaaaccgacgaactggcgcgaaggctgtcgaagcgggttatcccgctgaagctatacacggcgacctttcccaggagattcgggagcgcaccttgcggcgtttccgcctgcgccagcatggttcgcggaaccatgctgccgcgactgtttccgcaggtggcgaaccggctattctcgtagctaccgatgtcgcggcccgtgggcttgatattgagaatctcagccatgtcatcaactgggatcttcccaatgaccgtgaaacctatgtccaccgcattggcaggacagccagagccgggaagcgcggcatagcgatcagccttgccatgctttctgaccgggggcgtatacaccagctttcccggatgatggaaaagaccctgggctgcgggattcaatggcttaaagtcccgtcggtaaaggctgttatgaaggcccttcgccggaggatcagttccagggtggttgccgctctgcccgggcaggaacccgctgccgaaaacaacgagccattagctgacgcggcaacgccttttgaaaaaacgacaagctccgaggctaaagaaatgccggaggcttctcctttccttgccaaggtttgccgcaacctgatagaccggctgggcgcggaaaaggctgttgaagccctggtatccctgagttatggcgagtttcttgatcccgggcgttatgggcctatcactgaatttcaggaagaagatttccatgagcctgttaaagcaggcggtaaaagcgtcggcggcaaaattgccggtggcagaagtgcgggcaggaggagggatgacaggccacgcagggcttcgggcagcgtatcgcatgcgccggctggcaagcgtggttcgggcagggaatttcgggaagagacaggcgatttacgcgggtatatgtag

SEQ ID NO: 46962 - protein, 308 aa, Unknown
  Obtained from environmental sample
  DOMAIN (13)...(105): Helicase conserved C-terminal domain
  misc_feature (1)..(308): Xaa is any amino acid
MRYQGGNRRTGAKAVEAGYPAEAIHGDLSQEIRERTLRRFRLRQHGSRNHAAATVSAGGEPAILVATDVAARGLDIENLSHVINWDLPNDRETYVHRIGRTARAGKRGIAISLAMLSDRGRIHQLSRMMEKTLGCGIQWLKVPSVKAVMKALRRRISSRVVAALPGQEPAAENNEPLADAATPFEKTTSSEAKEMPEASPFLAKVCRNLIDRLGAEKAVEALVSLSYGEFLDPGRYGPITEFQEEDFHEPVKAGGKSVGGKIAGGRSAGRRRDDRPRRASGSVSHAPAGKRGSGREFREETGDLRGYM

SEQ ID NO: 46963 - DNA, 729 bp, Unknown
  Obtained from environmental sample
  misc_feature (1)..(729): n is a, c, g, or t
atgtcaaacatggcggcggcggctacaatcggcagcaaccacaacagccgcgccaatgacggtgaaatacgggcaaaacgcggtttttggcccgggcttgccgtaagcatcaagcactcaagtatctttgcttcgtttgttatcatcgcaaagggcgaatatccgtcagagctgaatatccctctgccgttctctcttgtaaacaacaatgtccataaaaaccgtcttgaggtaatgcccgcttatttctggatgcacaatctttacgctcttgagcgcaattcatggaaaaccaaaaaccgggacaaacggaaaataaaaatacagcgtattgaaagcgattatcttgcgcctgatacggcagaagaaatcatcgccgctctttcgctattggaaggttggctgggtgaatccggtttttcaccgatggatatgacaggcgcggaagatgttacagtcaggcatattacttgccgtcactttgaacgaagtaaaagaggacaggtgattataaaaccgcttgaagctatagcggcttaccgccaaatgctgcgttattacgcagtcaaaacaatcgccgccttttttgattcacaaccttctttgaattataaaaatttatgcgacttgcttggttctcccgcagcaaatgaacgtataaaaggttgggaaaatttcggcggccaaatcgttccggctttccgtgtcgataagttacggaagaaatag

SEQ ID NO: 46964 - protein, 242 aa, Unknown
  Obtained from environmental sample
  SIGNAL (1)...(18)
  misc_feature (1)..(242): Xaa is any amino acid
MSNMAAAATIGSNHNSRANDGEIRAKRGFWPGLAVSIKHSSIFASFVIIAKGEYPSELNIPLPFSLVNNNVHKNRLEVMPAYFWMHNLYALERNSWKTKNRDKRKIKIQRIESDYLAPDTAEEIIAALSLLEGWLGESGFSPMDMTGAEDVTVRHITCRHFERSKRGQVIIKPLEAIAAYRQMLRYYAVKTIAAFFDSQPSLNYKNLCDLLGSPAANERIKGWENFGGQIVPAFRVDKLRKK

SEQ ID NO: 46965 - DNA, 978 bp, Unknown
  Obtained from environmental sample
  misc_feature (1)..(978): n is a, c, g, or t
atgtataataaatctatgaaaactaagaatgttctccccatagaacgtcacggttacgattttattcccgccgagtacttgccgccgggcgcggatgagtactggcaacggaacgcgcaacaaacagaattgttttctaaaaataaagatagctggcggcggttgaaacccgaagaaatagaagtactgagccaaaataaaaattactgcgctaagtgggaagactttttggttaccgatccattcgatccttcgctaatctgcgattcaaatttttacggtcttgtgcgcataggctctttgcaaaatgtactgcttaaacatcacgacttttgtattcccgcagggattcgtaacagcacaattatttcctgtgacattggtaatgacaccgcaatccagaattgcgcatttgtttgcaattatattattggaaacaactgtatcctctccgaagtcaatgaattgcagactaccaaccacgcgaaattcggtaatggtgcgataaaggacggcgaagacgaagaagtgcgcgtttggatcgatgtgatgaacgaagctggcgggcgttcaatattaccgtttgacaaaatgatcgccgcagacgcgtatctttgggctgcgtaccgcgatgatacggagttaaccgttaaattggcggagattacgcaaaaacagtacggcggttaccgtggcagttacgggattatcgggtcaaatgcggtaattaaaagctgttcaattatcaaggacacgatggtgggagagtgcgcttacattaagggagcgaataaacttaaaaacattacgatacagtcatctgccgaagagcctacgcagataggagagggcgtggaaatggtgaatggcattgtgggttacgcctgtaacgctttttacggttccaaggcagtgcgttttgttatgggcagaaacagtaacttaaagtacggggcgcgtcttattcattctgtgtag

SEQ ID NO: 46966 - protein, 325 aa, Unknown
  Obtained from environmental sample
  misc_feature (1)..(325): Xaa is any amino acid
MYNKSMKTKNVLPIERHGYDFIPAEYLPPGADEYWQRNAQQTELFSKNKDSWRRLKPEEIEVLSQNKNYCAKWEDFLVTDPFDPSLICDSNFYGLVRIGSLQNVLLKHHDFCIPAGIRNSTIISCDIGNDTAIQNCAFVCNYIIGNNCILSEVNELQTTNHAKFGNGAIKDGEDEEVRVWIDVMNEAGGRSILPFDKMIAADAYLWAAYRDDTELTVKLAEITQKQYGGYRGSYGIIGSNAVIKSCSIIKDTMVGECAYIKGANKLKNITIQSSAEEPTQIGEGVEMVNGIVGYACNAFYGSKAVRFVMGRNSNLKYGARLIHSV

SEQ ID NO: 46967 - DNA, 333 bp, Unknown
  Obtained from environmental sample
  misc_feature (1)..(333): n is a, c, g, or t
atgctggggcaggcggaacatgacccggacgcgcgagcgcgggcgttggttccaaacaaagagcttgctgaaaaaattcttgcggcaattgagcggcgtataaaatcattgccgacagaaagaaccgcccgcgcttctttgaacgcaggcggacttattatcgtctataanacaaaggaagaggcaatccgtattgctaacacaatagcacccgaacatcttgagcttcaaaccgtaaacgcggaaagttggatacccaaacttaaaaatacggctcgctttttatcggcagtctttgcgccgaagtcctcnggncgatatcagcgggaataa

SEQ ID NO: 46968 - protein, 110 aa, Unknown
  Obtained from environmental sample
  misc_feature (1)..(110): Xaa is any amino acid
MLGQAEHDPDARARALVPNKELAEKILAAIERRIKSLPTERTARASLNAGGLIIVYXTKEEAIRIANTIAPEHLELQTVNAESWIPKLKNTARFLSAVFAPKSSGRYQRE

SEQ ID NO: 46969 - DNA, 1164 bp, Unknown
  Obtained from environmental sample
  misc_feature (1)..(1164): n is a, c, g, or t
ttgttccctcgacctttcaaagccaatgttaaagaaggcaacccaagcggagggttaataaggcttgacaaggacgatgaagaatttaatcccttttcttacctttctgaccctgttcctgccgtagctttcgatccttttcccgcctcttcttcgggcaaggattttattatatcaattatccttcccgacgcggcgcaaataataaaaggagccggcaaacttgacagtgaaataaccggttataatgaagaaaaaattaaagacgcgaaaaaatactccgcgttcagatcgttttccaatctccgttccgtaaaagccaataatgtcacttatatcggtaatttcgcgtttgccgattgcaaggcgctgacggaaataaatttcccgcgggtaagctccgccggttcgttagctgatatcggcaaatacgcttttctgggatgcgcgggccttaaagaaataaaatttaattcggcggcggttataggcgaatacgcttttaaagattgtacaagcctgtcaaagattgatttccccgaagtaaacaagattgaaaataacgcttttgagggatgcacaagccttgtcaacatttttttcgagaaggcgacaaaaatccgcgatgaagcttttaagggctgtacaggtcttaaaaaagcggaattcaatacaacgcagaaacatgatccgagtgtcgcatttccgtatcctcttggcgatcccgaattttactttccttttcccgatcccgaatatttgcttccttttcccgatcccgacgagattcccaatttttctctttatgaggaatatgtgattttctacccttccgtattcaacggttgcaaagcccttgaaatattgaatgtacgccgtgcatggaatgtttatttttccaaagatgttctggcaaatacaggttccgctatcgaaatctatctgtttgatgaaccggattcccttcaaaaaataagctatggtcacccgcaaaacgttaagtttttaggcgaaggcgcaaccgctactttgaaaaaggttactattttagttcccgcaggcggagagttaattcaagaaaacagcgctactgataatatagcgaagtttatccgaaaaacttacaacaccatagatgtaaacgtcaacaaaaggactttttaa

SEQ ID NO: 46970 - protein, 387 aa, Unknown
  Obtained from environmental sample
  misc_feature (1)..(387): Xaa is any amino acid
MFPRPFKANVKEGNPSGGLIRLDKDDEEFNPFSYLSDPVPAVAFDPFPASSSGKDFIISIILPDAAQIIKGAGKLDSEITGYNEEKIKDAKKYSAFRSFSNLRSVKANNVTYIGNFAFADCKALTEINFPRVSSAGSLADIGKYAFLGCAGLKEIKFNSAAVIGEYAFKDCTSLSKIDFPEVNKIENNAFEGCTSLVNIFFEKATKIRDEAFKGCTGLKKAEFNTTQKHDPSVAFPYPLGDPEFYFPFPDPEYLLPFPDPDEIPNFSLYEEYVIFYPSVFNGCKALEILNVRRAWNVYFSKDVLANTGSAIEIYLFDEPDSLQKISYGHPQNVKFLGEGATATLKKVTILVPAGGELIQENSATDNIAKFIRKTYNTIDVNVNKRTF

SEQ ID NO: 46971 - DNA, 1200 bp, Unknown
  Obtained from environmental sample
  misc_feature (1)..(1200): n is a, c, g, or t
ttgcaccccacctttcttgccgccgatacaagggaatttttcagtaaagtcattgacgataataagctggatcagcctattctttatttggacgaatgggttggctcgattggaaccggaaaaatgcgcccgtccagtacggatgaagtgcggatagccagaggaaataatcagtcaaaaatacaggcattgctggaaaaagcgcagggaaaatttgacggcgcaagagtcttgttaaaagcaaaagaaaaagaacgcgatgaaatagaaagaatactgcgcgacagaatgaactcgatatgtgaacgcactccgctgcaggaaatgaccgatgtaagcgattgtatgtcggaagcgcaaaaatcggcggttaatgaaattcaaaacctgctcaaacaaatgttaaaaaacgatcatgaactggaattgagtattaaggattatgtcaccgcccacgccgatgtggagcatttaaccgataaacttgaatccgagggcggctctgttaccgtagatacaggcgcgatagacgcggaacttgacaccatccgccaaatggcaaaaatgacaatcgggcggcagggaaaccacttccccgttcttaccgcggaatattatcacagtatgcccagcgaagtagcgacgcgcgaaaatattatcgccatgctcgcgagaatcgaaagtatcgacgccgaggcgttttgcagggtgcataaaaatcagttaaaccgcatagttccttacgttcttttaataccgacctacggtgattttggtttttgctgggaaccgtttgaccggcataaccgcgccacaagccgcggacgaattattattcccatgtaccctaaaaatttattcatggcgatgcttaccgctatagccgatcttcgctggcaggtagcaaaagaaaaagcgtctttttactggatggaagaaggtcttacaggtcattattatcaatggtttcaggcccaaaagctaaagggtgatataaaagaatactttatcaaagattacattatgtggataaccaaggaatcggaaggaatacaaaagctggaaaaagacgtacgcggaacattctggcggtatatgccgtttacaagagaagtaaaagaaaaattaaaaaccagaaaccttatttatcaggaactttaccagcgcgatgttaaccgctccatgtcagacggatattag

SEQ ID NO: 46972 - protein, 399 aa, Unknown
  Obtained from environmental sample
  misc_feature (1)..(399): Xaa is any amino acid
MHPTFLAADTREFFSKVIDDNKLDQPILYLDEWVGSIGTGKMRPSSTDEVRIARGNNQSKIQALLEKAQGKFDGARVLLKAKEKERDEIERILRDRMNSICERTPLQEMTDVSDCMSEAQKSAVNEIQNLLKQMLKNDHELELSIKDYVTAHADVEHLTDKLESEGGSVTVDTGAIDAELDTIRQMAKMTIGRQGNHFPVLTAEYYHSMPSEVATRENIIAMLARIESIDAEAFCRVHKNQLNRIVPYVLLIPTYGDFGFCWEPFDRHNRATSRGRIIIPMYPKNLFMAMLTAIADLRWQVAKEKASFYWMEEGLTGHYYQWFQAQKLKGDIKEYFIKDYIMWITKESEGIQKLEKDVRGTFWRYMPFTREVKEKLKTRNLIYQELYQRDVNRSMSDGY

SEQ ID NO: 46973 - DNA, 759 bp, Unknown
  Obtained from environmental sample
  misc_feature (1)..(759): n is a, c, g, or t
ttgcgttatcaggacgaaatcaacggctcactgatcggtatcgcagaccgtattattgacatcatctacaccaaatactttaagggaatgattcgttacgagggtatacaaaggatagacgaattcccgatgttgcgtgatgttctgcgcgaagctgttttgaacgctgtcgtacataaggattatagttcgggcaacccgatacacataaaaatttacgatgagaaggtcattatatataacgactgtcagataccgtcgaatatcaaaccggaaagcctgctcacaggcgtccgctcgaatcctcacaatcccttgattgcgaacgtgttttttcgttcgggtcagattgaggcgtggggacgcggtattgagaagatgaaaaacggctgtattgctgatggtctgccggagccgaaatttacgatactgccaaacgtgttctctatttgtttctatattcggaacaacaataaaacggcgattagctacgaggttaaaagtgataatcaaggcgataacttcggtataaacttcggtataaacttcggtataaacttcggtttaaatgaaacacaatgcaagattgttgaattgatgatggccaacccggaaataatcacagaacagatagcggaggcaatcggtatcacaaagcgccagatagaggcgaacatcagcaaattgaaggctttgggtatagtggaacgcaaaggcgcgcgcaagaaaggccgatgggttgtcaagcggaaaaaatga

SEQ ID NO: 46974 - protein, 252 aa, Unknown
  Obtained from environmental sample
  misc_feature (1)..(252): Xaa is any amino acid
MRYQDEINGSLIGIADRIIDIIYTKYFKGMIRYEGIQRIDEFPMLRDVLREAVLNAVVHKDYSSGNPIHIKIYDEKVIIYNDCQIPSNIKPESLLTGVRSNPHNPLIANVFFRSGQIEAWGRGIEKMKNGCIADGLPEPKFTILPNVFSICFYIRNNNKTAISYEVKSDNQGDNFGINFGINFGINFGLNETQCKIVELMMANPEIITEQIAEAIGITKRQIEANISKLKALGIVERKGARKKGRWVVKRKK

SEQ ID NO: 46975 - DNA, 738 bp, Unknown
  Obtained from environmental sample
  misc_feature (1)..(738): n is a, c, g, or t
atgggcaaattagagcgaatggcgttttttctgcgagagttatttttccagtccggatgcagtctctgcgggcagccgtgcgcgtcccttgatgaggcgtggtacgggctgtgcgatggctgccgcggcaagatcgaacaggagcttgcagaaactcaagaattggaatcctgtgaatattgcggaaaaccgctcatatcggaacagggacgctgcctttgctgcagacggacggaaacactggggttcgacaaggcaatagtcctgtttccctattccggaaaataccggaaattgctgagttcttacaaatttgacaaacatatagctcttgggaatttttttgttgaaataataaggagaacacttgaaagaaatggcatatcctctgaaacaagcattgtacctgtccccccgcgtcctggaaaaattcgtaatgctggctgggatcagatagaatacctcgcaagactgctggaaaagaggcaaaaaaacgttaaaggtttgtttgtcagccgctgtctgaaaagactgcgatcaaaaagccagaaagagcttggccgggaaagccgccaaaccaacctcagggggcgcataatacctaaaaaacaaatcccaaaatttgccgttattattgatgatgttataacgacaggttcaacccttgacgcctgcgccactgccctgaaagaaggcggagcccaaattgtctacgggctgtgtttgttttatgattag

SEQ ID NO: 46976 - protein, 245 aa, Unknown
  Obtained from environmental sample
  misc_feature (1)..(245): Xaa is any amino acid
MGKLERMAFFLRELFFQSGCSLCGQPCASLDEAWYGLCDGCRGKIEQELAETQELESCEYCGKPLISEQGRCLCCRRTETLGFDKAIVLFPYSGKYRKLLSSYKFDKHIALGNFFVEIIRRTLERNGISSETSIVPVPPRPGKIRNAGWDQIEYLARLLEKRQKNVKGLFVSRCLKRLRSKSQKELGRESRQTNLRGRIIPKKQIPKFAVIIDDVITTGSTLDACATALKEGGAQIVYGLCLFYD

SEQ ID NO: 46977 - DNA, 1662 bp, Unknown
  Obtained from environmental sample
  misc_feature (1)..(1662): n is a, c, g, or t
atgtatcagatcggccgagagcgccgttgccaagctcttaaccccgcagtcggggactataccatcagcggaatcggaacgtttaccagcaacggaagccgcagacaagtaaccgtaacgcccaaaccggggaaatctacgggggctgtaaccgtcaagtacaacggcaatactgttgccccttccgcggtcggcacatatacggttacctttgacgtggaggcggcggaaggttttaacgcggcaagcggattaagcgcgggaaccttaaccattaagaccgcaagcagtggcggcggtagcaatagcggcggaggcggaactccgactccaaccgtaaccggcgtaaccgtaagcccctcctccgtttctattgagaaaggggaaacccggcagtttagcgcgacagttaccggcgcgaacaatcccagccaaacggtaacctggacggtgacaggcggcgtaagcggaaccggcatcaacgcaagcggcctcttaaccgtggcggccaatgaaaccgctgcaggcctcaccgtcaaggcgacatcagcggcaaacacgtccataagcggcaccgcgtccgtgacggttaccgcgcctcctataaccgcagagccgggcagcattgataatcctattttaatagtcccgacagggcagcttacaagcgcaggctggaataaactgcttggcgacattgcctacgaagacaagtacgtgagccttgacctctcgaaatgcgactggcaaggtacggagttctctgtggatgaccctttgggcgttggcacggacaagatcgtatccctgatcctgcccgacacggtgcagaaggttatgggtagaccgtattctgaaattattcctaactacattcaaagttacaaaaaccttcgcgccgtaaagggaaaaaacataacagcagtagtccaaggtgccttctatgcctgcatgaaccttgccagcgtggacttcccagcggcaacttccatcggtgaatgtgctttcatggactgtacgagccttaccagcgtgagcctcccggcggcaacgtccatcggccttggcgctttctataagtgtacgagccttaccagtatgagcctcccagtggcaattaccatcagcggggcagccttctatgagtgtacgagccttaccagtgtgagcctcccagcggcaactaccatcgactacaacgccttcaatggctgtacgagccttaccagtgtgagcctcccagcggcaactaccatcgctaacggtgccttccatagatgtacgatccttaccagcgtagacttcccaaaggcaacttacattggggagttaaagggggcggatttaccagcaacggagaagggcatcttccaaagctgtacaagccttaccagtgtgagcctccctatggcaactaccatcggctacttcgccttcatggactgtacgagccttaccagtgtgagcctcccagcggcaactaccatcggctaccacgccttctatggctgtacgagacttaccagtgtgagcctcccagcggcaactaccatcggtaacggtgccttctctacatgtgcgagccttatcagcgtgagcctcccggcggcaactaccatcgtcttggaaaccttcaatggctgtacgaaccttacagtgtga

SEQ ID NO: 46978 - protein, 553 aa, Unknown
  Obtained from environmental sample
  DOMAIN (112)...(193): Bacterial Ig-like domain (group 2)
  misc_feature (1)..(553): Xaa is any amino acid
MYQIGRERRCQALNPAVGDYTISGIGTFTSNGSRRQVTVTPKPGKSTGAVTVKYNGNTVAPSAVGTYTVTFDVEAAEGFNAASGLSAGTLTIKTASSGGGSNSGGGGTPTPTVTGVTVSPSSVSIEKGETRQFSATVTGANNPSQTVTWTVTGGVSGTGINASGLLTVAANETAAGLTVKATSAANTSISGTASVTVTAPPITAEPGSIDNPILIVPTGQLTSAGWNKLLGDIAYEDKYVSLDLSKCDWQGTEFSVDDPLGVGTDKIVSLILPDTVQKVMGRPYSEIIPNYIQSYKNLRAVKGKNITAVVQGAFYACMNLASVDFPAATSIGECAFMDCTSLTSVSLPAATSIGLGAFYKCTSLTSMSLPVAITISGAAFYECTSLTSVSLPAATTIDYNAFNGCTSLTSVSLPAATTIANGAFHRCTILTSVDFPKATYIGELKGADLPATEKGIFQSCTSLTSVSLPMATTIGYFAFMDCTSLTSVSLPAATTIGYHAFYGCTRLTSVSLPAATTIGNGAFSTCASLISVSLPAATTIVLETFNGCTNLTV

SEQ ID NO: 46979 - DNA, 348 bp, Unknown
  Obtained from environmental sample
  misc_feature (1)..(348): n is a, c, g, or t
atggctcatgattttagaaaaaatttgagaagtgaactcgattttcaaggtataacagtcaaagaattgagcgccagaacaagcatccctatcgcaaccctggattgctacctggggacaagggcaactataccttctgttgatgccgcgtttaaaatcgcaaaagctttgcaggtttcggttgaatatcttgttgccggtgaaatggcaaaggtggataagtcactaaaaacacctaatcgtgaggcacaggaaattatccaatggattgaaagccttaattctgaacagcgtagagcaatttataagatgatcgttgcctttaaaggcaaagctaaaagtacatga

SEQ ID NO: 46980 - protein, 115 aa, Unknown
  Obtained from environmental sample
  misc_feature (1)..(115): Xaa is any amino acid
MAHDFRKNLRSELDFQGITVKELSARTSIPIATLDCYLGTRATIPSVDAAFKIAKALQVSVEYLVAGEMAKVDKSLKTPNREAQEIIQWIESLNSEQRRAIYKMIVAFKGKAKST

SEQ ID NO: 46981 - DNA, 597 bp, Unknown
  Obtained from environmental sample
  misc_feature (1)..(597): n is a, c, g, or t
ttgcctttaaaggcaaagctaaaagtacatgacatagatgatgtttttcatataacaatccctaattccctgctttcttacttcttttttcctgatgtgctttttgaagcctttaccttatcaaccggctttttctttgtacgcaaaattcctttagggaacaggatatcaaatgcctcccaggcattgtccacaaaatggactatcagggattttttgatgtcggcgttcagctcttcccattcttccctgttgtcggccgggagaagaacttcttccattccgtttcttattgccgcaaggagcttttcctttagcccgcctatgggaaggatgcggccggtaagggtcagctccccggtcatggcaaagcccggctttggcggaacctggcagagggttgatagaagcgaggcagccaaggttatgcccgctgacgggccatccttgggattgcgccttcgggaacgtgaatgtgaaaatccgattttaacaaatctttggcaaggaaattgtatttgttactcgtactgcgcaagtaggaaagagcgatgcgtgcgctttctttcattacatcgccgagatttcccgttataa

SEQ ID NO: 46982 - protein, 198 aa, Unknown
  Obtained from environmental sample
  misc_feature (1)..(198): Xaa is any amino acid
MPLKAKLKVHDIDDVFHITIPNSLLSYFFFPDVLFEAFTLSTGFFFVRKIPLGNRISNASQALSTKWTIRDFLMSAFSSSHSSLLSAGRRTSSIPFLIAARSFSFSPPMGRMRPVRVSSPVMAKPGFGGTWQRVDRSEAAKVMPADGPSLGLRLRERECENPILTNLWQGNCICYSYCASRKERCVRFLSLHRRDFPL

SEQ ID NO: 46983 - DNA, 345 bp, Unknown
  Obtained from environmental sample
  misc_feature (1)..(345): n is a, c, g, or t
ttggctgcctcgcttctatcaaccctctgccaggttccgccaaagccgggctttgccatgaccggggagctgacccttaccggccgcatccttcccataggcgggctaaaggaaaagctccttgcggcaataagaaacggaatggaagaagttcttctcccggccgacaacagggaagaatgggaagagctgaacgccgacatcaaaaaatccctgatagtccattttgtggacaatgcctgggaggcatttgatatcctgttccctaaaggaattttgcgtacaaagaaaaagccggttgataaggtaaaggcttcaaaaagcacatcaggaaaaaagaagtaa

SEQ ID NO: 46984 - protein, 114 aa, Unknown
  Obtained from environmental sample
  DOMAIN (1)...(90): Lon protease (S16) C-terminal proteolytic domain
  misc_feature (1)..(114): Xaa is any amino acid
MAASLLSTLCQVPPKPGFAMTGELTLTGRILPIGGLKEKLLAAIRNGMEEVLLPADNREEWEELNADIKKSLIVHFVDNAWEAFDILFPKGILRTKKKPVDKVKASKSTSGKKK

SEQ ID NO: 46985 - DNA, 1638 bp, Unknown
  Obtained from environmental sample
  misc_feature (1)..(1638): n is a, c, g, or t
ttggctgtggatcgctcggaaaatcccgaacgcgcggcaaatctgatctgcaattcgtcccatttcaaaaccgagaaaaaagtcgagcttcttgccgttcctgacatcagggagcgccttgaggcggttcttgaaacgcttgaacgggaaaacgagatattcggcatacagaaaaatatttcaggaaaggtcaaaagccgcatagacaagcaccagcgcgaatactacctccatgaacagcttaaagaaattaacaaagaacttggcaaggacaaggacagcaaggaagacgaattttcagagattgaaaaacagatcgaagcgaaggccccccccgcggaagttgtagctaaagcggccaaggaactggcccggctccgcaagctccagcccctttcgcccgaagcgggcgtgttgcgcggctaccttgagtggatttccgatcttccctggagcgagacaagcgcggattcaggcgacctcgacgcggcgcaggctatacttgatgaagatcattttaacatgcgcaaagcaaaggaccgcatactggagtttatcgcggtgcggcaattgctggcttgtgcggatggggctgaaaaaaacgcgataaaggggccaatcctctgtttcgtggggccgccgggcacaggcaagaccagcctgggaaaatccgtggcgagggcgctggggcggcgttttgtccgtatctcgctgggcgggctgagggacgaagccgagatccggggccacaggaaaacctatgtaggggcgcttcccggcaaaataattcagtccatgcgaaaagccggaacgatgaaccctgttattttgttagacgaaatcgacaaactttcaagcgatttcaggggagacccggcatccgccttgctggaagtgcttgaccccgaacaaaactcaacttttgtggatcactatcttgaagttcaatatgatctttccaaagtaatgtttttaactacggcgaactctctgcactccattccgtatccccttctcgaccgcatggaaataatcgaagttcccggttacggcgaaaacgaaaaattaagcatagcgaaacaatttttagttcccaaagagctgcgtgaaaacggattatcctcggcgaaaataacattcagagacgacacgataaaaaacattatccgtttttggacgatggaatcgggtgtgcgtaatcttgaacgcgagacggctaggtgtatcaggcgcatagcgagagacgccgtgaacaaaggttacggaaaggacaaagctgtatcggagttcaataaaattattacaccggctaacttggaaaaactgctcggaaagaaaaaatataaaagagacgttgtttacagagaagcgagggtcggcgtaacatacgggcttgcgtggacggaaactggcggaacaattctgcctgtcgaaacaatccgttactcaggaagcggagagcttcttataacgggaaatctcggcgatgtaatgaaagaaagcgcacgcatcgctctttcctacttgcgcagtacgagtaacaaatacaatttccttgccaaagatttgttaaaatcggattttcacattcacgttcccgaaggcgcaatcccaaggatggcccgtcagcgggcataa

SEQ ID NO: 46986 - protein, 545 aa, Unknown
  Obtained from environmental sample
  DOMAIN (208)...(344): ATPase family associated with various cellular activities (AAA)
  misc_feature (1)..(545): Xaa is any amino acid
MAVDRSENPERAANLICNSSHFKTEKKVELLAVPDIRERLEAVLETLERENEIFGIQKNISGKVKSRIDKHQREYYLHEQLKEINKELGKDKDSKEDEFSEIEKQIEAKAPPAEVVAKAAKELARLRKLQPLSPEAGVLRGYLEWISDLPWSETSADSGDLDAAQAILDEDHFNMRKAKDRILEFIAVRQLLACADGAEKNAIKGPILCFVGPPGTGKTSLGKSVARALGRRFVRISLGGLRDEAEIRGHRKTYVGALPGKIIQSMRKAGTMNPVILLDEIDKLSSDFRGDPASALLEVLDPEQNSTFVDHYLEVQYDLSKVMFLTTANSLHSIPYPLLDRMEIIEVPGYGENEKLSIAKQFLVPKELRENGLSSAKITFRDDTIKNIIRFWTMESGVRNLERETARCIRRIARDAVNKGYGKDKAVSEFNKIITPANLEKLLGKKKYKRDVVYREARVGVTYGLAWTETGGTILPVETIRYSGSGELLITGNLGDVMKESARIALSYLRSTSNKYNFLAKDLLKSDFHIHVPEGAIPRMARQRA

SEQ ID NO: 46987 - DNA, 867 bp, Unknown
  Obtained from environmental sample
  misc_feature (1)..(867): n is a, c, g, or t
gtgccgctcatgctccaccaaaacggctgggataaagtcgtttgccgggaactggcccttgacaccgccgaacctgatttaaacgaatggcagaagatggtccaaaaaatcggggagaggaaacaggaagtaaatatttcgatagtcgggaaatacgttcaactgcacgacgcgtatttgtccatcatagaaagtttgaaccacgccgggtttgaagccggcgtaggagtaaatattttatggattgacagcgccgaggtaaccgctgaaagcgccggcgggttgttgggcggatcagacggtatgatcattcccggcggtttcggcgacaggggaattgaaggaaagatcaacgcctgccgttacgcgagggaaaacaacataccgtacctgggtatctgccttggaatgcagattgccgtgattgaatacgcacgtaatgtctgcggtctggagcgcgcgaattcaagcgagtttgacgagacttcgccccatccggtaattgatctcatgcccggtcaaaccggcatgctgggctcaggcggcaccatgcgcctcggcgcctatccatgcaagatcacaaagagcacgctgttaagcaggctttacaatgcggatgaaataagcgaaaggcaccgccaccgctttgaatttaacaacgcttacctggagaccttgacaaataagggcattgttatctccggcgcttcgcctgacggcaagcttgttgaagcgatagaactgccgaatcatcgcttttttaccggcgttcaatttcatcctgaattcaagagccgccccaataaaccgcatccgcttttcctggggcttgtaaaggcagcgtttaatatgcggggagagcgctaa

SEQ ID NO: 46988 - protein, 288 aa, Unknown
  Obtained from environmental sample
  DOMAIN (46)...(262): Peptidase C26
  misc_feature (1)..(288): Xaa is any amino acid
MPLMLHQNGWDKVVCRELALDTAEPDLNEWQKMVQKIGERKQEVNISIVGKYVQLHDAYLSIIESLNHAGFEAGVGVNILWIDSAEVTAESAGGLLGGSDGMIIPGGFGDRGIEGKINACRYARENNIPYLGICLGMQIAVIEYARNVCGLERANSSEFDETSPHPVIDLMPGQTGMLGSGGTMRLGAYPCKITKSTLLSRLYNADEISERHRHRFEFNNAYLETLTNKGIVISGASPDGKLVEAIELPNHRFFTGVQFHPEFKSRPNKPHPLFLGLVKAAFNMRGER

SEQ ID NO: 46989 - DNA, 528 bp, Unknown
  Obtained from environmental sample
  misc_feature (1)..(528): n is a, c, g, or t
gtgcctccggtactgtgctcttataacgattcgattgtcgtcagttcttactcaaaaagcctttccctgcccggcgaaaggataggctatatcgcggtaagccccaaggcggcggacaaagatgatcttatgaacggccttatctactccacgcggatacttggctatgttaacgccccggccctcatgcaacgcattgtggcggagcttaccgacgcggcggttgacgtaaacatctacgcccgcaggcgcgacgcgttcacggcaatcctcgatgaagtgggaatagagtacgccgtaccggaaggggcgttttacctgttctgtaaagcgcctcccgcgaagaaagacccagccggacagggcgatgattcggcttttgtgaaccacttaaaacagcatttgattctgggcgttcccggatcaagtttcggcaagcccggctggctgcgtttcgcgtactgcgtggatgaaaaaaatatccgcgcctcagccggggcatttaaaagggcgatggagacttggtaa

SEQ ID NO: 46990 - protein, 175 aa, Unknown
  Obtained from environmental sample
  misc_feature (1)..(175): Xaa is any amino acid
MPPVLCSYNDSIVVSSYSKSLSLPGERIGYIAVSPKAADKDDLMNGLIYSTRILGYVNAPALMQRIVAELTDAAVDVNIYARRRDAFTAILDEVGIEYAVPEGAFYLFCKAPPAKKDPAGQGDDSAFVNHLKQHLILGVPGSSFGKPGWLRFAYCVDEKNIRASAGAFKRAMETW

SEQ ID NO: 46991 - DNA, 693 bp, Unknown
  Obtained from environmental sample
  misc_feature (1)..(693): n is a, c, g, or t
ttggcgccaaagaacagcaaacgcagcacgaattgcctttctcgaatgaaagtttataatcttcccgtcaaatgcgccgcgattctttttgacatagattccacactttacacaaatccggaatacgcccgctctcaaatcgatctccctattgagaaacttgcccgtatgaggggaattacatttaaccaaatgaacgatgaaatgaaccaatacagggataactgggttaaaacgcataacgggcaggggatcagccatgggaatactttcaaagcctttggcgtcagtatcagcgaaagcgtgaaatggcgggaagaactctgccggcccgagcagtacctcttaaaagatatgcggcttcgttcggccctggaacagctcggctcctgttttgccctgggtgtggttaccaacaacccggtttccattgcccaaagaacccttcgcgtgctgggagtggaggatctgttccgcgcccttatcgggcttgacacctgcggcgtctccaaaccccacaaggagcccttcacgcgagccgcgactctctgcggcgcggcgactgagacctgcgtcgccgtaggggatcgttatgatattgacatcgcccttcccctggaactcggcatgggcggcatccttgttgacggcgtagaggatgtatacaaactgcccgaattacttgtaaaatag

SEQ ID NO: 46992 - protein, 230 aa, Unknown
  Obtained from environmental sample
  DOMAIN (25)...(218): haloacid dehalogenase-like hydrolase
  misc_feature (1)..(230): Xaa is any amino acid
MAPKNSKRSTNCLSRMKVYNLPVKCAAILFDIDSTLYTNPEYARSQIDLPIEKLARMRGITFNQMNDEMNQYRDNWVKTHNGQGISHGNTFKAFGVSISESVKWREELCRPEQYLLKDMRLRSALEQLGSCFALGVVTNNPVSIAQRTLRVLGVEDLFRALIGLDTCGVSKPHKEPFTRAATLCGAATETCVAVGDRYDIDIALPLELGMGGILVDGVEDVYKLPELLVK

SEQ ID NO: 46993 - DNA, 474 bp, Unknown
  Obtained from environmental sample
  misc_feature (1)..(474): n is a, c, g, or t
ttgaatcttagcgccgatttggtcgatgcccataccggcggcaaaaaaaccgttgcgggaaataccatcgtcttttcagggaaactgaccactgtttcctacgcggcccggcttgtcgtgctgaatgaagggggaacggttaccgttgataacggaaaacttaaagttgaaagagccgatgcagtaacatttttgcttgcggccgctaccaactacgacattaacaactccggttacaccggccgtacggcggaagccttacataagtccctggagaacacaaccgcgagagccgcgaaaagaacctacgaaagtttaagaaacgcccatcttaatgattaccggcctctgttcgaccgcgtaaagcttgacttaaaaacacctgagcccgcgatcaccaccaaagaactgggtcaaaacagaagagcagcaactaccttgatatgctgtattttcagttcgggcgttatttaa

SEQ ID NO: 46994 - protein, 157 aa, Unknown
  Obtained from environmental sample
  misc_feature (1)..(157): Xaa is any amino acid
MNLSADLVDAHTGGKKTVAGNTIVFSGKLTTVSYAARLVVLNEGGTVTVDNGKLKVERADAVTFLLAAATNYDINNSGYTGRTAEALHKSLENTTARAAKRTYESLRNAHLNDYRPLFDRVKLDLKTPEPAITTKELGQNRRAATTLICCIFSSGVI

SEQ ID NO: 46995 - DNA, 819 bp, Unknown
  Obtained from environmental sample
  misc_feature (1)..(819): n is a, c, g, or t
atgcgcacctacggcataaaatcaatattaatactgcccatttttacgcgcgggaaattctggggcgttatcaattttgaggatcacaccaacgacaggtattttgacgaagactgcgccgatttactttactccgcggcgcgtatattctcgaactcaattatcagagaggaaatgaaaaaccacgcaaaaatggaagcggcgttgaacaaagccgccgtcatgtttctctcgcaaaatgaagatacatttgaaacaaccttgacaaaggctgttaaagaaataaccggcgctttcaatttggacagattttccatttggcgcaatgttcccaagccggacggcctgcatggaagggaaatataccgctgggacatggaatccggcagtacaatgataccgagaaaaggactggaagatgtcgccttccgcgagtcggcgccgcgatgggaaaatcttctagcgtcagacaaaacaattaacagccctgcaagacttttgccggaagaggcctttcttaaacaattcggctgtgtatcgattcttatcacgcccgtttttatcaacagtattttttggggctttgccttttttgaagaccgccgcaatgaacgcttttttgaagataacgagattaacttgctgcgctcggtcgcgtttctgtgcgcaaacagcattgtacgcgccgatatggaacatgaaatagccgatgtcaataaatataacagcgacatccttacctcaatgccgcttggttttaccatttttgacgaaaacgccaatgttatcggctgtaacaacactcttgcgcattattaa

SEQ ID NO: 46996 - protein, 272 aa, Unknown
  Obtained from environmental sample
  DOMAIN (83)...(226): GAF domain
  misc_feature (1)..(272): Xaa is any amino acid
MRTYGIKSILILPIFTRGKFWGVINFEDHTNDRYFDEDCADLLYSAARIFSNSIIREEMKNHAKMEAALNKAAVMFLSQNEDTFETTLTKAVKEITGAFNLDRFSIWRNVPKPDGLHGREIYRWDMESGSTMIPRKGLEDVAFRESAPRWENLLASDKTINSPARLLPEEAFLKQFGCVSILITPVFINSIFWGFAFFEDRRNERFFEDNEINLLRSVAFLCANSIVRADMEHEIADVNKYNSDILTSMPLGFTIFDENANVIGCNNTLAHY

SEQ ID NO: 46997 - DNA, 726 bp, Unknown
  Obtained from environmental sample
  misc_feature (1)..(726): n is a, c, g, or t
atgaaacataacaaatcaacctcatttgcgaccgcggtaatcgtttcaattttatttacggcctgcgccggacagaacaagaagataatattccgcccggataccacgaatactccccaggtacagtccggaatttttgacacatgggaaataatcagttcgcagagcggcggcaaagatcctgataatattcccgaatgggtgcgtcggcatattgataatcaggcggatgagattgaggcattggacgaatttagcggaaagtatttatttatcggggaaaacggagggagcaatttcaacgccctgcagcagtgggcaaacggttttaccgtggaacaggacctgcccaggctgattacccgaagggtggaacacaggcttgtctcttcggcctccctgtaccccgatgacgagtacggcgaattttttgagttttttataagagaagtgtctaacggggattttttgggggctgtcaaagagcagactttctggctcaaacgaaaaatcgtcagcgacgcggaagatgatgataccgccctgccgaatccggacgccgaacaggaacgttatgagttttttgtattgatcagcgttgacagggaaatactgcaaaaacagattcaggaaattatggtgaaaataaaaacaaagatacccgcgacaaagaaccaggccgcggcaatagccaaaataaaaaataatttttttgaaggattctaa

SEQ ID NO: 46998 - protein, 241 aa, Unknown
  Obtained from environmental sample
  SIGNAL (1)...(23)
  misc_feature (1)..(241): Xaa is any amino acid
MKHNKSTSFATAVIVSILFTACAGQNKKIIFRPDTTNTPQVQSGIFDTWEIISSQSGGKDPDNIPEWVRRHIDNQADEIEALDEFSGKYLFIGENGGSNFNALQQWANGFTVEQDLPRLITRRVEHRLVSSASLYPDDEYGEFFEFFIREVSNGDFLGAVKEQTFWLKRKIVSDAEDDDTALPNPDAEQERYEFFVLISVDREILQKQIQEIMVKIKTKIPATKNQAAAIAKIKNNFFEGF

SEQ ID NO: 46999 - DNA, 804 bp, Unknown
  Obtained from environmental sample
  misc_feature (1)..(804): n is a, c, g, or t
ttggctgcttctcgttcacattatttatttaattggatggagcttatcccttttttgtggttgctgacgcttgtctttattctcaacaattatgccaaccaatataacaactttagttttaatgttgccaaccttgccgcttatgtttatacggctgttaaattgcccgtacttatccttgatgatgaaggcaatattatgctctgcaatacagcttcggaaagtttttttaagaaaaatattgaacggcttaacaggctaaaattgtttgacttatttcattttgggaacatgccactatcattgcagcgtcaaaaaaaagacgcgtctgttttcaactgcgatgctgtttgtgatgttgagggacagaaatgccaaatttcgctaaattatgtttacgataaatttgacgaaatgatctgtactgttgtgattgttaccgacatcactgaaaaagaaaaattaatccgccagcttaacgaatctaatgcgaaaattgagcgttttaacaaagaactacagtcagaggttgacaggcaaactgaaagcatccgcaatcttcaaaaggcgattgtatattcgatgagcgatttgatagaaaaaaaagacggttacactggcgtacacaccaggcgtgtaagcgaatatgttgctattttgttgcgtgaattggcgcggcgcggctatcaatttaccgaatcggaaattcaaagaatagcggaatcttcccttctgcatgacatggggaaaattgcaatacctgacagcatacttctaaaaaacggaaagattgaccgatggtga

SEQ ID NO: 47000 - protein, 267 aa, Unknown
  Obtained from environmental sample
  misc_feature (1)..(267): Xaa is any amino acid
MAASRSHYLFNWMELIPFLWLLTLVFILNNYANQYNNFSFNVANLAAYVYTAVKLPVLILDDEGNIMLCNTASESFFKKNIERLNRLKLFDLFHFGNMPLSLQRQKKDASVFNCDAVCDVEGQKCQISLNYVYDKFDEMICTVVIVTDITEKEKLIRQLNESNAKIERFNKELQSEVDRQTESIRNLQKAIVYSMSDLIEKKDGYTGVHTRRVSEYVAILLRELARRGYQFTESEIQRIAESSLLHDMGKIAIPDSILLKNGKIDRW

SEQ ID NO: 47001 - DNA, 468 bp, Unknown
  Obtained from environmental sample
  misc_feature (1)..(468): n is a, c, g, or t
atgtttttatttgacaaagtttctccttggatatataccgactatgatagagctaagagaaaatcaaagttatatgtttctgattcggggcttatgagttctattttagattgggatgaacgggaagtagccctagatcctgaccgctctggaaaattaattgaaacttttgtatataaagaactcgctacgctaatggactttggcaaaaactattcgctttatcaatacagggatagagaaaaacgagaaatagattttattgttgagcgaagtgacaaaaaacttttgggcattgaggtaaaagcagggtacaatgtttcaaaagatgattttaaacatttggaatggtttagaaacaaccttgtaaaaaagcaatttaagggaattgtactctactcaggggaacacattataccttttggcaaagatatgcttgctgtgcctactgcggcactatggatgtga

SEQ ID NO: 47002 - protein, 155 aa, Unknown
  Obtained from environmental sample
  misc_feature (1)..(155): Xaa is any amino acid
MFLFDKVSPWIYTDYDRAKRKSKLYVSDSGLMSSILDWDEREVALDPDRSGKLIETFVYKELATLMDFGKNYSLYQYRDREKREIDFIVERSDKKLLGIEVKAGYNVSKDDFKHLEWFRNNLVKKQFKGIVLYSGEHIIPFGKDMLAVPTAALWM

SEQ ID NO: 47003 - DNA, 570 bp, Unknown
  Obtained from environmental sample
  misc_feature (1)..(570): n is a, c, g, or t
atgctttttctacctggttcaattgcggtttctgatttccggctttcgcaatttccggttaaaggcataagcgcggaatatttgcacatagcagaaaccgaaagggatttaacagcagaagaattaaaaaaactggaaatacttttagaatacggcgaggtaggggcgcgattaatcgcgcccttacccgcgccccccgccgccacccaactcatcgtcgcgccacgtgctggcacaataagcccgtggagttcaaaagcaaccgatatactccacatctgcgggctgcacgctgttattcgcatagagagggcagtggtttggaattttgcccaagacctgccgccaaaagagatgctctttgacagaatgactcagcaaattttccagtcaaaagaggaactcgccgctctgttcacgcacaaagaaccaaagcctttaaccagaattaccgatttgggaaaagccaattcagaactggggcttgccctctccgcagaagagataaattattttaaggaaaaatttgccgaagctggggcgcgagcccaagcgatgttgaacttatga

SEQ ID NO: 47004 - protein, 189 aa, Unknown
  Obtained from environmental sample
  misc_feature (1)..(189): Xaa is any amino acid
MLFLPGSIAVSDFRLSQFPVKGISAEYLHIAETERDLTAEELKKLEILLEYGEVGARLIAPLPAPPAATQLIVAPRAGTISPWSSKATDILHICGLHAVIRIERAVVWNFAQDLPPKEMLFDRMTQQIFQSKEELAALFTHKEPKPLTRITDLGKANSELGLALSAEEINYFKEKFAEAGARAQAMLNL

SEQ ID NO: 47005 - DNA, 951 bp, Unknown
  Obtained from environmental sample
  misc_feature (1)..(951): n is a, c, g, or t
ttggctcaatatgccaaagaaaaaggcatttcccacaaatattatcagcctgcagaacagagcgacgacgcctaccttacggcgattggtctggctgtccaaggcggcgcaaaagtagttgttactccgggcttcctttttgaaacaccggtttttgtcgcgcaggatcgctatcccaatgtaaatttcattctggtagacggcgttccgcacagcgcggattattccgaatttaaaacaggcaagaacactgtcggtgtaaattacgccgaagatcaggcgggtttccttgccggatacgcggctgttaaagacggcagcagaaaactcggctttgtaggcggaatggcggttccggcagttgtccgtttcggttacggttttgttcagggtgcggaatacgcggctaaggaattgggactggcttccggttcaattacaattaactaccattacacaggcgcttttgccgccacacccgaagcccaaactcttgcggcttcatggttcaacagcggagtagacgtaatctttgcctgcggcggcgcggtcggcaactctgtaatggcggcggctgaacaagccggcaaaaaagtaatcggtgttgacgtagatcagtcgggcgaatccccaaccgttattacttccgcaatgaagggacttcaagtttccgtttatgattgtattgccgattattacaacggaaaattccccggaggacttactttggtttttgccgccgataacaaaggcgtcgggcttccaatgcagtcttccaagttcaagaatttcagtcaggctgattacgacagtatttttcataagttggcgacaggttctattccaagaatggataatctcgacagcaaacggaagtccaagcgtagttccggttaccatatcaggagttacagaggtaaggtaaattacggcaatggactacatttgtga

SEQ ID NO: 47006 - protein, 316 aa, Unknown
  Obtained from environmental sample
  DOMAIN (2)...(285): Basic membrane protein
  misc_feature (1)..(316): Xaa is any amino acid
MAQYAKEKGISHKYYQPAEQSDDAYLTAIGLAVQGGAKVVVTPGFLFETPVFVAQDRYPNVNFILVDGVPHSADYSEFKTGKNTVGVNYAEDQAGFLAGYAAVKDGSRKLGFVGGMAVPAVVRFGYGFVQGAEYAAKELGLASGSITINYHYTGAFAATPEAQTLAASWFNSGVDVIFACGGAVGNSVMAAAEQAGKKVIGVDVDQSGESPTVITSAMKGLQVSVYDCIADYYNGKFPGGLTLVFAADNKGVGLPMQSSKFKNFSQADYDSIFHKLATGSIPRMDNLDSKRKSKRSSGYHIRSYRGKVNYGNGLHL

SEQ ID NO: 47007 - DNA, 828 bp, Unknown
  Obtained from environmental sample
  misc_feature (1)..(828): n is a, c, g, or t
gtggtggatggctgccctgcgggcttagaaattagcgaagaatatatacagcaatttttaaaccgccgcaagcctgggcaaagtgcaattaccacgcagcgtaaagagagcgatgtagttaaaattttgagcggagtttttgaaggcaaaacaacgggaacgcctatatcaatgatagtggaaaacgcagaccaacacagtgcggattatgagcaaataaaagactggtggcgcccagggcacgcagacgaagtttatgattccaaatatggattcagagattaccgaggtggcgggcgcagttcggctagggaaactatagcacgggttgctggtggttcaatagctcgcaaatttttgaaggaaaaatgcggaaccgaattcacagctactataaacatagacaataactcaatagaaaatgcaaaaaaaaatggagatagcattggcggtattgttagcttaaccatcaaaaatccaccgaaaaatttgggcgagccagtttttgaccgcacagaggcactgcttgcaatggcgatgttaagcattcccgcaacgcggggatttgaaattggcaaaggttttgaagcggcaaatatgctcggcagtgagcacaataaatttgcagatggcacttatggtggcataactagcggagaagatattttgtgcaggatagcgttcaagccaaccccatccatttctaaaatgcaaatggcaaaaaataaaaacgggtcatttggcgaaatcagcataaaaggcaggcacgacccctgtgttgcggtacgtgctccggtgattgtggaaagtatggcggcactgttttaa

SEQ ID NO: 47008 - protein, 275 aa, Unknown
  Obtained from environmental sample
  DOMAIN (2)...(275): Chorismate synthase
  misc_feature (1)..(275): Xaa is any amino acid
MVDGCPAGLEISEEYIQQFLNRRKPGQSAITTQRKESDVVKILSGVFEGKTTGTPISMIVENADQHSADYEQIKDWWRPGHADEVYDSKYGFRDYRGGGRSSARETIARVAGGSIARKFLKEKCGTEFTATINIDNNSIENAKKNGDSIGGIVSLTIKNPPKNLGEPVFDRTEALLAMAMLSIPATRGFEIGKGFEAANMLGSEHNKFADGTYGGITSGEDILCRIAFKPTPSISKMQMAKNKNGSFGEISIKGRHDPCVAVRAPVIVESMAALF

SEQ ID NO: 47009 - DNA, 354 bp, Unknown
  Obtained from environmental sample
  misc_feature (1)..(354): n is a, c, g, or t
gtgccatctgcaaatttattgtgctcactgccgagcatatttgccgcttcaaaacctttgccaatttcaaatccccgcgttgcgggaatgcttaacatcgccattgcaagcagtgcctctgtgcggtcaaaaactggctcgcccaaatttttcggtggatttttgatggttaagctaacaataccgccaatgctatctccatttttttttgcattttctattgagttattgtctatgtttatagtagctgtgaattcggttccgcatttttccttcaaaaatttgcgagctattgaaccaccagcaacccgtgctatagtttccctagccgaactgcgcccgccacctcggtaa

SEQ ID NO: 47010 - protein, 117 aa, Unknown
  Obtained from environmental sample
  SIGNAL (1)...(17)
  misc_feature (1)..(117): Xaa is any amino acid
MPSANLLCSLPSIFAASKPLPISNPRVAGMLNIAIASSASVRSKTGSPKFFGGFLMVKLTIPPMLSPFFFAFSIELLSMFIVAVNSVPHFSFKNLRAIEPPATRAIVSLAELRPPPR

SEQ ID NO: 47011 - DNA, 1122 bp, Unknown
  Obtained from environmental sample
  misc_feature (1)..(1122): n is a, c, g, or t
atggaaacttttatttcatgtatcatctgtattgccgacatgaatatagtccccctcgtggatcaggtgcttaccgatcttgagctttccgaagtttttgtacaacgcgccaaacaaacgtttcttcaggacaaacgcgagcttctgggccttcgttccgttactaaacttgatgaaagcagggcgttaatttacagagtgtacgttccggcgatgtatgaagaaagtgttatgcgccgtattatcgaagcgactgatcttggaatgggcggacgcggcagtattttttcccaacatatcgacattttaagggggacgcctttttcttttgacatggaaaaactcagtaaactctgtaaaaaaaccgatgaactttcccatgaggaacacgcccttatcacttgtacggtttcaagaggctcgggcgacgcgttggctcaggcaatattagagcttggtatcggcgtacctgttgtttttttcggtacgggcgcggggttgagggacagattagggcttatgaggataaccattccggtagaaaaagaaatcatctggtttcttgtttcccgttccgatgcggacttggtggaaaaaagcataattccgcgagcccgtcttgacattcccggcaacggctttttataccggtgctttgttcacgcgcccgtagtaaatttaaggattaggcacagggagcgtcttcatgccgcgactatggaacaggtcattgccgctttggacgaggttcgcggttcaaacgattggcgccgttttggagcgcgtaaacatgaacacaagggcggcgaaagaaaatccgtcagcacaaaaggacttttttttatcggtaatgaagaagaaattgaattattccgtaaagaggcgatagaaaacggcgcgcgcggcgcgacctttaatcccgttgagatgcgctcatacagggcatttactcaagaaaaaatgaaatcaaactcccgccacctctgcgatattatcgccactccgganattgaagaaagaatccgcgcttccgccattgcaaacggtctttttagtgaaggtaaaacctgcgtacttaaaactttcaatgtggaaatgcctactattatccatagaaaatag

SEQ ID NO: 47012 - protein, 373 aa, Unknown
  Obtained from environmental sample
  misc_feature (1)..(373): Xaa is any amino acid
METFISCIICIADMNIVPLVDQVLTDLELSEVFVQRAKQTFLQDKRELLGLRSVTKLDESRALIYRVYVPAMYEESVMRRIIEATDLGMGGRGSIFSQHIDILRGTPFSFDMEKLSKLCKKTDELSHEEHALITCTVSRGSGDALAQAILELGIGVPVVFFGTGAGLRDRLGLMRITIPVEKEIIWFLVSRSDADLVEKSIIPRARLDIPGNGFLYRCFVHAPVVNLRIRHRERLHAATMEQVIAALDEVRGSNDWRRFGARKHEHKGGERKSVSTKGLFFIGNEEEIELFRKEAIENGARGATFNPVEMRSYRAFTQEKMKSNSRHLCDIIATPXIEERIRASAIANGLFSEGKTCVLKTFNVEMPTIIHRK

SEQ ID NO: 47013 - DNA, 408 bp, Unknown
  Obtained from environmental sample
  misc_feature (1)..(408): n is a, c, g, or t
atgaccaccggcacatttaggcgttcaaaattgataaagattgcggctatgggcgtcggcggcggtatggtgattggttttgcgcgtgtactgttcagcaatatgttgccatccggaggcatacatctttcatggattttggccccatgttatgcgattgccctgatactgacaatatttgcccctgaagatttttcttcgatagcgtgggatgtcgccggcattgcgacaggccccatttccgttccaatcattataactgcggggcttggactcggacgtgattcgcttcgcgcggatggcgctttcggtattgtggcgacggcgagcgtttttccgattatcgtaatccttatatcgggtattattgataaagcaagatcgaaacgtatgctaaaaaatatgtag

SEQ ID NO: 47014 - protein, 135 aa, Unknown
  Obtained from environmental sample
  DOMAIN (1)...(125): Protein of unknown function (DUF1538)
  misc_feature (1)..(135): Xaa is any amino acid
MTTGTFRRSKLIKIAAMGVGGGMVIGFARVLFSNMLPSGGIHLSWILAPCYAIALILTIFAPEDFSSIAWDVAGIATGPISVPIIITAGLGLGRDSLRADGAFGIVATASVFPIIVILISGIIDKARSKRMLKNM

SEQ ID NO: 47015 - DNA, 1062 bp, Unknown
  Obtained from environmental sample
  misc_feature (1)..(1062): n is a, c, g, or t
atggtagcgcacgattacacctaccccctcggacacctgatgaccggcgttttctggcacagagtggaaaaaggcggacttcattttaccatttccgacacaggctggcttaaatcgctgtggggcaaaatgtacggacaatggctcggggaatgcgccatcctgacttatgactttgaaaaattcaacgcgcgcgatattttaaaagttcttgaaaaatataaagtaacaagtttctgcgctccgcccaccatgtaccgctttataatgaacgaggacgtgccttcttatgatctttccagccttaaacactgcaccgccgccggcgaggctctgagtcaggaccttttcaaaaaatgggaaaccatgacagggcttaacatatacgaaggtttcggacagacggaaacgacgatctgctgcgggacgctgtacccgtttaccgaaccgcacgccagttcaatgggtatgggaatccccggttacaacgtgacgcttcttgacgccgatggcaacaaggtacccacgggcgcgacaggtgaaatttgcatgaaggccgaacgctcaaagccgggcgtcccccgccgccctgtcggcctgtttatgggttatcacaaaaacgacgaagcgacggataaatcgtggcatgacgggtatttccataccggcgaccttgcctattacgatgagcagggctatttgtggtacgtgggacgtaacgatgatgtaattaaatcgtcaggctaccgcatcggaccgtttgaagtggaaagcgtactgttaaaacatcccgccgtagccgaaaccgctgtaaccggcatacccgacccgatacgcggctttaacgtaaaggcgacagtcgtgcttgccaaaaactaccaagtctctgacgagcttaaaaaggaattgcaggactttgttaaaaagaacaccgcgccgtataagtatccaagagtgattgagtttgtcagtgaactgccaaaaaccattaacggaaaaattcgccgcgcggaaatacgcaacagggatatgggtaaacctgcgacagagaccgatatttag

SEQ ID NO: 47016 - protein, 353 aa, Unknown
  Obtained from environmental sample
  DOMAIN (1)...(271): AMP-binding enzyme
  misc_feature (1)..(353): Xaa is any amino acid
MVAHDYTYPLGHLMTGVFWHRVEKGGLHFTISDTGWLKSLWGKMYGQWLGECAILTYDFEKFNARDILKVLEKYKVTSFCAPPTMYRFIMNEDVPSYDLSSLKHCTAAGEALSQDLFKKWETMTGLNIYEGFGQTETTICCGTLYPFTEPHASSMGMGIPGYNVTLLDADGNKVPTGATGEICMKAERSKPGVPRRPVGLFMGYHKNDEATDKSWHDGYFHTGDLAYYDEQGYLWYVGRNDDVIKSSGYRIGPFEVESVLLKHPAVAETAVTGIPDPIRGFNVKATVVLAKNYQVSDELKKELQDFVKKNTAPYKYPRVIEFVSELPKTINGKIRRAEIRNRDMGKPATETDI

SEQ ID NO: 47017 - DNA, 849 bp, Unknown
  Obtained from environmental sample
  misc_feature (1)..(849): n is a, c, g, or t
ttgattgatggccgaaaggccacaggcagaagacgccgcgaagacctccacgcgcaggttccgttggtagaagagctccttacagccatgaatatcccgtgctttaaggttgacggttttgaagcggacgacatcatcgcgaccctggctttaaaatgccgggctgagggacgacattgctatatcctttcttcagacaaggatctgcttcagcttgtgggaggcggaacctgggagctaaggccaatcaagggaacctcgccgtctgaaggcggcctgccctatgagctggtcggcccaggcgaagtcaaaggcgaatggggagtaagccccgataaagtgctggatcttctttcacttaccggggatagctccgataacgttcctggcgtaaagggcgtgggggaaaagactgcggtaaaactcatgtcccgctacggttccctcgacgagatttacaaaaacatcgccgggatagaaggggcaatcgggaaaaagatagccgacggaaaagagagtgcctacttttcacgctcgcttataaaactggacagtgccgttccccttgcgataaaagaaatcgacgagctttcaatcgaaaaaattgaccgcgcagccggagcgcgtgttctgcttcgtgaaggaatacgccaaagcgcgaagcagcttgacccagggataggcgcgaaagaaaagaaaaacaccgaaggcaaagcagatgacacagaaacgctaaaaacccctgccgaagaagaaccggcgagaatattgaccctgccctgnctggagaaggtgttacaaaaccatctggacattaaagatttacaggcccttttgggaaaaagctaa

SEQ ID NO: 47018 - protein, 282 aa, Unknown
  Obtained from environmental sample
  DOMAIN (2)...(107): 5'-3' exonuclease, N-terminal resolvase-like domain
  misc_feature (1)..(282): Xaa is any amino acid
MIDGRKATGRRRREDLHAQVPLVEELLTAMNIPCFKVDGFEADDIIATLALKCRAEGRHCYILSSDKDLLQLVGGGTWELRPIKGTSPSEGGLPYELVGPGEVKGEWGVSPDKVLDLLSLTGDSSDNVPGVKGVGEKTAVKLMSRYGSLDEIYKNIAGIEGAIGKKIADGKESAYFSRSLIKLDSAVPLAIKEIDELSIEKIDRAAGARVLLREGIRQSAKQLDPGIGAKEKKNTEGKADDTETLKTPAEEEPARILTLPXLEKVLQNHLDIKDLQALLGKS

SEQ ID NO: 47019 - DNA, 495 bp, Unknown
  Obtained from environmental sample
  misc_feature (1)..(495): n is a, c, g, or t
ttgaaattggaggggaaaatgaaacaaaagcactcatgggaaattacagacgagttctgggcgatagccgaacccttgattcccaaaaaaactagagaccctgataaagcgtatcaaagaaagccgggcggaggccgccgccctatggaacctagaaaggcacttgaggccattttctttgtgttacgtaccggtatccagtggaacgccttgcccaaatcctttggctcttcaagtgccgtccaccggcatttcatgtgttggtcccagttaggtttctttaaggccctgtgggcgtgcggactacggaagtatgacgaagtcaaaggtatagactggacatggttaagcggagatgggtgtatgaccaaggcaccattagcacaagaaacagtcggggccaatccaaccgaccggggaaaaaaaagggagcaagcgccatatgctcgtagatggcaagggagttccccttgggatggtaataaccggcgctaa

SEQ ID NO: 47020 - protein, 164 aa, Unknown
  Obtained from environmental sample
  misc_feature (1)..(164): Xaa is any amino acid
MKLEGKMKQKHSWEITDEFWAIAEPLIPKKTRDPDKAYQRKPGGGRRPMEPRKALEAIFFVLRTGIQWNALPKSFGSSSAVHRHFMCWSQLGFFKALWACGLRKYDEVKGIDWTWLSGDGCMTKAPLAQETVGANPTDRGKKREQAPYARRWQGSSPWDGNNRR

SEQ ID NO: 47021 - DNA, 309 bp, Unknown
  Obtained from environmental sample
  misc_feature (1)..(309): n is a, c, g, or t
atgctcgtagatggcaagggagttccccttgggatggtaataaccggcgctaaccggcatgacgtctctcaacttgaagcgctactggactctgtcattatagaaaggcctgacccatttgaggatcctcaaaatctctgtcttgataaaggctatgccggtgagccagctttggaacaggtggtattacggggatttattcctcacatcaaaagccggggagaggagcaaagtacaagcgtgcaggatcccacttacaaagcccgtcgatgggtagtggaagtgaccccattcgggagaaccggttag

SEQ ID NO: 47022 - protein, 102 aa, Unknown
  Obtained from environmental sample
  misc_feature (1)..(102): Xaa is any amino acid
MLVDGKGVPLGMVITGANRHDVSQLEALLDSVIIERPDPFEDPQNLCLDKGYAGEPALEQVVLRGFIPHIKSRGEEQSTSVQDPTYKARRWVVEVTPFGRTG

SEQ ID NO: 47023 - DNA, 369 bp, Unknown
  Obtained from environmental sample
  misc_feature (1)..(369): n is a, c, g, or t
ttgtcgttggctatgttgttgtacatcgccttctctttattggcgtcgagcaccacgctgctgttgttattaacgcgtagcgtccccttgatctcatcacgcacacccgttgcgctgccttcgagcaacttcttagtattgaactccgtggtatttccgattctgtcaatctcggccttcagctgtttcacttcagcttgcagttccgcccggtccgcgtcggtgttcgtgtcgtttgcggactgcacagacagttcgcgcatcctctgcaaaatgtcttgcgtctccgccagggcgccttccgccgtctggatcatggagatggtgtcttgggcgtttctggaggccatactcaagccgcggacctga

SEQ ID NO: 47024 - protein, 122 aa, Unknown
  Obtained from environmental sample
  SIGNAL (1)...(15)
  misc_feature (1)..(122): Xaa is any amino acid
MSLAMLLYIAFSLLASSTTLLLLLTRSVPLISSRTPVALPSSNFLVLNSVVFPILSISAFSCFTSACSSARSASVFVSFADCTDSSRILCKMSCVSARAPSAVWIMEMVSWAFLEAILKPRT

SEQ ID NO: 47025 - DNA, 1599 bp, Unknown
  Obtained from environmental sample
  misc_feature (1)..(1599): n is a, c, g, or t
atggtaatggcgatagccaatattcccataggggtgtctcctacaacatggtcggtaatggtcggttcaaccgaggcttacatcctgaaagatgtcaacgcgatgagaaactttgtcattatcctggccttaatagcccttgtcgcggcggtggcgcttatataccttgttctgagcagaactaccaggccaatcgtcaagttagcggacacgctgaaagacatttccgaaggcgaaggcgacttaacgcggactattaccgtcaattccaaagacgagataggcgaccttgccatgtacttcaacaaaacgctggataaaatcaagaatatgatcatccatatcaaggatgaggcggatggtttgtcagtgataggcaatgatcttgccagcaacatgaccgaaaccgccgcggcgatcaaccagattaccgccaacatccaaagcatcaaggggcgcgttataaaccagagcgccagcgttaccgagaccaacgccaccatggaacaggttatttccaatatcaacaaactcaacgaccatgtagaagaccagagtactaatatttcaagggcttcgtccgccatagaggaaatggtagcgaatgtcggttcggtaacccaaactttggtaaagaatgttgataatgtaaactcgttaaaagaagcctccgaagtgggccgcagcggattacagggggtcgtggcggatattaagggaatagccattgaatccgaagacctgttgaaaattaactctttgatgaatagcattgcgagccagaccaacctgctttcgatgaacgctgcaatcgaggcggcgcacgcaggagaggctggtaggggctttgccgttgtcgcagatgaaatccgcaagctcgccgagacatccggcaagcagtcaaagaccaccgcagcgatgctgaaaaaaataaaagcgtccatagacaacattaccaaatcatctaacgaagtgcttgagcgctttggggctatagactcaagcgtaaaaacggtttccgagcacgagcagaacattttacgtgcgatggaagagcaggaaacaggcggaaagcagatacttgattccattgggcgcttaagggacataactgcctcggttaagaaaggttctgatgaaatggaggaatcaggcaagaccctggttaaggaaaccggcgattttatcaagaccagccaggaagcggcaggaggtatgagcgagatactgaaaggcgttaaccagataaaagtttcggtaaaccatgtaaacgatatgagcatggaaaataaccgaaactttgagtcgctaaagcatgaaactgataaatttaagcatactgtcggggacgaaaagcacaaaatccttgttgtggatgacgatagcatcgtcaccacgctggtggaatccatgctatcaaacgattacgatataattactgcgcaatcgggcaaggaagcgctgggtctgttttaccagggcctagtccctcaactgatactattggacttaataatgccggaaatggacggatggagtacttacagcagaataaaagcgatagggggttgcacgatatcccgatctcggccgatctga

SEQ ID NO: 47026 - protein, 532 aa, Unknown
  Obtained from environmental sample
  DOMAIN (453)...(530): Response regulator receiver domain
  misc_feature (1)..(532): Xaa is any amino acid
MVMAIANIPIGVSPTTWSVMVGSTEAYILKDVNAMRNFVIILALIALVAAVALIYLVLSRTTRPIVKLADTLKDISEGEGDLTRTITVNSKDEIGDLAMYFNKTLDKIKNMIIHIKDEADGLSVIGNDLASNMTETAAAINQITANIQSIKGRVINQSASVTETNATMEQVISNINKLNDHVEDQSTNISRASSAIEEMVANVGSVTQTLVKNVDNVNSLKEASEVGRSGLQGVVADIKGIAIESEDLLKINSLMNSIASQTNLLSMNAAIEAAHAGEAGRGFAVVADEIRKLAETSGKQSKTTAAMLKKIKASIDNITKSSNEVLERFGAIDSSVKTVSEHEQNILRAMEEQETGGKQILDSIGRLRDITASVKKGSDEMEESGKTLVKETGDFIKTSQEAAGGMSEILKGVNQIKVSVNHVNDMSMENNRNFESLKHETDKFKHTVGDEKHKILVVDDDSIVTTLVESMLSNDYDIITAQSGKEALGLFYQGLVPQLILLDLIMPEMDGWSTYSRIKAIGGCTISRSRPI

SEQ ID NO: 47027 - DNA, 1335 bp, Unknown
  Obtained from environmental sample
  misc_feature (1)..(1335): n is a, c, g, or t
atggattccaccagcgtggtgacgatgctatcgtcatccacaacaaggattttgtgcttttcgtccccgacagtatgcttaaatttatcagtttcatgctttagcgactcaaagtttcggttattttccatgctcatatcgtttacatggtttaccgaaacttttatctggttaacgcctttcagtatctcgctcatacctcctgccgcttcctggctggtcttgataaaatcgccggtttccttaaccagggtcttgcctgattcctccatttcatcagaacctttcttaaccgaggcagttatgtcccttaagcgcccaatggaatcaagtatctgctttccgcctgtttcctgctcttccatcgcacgtaaaatgttctgctcgtgctcggaaaccgtttttacgcttgagtctatagccccaaagcgctcaagcacttcgttagatgatttggtaatgttgtctatggacgcttttatttttttcagcatcgctgcggtggtctttgactgcttgccggatgtctcggcgagcttgcggatttcatctgcgacaacggcaaagcccctaccagcctctcctgcgtgcgccgcctcgattgcagcgttcatcgaaagcaggttggtctggctcgcaatgctattcatcaaagagttaattttcaacaggtcttcggattcaatggctattcccttaatatccgccacgaccccctgtaatccgctgcggcccacttcggaggcttcttttaacgagtttacattatcaacattctttaccaaagtttgggttaccgaaccgacattcgctaccatttcctctatggcggacgaagcccttgaaatattagtactctggtcttctacatggtcgttgagtttgttgatattggaaataacctgttccatggtggcgttggtctcggtaacgctggcgctctggtttataacgcgccccttgatgctttggatgttggcggtaatctggttgatcgccgcggcggtttcggtcatgttgctggcaagatcattgcctatcactgacaaaccatccgcctcatccttgatatggatgatcatattcttgattttatccagcgttttgttgaagtacatggcaaggtcgcctatctcgtctttggaattgacggtaatagtccgcgttaagtcgccttcgccttcggaaatgtctttcagcgtgtccgctaacttgacgattggcctggtagttctgctcagaacaaggtatataagcgccaccgccgcgacaagggctattaaggccaggataatgacaaagtttctcatcgcgttgacatctttcaggatgtaa

SEQ ID NO: 47028 - protein, 444 aa, Unknown
  Obtained from environmental sample
  misc_feature (1)..(444): Xaa is any amino acid
MDSTSVVTMLSSSTTRILCFSSPTVCLNLSVSCFSDSKFRLFSMLISFTWFTETFIWLTPFSISLIPPAASWLVLIKSPVSLTRVLPDSSISSEPFLTEAVMSLKRPMESSICFPPVSCSSIARKMFCSCSETVFTLESIAPKRSSTSLDDLVMLSMDAFIFFSIAAVVFDCLPDVSASLRISSATTAKPLPASPACAASIAAFIESRLVWLAMLFIKELIFNRSSDSMAIPLISATTPCNPLRPTSEASFNEFTLSTFFTKVWVTEPTFATISSMADEALEILVLWSSTWSLSLLILEITCSMVALVSVTLALWFITRPLMLWMLAVIWLIAAAVSVMLLARSLPITDKPSASSLIWMIIFLILSSVLLKYMARSPISSLELTVIVRVKSPSPSEMSFSVSANLTIGLVVLLRTRYISATAATRAIKARIMTKFLIALTSFRM

SEQ ID NO: 47029 - DNA, 831 bp, Unknown
  Obtained from environmental sample
  misc_feature (1)..(831): n is a, c, g, or t
ttggaggacgtaggggtgatgggcttggtgcctccccctgctcgacccatgcccgctgcggctaacacatcatcagtcagcactccggcggtcaacgcccatgcgcccaagccgcctcttcccagcccacccccgattgtcacgccgagggctgccaaagtcgccgcgccgcaacaatcggctgcaaaagccaaagaagcccccgcctggcagtccccgacagacccaaccaagaatccgccattagaggccattgaagcctgtgaaagcctggacgcactgaacacctgcatctgccgctgcgaggcctgccctcttggtgcaggaaggataaagttcgtatttggcgagggttcgccaaatgcccagatgatgtttgtcggcgagggccccggcagcgaagaggacatcatgggccgcccattcgtcggcagggccggagttcttctggacaagatgataggcgccataaacatggcccgcagcgatgcctacatagccaacatagtgaagtgccgcccgcccgacaacagagtgccaacgccaatggaggcccaaacatgcatccgctaccttatgagacaaattgaattaatcaaacccaacgtaatagtgggccttggcgcaacgccccttagggagatgataggcatcccaagcgggataacaaagctccgcggcacttggcgttcagtcaaagtggcagacagagagataccatacatgcccaccttccatccagcctacgtcctgcgctcgtacaccaaagaagtcagacaggccgtctgggaagatttgaaggcggccaaacagcgggcggaggaagggtaa

SEQ ID NO: 47030 - protein, 276 aa, Unknown
  Obtained from environmental sample
  DOMAIN (115)...(271): Uracil DNA glycosylase superfamily
  misc_feature (1)..(276): Xaa is any amino acid
MEDVGVMGLVPPPARPMPAAANTSSVSTPAVNAHAPKPPLPSPPPIVTPRAAKVAAPQQSAAKAKEAPAWQSPTDPTKNPPLEAIEACESLDALNTCICRCEACPLGAGRIKFVFGEGSPNAQMMFVGEGPGSEEDIMGRPFVGRAGVLLDKMIGAINMARSDAYIANIVKCRPPDNRVPTPMEAQTCIRYLMRQIELIKPNVIVGLGATPLREMIGIPSGITKLRGTWRSVKVADREIPYMPTFHPAYVLRSYTKEVRQAVWEDLKAAKQRAEEG

SEQ ID NO: 47031 - DNA, 675 bp, Unknown
  Obtained from environmental sample
  misc_feature (1)..(675): n is a, c, g, or t
atgatgtccagtttttggtcgcgtatgaggaatagcaacaagtctagggggccttcaaagatggggaggtccagcgccatgccgctgaatttgctctcaaagccctttgggggttcaaagatttttgattctttggcgtttgcggcatcctctggcttggcctcagagttgacttgtgcagcggtttccatacaattattatacatccatttgcgctccccgcagatggaaacagggttttcatttgccatgaccagcgaagccgatccccagtcgccacccggccctaatgaacattccagcgcaaggcgctggctgacggtgctgctgcgctcgatgcacatcgtgacgacggccatcgtcttggggggcgtgtttttgggcgccaagcatggcgaaatatacatcgccatttgggcggccattcttagcggctccctgatgctgtttgctgacatctacaaaagccccagcatcctagtgcagggcagcggccttttttctctgctgaaactggcgttccttggcactggcttctttatgctgcccggccaccgtttttattggtacatgggggccactgtcattgcttcggtgggcagccacatgccgggggccgtgcgccattttgatcttttggagtggctgaagaaaagacatggtcagcgcacttga

SEQ ID NO: 47032 - protein, 224 aa, Unknown
  Obtained from environmental sample
  misc_feature (1)..(224): Xaa is any amino acid
MMSSFWSRMRNSNKSRGPSKMGRSSAMPLNLLSKPFGGSKIFDSLAFAASSGLASELTCAAVSIQLLYIHLRSPQMETGFSFAMTSEADPQSPPGPNEHSSARRWLTVLLRSMHIVTTAIVLGGVFLGAKHGEIYIAIWAAILSGSLMLFADIYKSPSILVQGSGLFSLLKLAFLGTGFFMLPGHRFYWYMGATVIASVGSHMPGAVRHFDLLEWLKKRHGQRT

SEQ ID NO: 47033 - DNA, 645 bp, Unknown
  Obtained from environmental sample
  misc_feature (1)..(645): n is a, c, g, or t
atgagtttaatatcaagtcaaaccacaataggcggcattgtcatgtgcgcggatcggtgcgcgtccgccaaaatgattaacaatgtagatatgccggaaagagtcgcgttttcacacaccgccgagaaaatacacgttaccacaaacaatatcggaatatcttcaatgggtactggttttgtaaataaagtgccgttggaacacgttatgtacgactttataaatacgcttgacgtaaagacgtataaaacgccgtcggacatatcgcaccagttaaaggcctttttacggcaattaagccccggcggactggacgcgactttccacgtctgcggatacgataaagacggaaagcccgctatttatttactacaggcgcaaaactggacggtaagccatgagaacgccgccaagccttacccgtggggaatatttgccgcgcccgatccgttcacggaaacaatatacagacgggtaggcggcgaatacggaaaatttaatttaagaaccgccgttgattttgcgaaattcgtaaacgtgacgacggcgggaataatgcgtttttccggggcgggtgaggccgtgagcaaggagtgcgacatactggttatctatccggatcgccatgaatggattaaggagtaa

SEQ ID NO: 47034 - protein, 214 aa, Unknown
  Obtained from environmental sample
  misc_feature (1)..(214): Xaa is any amino acid
MSLISSQTTIGGIVMCADRCASAKMINNVDMPERVAFSHTAEKIHVTTNNIGISSMGTGFVNKVPLEHVMYDFINTLDVKTYKTPSDISHQLKAFLRQLSPGGLDATFHVCGYDKDGKPAIYLLQAQNWTVSHENAAKPYPWGIFAAPDPFTETIYRRVGGEYGKFNLRTAVDFAKFVNVTTAGIMRFSGAGEAVSKECDILVIYPDRHEWIKE

SEQ ID NO: 47035 - DNA, 1149 bp, Unknown
  Obtained from environmental sample
  misc_feature (1)..(1149): n is a, c, g, or t
atgaatgatccgcgctttataaaattggacgataacgccgatagattttataacttgccgtacttcgcgcttggtcacataagccgcgacgatatggtgactacgtttacgcgcctatgggaggaggctgagggtgattctgcggcgtttatcaacgtacttgccgatcttgttgagcgtcaaaacaagcttgcgagcgtagacgccgccgaggttacggcttcggtcgtggctatgtatgagggtattcagggcgtcgttctgtacccaggtgatcctgtacgtttgttactttctacgttggcggcggtaatttctatgcaaaataccgtatcggattggacgcaaaagcaaaacttcctacgccacgcctccggcgcgtatttggacgccctcgccgccctactcggtgtatatcgtttggaggcttttccggccaaaacgaagcttaaatatagcctaaaagacccgttgacgcgctctgtagtcataccgcacggtacaagggcgacggctgacggacgtatatttttcgcgacggataggcttgtaattatcccggccggccagctgtccgtcgaggtttcggctacgtgcctaacctacggcgcagagggtaacggtttattgccgcgccaaataaaccgcgctgttgacgtcgtagcgtttatttcatccgtagtcaatataacggcttcggagggtggttcagatgtggaaaatgatgatgatttgcgtaatcgggcgcgtatggcccctgggcagttttctaccgcaggggcgcggttatcttatatttattgggcgctcaccgctcacggcaacattgcggatgtatcgataagcggcccggaggatagggagggcgaacggttaggtgaagttgatgtagtggtaatgctcaaaggcggcgccatacccgacgtagacggcgtagaaatagaagccgtgacgaatgtgttaaatggggagaagatacgtccgctcacggataaagtgaacgtcctgccggtagatacgcttgaaattgaatatactctcacgtggtatataaccaccgaacaagctatacaattcaccacgatagaagaacggataagcgccgccgtcgctgaatatgaggcttggcaaatactcggccgaatctga

SEQ ID NO: 47036 - protein, 382 aa, Unknown
  Obtained from environmental sample
  DOMAIN (93)...(369): Baseplate J-like protein
  misc_feature (1)..(382): Xaa is any amino acid
MNDPRFIKLDDNADRFYNLPYFALGHISRDDMVTTFTRLWEEAEGDSAAFINVLADLVERQNKLASVDAAEVTASVVAMYEGIQGVVLYPGDPVRLLLSTLAAVISMQNTVSDWTQKQNFLRHASGAYLDALAALLGVYRLEAFPAKTKLKYSLKDPLTRSVVIPHGTRATADGRIFFATDRLVIIPAGQLSVEVSATCLTYGAEGNGLLPRQINRAVDVVAFISSVVNITASEGGSDVENDDDLRNRARMAPGQFSTAGARLSYIYWALTAHGNIADVSISGPEDREGERLGEVDVVVMLKGGAIPDVDGVEIEAVTNVLNGEKIRPLTDKVNVLPVDTLEIEYTLTWYITTEQAIQFTTIEERISAAVAEYEAWQILGRI

SEQ ID NO: 47037 - DNA, 1068 bp, Unknown
  Obtained from environmental sample
  misc_feature (1)..(1068): n is a, c, g, or t
atgctgacgaccagcgacatagaggtgttcggcaccgcccgcgatgggatagacgccctagaaaaaattccgatgtgcaaacgggatttgatcactctggacatcgaaatgcccaggatggatggcctcacatgcctcaaaaagataatggaggattattcctccatgcccgttttgatggtatccagcttaccccaagaaggggccaaggccacattggatgccttggaacttggtgccctcgatttcatctcaaaggagaaaaagctcgaggggagagatgaaaacatattaaacatcaaggacgagttgcaggaaaaagttagaaaactgtcgcagagtccaaaattcaggactaatcggcgcgcgctcgcgtcacccacacctgctgctgcccccgctcggcccgcgccgcccccacgcgaaacaaccgatgccgcgccgaggtccgctgtatcaaaaggcgttcagggcacaataccaaaccatccgatggcagagatgatagtgctgggctgctcgaccggcggaccaaaggcccttcaagattttctgccgtacctgccaaagaacctgccagtgccaatgctgatagtgcagcacatgccatccagcttcaccaaaccttttgccgagaggctgaacgggatttgccagttggaagtaaaagaggcggccaatggggacgttccacagccagggcacatatatctcgcccctggcggcatccacatgcacctccggcaccagctgggccgctattcgatcgaactgaacccagagccatcgaacaccttgcaccgcccaagcgtggacgtgctgtttaatagcgcatttgatgcctgcaacaatgtccaactgctggcgataatcctgacaggcatgggaagcgacggagcccaagggatgaaaaaactcaaatcgaaaggcgcctacactatagcagaagcagaatcgagctgcgtagtgtatggcatgccaaaggccgcattcgaactgggttgcgtcgacgtggtttcgccgatcaccgacatggcaggggtcgtcaggaaccacttccagctttag

SEQ ID NO: 47038 - protein, 355 aa, Unknown
  Obtained from environmental sample
  DOMAIN (1)...(91): Response regulator receiver domain
  misc_feature (1)..(355): Xaa is any amino acid
MLTTSDIEVFGTARDGIDALEKIPMCKRDLITLDIEMPRMDGLTCLKKIMEDYSSMPVLMVSSLPQEGAKATLDALELGALDFISKEKKLEGRDENILNIKDELQEKVRKLSQSPKFRTNRRALASPTPAAAPARPAPPPRETTDAAPRSAVSKGVQGTIPNHPMAEMIVLGCSTGGPKALQDFLPYLPKNLPVPMLIVQHMPSSFTKPFAERLNGICQLEVKEAANGDVPQPGHIYLAPGGIHMHLRHQLGRYSIELNPEPSNTLHRPSVDVLFNSAFDACNNVQLLAIILTGMGSDGAQGMKKLKSKGAYTIAEAESSCVVYGMPKAAFELGCVDVVSPITDMAGVVRNHFQL

SEQ ID NO: 47039 - DNA, 813 bp, Unknown
  Obtained from environmental sample
  misc_feature (1)..(813): n is a, c, g, or t
gtgaatatgacaatgatcccggtaaagtcatttaaaaaaatcgccaacaataaactccttgtattttcctgtatcctcttccttgttatagcttgttcggctattacggcatattcaatttcatcgcatcaaatcaaccattcatttatcaagcagcagctttccatagcgtctgaaacaatgcggctgcgtttgacatccatggtaaacagtgaaattgcacttttgttgaagatggcggataccccggtaatccggcagcattttataaatccttctgaccatgttctaaaatcccaggcagacgccgaatttgccatttatagggaacatttcaataatgaaatactttactggattaatgacgtggataaaatattttatacaacaagaaatgccccgtacattgttaatcctgatgatcccaggaattattggtacaatttaactttatacgaaacggagaaatatatttttaacattaattacaatcatgatttggagcaaatctatctttgggtcaatgtcccggtatttgtaaccgcggagacaggtaaaaaacccatagggatgattggtacaggaataaatctgactgatttttcaaattttgtagcttccagctatagggaattcgataaaaatattacaacatatatgtttaataaatacaatgaaattacttcggcggttgattatgaactggttctgaataaagtccgccttgatgagtaccttggcgaaaccggaaaagaaataattaaggtagcgcatgagctttttgatggtgaaagccggagntttcacctatga

SEQ ID NO: 47040 - protein, 270 aa, Unknown
  Obtained from environmental sample
  misc_feature (1)..(270): Xaa is any amino acid
MNMTMIPVKSFKKIANNKLLVFSCILFLVIACSAITAYSISSHQINHSFIKQQLSIASETMRLRLTSMVNSEIALLLKMADTPVIRQHFINPSDHVLKSQADAEFAIYREHFNNEILYWINDVDKIFYTTRNAPYIVNPDDPRNYWYNLTLYETEKYIFNINYNHDLEQIYLWVNVPVFVTAETGKKPIGMIGTGINLTDFSNFVASSYREFDKNITTYMFNKYNEITSAVDYELVLNKVRLDEYLGETGKEIIKVAHELFDGESRXFHL

SEQ ID NO: 47041 - DNA, 912 bp, Unknown
  Obtained from environmental sample
  misc_feature (1)..(912): n is a, c, g, or t
atgtataaaataagttattacagtttacgagggattttctttctattcgtatcaattctttttctctcttgcgccacgcggcctccttcagatccggcgcagacttcgcttgagtcctntgcggcggtcgaggcggcggttccgcagtggcagccgtttgcgcagggcgtcgaatacttccacggaaaaacaaaagcgccggaacttgagttttgggcgctgaagatcgatcttggcgcgccggatctgcaaattgtcgttaaaggcggcgcggaggatacggcgggaggaacagaccgcacattgagcgctaaagtttcaagttttgtaagcgtgaacggcttaacagccggaatcaacgccgctccttttgatattgccgcttctcaggaaggccgtccgattaaaaatgtgggtatcgttatttcgggcggcaaacaaatcgctccggcaagtccgcgctatgacgcgcttgttttttacaaagacggaaaggctgcgattgtaaaccaggcggctattaaatcgacggaaaacatagaaaacgcggtaggcggttttcatcacattcttgtaaacggcgaacctgcggaaaggacgcacagccgggaaagccgggaaccgcgaagcgccgcgggagtttcagctaacggggaatacctttatctgcttgtaattgacggcaggcgcgcgggaagcgccggcggtacggaaaaagagaccgccctgctccttcttgcgcttggttcatggaacggtcttaacctggacggcggcggctcaaccgcgcttgcccttcgcggcgcggacggcaaggtaagagtggtaaacacccctgttcacggaggaattccgggaagagaacgcgcggtagccggctgcctaggaatagcgacaacaaataaaaaataa

SEQ ID NO: 47042 - protein, 303 aa, Unknown
  Obtained from environmental sample
  SIGNAL (1)...(26)
  misc_feature (1)..(303): Xaa is any amino acid
MYKISYYSLRGIFFLFVSILFLSCATRPPSDPAQTSLESXAAVEAAVPQWQPFAQGVEYFHGKTKAPELEFWALKIDLGAPDLQIVVKGGAEDTAGGTDRTLSAKVSSFVSVNGLTAGINAAPFDIAASQEGRPIKNVGIVISGGKQIAPASPRYDALVFYKDGKAAIVNQAAIKSTENIENAVGGFHHILVNGEPAERTHSRESREPRSAAGVSANGEYLYLLVIDGRRAGSAGGTEKETALLLLALGSWNGLNLDGGGSTALALRGADGKVRVVNTPVHGGIPGRERAVAGCLGIATTNKK

SEQ ID NO: 47043 - DNA, 888 bp, Unknown
  Obtained from environmental sample
  misc_feature (1)..(888): n is a, c, g, or t
ttgaatacggcggtgtcggtaaaactggagattcagaatttaaagaaggtttttaaccggcaggaagttctccacgggttgaactttaccgtgaacgacggggaatttctttctattttagggccttccggttgcggtaaaaccactatcttgcgaatcctcatagggcttttgccacctacatgcgggcggattataaaggacggaaatgacattaccgccgttcccgcttcaaaacggggcatgggcatcgtgttccaaaactacgccctgttccagaatatgagcgttcttggcaatgtggagtacgcgttaaaatttaataaggaattaaaataccatagccggagcattgccaaagaaataattgaacaggtggggcttaacgaacacatttataaaaaaccgtggaaactttcaggcggccagcaacaacgggtggcaatcgcccgtactcttgcctgncaacctgaaattattctttttgacgaaccgatgtccgcgctggacgcggcgacgcggctgtcgttacgcgatgagatcaagaatatacagaagcggttccgtaccaccatgatctacattacgcatgatcaggaagaagcttttgccctttcggatcgcgtaatggtaatggataacggaacaattcagcaactggatacgcctgaagcaattagcggggggcctgcaaatgactatgtcagggaatttgtgatcaacaatctccgcctgaaaatagactccctaaccaagcacattcagccggaagttacaacccttggatcggtgatggacaacctccggatgaaattcacttccatgcttaattatgtgaagcatgaagagtcttctttagtcaataagtctccttctccgaagggataa

SEQ ID NO: 47044 - protein, 295 aa, Unknown
  Obtained from environmental sample
  DOMAIN (34)...(215): ABC transporter
  misc_feature (1)..(295): Xaa is any amino acid
MNTAVSVKLEIQNLKKVFNRQEVLHGLNFTVNDGEFLSILGPSGCGKTTILRILIGLLPPTCGRIIKDGNDITAVPASKRGMGIVFQNYALFQNMSVLGNVEYALKFNKELKYHSRSIAKEIIEQVGLNEHIYKKPWKLSGGQQQRVAIARTLAXQPEIILFDEPMSALDAATRLSLRDEIKNIQKRFRTTMIYITHDQEEAFALSDRVMVMDNGTIQQLDTPEAISGGPANDYVREFVINNLRLKIDSLTKHIQPEVTTLGSVMDNLRMKFTSMLNYVKHEESSLVNKSPSPKG

SEQ ID NO: 47045 - DNA, 1401 bp, Unknown
  Obtained from environmental sample
  misc_feature (1)..(1401): n is a, c, g, or t
ttgggaatatccgccgaagcggaggagcgattcaaagaacgggatcgtcatgttataagagagggccggaccctggtatttgaagaaaatataccttccgcgaacggaataacacagctttttgaaacatccaaagtcccgatggtgcaagacgggcagataatcgggctgatgtctatatcgcataacataaccgagcgtaaggcaatggaagaacaggcgatgagcgccagccgcgcgaaatcggcgttcctcgccaatatgagccacgagatacgcacgcccatgaacgccattaccggcatgaccgcgataggaaagtccgccgccgacgccgagcgcaaagattactgctttagcaaaattgaggacgcgtcgcggcatttgttaggtgtaatcaacgatatcctggatatgtccaaaattgaagccaataagtttgaactgtcaccggtagaatttaattttgaaaaaatgatccagtcggcggtcaatgtcgttaacttccgcctggacgaaaaacaccagaattttacactacaaattgataaaaaaattccaaagaatctcattgccgatgatcagcggctgatacaggtcatcaccaacctcctggggaacgcggccaaattcacgcctgaacacggctctatcagtcttgacgcgcggtttctgggggaaaaaaacgatctgtgcaccatagagattgcgataagcgacacggggatcggcatcagccccgaacaacaggaaaatttatttaattcttttcagcaggcggagaccagcacggcgcgcaagtttggcggcaccggtctggggcttgcgatttgtaaaagtattgtcgaaatgatgagcggaacaattcgggtagaatccgagcaggaaaagggggccgcttttatctttacgatacaggcgaaaaagggcgcccatataaatgaagcggtaaacggctctccggaagcgaagcataaagagaaagttaaccttgacggactctttgaggggaggcgcatactgctggttgaagacgtggaaataaaccgcgagatagtgctggcgctgtttgagccaaccagattaaagatagactgcgccgaaaacggcgtggaagccgtccgtaaattcaatgaggcgccagcaaagtacgatctgatattcatggacatacagatgccggaaatggacggttatgaggcaacgcggtatattcgggcgctggacattccggaagcaaaaaccattccgataatagcaatgactgctaacgtgttccgtgaagacgttgaaaggtgtctcgaatcgggcatgaacagccatgtgggcaagccgttgaattttgatgaagttctggaaaaattaagaagttatctggggagtagggagtcggagggctaa

SEQ ID NO: 47046 - protein, 466 aa, Unknown
  Obtained from environmental sample
  DOMAIN (80)...(145): His Kinase A (phosphoacceptor) domain
  misc_feature (1)..(466): Xaa is any amino acid
MGISAEAEERFKERDRHVIREGRTLVFEENIPSANGITQLFETSKVPMVQDGQIIGLMSISHNITERKAMEEQAMSASRAKSAFLANMSHEIRTPMNAITGMTAIGKSAADAERKDYCFSKIEDASRHLLGVINDILDMSKIEANKFELSPVEFNFEKMIQSAVNVVNFRLDEKHQNFTLQIDKKIPKNLIADDQRLIQVITNLLGNAAKFTPEHGSISLDARFLGEKNDLCTIEIAISDTGIGISPEQQENLFNSFQQAETSTARKFGGTGLGLAICKSIVEMMSGTIRVESEQEKGAAFIFTIQAKKGAHINEAVNGSPEAKHKEKVNLDGLFEGRRILLVEDVEINREIVLALFEPTRLKIDCAENGVEAVRKFNEAPAKYDLIFMDIQMPEMDGYEATRYIRALDIPEAKTIPIIAMTANVFREDVERCLESGMNSHVGKPLNFDEVLEKLRSYLGSRESEG

SEQ ID NO: 47047 - DNA, 648 bp, Unknown
  Obtained from environmental sample
  misc_feature (1)..(648): n is a, c, g, or t
ttgacccggccccgggccacgcgcgcaaacgccggaatcgccccgatgccaagggccaccgctgcgctcagggtgctggcaccgaaagccgccgcgaaaataatcgccaacaacaggcccgggaacgcgagcagcaagtccgagccgcgcatcagcagcgaatccacgcgcccgccgcgcattgccgcccacacgccgagcggggtaccgagcagagcgccgatcccgaccgccaccaacccaaccagcagtgccacccgtgcgcccgccatcacctgcgaaaacacgtctcgtccgaggcggtcggtgccgaaccagttggtcagcgagggcccggcgaggcggcctgcaacgttcgcgcgcgtcgggtcaaacggcatccagaccagcgagaccaaagcgagcagcgcgacgaggcccacgagcaccgcgccgataataagttgcggatgcacccccggcctaaatcgccgcggcccaagcgaggccaccgaaacatacgacgaggaaacatcctgccgagaacgtgcgccgaagtccggcttcgtgccaatacctagcgactccgcgggctcccgggaaggtaaacggatccttcgggtggtttcgacaggctcaaccacccgaatcaccagcctcggtcactag

SEQ ID NO: 47048 - protein, 215 aa, Unknown
  Obtained from environmental sample
  misc_feature (1)..(215): Xaa is any amino acid
MTRPRATRANAGIAPMPRATAALRVLAPKAAAKIIANNRPGNASSKSEPRISSESTRPPRIAAHTPSGVPSRAPIPTATNPTSSATRAPAITCENTSRPRRSVPNQLVSEGPARRPATFARVGSNGIQTSETKASSATRPTSTAPIISCGCTPGLNRRGPSEATETYDEETSCRERAPKSGFVPIPSDSAGSREGKRILRVVSTGSTTRITSLGH

SEQ ID NO: 47049 - DNA, 723 bp, Unknown
  Obtained from environmental sample
  misc_feature (1)..(723): n is a, c, g, or t
gtgattcgggtggttgagcctgtcgaaaccacccgaaggatccgtttaccttcccgggagcccgcggagtcgctaggtattggcacgaagccggacttcggcgcacgttctcggcaggatgtttcctcgtcgtatgtttcggtggcctcgcttgggccgcggcgatttaggccgggggtgcatccgcaacttattatcggcgcggtgctcgtgggcctcgtcgcgctgctcgctttggtctcgctggtctggatgccgtttgacccgacgcgcgcgaacgttgcaggccgcctcgccgggccctcgctgaccaactggttcggcaccgaccgcctcggacgagacgtgttttcgcaggtgatggcgggcgcacgggtggcactgctggttgggttggtggcggtcgggatcggcgctctgctcggtaccccgctcggcgtgtgggcggcaatgcgcggcgggcgcgtggattcgctgctgatgcgcggctcggacttgctgctcgcgttcccgggcctgttgttggcgattattttcgcggcggctttcggtgccagcaccctgagcgcagcggtggcccttggcatcggggcgattccggcgtttgcgcgcgtggcccggggccgggtcaatgcaggtgctttgcagcgattatgtgcaagccgcccggatggccaatcgatcttcttggcaaatgcgcgccagcacgtgctgccgaactaa

SEQ ID NO: 47050 - protein, 240 aa, Unknown
  Obtained from environmental sample
  misc_feature (1)..(240): Xaa is any amino acid
MIRVVEPVETTRRIRLPSREPAESLGIGTKPDFGARSRQDVSSSYVSVASLGPRRFRPGVHPQLIIGAVLVGLVALLALVSLVWMPFDPTRANVAGRLAGPSLTNWFGTDRLGRDVFSQVMAGARVALLVGLVAVGIGALLGTPLGVWAAMRGGRVDSLLMRGSDLLLAFPGLLLAIIFAAAFGASTLSAAVALGIGAIPAFARVARGRVNAGALQRLCASRPDGQSIFLANARQHVLPN

SEQ ID NO: 47051 - DNA, 1071 bp, Unknown
  Obtained from environmental sample
  misc_feature (1)..(1071): n is a, c, g, or t
gtgatagaagaccagaacaccgaatggaaagaaacctggcatgatgaattcctaaaaacagtttgtggcttcgccaacgcacaaggcggtgtcattgaaattggcagaaacgacaatggtattattgtaggtgtagaaaacgcgaaacgacttttggacgaactccccaaaaaaatccgcgccacaatgggtatcgtggttgatgtcaatcttcgcagaaaaaacgctattgaatatattattattaaagttaaggcgtacccaaacgccataagttacaggggcaaatattatttacgttcgggtagtacaaaccaggaagtaacaggttttgcccttgatgaaatgatactccgaaaatacggaagaacctgggattcagccccggtacctcgtgttaaaccgaaagatttttatcacgacgcttttgacgttttcaggaaaaaagcggtttccagtgaacgccttacccccgaagacatagtaggcagtgatgaaaaattactccaggcattgaaattggtggacggcaagtatctattgaaagccgctcttctcctgtttcaccaggatcctgagcaatggtgtctgggctcttatgtaaagatcggttacttcaaaaatgacgccgatttaatgtatcaggatgaaataaacggcccgcttataagtatcgcagatcgcataatggataccatttataccaagtattttaagggcttgatccattatgaaggcctccagagggtagataaatttcccatgccccgcgaagttttgcgggaggcggttctgaacgcggtaatacacaaggattacagtacaggaaacccgattcacataaaaatatatggcgataaggtcatcgtttataatgattttctgcttccttccaataccactacaaaaaacctgcttaaaagagttggttccaggccgcataatccgctcattgcgaatggctttttccgttcaggacaaattgaagcctggggacggggaatagaaaaaattaaaactggttgcattgccgataatttgcctgaacctgaattcgctcggccgatctga

SEQ ID NO: 47052 - protein, 356 aa, Unknown
  Obtained from environmental sample
  DOMAIN (24)...(111): Divergent AAA domain
  misc_feature (1)..(356): Xaa is any amino acid
MIEDQNTEWKETWHDEFLKTVCGFANAQGGVIEIGRNDNGIIVGVENAKRLLDELPKKIRATMGIVVDVNLRRKNAIEYIIIKVKAYPNAISYRGKYYLRSGSTNQEVTGFALDEMILRKYGRTWDSAPVPRVKPKDFYHDAFDVFRKKAVSSERLTPEDIVGSDEKLLQALKLVDGKYLLKAALLLFHQDPEQWCLGSYVKIGYFKNDADLMYQDEINGPLISIADRIMDTIYTKYFKGLIHYEGLQRVDKFPMPREVLREAVLNAVIHKDYSTGNPIHIKIYGDKVIVYNDFLLPSNTTTKNLLKRVGSRPHNPLIANGFFRSGQIEAWGRGIEKIKTGCIADNLPEPEFARPI

SEQ ID NO: 47053 - DNA, 1092 bp, Unknown
  Obtained from environmental sample
  misc_feature (1)..(1092): n is a, c, g, or t
ttgcgcctgccgaattacatgaaagacggcaagactgttttcgatgaggaaaaaagcattgcccttatccataaggccgtggaattgggagttaattactttgacacggcgccttattactgcgacaaggttagtgagataatcgtcgggaaagccttcaaaggcggcaagcgggagaaggtttttctttccaccaaaaaccccattgaaaacgattccggcgacgattacgaaaagcggctggagacctctctcaaaaagatggagacctcttacattgacttttaccatttttggggcatatcgctcaacgattttattaaaaaggttaaggccaaggacggcccgcttgaccgcgcgataaagcttaaggcgcagggagttatcaggcatatttccttttcttttcatgatggcagcgcgggagccaaagaaggagacaatttaatagagatccttaaaatgagtgaagggattctggaaaccgtcctttgccagtacaacctgatggatcgcaacaaggaaaaaggcattgccctggcgcatgacatgcggttaggtacggtcgtaatggggccggttggcggcggacgccttggaacgccttcaaaaactatcctggatctgcttcccggcaagttcacgagttccgccgaactcgccatgcgttttgtgctggcgaacaataatgttgacattgccctatccggggtttcctctattgaacaactggaagaaaatgcccgggtagcggacaatgccgcgcccctaagcgccgccgaacttaagcagatagaaaccatgatgaaggaaaacgagcgcctcgccgggctttactgtacaggctgcaaatactgcatgccctgtccggaagggatcaacatccccgaagtttttacaatcatgaattatcacagggtttatcaaataacggaattcgccaaaaacgcctatgccgaaatcggcaaggttccatggaggcaattcaaaaacgcgtcagcctgtattgaatgtggagtttgcgagaccaaatgtccccagagcattcatgtcagggaacagctcaaggagacccacaaagttcttgcttaa

SEQ ID NO: 47054 - protein, 363 aa, Unknown
  Obtained from environmental sample
  DOMAIN (7)...(270): Aldo/keto reductase family
  misc_feature (1)..(363): Xaa is any amino acid
MRLPNYMKDGKTVFDEEKSIALIHKAVELGVNYFDTAPYYCDKVSEIIVGKAFKGGKREKVFLSTKNPIENDSGDDYEKRLETSLKKMETSYIDFYHFWGISLNDFIKKVKAKDGPLDRAIKLKAQGVIRHISFSFHDGSAGAKEGDNLIEILKMSEGILETVLCQYNLMDRNKEKGIALAHDMRLGTVVMGPVGGGRLGTPSKTILDLLPGKFTSSAELAMRFVLANNNVDIALSGVSSIEQLEENARVADNAAPLSAAELKQIETMMKENERLAGLYCTGCKYCMPCPEGINIPEVFTIMNYHRVYQITEFAKNAYAEIGKVPWRQFKNASACIECGVCETKCPQSIHVREQLKETHKVLA

SEQ ID NO: 47055 - DNA, 642 bp, Unknown
  Obtained from environmental sample
  misc_feature (1)..(642): n is a, c, g, or t
atgccgaaatcggcaaggttccatggaggcaattcaaaaacgcgtcagcctgtattgaatgtggagtttgcgagaccaaatgtccccagagcattcatgtcagggaacagctcaaggagacccacaaagttcttgcttaacaaaaaaattctcgttttatgttcatcagttttttttctttccggttttctatatgcgcgcggagctaacgaaagcggtgttaagccgctgacggtttacggtatcaagggatcttcgggagtgggaattgtacgtctttttgaggaaccccctaagattccgggtttcgatgtgaaggttgaagcgcttgcccaggccgatcaaatggccgcccgttttatttctggagaagccagggtaggaatactcccgcccaatatggcagcaaaaatagccttatcaggaaaagacatccgggccgccgcgatcatcggtaacgggatgctgagccttctcagctcggacgcaagcgttcacagcattgccgatctcaggggaaaaaccgttgaagtcgcagtccagggagcaacgcctgagtttgtttttaggaagatacttgagtttaacggattggcgcctgatcgcgatgtcaggctcgggctattccatggctccccctga

SEQ ID NO: 47056 - protein, 213 aa, Unknown
  Obtained from environmental sample
  misc_feature (1)..(213): Xaa is any amino acid
MPKSARFHGGNSKTRQPVLNVEFARPNVPRAFMSGNSSRRPTKFLLNKKILVLCSSVFFLSGFLYARGANESGVKPLTVYGIKGSSGVGIVRLFEEPPKIPGFDVKVEALAQADQMAARFISGEARVGILPPNMAAKIALSGKDIRAAAIIGNGMLSLLSSDASVHSIADLRGKTVEVAVQGATPEFVFRKILEFNGLAPDRDVRLGLFHGSP

SEQ ID NO: 47057 - DNA, 312 bp, Unknown
  Obtained from environmental sample
  misc_feature (1)..(312): n is a, c, g, or t
atgatttcgcgcgaagccagccaaaagcagaaatggaacacagaaaacgaggaaggccgcagaaacatggtaagggaataccgtaagaatcttcaaaattctgttatagacggcgatattaacgtaattcccaccagtttcctaattgaaaaaaccgaatacaacaataacgagggaaccgtcatagttttaacaagattccgctattcaaatttcaccgaattaaggcgctacacatattatcttgaacgcaaggacaatatctggaaaatcgtgaattatacagtcagaggattgggaacggagccgtaa

SEQ ID NO: 47058 - protein, 103 aa, Unknown
  Obtained from environmental sample
  misc_feature (1)..(103): Xaa is any amino acid
MISREASQKQKWNTENEEGRRNMVREYRKNLQNSVIDGDINVIPTSFLIEKTEYNNNEGTVIVLTRFRYSNFTELRRYTYYLERKDNIWKIVNYTVRGLGTEP

SEQ ID NO: 47059 - DNA, 531 bp, Unknown
  Obtained from environmental sample
  misc_feature (1)..(531): n is a, c, g, or t
atggctcaattaaatttagacgactatatcagaaaagtgccggattttcccaaaaagggaattctcttttatgacattaccagcattctctcttctcccgaagcgttcctttactgcatagaccgcatggtagaaatttacaaagacaagaagatagacgccatcgccgcgatagaagcccgagggtttttatttgccgctcctttcgcaatccgcttaggcattccgttaattccgattcgtaaaaaaggaaaactgccgggcattactctctccaagaaatacgatcttgaatacgcgcaagccgaaattgaagtccactcttctgacgttccgaaaggcaaacgcgtattgcttaccgacgacttaatcgcaacaggcggcacgcttaacgccgcaaggtctctacttgtagaaggcggagcggaagttccggaaattttcggcgtattgggtcttccgtttctcaacttcaagaaaatactcgaccctactcctgttactactctgattgattaccagtctgaataa

SEQ ID NO: 47060 - protein, 176 aa, Unknown
  Obtained from environmental sample
  DOMAIN (25)...(161): Phosphoribosyl transferase domain
  misc_feature (1)..(176): Xaa is any amino acid
MAQLNLDDYIRKVPDFPKKGILFYDITSILSSPEAFLYCIDRMVEIYKDKKIDAIAAIEARGFLFAAPFAIRLGIPLIPIRKKGKLPGITLSKKYDLEYAQAEIEVHSSDVPKGKRVLLTDDLIATGGTLNAARSLLVEGGAEVPEIFGVLGLPFLNFKKILDPTPVTTLIDYQSE

SEQ ID NO: 47061 - DNA, 408 bp, Unknown
  Obtained from environmental sample
  misc_feature (1)..(408): n is a, c, g, or t
atgaggttcttggaaaatggaactataaaatcttgccaagaaaattttcataattgtatattttatattgggacagttcctaagcgtattagcggtgtattggctgctgtttccttgaccaatattttctacctgcttcgaaaagccaaaatggcttctgctgacgtttatcaaattatggataaactcatcgctctttttactgttgcccctattgttgaatctactatagccagcgcattggctctccgctggaaggattttgaggacgctgttcagtttatagccgcagaagaaagtaaggttgagtttatcattactcgaaacaaagcagactataaaacttccgaaattccttgcctgaccccaacagaatttatagctcatcttaaggaaaatgaggaatga

SEQ ID NO: 47062 - protein, 135 aa, Unknown
  Obtained from environmental sample
  misc_feature (1)..(135): Xaa is any amino acid
MRFLENGTIKSCQENFHNCIFYIGTVPKRISGVLAAVSLTNIFYLLRKAKMASADVYQIMDKLIALFTVAPIVESTIASALALRWKDFEDAVQFIAAEESKVEFIITRNKADYKTSEIPCLTPTEFIAHLKENEE

SEQ ID NO: 47063 - DNA, 312 bp, Unknown
  Obtained from environmental sample
  misc_feature (1)..(312): n is a, c, g, or t
atgggcaaaagaaaaaggtataccgccgaagaaaaagtaaagattctcagagaagtgctagaagacggaaaaccgataagccaagtggcagagagctacggccttcacccgaacaatatatttaactggcggaaacagctttttgaaaacggacttcaaacttttcaaataagaaggacggacatcagcaataaagcggaagaaagggtgataagcaggcttgaagaaaaaataaagcataaagacgaaattatagccgagcttgccggagagctgctggagctaaaaaaaaattattctggccgtctgtag

SEQ ID NO: 47064 - protein, 103 aa, Unknown
  Obtained from environmental sample
  DOMAIN (4)...(79): Transposase
  misc_feature (1)..(103): Xaa is any amino acid
MGKRKRYTAEEKVKILREVLEDGKPISQVAESYGLHPNNIFNWRKQLFENGLQTFQIRRTDISNKAEERVISRLEEKIKHKDEIIAELAGELLELKKNYSGRL

SEQ ID NO: 47065 - DNA, 957 bp, Unknown
  Obtained from environmental sample
  misc_feature (1)..(957): n is a, c, g, or t
atgagtcttcaggttcgagagcttgttgaaaaagaaataacgcggtacagagccatgacggggctcccgctggacttcctgttaacgcattcctgcatttcacggcggacatggtgggaatgggaaacccgcaaaggcgtggaaacaaaacacaatgacaacaccccgaaaaaccatcacctgacgccggaagaaacggcggccatagtcaggtattgcacggaaaacccgctcaaaggctaccgtatgcagtgttgggagatggtagaccaaaatgtggcgtttgtgtcctgcagcagcgtctataacgtcataaaacgccataatttgggcaaaaaatgggcggaattggctgaagaggcgaagaaaggttttgaccagcctctgacggttcacgagcaatggcacatagatttctcttacatcaagatacaaaactccttttattattttattggcatccttgacggctacagccggaaaatgcttaactggaggctctgcaaaaacatggagggtgttaacgctgaaatactggttgccgaaaccaaagaggtgtaccctgaagcggccggtccgcggctgataagcgacaacggcagccagttcgtatcaaaagattttgaagagctgcttgtgcttttggaattctcccacacgcttacatccgcgaatcacccgcagagcaacggcaaactggaacggttccaccgcaccttgaaaactgaacatataaggagggcatcgtatctggaataccaagacgcctgcattaggctggcggaatggatcgcgtattacaacagcgaaaggcttcacagcgcgatctggtatttaacgccgaatgacgttttttacggcaggacggctaaacggcttgcagaacgcaaagaaaagttgcatgctgcatttatcaagagacaggaatactggcggacacaaaatgccggttcctga

SEQ ID NO: 47066 - protein, 318 aa, Unknown
  Obtained from environmental sample
  DOMAIN (127)...(286): Integrase core domain
  misc_feature (1)..(318): Xaa is any amino acid
MSLQVRELVEKEITRYRAMTGLPLDFLLTHSCISRRTWWEWETRKGVETKHNDNTPKNHHLTPEETAAIVRYCTENPLKGYRMQCWEMVDQNVAFVSCSSVYNVIKRHNLGKKWAELAEEAKKGFDQPLTVHEQWHIDFSYIKIQNSFYYFIGILDGYSRKMLNWRLCKNMEGVNAEILVAETKEVYPEAAGPRLISDNGSQFVSKDFEELLVLLEFSHTLTSANHPQSNGKLERFHRTLKTEHIRRASYLEYQDACIRLAEWIAYYNSERLHSAIWYLTPNDVFYGRTAKRLAERKEKLHAAFIKRQEYWRTQNAGS

SEQ ID NO: 47067 - DNA, 729 bp, Unknown
  Obtained from environmental sample
  misc_feature (1)..(729): n is a, c, g, or t
atgaagatccgtttcaaaattatcctggtggtactgccggtggtaatcctcgccctttgcatagcccaggaggcttcattttttgccgcccagagcggcttaatgcgcatggctcagtcgttttttctttttaagacctctgagctaaaaaaatacgccgaaggccagtggaatctgcttctggaaaacaatttttcaggcagagcggagatggtggaggccgccaaaaaatcgctgcttctgtacgagcagagcattattctcggcgaaactgaaataatccttgccctggacgacgaaggcaggatcgccatgtctacttctcccctgcacatatcgcaggttgaaagcgaaaacatcataaaaatcttaaaagaagaaaaagaagggctttacagcgcttatcttggcgggacggaacgggtttttacggcttttcattttacgccctttagttggtacattctacttaccgaagacaaagacagtttttacagggacgcgaacaagattcgcttccaaaccactattgtgcttgcaataactttggttcttaccacagtgttacttatctttttcgcgctgcatcttaccaacccactgaaaagagtggtggacgcaatgagcggtattacctccaacggtgacctgtcttcgcgggtggaggtggagtacaatgacgaaacagggaaactggcttctctctcggccgatctgatgcgtggctaa

SEQ ID NO: 47068 - protein, 242 aa, Unknown
  Obtained from environmental sample
  SIGNAL (1)...(22)
  DOMAIN (175)...(241): HAMP domain
  misc_feature (1)..(242): Xaa is any amino acid
MKIRFKIILVVLPVVILALCIAQEASFFAAQSGLMRMAQSFFLFKTSELKKYAEGQWNLLLENNFSGRAEMVEAAKKSLLLYEQSIILGETEIILALDDEGRIAMSTSPLHISQVESENIIKILKEEKEGLYSAYLGGTERVFTAFHFTPFSWYILLTEDKDSFYRDANKIRFQTTIVLAITLVLTTVLLIFFALHLTNPLKRVVDAMSGITSNGDLSSRVEVEYNDETGKLASLSADLMRG

SEQ ID NO: 47069 - DNA, 717 bp, Unknown
  Obtained from environmental sample
  misc_feature (1)..(717): n is a, c, g, or t
atgggaagggacaaactaaggataagggagtatttttcagaagtcgaaacggaaaaagagtacaatggctatttctgcagcgtaggggaggcgctgacaatagcgatattgggttcaatatgcggcttgcgaaataccaatcaaatccatcaatgggcatcaagccaacgcgtcagagagtttctgtccaggtattttctgataaataacattccctgctattactggcttttatgccttttaaagcttataaagcctgacttgcttaacagatgcttcatgaaatgggcacaatcgctaaggcccggtggagacggaaccgaagcctataccatttcattcgacgggaaaacaatccgttcaaccgggaagatggacagctatgaaaatccgctgcatatactaagcgcgcacttggccgaacttggcataaccataggccaaaagacggtcggggagaagagcaacgagattcctgctatgagggagcttatagggcttttagagatacagggctgcatgatagtcgccgacgcgcttaactgccagaaagagacggctgaagcggtaattgaaggcaagggggactatttattttcggttaaggacaaccagcagatattgaaggaagacatagaaggctatgttcaagacaagaatttgcagaaaacaatggacacagccgcaacggtagaaaaaacgagcggcagagtctaa

SEQ ID NO: 47070 - protein, 238 aa, Unknown
  Obtained from environmental sample
  misc_feature (1)..(238): Xaa is any amino acid
MGRDKLRIREYFSEVETEKEYNGYFCSVGEALTIAILGSICGLRNTNQIHQWASSQRVREFLSRYFLINNIPCYYWLLCLLKLIKPDLLNRCFMKWAQSLRPGGDGTEAYTISFDGKTIRSTGKMDSYENPLHILSAHLAELGITIGQKTVGEKSNEIPAMRELIGLLEIQGCMIVADALNCQKETAEAVIEGKGDYLFSVKDNQQILKEDIEGYVQDKNLQKTMDTAATVEKTSGRV

SEQ ID NO: 47071 - DNA, 1008 bp, Unknown
  Obtained from environmental sample
  misc_feature (1)..(1008): n is a, c, g, or t
ttggaagcgccgccggcgctcttgctcgacaagaagctcgtcccgccgtcaagcgccgccgccttccgcgacaccggaaagctgctggccgaagccgacgctcagatggagacctgccgcaaatccggcgtcgccgttctgattcaagccgacggcgactacccgatgtacctaagggagatattcgccccgccgcccgtgctctacgtgaagggcgacctctcgaccctgcgcagccacgcgcttgccgtagtgggtacgcgcaggcccaccgcctacggcgtcacatgcgcgcgcgcgctgaccgccgagctctgcaagagcgccgtgattgtgagcggcctcgccgtcggcgtggacaccgccgcccatgagtgctgcctagaacttggcggcaagacgatagccgttctgggtagcggtatagaccgcatctatccccccgaaaacaaggagctagccaagcgtatctgcgaacacggcgcaatcgtctccgagttcccgccgggcaccgttccggaggcgtacaacttcccgcggcgcaaccgcgttataagcggcatctcctgcggcgtgatagtcgtggaggccggcgagagaagcggggcgctcataaccgccggctacgcgctggagcagaatagggtggtcttcgccgtgcccggcccgataaactcgccgatgagcgccggcacgttcaaactgatcaaagacggcgccgtgcctatcaggtcggcggcggacgtgttcgagcacatctcaacagtcacgttcgcccctgtgctgaccgcccccccccaaagcataaggagcgaggcgccgcccgtgctaccggaaaacgaggtcacggtatgggacgtcttgtcaaacaacccgcaaagagtggacgcaatatcggaagccagcggcgtggacatcccgcaactgctcgcgatattgctgaacctggagttaaaaggttttgtaacgcagatgggcggacagcagtttaggagggcgctttcttga

SEQ ID NO: 47072 - protein, 335 aa, Unknown
  Obtained from environmental sample
  DOMAIN (38)...(244): SMF family
  misc_feature (1)..(335): Xaa is any amino acid
MEAPPALLLDKKLVPPSSAAAFRDTGKLLAEADAQMETCRKSGVAVLIQADGDYPMYLREIFAPPPVLYVKGDLSTLRSHALAVVGTRRPTAYGVTCARALTAELCKSAVIVSGLAVGVDTAAHECCLELGGKTIAVLGSGIDRIYPPENKELAKRICEHGAIVSEFPPGTVPEAYNFPRRNRVISGISCGVIVVEAGERSGALITAGYALEQNRVVFAVPGPINSPMSAGTFKLIKDGAVPIRSAADVFEHISTVTFAPVLTAPPQSIRSEAPPVLPENEVTVWDVLSNNPQRVDAISEASGVDIPQLLAILLNLELKGFVTQMGGQQFRRALS

SEQ ID NO: 47073 - DNA, 1368 bp, Unknown
  Obtained from environmental sample
  misc_feature (1)..(1368): n is a, c, g, or t
gtgcctccgcagggcgacatttctgtgccatattacatttttgcgcctaacggaaacggaaaccgcgataccctgcccttccgtgttacaacggagggcaatgacgagtggaatctggtgatttcgtcaggcaataacacggcggtcagatcatggaactggacaggaagggctcccgcagtatcgattgtctgggatggaaaggacgaagccggaaacgtcgtaaacgacggaacctataacataaccctcagctctaccgacgatgccggaaacagtacccgcaaaaacataaacaacataattgttgacgccagtgtgccaaagattttccttacagcctccgcccaggcaattgctccgaagccggaccaaaccgaagccatgcactttaacattatggcaaccccggcggaaggagtcactttctggaagctggaattgagggacgagaatagcgagctgattaaatctttcccgtcccaggccggcggcagcgggccgctccccgccgtcctgccctggaacggtgcaaatgaaagaaacgtaataatagaagggcgtataactccctccttaaccgtgaattacgccaagggggacgttgtcaatatctccgcgccgtcaataatggtggacatctccggccccgtactcggctttcattcgcagcctgaattcttcagccccgataacgacggggtagacgatgagcttttcatcactctttcccgcagggacttttcgcccattgcggaatggtcgcttgaaattcgtgaaacagaaggaaccaaacaggtgttctaccggatcggaggcaggggaagcccttcggacaggataatctgggacggaaggagcaattggggagagctggttcagagcgcgtccgattacgagtacacctacagcgccagagatacgctggggaacgcaagtaccataacgggaaaaataacaaccgacgttctggtcatccgggacggcgacatactgcggattttaatcccgtcaattaccttcagggcaaactacgccgattttatcggaataccgcaggaaaggcaggaaaccaatacacgggtattgaaacgaattgcagaaatcctaaacaaattcagggattacagaatcatcgttgaaggccacgcgaatcccgtgctgagaactgccaaggaagaggacgaggtacttaagccccttagtcttgccagggctcaattcgttatcgatcacctcgtgaactacggagtaagccgaagccgtctctcttcgacaggacagggcggcacaagaaacgtagcgaacagccaggatccaaacaacaactggaaaaacaggcgggtggagttcctgttgattaagtaa

SEQ ID NO: 47074 - protein, 455 aa, Unknown
  Obtained from environmental sample
  DOMAIN (340)...(447): OmpA family
  misc_feature (1)..(455): Xaa is any amino acid
MPPQGDISVPYYIFAPNGNGNRDTLPFRVTTEGNDEWNLVISSGNNTAVRSWNWTGRAPAVSIVWDGKDEAGNVVNDGTYNITLSSTDDAGNSTRKNINNIIVDASVPKIFLTASAQAIAPKPDQTEAMHFNIMATPAEGVTFWKLELRDENSELIKSFPSQAGGSGPLPAVLPWNGANERNVIIEGRITPSLTVNYAKGDVVNISAPSIMVDISGPVLGFHSQPEFFSPDNDGVDDELFITLSRRDFSPIAEWSLEIRETEGTKQVFYRIGGRGSPSDRIIWDGRSNWGELVQSASDYEYTYSARDTLGNASTITGKITTDVLVIRDGDILRILIPSITFRANYADFIGIPQERQETNTRVLKRIAEILNKFRDYRIIVEGHANPVLRTAKEEDEVLKPLSLARAQFVIDHLVNYGVSRSRLSSTGQGGTRNVANSQDPNNNWKNRRVEFLLIK

SEQ ID NO: 47075 - DNA, 600 bp, Unknown
  Obtained from environmental sample
  misc_feature (1)..(600): n is a, c, g, or t
atgcggcttgtttactatactccgaaaaaagggaaaattcttctggaaaagggacttgatagcagttacatatacgctcagccgctgaaccatcttcttatttatattcaggaatatctcagcaaagagattcaggaactttgcgacattcttttagtccgcggtcaatggacaaacaactctgctttcagggctatgtcggaggcttttcatgaggctttggacactgccgcagaaattctccagctggatgaaagcctttccgaggaaggcagcaacggccccaggctcaggggagcgctgcttagggttgacagggacaagacccaaaatcggtatatcaacagtatcattaataccttaaacgatgatgccctggacataatcaacaaggctgtccctgcccttattgtattaggtaaacattttaaaatgctgttggaagattgtgaaaaaaagccttttgaattaattatgaactggaaagaactgaattcggtaacaaaagtacctatgggccaaagaatggcgccggtttataaaaaattaactttgtttgtacaacttatggcaatggaaaaagccccatcggaagaatag

SEQ ID NO: 47076 - protein, 199 aa, Unknown
  Obtained from environmental sample
  misc_feature (1)..(199): Xaa is any amino acid
MRLVYYTPKKGKILLEKGLDSSYIYAQPLNHLLIYIQEYLSKEIQELCDILLVRGQWTNNSAFRAMSEAFHEALDTAAEILQLDESLSEEGSNGPRLRGALLRVDRDKTQNRYINSIINTLNDDALDIINKAVPALIVLGKHFKMLLEDCEKKPFELIMNWKELNSVTKVPMGQRMAPVYKKLTLFVQLMAMEKAPSEE

SEQ ID NO: 47077 - DNA, 1170 bp, Unknown
  Obtained from environmental sample
  misc_feature (1)..(1170): n is a, c, g, or t
atggcacaaacccaatttatccgtaatttttgcattatagcgcacatcgatcacggcaagtctaccctcgccgaccgtctcattcaaaaagccaacattgtcgaagaccgcaacttccaagaccagatactcgataatatggatatcgagagggagaggggcatcacgataaagagccaagcggttaccctgccctacacggcgaaagacggcaacgagtacattctcaatttggtagacacgcccggacacgtcgattttagttacgaggtaagccgagcgattaattcctgcgaaagcgctctgcttttggttgacgctactcagggcgtgcaggcgcaaactttgtccaatatgtacctcgccctcgaacacaatcttgaaatagtgcctgtcattaacaagatcgatatgcaggcggctgatgttccgagagttaaaaaacaaattgataaagacttgggactggacgctgaaaccgccgttttggcgtccgcaagacagggcataggaattgacgaacttttagaggcgatagtgcagagaattcccgcaccgtcaggcaaaacggatgttccgttacgcgcgcttatttttgactgccactatgatccttacagaggcgtagttgtacacttgcgtcttttcgacggaaaaataaaaaagggaatgaaaatctcttttatgtccagcggttccgtttacgaagtggaaaccgtcggcgtttttaagctcgcccttgtagaaacagacgagctttcagcgggagacgtaggctacataatagcgagcattaaaaccgtaagcgacgtgcgggtaggcgacactgtaacaggaacggacaatccctgccctgaacctttgcccggtttccgagaagtaaaacccgtcgtcttttcttctatctaccctgttgactcaaacgactacgaagagttacgcgcaagcatggacaaacttaaacttaacgacgcttcccttgtttttgaaaaagactcatccgccgccctcggattcggtttccgctgcggctttttagggctgctgcaccttgaagttattcaagaacgccttgagcgtgaatttgatcaatcggtaattttcacggctccgtcggtaaaatacaaggtgcatcttgaagcggcgaagaaatcatctcggccgatctga

SEQ ID NO: 47078 - protein, 389 aa, Unknown
  Obtained from environmental sample
  DOMAIN (8)...(137): GTPase of unknown function
  misc_feature (1)..(389): Xaa is any amino acid
MAQTQFIRNFCIIAHIDHGKSTLADRLIQKANIVEDRNFQDQILDNMDIERERGITIKSQAVTLPYTAKDGNEYILNLVDTPGHVDFSYEVSRAINSCESALLLVDATQGVQAQTLSNMYLALEHNLEIVPVINKIDMQAADVPRVKKQIDKDLGLDAETAVLASARQGIGIDELLEAIVQRIPAPSGKTDVPLRALIFDCHYDPYRGVVVHLRLFDGKIKKGMKISFMSSGSVYEVETVGVFKLALVETDELSAGDVGYIIASIKTVSDVRVGDTVTGTDNPCPEPLPGFREVKPVVFSSIYPVDSNDYEELRASMDKLKLNDASLVFEKDSSAALGFGFRCGFLGLLHLEVIQERLEREFDQSVIFTAPSVKYKVHLEAAKKSSRPI

SEQ ID NO: 47079 - DNA, 975 bp, Unknown
  Obtained from environmental sample
  misc_feature (1)..(975): n is a, c, g, or t
ttgaggatcaaagctggttctcaaaaatattcaagcactataccggttacagtccttgtcaataccgggaaaacggaggagctattatggcaaataaaatattacaaccagggaggtgtaattaacatgaatcgcgattatcatgagtctggggtttccagaaaacgaaaggtactatcagtttatacacgggcgacaggaagcaatgtacaaatatttgataacaactttcggtcttttggggtagatgataaacccgatattgaacaaagtatatgccgatactgtactggcagcgagaattgcaaaagcaatgataattgccccgatggcaatagttgccgggaaatgcatataaaagcgattcaaaaagcgggccgcagcggcaaagcgcatgcctatcagtgtgatctgggactgctgttttggaccagcccgatttacagcgatggtgaattttcgggcgctttgcgcggttccggttatttagccaatgatgttgacaagtctgaatacgcgaaaaaatgtaacgggatgattcatcctgaagaatttatacgccgtgtttccatgcttccttcctgcgatatggaaagaattcattctctcgccgaaatgctgctgctctgcgccgaatctctttctaccggcagtgaaaattaccatgagatgctgaggcttcgttccgagcagcaggcttctctttccgctttaattgagaaactgaaaaagaaatatccggaaggatcaatgcttcccccttatccccttgataaagaacgccagcttatagcctcgctttaccgggggaataaaaaagaaacggaaaaaatacttaatgaagtgctggcagttttggtattcagcaactcaaataatttccggtatattcagatgagagtgttggagatggcggttttgcttgcccgcgccgggattaatttcggcagtaaaataccctcgtgccgaatctga

SEQ ID NO: 47080 - protein, 324 aa, Unknown
  Obtained from environmental sample
  misc_feature (1)..(324): Xaa is any amino acid
MRIKAGSQKYSSTIPVTVLVNTGKTEELLWQIKYYNQGGVINMNRDYHESGVSRKRKVLSVYTRATGSNVQIFDNNFRSFGVDDKPDIEQSICRYCTGSENCKSNDNCPDGNSCREMHIKAIQKAGRSGKAHAYQCDLGLLFWTSPIYSDGEFSGALRGSGYLANDVDKSEYAKKCNGMIHPEEFIRRVSMLPSCDMERIHSLAEMLLLCAESLSTGSENYHEMLRLRSEQQASLSALIEKLKKKYPEGSMLPPYPLDKERQLIASLYRGNKKETEKILNEVLAVLVFSNSNNFRYIQMRVLEMAVLLARAGINFGSKIPSCRI

SEQ ID NO: 47081 - DNA, 468 bp, Unknown
  Obtained from environmental sample
  misc_feature (1)..(468): n is a, c, g, or t
ttgaaacgaattgatgactcaaaaaccgctgaagaagtcaccggaaatatgcgtttgattctggatcagatggcggggaaactgttttcctttcagggtatccgccatgcgtccgcgctgcggaaagcggaacgttttatttgggaaaattaccaccgaaaaatcagtttgaaagaaattgccgatgtatcggggctttccgcgccgtacttcagcactattttcaaagaagaaatgggggaaaacctttcaacctaccttaatcggctcagggtagagaaagcctcatcaatgctgcgggaaaccgaattgcctattaacggaatctccgcggcctgcggttttgaggatcaaagctggttctcaaaaatattcaagcactataccggttacagtccttgtcaataccgggaaaacggaggagctattatggcaaataaaatattacaaccagggaggtgtaattaa

SEQ ID NO: 47082 - protein, 155 aa, Unknown
  Obtained from environmental sample
  DOMAIN (42)...(88): Bacterial regulatory helix-turn-helix proteins, AraC family
  misc_feature (1)..(155): Xaa is any amino acid
MKRIDDSKTAEEVTGNMRLILDQMAGKLFSFQGIRHASALRKAERFIWENYHRKISLKEIADVSGLSAPYFSTIFKEEMGENLSTYLNRLRVEKASSMLRETELPINGISAACGFEDQSWFSKIFKHYTGYSPCQYRENGGAIMANKILQPGRCN

SEQ ID NO: 47083 - DNA, 852 bp, Unknown
  Obtained from environmental sample
  misc_feature (1)..(852): n is a, c, g, or t
ttgaaagccgtggaagctcaggcggaaaaagaaaaagccgaagccgcatcaaaatccaaagacgaattccttgccaagatgagtcatgaaatacgcacgcccatgaacgccattatcggcatggcggagcttgctttgcgcgaagacagatatgagacttctaaagaatatatccttacgattaaacaggcgggcgcgaatcttttgtccatcatcaacgacattctggatttctcaaaaatcgagagcggtaaactggaaattgttccaatcaattatcagctttcatctttaatcaacgatacgataaacattatccgcatgaggcttattgaaaagccgatacgtttctttaccaacatagacggtaatattcccaacagccttatcggagacgagacgcggctgcgccagattttccttaatcttctgtccaacgcggtaaagtattccgaaaaaggtcatatcggttttaccattaccatggataaacgggataacaaacaggtccggctcaggataaccgtagccgataccggtaaaggtattaagaaggaggatcaggcaaaacttttcgatgaatttataaaagtggacgtaaagaaaaatcagggtattgagggaacgggactgggtttggcaattacaaaacgcctctgcgtcgccatgaacggggatataagcatggaaagcgaatacggcaaaggaagcttattcactgctgttatcccgcagggtattgagtcggaagcgccctttgcgtcggtagaagagccggagaaaaaaaatatccttgtatatgaaggcagatctgtttacgccggagcggtatgctggactctgaaaaattaa

SEQ ID NO: 47084 - protein, 283 aa, Unknown
  Obtained from environmental sample
  DOMAIN (19)...(84): His Kinase A (phosphoacceptor) domain
  misc_feature (1)..(283): Xaa is any amino acid
MKAVEAQAEKEKAEAASKSKDEFLAKMSHEIRTPMNAIIGMAELALREDRYETSKEYILTIKQAGANLLSIINDILDFSKIESGKLEIVPINYQLSSLINDTINIIRMRLIEKPIRFFTNIDGNIPNSLIGDETRLRQIFLNLLSNAVKYSEKGHIGFTITMDKRDNKQVRLRITVADTGKGIKKEDQAKLFDEFIKVDVKKNQGIEGTGLGLAITKRLCVAMNGDISMESEYGKGSLFTAVIPQGIESEAPFASVEEPEKKNILVYEGRSVYAGAVCWTLKN

SEQ ID NO: 47085 - DNA, 1401 bp, Unknown
  Obtained from environmental sample
  misc_feature (1)..(1401): n is a, c, g, or t
atgctggactctgaaaaattaaatgttccccatactttagtaactaatctggatgatttcgcctcggcgctgtaccgggaagaatggttttatgtgttttccagctacggcctttatgaaaagatcgaaccgtttatggcccgcggcggcgaggctttcagcgggggaaaaaagccgcccctggcccttatgatagaatgggggacagaagcctacatacccggcgttcgctttgtatcaatacccgcgcagtcactgtccattgccaatgtgctgaacggcaggacggacagcaaaggttatgtcaagagttccggcataatccgttttactttccccggagcgcggattcttgtggtggacgacattgcgactaaccttaaagtagtcgagggccttcttgccccctatcacgcggaagtggacacctgcctgaacggcctgcaggccatagaactggtaaaacgcggcgaatatgatgttgtattcatggatcacatgatgccggagatggacgggattgaggcggcggcgattatccgctccctggagggcgagcgttttcgcacaatgccgattgtagcgttaaccgcgaatgccgttttgggaatgcgggaaatgtttattaaaaacggcttcaatgattttctttccaaacccatagacgtttccaaactggatgaaacgcttgaccgctggatacccagggagaaaagggcgactagagaattaggaattaggaatgaggaattaggaataggggggaacaaggaaacccattcctcattattatccattcccggcgttgacatacaaaaaggcatcgccatgaccggcggaactttgtccgcttatatgcaggtattatccctgttccacaaagacgcgcaggacaggctgccgctgctgcaaaaagcgccggaggtggacgccctgcccgcctttgtcactcaggttcatgccctgaaaagcgcgtcggcaagcctgggggcgagggatgtttccgcgcaagccgccgatcttgaaaaagcgggaaaagccgcggatttagcctttatctacgaaaatctgcccgtttttacacaacagcttgcgaaactggttcgcgctattgagaaagccctggaaaccaaagaaccggaaaaacaggaaccccttgactcttcattcctcattgcccattcttcattaatagaagaacttgccggggctctgaaagcccagaagtccgccgacattgaccgaattctggaagaacttatgcggcagccgatgaatcccggcataaaagcggcgttggaagaaatttccgacgaagtactgatgactgagtttgataaggccctaaaaatcgcagacagcttgctggtgcgaaaagaagaaacaggggcgatgaaatga

SEQ ID NO: 47086 - protein, 466 aa, Unknown
  Obtained from environmental sample
  DOMAIN (287)...(374): Hpt domain
  misc_feature (1)..(466): Xaa is any amino acid
MLDSEKLNVPHTLVTNLDDFASALYREEWFYVFSSYGLYEKIEPFMARGGEAFSGGKKPPLALMIEWGTEAYIPGVRFVSIPAQSLSIANVLNGRTDSKGYVKSSGIIRFTFPGARILVVDDIATNLKVVEGLLAPYHAEVDTCLNGLQAIELVKRGEYDVVFMDHMMPEMDGIEAAAIIRSLEGERFRTMPIVALTANAVLGMREMFIKNGFNDFLSKPIDVSKLDETLDRWIPREKRATRELGIRNEELGIGGNKETHSSLLSIPGVDIQKGIAMTGGTLSAYMQVLSLFHKDAQDRLPLLQKAPEVDALPAFVTQVHALKSASASLGARDVSAQAADLEKAGKAADLAFIYENLPVFTQQLAKLVRAIEKALETKEPEKQEPLDSSFLIAHSSLIEELAGALKAQKSADIDRILEELMRQPMNPGIKAALEEISDEVLMTEFDKALKIADSLLVRKEETGAMK

SEQ ID NO: 47087 - DNA, 1128 bp, Unknown
  Obtained from environmental sample
  misc_feature (1)..(1128): n is a, c, g, or t
atgaccgcaccgcaacgtgtcaatgccgtcgtcggcgcaagtgccggcgcgttaataacggttgtttttgtgatgctgacggccgtgcgcgccgcgtactgcgcaacgccggcaagggttttcgtcccagcctcccacccgtccgtccgttacgtcgggcgcattgacaggcggcacccgtcggacgtccgctttgactggcccggggtcgccgttgaaacgcgctttcagggcgcctcctgcgatgtgttgattcgcggcgacggcgggctatacgatatttccgtcgataatgttcttacggtgcggcggtttgataccatggagacggtgcgctcgcttgcctcagggcttgccgattctatacacagcctacggattgtcaagcgcacggagggattgcgcggacggatcgtcacgctgaaaggtttttacgtggacgcaggtaagtcgctattgccgccgcttggagccatgccctcgcggcggatcgagtttatcggcgggtcgaacctgctgggattcggcgtggaggccgatacggtatggtgcgacacgccctccaatttttccaacccgtccctctccttcggcgccgtggccgccaagacggtcggcgccgagtgccgcgtgcaggcgatttccggcaaagggctggtgcgaaattggatgtcgccctacttcgccgcgacacgccccttcgggccgttctaccgccgcgcattgaagaacgacaccgccgccgtatgggacttcaagtcgtgggttcctcaggcggtggtcacctgctttgggacgaatgacttttcaacgcgcccgtacccgaccaaggcgctgttcatccaaagttacaggagctttttggacggcgttcgggagcgttacccgaacgttcagatagtctgcgtaacctcggcgcgggagccggtgcgggaatacgtgcgggagcttgtggagatagaacgggagggcgggaacgaccgcatacacttttactcgtttggggaggtgccgaaaaaacaatgcgggtgcgactggcatcctaacgcgggggcgcatgaaaagattgggagggagttggcggaaattatcaggcctttgttgagcggggttggggttngaacttaa

SEQ ID NO: 47088 - protein, 375 aa, Unknown
  Obtained from environmental sample
  DOMAIN (164)...(360): GDSL-like Lipase/Acylhydrolase
  misc_feature (1)..(375): Xaa is any amino acid
MTAPQRVNAVVGASAGALITVVFVMLTAVRAAYCATPARVFVPASHPSVRYVGRIDRRHPSDVRFDWPGVAVETRFQGASCDVLIRGDGGLYDISVDNVLTVRRFDTMETVRSLASGLADSIHSLRIVKRTEGLRGRIVTLKGFYVDAGKSLLPPLGAMPSRRIEFIGGSNLLGFGVEADTVWCDTPSNFSNPSLSFGAVAAKTVGAECRVQAISGKGLVRNWMSPYFAATRPFGPFYRRALKNDTAAVWDFKSWVPQAVVTCFGTNDFSTRPYPTKALFIQSYRSFLDGVRERYPNVQIVCVTSAREPVREYVRELVEIEREGGNDRIHFYSFGEVPKKQCGCDWHPNAGAHEKIGRELAEIIRPLLSGVGVXT

SEQ ID NO: 47089 - DNA, 489 bp, Unknown
  Obtained from environmental sample
  misc_feature (1)..(489): n is a, c, g, or t
ttgatggaaaacaacgataacgagattattcaatatatagaacccatactgcattattgcattaaacggctgaacaaccgccaggacgccgaggacctggcgggcgaaataatggttcacatattaagcggcataaggaaatacaaaattgattcgcttgaaaaatggatatggagtatcgcgcataatcgttacgcgaaatatatagacaaaagaaataaaaccaattatacggaaacggatgccgattacgctgaaatcgcggacacttatgattttatcgaccaattaataatttcaaacaggtatcaaaatgtgtttaaggcgcttcatgcgctttcaggcgagtatcgcgatattttggttgattattatgttaatgagttttctgttaagcagattgccgggaaatttaaattgccggaaactacggttaaatggcggcttaatgcggggagggggaagattaggggggaggtatatttataa

SEQ ID NO: 47090 - protein, 162 aa, Unknown
  Obtained from environmental sample
  DOMAIN (103)...(156): Sigma-70, region 4
  misc_feature (1)..(162): Xaa is any amino acid
MMENNDNEIIQYIEPILHYCIKRLNNRQDAEDLAGEIMVHILSGIRKYKIDSLEKWIWSIAHNRYAKYIDKRNKTNYTETDADYAEIADTYDFIDQLIISNRYQNVFKALHALSGEYRDILVDYYVNEFSVKQIAGKFKLPETTVKWRLNAGRGKIRGEVYL

SEQ ID NO: 47091 - DNA, 324 bp, Unknown
  Obtained from environmental sample
  misc_feature (1)..(324): n is a, c, g, or t
gtgttcggcgagccagccttcgtcgcgggcaagtaccgacgctatgcgcagcgcgaggcactttttgccgagcagggcgtttccgccgtagccggaaccgtaagaccagatttcccttgtttcggggaagtggctgatgtatttgtgttcaagcggggcgcagggccatttgccgttgtcgctttctccggcggcaagaggcttgcctatagaatggaaacaaggcacataaaaaccgtcgcttccaagcacatccagaacctttgttcccactctggtcataatgtgcatattaacgactacataggcgctgtctgtaattga

SEQ ID NO: 47092 - protein, 107 aa, Unknown
  Obtained from environmental sample
  misc_feature (1)..(107): Xaa is any amino acid
MFGEPAFVAGKYRRYAQREALFAEQGVSAVAGTVRPDFPCFGEVADVFVFKRGAGPFAVVAFSGGKRLAYRMETRHIKTVASKHIQNLCSHSGHNVHINDYIGAVCN

SEQ ID NO: 47093 - DNA, 1401 bp, Unknown
  Obtained from environmental sample
  misc_feature (1)..(1401): n is a, c, g, or t
atgcacattatgaccagagtgggaacaaaggttctggatgtgcttggaagcgacggtttttatgtgccttgtttccattctataggcaagcctcttgccgccggagaaagcgacaacggcaaatggccctgcgccccgcttgaacacaaatacatcagccacttccccgaaacaagggaaatctggtcttacggttccggctacggcggaaacgccctgctcggcaaaaagtgcctcgcgctgcgcatagcgtcggtacttgcccgcgacgaaggctggctcgccgaacacatgctcatcttaaaattaaccaaccccaagggcgaggttaaatatgttacaggcgcccttccctcggcatgcggcaagacaaaccttgccatgttacagcccacccttcccggctggaaagtcgagaccgtaggcgacgacatcgcgtggatgaaattcggagcggacggcagactgtacgcgatcaatcctgaagctggattcttcggcgtcgcgcccggaacaagcgatcaatcaaactacaacgcgatgagggcaatcgagaagaattcaatatttacaaactgcggtcttaccgaagacggagacatctggtgggaacagatcggccacggcgctcccggcaaaacaatcatcgactggaagggaaatgaaaaacccgctccccagaacgacaaagccgtgaagggcgaagagatcgcccatcccaacgcccgctttacggcgccggctaaacaatgccccgtaatcgcttccgagtgggaagacccgaaaggcgtgccaatcagcgcgttccttttcggcggacgccgcgcgtcaactatccctctcgtaaaccagagcaagaactgggtacacggcgttttcatgggctcgatcaccggctctgaaatcacggccgccgcactcgatcttaaagaaggttccgtccgccgcgacccgttcgccatgctgccgttctgcggttaccacatgggcgactacttcagccactggctcaaactcggcaagaaagcgcaggacgaaggacacggcgacaaactcccgaagattttctttatcaactggttccgcaaagataaagacggtcatttcatgtggcccggttacggcgagaactcccgcgtgctcgcgtggattttcgaccgctgcgacggcaaggacaactttgttgaaaccgctatcggcttcctgcccaaacccggcgcgattgaaccgcccgcgggcgtaagcgcggatactatggcgctgttaatctccgcggacaaagacggctggaagaaagaaatttcagacgtgcgcgagaatcattacgcgaagttcggggataagatgcctaaagagttgtatgatcatttggcggagatggagaagaatctcggcgcataa

SEQ ID NO: 47094 - protein, 466 aa, Unknown
  Obtained from environmental sample
  DOMAIN (1)...(464): Phosphoenolpyruvate carboxykinase
  misc_feature (1)..(466): Xaa is any amino acid
MHIMTRVGTKVLDVLGSDGFYVPCFHSIGKPLAAGESDNGKWPCAPLEHKYISHFPETREIWSYGSGYGGNALLGKKCLALRIASVLARDEGWLAEHMLILKLTNPKGEVKYVTGALPSACGKTNLAMLQPTLPGWKVETVGDDIAWMKFGADGRLYAINPEAGFFGVAPGTSDQSNYNAMRAIEKNSIFTNCGLTEDGDIWWEQIGHGAPGKTIIDWKGNEKPAPQNDKAVKGEEIAHPNARFTAPAKQCPVIASEWEDPKGVPISAFLFGGRRASTIPLVNQSKNWVHGVFMGSITGSEITAAALDLKEGSVRRDPFAMLPFCGYHMGDYFSHWLKLGKKAQDEGHGDKLPKIFFINWFRKDKDGHFMWPGYGENSRVLAWIFDRCDGKDNFVETAIGFLPKPGAIEPPAGVSADTMALLISADKDGWKKEISDVRENHYAKFGDKMPKELYDHLAEMEKNLGA

SEQ ID NO: 47095 - DNA, 396 bp, Unknown
  Obtained from environmental sample
  misc_feature (1)..(396): n is a, c, g, or t
gtgttcaacgtaaaccacgggcataatcccgtaatattaaaaaagagcgagactctgaataactacagtatgtttatagggaaaatacgtgaatgccagaaagaggaagattcacttgaaaaagcggtccgatctgcgataatatactgtataaagaacaatatactaaaggaatatttggaagcccatgcttcggaggtgttaaatatgttgttgacggaatggaaccaggatgaggcggtagaagttgcccgcgaagagggaagagaagaaggtcgcgaagagggacgcgaggaagggcgcgaggaagggcgcgaggaagggcgtgaggaaatacttaacctttttgaacagggattgtcaattgatgaaataaaaggacggttaaagagataa

SEQ ID NO: 47096 - protein, 131 aa, Unknown
  Obtained from environmental sample
  misc_feature (1)..(131): Xaa is any amino acid
MFNVNHGHNPVILKKSETLNNYSMFIGKIRECQKEEDSLEKAVRSAIIYCIKNNILKEYLEAHASEVLNMLLTEWNQDEAVEVAREEGREEGREEGREEGREEGREEGREEILNLFEQGLSIDEIKGRLKR

SEQ ID NO: 47097 - DNA, 1092 bp, Unknown
  Obtained from environmental sample
  misc_feature (1)..(1092): n is a, c, g, or t
gtggcccctgacgcggttatgccggcggttgtcgccggtatggggccggacgccgcgctgaccgtgcctcagattgatccggtgaattatgccgtccgccatgccgcgcttgacctttcaaaattaaaagactttgaagcgctgacgcgggagttttcttccagcgtcctcgtgccgtttcgctacgccggcggggtgtacggccttccggaaacccagtacttccatgttatgttttaccgcaaggatatttttgcggaactgaatatcgccgttcccgaaacatgggacgatctgatcggcattttacccattattcaaaagaacaacatgaacgtgggaatcccctcggtggctacgacagagcaggccaatattgatttttccaatttcctggcccatttgtaccagcgcaaaggcagcctgtacaacgaaaacggctcccgcactttgctgtccggcgagacggccatcgaagcctttgatgtctatacgaaattttttacccattataaaacgccggtagtgtttaattttttaaaccgttttcgtaccggcgaaatgcccctgggctttgccgattacaccaactttaacacgttggaagtttttgcgccggaactgcgcggtctctggggcttcgcccgtatgcccgggctgcggcaggacgacggcagcgttaaccgctcggtgcccacgggaaccctcgcctcgatgattttttccaacgcgaagagaccggaacttgcctgggaatttttaaagtggtgggtcagcgccgatacccagctccgctttggccgcgagcttgaaagcgtcatgggcgcggcggcgcgttatcccacggcgaattataacgcttttacgcggctttcctggggctcggagcaaatggcggtgctgagggaacagcgttcctggacggtgggtacgccggaagtgccgggcggttactacgtcagccgtcatataaccaacgcggtgcgccgtatactgaacgagggcgaggatacgcgggaaactctgctggattacagcataacgatagatgacgaactgataaagaaacgcaaggaattcgggttggagtag

SEQ ID NO: 47098 - protein, 363 aa, Unknown
  Obtained from environmental sample
  DOMAIN (5)...(264): Bacterial extracellular solute-binding protein
  misc_feature (1)..(363): Xaa is any amino acid
MAPDAVMPAVVAGMGPDAALTVPQIDPVNYAVRHAALDLSKLKDFEALTREFSSSVLVPFRYAGGVYGLPETQYFHVMFYRKDIFAELNIAVPETWDDLIGILPIIQKNNMNVGIPSVATTEQANIDFSNFLAHLYQRKGSLYNENGSRTLLSGETAIEAFDVYTKFFTHYKTPVVFNFLNRFRTGEMPLGFADYTNFNTLEVFAPELRGLWGFARMPGLRQDDGSVNRSVPTGTLASMIFSNAKRPELAWEFLKWWVSADTQLRFGRELESVMGAAARYPTANYNAFTRLSWGSEQMAVLREQRSWTVGTPEVPGGYYVSRHITNAVRRILNEGEDTRETLLDYSITIDDELIKKRKEFGLE

SEQ ID NO: 47099 - DNA, 591 bp, Unknown
  Obtained from environmental sample
  misc_feature (1)..(591): n is a, c, g, or t
atgagtttagcgcggtatacggcaaaaaagaaaacggccttttcgcatctgttaaaagaaatagcaaaaagccgcgtgtgctatatttttctcgccccttatgcgatagtctttgccctgttctttatcgcgccgctggtggtttcggtgttttacagttttacctattttaatattctggagccgcccaaatatatcggcctgcgcaattatatcaaccttctgttaggcgacgacgtgttcctcaaggcgctgaaaaacacctttatcatggcggcgataacaggcccaatcggttatattttttcattcctgttcgcctggtttatcaatgaactgccccgctatatccgcgccgtggtaacgcttgttttttacgcgccctcaatttccggagcggtgtacatgatatgggcgatcattttctccggcgacgcctacggctacatcaacgggcttttgctgaatctgggcattctggatcagccgctgctctggctgaccgatcccaggtacatgatgccggttatgttagttgtcattttatggatgagtctgggaacggggttcctggcttttatagccggttga

SEQ ID NO: 47100 - protein, 196 aa, Unknown
  Obtained from environmental sample
  misc_feature (1)..(196): Xaa is any amino acid
MSLARYTAKKKTAFSHLLKEIAKSRVCYIFLAPYAIVFALFFIAPLVVSVFYSFTYFNILEPPKYIGLRNYINLLLGDDVFLKALKNTFIMAAITGPIGYIFSFLFAWFINELPRYIRAVVTLVFYAPSISGAVYMIWAIIFSGDAYGYINGLLLNLGILDQPLLWLTDPRYMMPVMLVVILWMSLGTGFLAFIAG

SEQ ID NO: 47101 - DNA, 513 bp, Unknown
  Obtained from environmental sample
  misc_feature (1)..(513): n is a, c, g, or t
gtgcgcgcctatctgaatgatactaacgaatatatactccaaaatgaaggtaaaccactattgggctttggcggcattttcggttgttttaacatattcggcggagaaatgcttgacggtcaggatcgctatataccggaagattatgaacccgcggaacagccatggtacaaggaagccgcggcggcgggcggcgaaatagtatatttacctccccataccggggaattaacgcctgttgccgtcattacctacgcgcgcggtttatttgataataacggaaaactgctgggcgcgattgccatggacacagagtttaaaaggatcagggaatatattgtcaatgagaatttagaaaaattgtggttaggaatcttattaaacgaacagtatgaatatatttcccaaagaaaccctgaaatggaaggtaaaaaatttggagacgatagcggcgacgccgcaggctcgtggctgaacttaaattgggacatgatgtttccgaattcaggatga

SEQ ID NO: 47102 - protein, 170 aa, Unknown
  Obtained from environmental sample
  misc_feature (1)..(170): Xaa is any amino acid
MRAYLNDTNEYILQNEGKPLLGFGGIFGCFNIFGGEMLDGQDRYIPEDYEPAEQPWYKEAAAAGGEIVYLPPHTGELTPVAVITYARGLFDNNGKLLGAIAMDTEFKRIREYIVNENLEKLWLGILLNEQYEYISQRNPEMEGKKFGDDSGDAAGSWLNLNWDMMFPNSG

SEQ ID NO: 47103 - DNA, 885 bp, Unknown
  Obtained from environmental sample
  misc_feature (1)..(885): n is a, c, g, or t
gtggctgaacttaaattgggacatgatgtttccgaattcaggatgaaaaataatcaaaatgtcaattcaatcgtttttatccgaaaactggataacggctggcatcttggcattgtaacgccggagaaaatatattttgaggaactcagaagaataagagctttaataatatttttggtaattgtactgtcggtagtatttactattctcatactccgcgctttattagagaaaaaaaaggtcagcgcgacgacaatatcaaaaatagaaaatatttctttccactctctgaatacatgttttctgctgctactttcttttatcactttgtatcctttctggacaacaattgccgtgtcattcaatgacgcgctggactcgatccgcggcggcattacttttttccccagaaaattcagcctttttaattatgaagtaattttccggacaggggctattccccacgctttctttatttccgtcgcaaggacttcgattaatctggttacaagcgtgttttttactgcaatgatcgcttttgccctttcccggcgtgaatttatattatcaaaaccttttacgtttattttggtgctttccatgtatattaacgcgggccttattcctacatttttactaatcaggaatcttggcatgtacggaacattctgggtatatatagtcccgggaattgtaaacgcgtttaattttgttgtaatgaggacatatatgcgcactattccggaaagcatcattgaatccgcgcgtattgacggttacggggatttttatatatttatccgtattgtttttcctttatgcctgcccggttcttgcaacaatagggctttttgtcgccgtaggttcatggaacgcgtggtttga

SEQ ID NO: 47104 - protein, 294 aa, Unknown
  Obtained from environmental sample
  misc_feature (1)..(294): Xaa is any amino acid
MAELKLGHDVSEFRMKNNQNVNSIVFIRKLDNGWHLGIVTPEKIYFEELRRIRALIIFLVIVLSVVFTILILRALLEKKKVSATTISKIENISFHSLNTCFLLLLSFITLYPFWTTIAVSFNDALDSIRGGITFFPRKFSLFNYEVIFRTGAIPHAFFISVARTSINLVTSVFFTAMIAFALSRREFILSKPFTFILVLSMYINAGLIPTFLLIRNLGMYGTFWVYIVPGIVNAFNFVVMRTYMRTIPESIIESARIDGYGDFYIFIRIVFPLCLPGSCNNRAFCRRRFMERVV

SEQ ID NO: 47105 - DNA, 567 bp, Unknown
  Obtained from environmental sample
  misc_feature (1)..(567): n is a, c, g, or t
atgttgaatgaataccactgctggctgcagcgacgaaccgttataaattccgcgaatatggtttttcaagacttagctctatcatccgtgtatgcacaagaaggctcggtttttcaaaccgaggtttttcaaaccgacgaagtcgccgtccaggcaagtagagaattctgccgggggatagagcgtctgctgggtttttcccccacggtgtatacgttatccgtcggggcaggaaaaaacgccggcgtgtatctgggaactatttccgttctggaaaaacagtttcagctttcggcgggaaacatggcagccggcatggccgccggcggcttagcagccggcggctttatcataaagacaatagagaataatctgattattgccggacaggatgaggaggggcttttgtacggcgtatttcgcttcctctcgctgctggcgttaggtgatatagaaggcagtcttgacataagagaagaaccggcctctccgctgcggatcatcaaccactgggacaaccttgacggcactttgagcggggctatgcgggtctctcggccaatctga

SEQ ID NO: 47106 - protein, 188 aa, Unknown
  Obtained from environmental sample
  DOMAIN (7)...(142): Glycosyl hydrolase family 67 N-terminus
  misc_feature (1)..(188): Xaa is any amino acid
MLNEYHCWLQRRTVINSANMVFQDLALSSVYAQEGSVFQTEVFQTDEVAVQASREFCRGIERLLGFSPTVYTLSVGAGKNAGVYLGTISVLEKQFQLSAGNMAAGMAAGGLAAGGFIIKTIENNLIIAGQDEEGLLYGVFRFLSLLALGDIEGSLDIREEPASPLRIINHWDNLDGTLSGAMRVSRPI

SEQ ID NO: 47107 - DNA, 846 bp, Unknown
  Obtained from environmental sample
  misc_feature (1)..(846): n is a, c, g, or t
ttggatataaaccttgagggaaggctattcatcagggacgagagcggcaacttattcgcggaactgcgaaaatttcgcgggcgggcgattgagttgggaatgccgccggggaaatattcaatacagatggagacgccgtcgcggatgtggatggcgggcggagtggagattgtggcgggaacgaagacggcacttaatatgaacgatatgaaggcgatggagagaaagacgggcgttgcgcgagggagcgacggcggggttgacggcgttgacggtaatgatattattgataccgccgataatattgacataatcgacagtatcgatatagccgccgaatcaacgggatcaaccgaatcggcaatatcaacggtatcaaaggcgacggattcatcaacgcaaaatccgccgacaaaagtattgacaaacccgttgctcgactcggcctgccgcaatccgtaccgtatgaacttcaacttcttcacgagcgtcagcgcaaaaccggagagcggaactcagttatcagtccttgcaaataccgctggcgcggaattctgcgggacgcaaatatccggcattgccaacatcgccgcgaaggatatgaacggcacacagatcgcctctaccctcaatatcgccgcggagcgctttaacggggcgcagatatctacaatcaacatgatgaacagcggcaacgccatacaagccggcgttgtcaatatcgctaaagacgcgggatatcttcaagccggcaacataaacgtcgctaaaggagacgcgggctatctccaagccggcgtctttaatatcgcgggacgcgtaggatacgtccacccggcgtcttga

SEQ ID NO: 47108 - protein, 281 aa, Unknown
  Obtained from environmental sample
  misc_feature (1)..(281): Xaa is any amino acid
MDINLEGRLFIRDESGNLFAELRKFRGRAIELGMPPGKYSIQMETPSRMWMAGGVEIVAGTKTALNMNDMKAMERKTGVARGSDGGVDGVDGNDIIDTADNIDIIDSIDIAAESTGSTESAISTVSKATDSSTQNPPTKVLTNPLLDSACRNPYRMNFNFFTSVSAKPESGTQLSVLANTAGAEFCGTQISGIANIAAKDMNGTQIASTLNIAAERFNGAQISTINMMNSGNAIQAGVVNIAKDAGYLQAGNINVAKGDAGYLQAGVFNIAGRVGYVHPAS

SEQ ID NO: 47109 - DNA, 576 bp, Unknown
  Obtained from environmental sample
  misc_feature (1)..(576): n is a, c, g, or t
gtgcagccggcatactggccgatttactggggtgtaaataataatgacattgggaaaatcaagaccggggccatgctgcatgacatcggcaaaatcggcatacctgtccatattctggaaagtacggaaaaattgaatgaggctgacatggggatcatgagggggcatgtggaaattacggaaaaaataatagaaggaaatgtacatgatgatataaagcatatagccgtcaaacaccatgaaaaactggatggttcaggctaccacaaaaggttaagcggtatcaatattgctttgtttgaccgtattgtcgcggtagccgatattttcagcgcgttatacgggacaagaagctacaagggcgcgttttcaaaagagagggtagtcggcatattgagcgatatgagcggtaaaaaccttatagacccgggaataacctcattagccataaaaaatttcgataaaattaccgaagcgatagacatggattccatgccggttatacaagcttacaacgctatgaacgaggaatacatcagaataagaaaagacattaatagttgggttcaggcttga

SEQ ID NO: 47110 - protein, 191 aa, Unknown
  Obtained from environmental sample
  DOMAIN (9)...(113): HD domain
  misc_feature (1)..(191): Xaa is any amino acid
MQPAYWPIYWGVNNNDIGKIKTGAMLHDIGKIGIPVHILESTEKLNEADMGIMRGHVEITEKIIEGNVHDDIKHIAVKHHEKLDGSGYHKRLSGINIALFDRIVAVADIFSALYGTRSYKGAFSKERVVGILSDMSGKNLIDPGITSLAIKNFDKITEAIDMDSMPVIQAYNAMNEEYIRIRKDINSWVQA

SEQ ID NO: 47111 - DNA, 849 bp, Unknown
  Obtained from environmental sample
  misc_feature (1)..(849): n is a, c, g, or t
gtgcttctgacaatacgggaaccaatcggtattgtggcctgtgtgattcccttcaacttcccctgcgatctttttgatcagaaggtagcgcccactctgctcgcgggtaatgccgcaatcgtaaagccttcaacggataatcccctgactctctgcatgctcaccgatctattggtaaaggccggggtaacggatggcgctattcagatcctgacaggcaggggcagccgtgtaggtaactggctttgcaagcacccggacattcatgccatcaccctgacaggctcgaccgaagtgggcatcgaaacctacaagaacgcagcgaaccacctggcgcatatcgctttggaacttggcggcaacgacgccttcatcgtatggaaggatggcgatgtagaccttgcggtagaggaaacgatctggggaaggatgtacaacacaggccaggtttgctgcgcctccaaacgcttcctgatccacaacagtctcaaggaagacttcgccaaaaaacttgttgatcggatcaagaaaatcaagctgggagacccggcagacgatgccacgcagctcggctgtcttatcagtgaaaaagccgcgatagaggtcgagaggcaggtgaacctcaccgtttctcagggcggcaagatcatcctgggcggcaagcgtaatggcgcgttctatgaacccacggtaatcgttgacgtgcccaagtcagcggacgttgccaaagacatggagatcttcggcccggtggtacgnatcacgggctttgataccctgaagaaagcggtggagatcgccaactcctccaattcggactctgcggctgtatcttttcctcggacatga

SEQ ID NO: 47112 - protein, 282 aa, Unknown
  Obtained from environmental sample
  DOMAIN (2)...(282): Aldehyde dehydrogenase family
  misc_feature (1)..(282): Xaa is any amino acid
MLLTIREPIGIVACVIPFNFPCDLFDQKVAPTLLAGNAAIVKPSTDNPLTLCMLTDLLVKAGVTDGAIQILTGRGSRVGNWLCKHPDIHAITLTGSTEVGIETYKNAANHLAHIALELGGNDAFIVWKDGDVDLAVEETIWGRMYNTGQVCCASKRFLIHNSLKEDFAKKLVDRIKKIKLGDPADDATQLGCLISEKAAIEVERQVNLTVSQGGKIILGGKRNGAFYEPTVIVDVPKSADVAKDMEIFGPVVRITGFDTLKKAVEIANSSNSDSAAVSFPRT

SEQ ID NO: 47113 - DNA, 1062 bp, Unknown
  Obtained from environmental sample
  misc_feature (1)..(1062): n is a, c, g, or t
ttgaaaactaggagttgcactagcggtgtgacaaagactgaaattgaggctatacctcagcttgaatggagcgattggtcagtgacaaccccagcaacctgcgatgctaaaggcgttgaaacaaggacttgcccaggcaatgcctctgctccacaaacacgctctatcatacctcagcttgaatggagcgattggtcagtgacaaccccagcaacctgcgatgctaaaggcgttgaaacaaggacttgcccaggcaatgcctctgctccacaaacacgctctatcatacctcagcttgaatggagcggctggtcagtgacaacccctgcaacttgtgcaacagcaggcttggaaacagcgacttgctccaatggcgattccaaaactcagccgatagctaaacttgaatacgaccaagcaaagtatgaatgcagaaccgataagatatatttaaaaaacggacttacagacagcagggataataacaagcattacgaggcagttttgataggtactcaaacttggatggcggagaatttgaactacgaagtaaatggcagtaaatgctatacaaacctagaagcatactgcggaatctacggtaggttgtacaattggtcaacggctatggctattgattccacatacaattccacttcatattcagcgacagcaaagcacacaggagtttgcccctcgggctggcatattccaagcgatgcggagtggggcactttgatgaaattcgtcaatccgaattgctctctcacaagtgatgattgcgattttgctggtatgctcttgaaagatagtattggttggaatagcggaaatggcacagatgcctatggtttttcggctctgccgggcggctacggcgattccgatggtagtggtagttttaaaggtattggaaccgatggtaattggtggagtaccagtgaggtaaatagcaacaatgtttactatcggactgcgtatcacaactctaatcgcatcggcaggtacaactatagcgacagtaagtctggtcttcgtagtattcgttgcgtgaagaattaa

SEQ ID NO: 47114 - protein, 353 aa, Unknown
  Obtained from environmental sample
  misc_feature (1)..(353): Xaa is any amino acid
MKTRSCTSGVTKTEIEAIPQLEWSDWSVTTPATCDAKGVETRTCPGNASAPQTRSIIPQLEWSDWSVTTPATCDAKGVETRTCPGNASAPQTRSIIPQLEWSGWSVTTPATCATAGLETATCSNGDSKTQPIAKLEYDQAKYECRTDKIYLKNGLTDSRDNNKHYEAVLIGTQTWMAENLNYEVNGSKCYTNLEAYCGIYGRLYNWSTAMAIDSTYNSTSYSATAKHTGVCPSGWHIPSDAEWGTLMKFVNPNCSLTSDDCDFAGMLLKDSIGWNSGNGTDAYGFSALPGGYGDSDGSGSFKGIGTDGNWWSTSEVNSNNVYYRTAYHNSNRIGRYNYSDSKSGLRSIRCVKN

SEQ ID NO: 47115 - DNA, 1446 bp, Unknown
  Obtained from environmental sample
  misc_feature (1)..(1446): n is a, c, g, or t
atggacagattggccgagtttctgggtgctttcggcaagctaaggccatgctttaatcttctaaggattcttttcgaacttgggggaaatgccnggggacgcnngctggttttaaaatccataaaggcggatgttcaaagcggaacgtggaagggaattgaacaggccatatcggatagtagcttcgcttcgattgtgggttcagggaacgcgcctcttcttgcatacatttataaaacgctcaatgcgctggtttggggcgacagcgttgaaatcaggcaggcttttcaggaggcagttccgtctgtaacaacggcggacggagtgccttgttacataggttatcaggctcaaatgcagatcaacctgacgtctttttatatcggcagccgggaaatcgatgccgcatcggaaactgtccgaggggctctgcttcttaaccgcgatctgaaagatgataaggttccggcctacaggcttttttctgttttaaatttatcacgacagcgtattgacgacgccatggaatacatttcttttgcgttggagcaagccgagaaagccggacaacaggaagaaatatttcttgcctgttattttgcttcttccattaatttgctcaaaggaaatctgtccaagtcgctgcgccttgccgcgaaggcggaagaaaccgcattttccgttgaatatgtaaattggggcatgagggcgaggtttcttcgcgccaggctttactttgagattggccgctacaatgaagctttggatatctttaaatctattccttccgaaagcggaacagatatggaacgtaccgttgaagcatggatctacagaacgaagaattttttgaaccccttttcagctctgaaagaaaatgctgaattctccggttctgatgcaaaaatttttgaaatagaagcggcgtactttttttccgattacaaaagggccgaagctttggcagaggagtttttgtcatccgttgttcccccaccggataatttctttttcaccgaacagccggactggagaagtgggtttacccagtgcgagtatatgtttcaaagcgatgagaagccgggggcaaggctggtacagatatacagatctatggcccaatgcgcccttaatctgtccggcgagacgcgcaaagaaattttgggcaggatgcagcgttttatgagggatgaacttctgcctgacaccgatcccagcgacacggtctatttttatgcgtggtatcgtatgctcaccgattccctgaatcgcaaggactcaccggcaacgcaggtggatctgaacacggtcgtaagtatggcgttcaaacggcttcagcgccgcgcaggcaaaatcgacgatccggaaataaaacaggcgtttctgagcttgccccgatggaacaacgctttgtatcaggcggcaagggagcataggctgatttag

SEQ ID NO: 47116 - protein, 481 aa, Unknown
  Obtained from environmental sample
  misc_feature (1)..(481): Xaa is any amino acid
MDRLAEFLGAFGKLRPCFNLLRILFELGGNAXGRXLVLKSIKADVQSGTWKGIEQAISDSSFASIVGSGNAPLLAYIYKTLNALVWGDSVEIRQAFQEAVPSVTTADGVPCYIGYQAQMQINLTSFYIGSREIDAASETVRGALLLNRDLKDDKVPAYRLFSVLNLSRQRIDDAMEYISFALEQAEKAGQQEEIFLACYFASSINLLKGNLSKSLRLAAKAEETAFSVEYVNWGMRARFLRARLYFEIGRYNEALDIFKSIPSESGTDMERTVEAWIYRTKNFLNPFSALKENAEFSGSDAKIFEIEAAYFFSDYKRAEALAEEFLSSVVPPPDNFFFTEQPDWRSGFTQCEYMFQSDEKPGARLVQIYRSMAQCALNLSGETRKEILGRMQRFMRDELLPDTDPSDTVYFYAWYRMLTDSLNRKDSPATQVDLNTVVSMAFKRLQRRAGKIDDPEIKQAFLSLPRWNNALYQAAREHRLI

SEQ ID NO: 47117 - DNA, 933 bp, Unknown
  Obtained from environmental sample
  misc_feature (1)..(933): n is a, c, g, or t
atggaaattgacaatgaaatcgaacaaatcgccgccgaattactcagtgattttcaaaagaagcgcgatgtcgccaaacagccggtaaaatcagtcatagtcgatataatcggcaaactacagcacctcctgtttccgggaatttttgaaagcgttttaaccggcggctcggtaaaaaataaactcaacgtcatgctggaagaagtttccgatgatttggccgcgcagacaagattggctctgcgttatgatctgcgctataaagataccgaacaggacgagattgacaaaatagcgtgggatataacgcgccaatttatcctgaagattccgcaaattaaagattatcttgaaaaagatattgaagcggcgtacagcggggatcccgccgcgtacagcaaggcggaaatcgtaatatcgtatcccggcatttacgccacaatgatatacaggatagcgcatgaactgtatttgctgtccgtgccgcttatcccaagaattatgagcgaatacgcgcacagcgctaccggcattgacattcatcccggcgcgacgataggcaaatatttttttatagatcacggcacaggtatagttataggagagaccgccgttatcggaaataatgtaaaattatatcagggagtaacgctgggcgctttgtccacaaaaggaggccagggaataaagggcgttaaacgccatccgaccataagcgataatgttacgatatactcaggagccagcattttgggaggggacaccattataggcgaaggcgtggtaataggcggaaacgcttttgtaatacggtctgtaccggagaaaacccgcgtaagcgtaaaaaatccagaattgcagtataagtcaagcggtaatatttcctctcatatagaattagaccagcttgatttctggcattacgagatttag

SEQ ID NO: 47118 - protein, 310 aa, Unknown
  Obtained from environmental sample
  misc_feature (1)..(310): Xaa is any amino acid
MEIDNEIEQIAAELLSDFQKKRDVAKQPVKSVIVDIIGKLQHLLFPGIFESVLTGGSVKNKLNVMLEEVSDDLAAQTRLALRYDLRYKDTEQDEIDKIAWDITRQFILKIPQIKDYLEKDIEAAYSGDPAAYSKAEIVISYPGIYATMIYRIAHELYLLSVPLIPRIMSEYAHSATGIDIHPGATIGKYFFIDHGTGIVIGETAVIGNNVKLYQGVTLGALSTKGGQGIKGVKRHPTISDNVTIYSGASILGGDTIIGEGVVIGGNAFVIRSVPEKTRVSVKNPELQYKSSGNISSHIELDQLDFWHYEI

SEQ ID NO: 47119 - DNA, 690 bp, Unknown
  Obtained from environmental sample
  misc_feature (1)..(690): n is a, c, g, or t
ttgtcttattatgaacattgcagggaaaacggggttgtacataaacttgtgcttgatcaaaacggcgacattgcggcatggaccgatactccgtccggcggtgaaatatcgtatgatctggatattgttaccattacggaagactttattaaaaagcatcccgatttttctatccgaggggcaaagggcattatcgcgcttacgggatacgaaggaatattgggatatcagactcaggccgaaaagtcaaatgctcccggttatcaaaaagaaatagaagacgccattataatagtaaataaactaaagaaactgggatggcgtatcgcgtcgcacagttggggacatttaaatatgccaaaagtgcctatgtcatggtttttatatgacaataagttatgggataaggaagtaaaacacatcctgggcgagaccgatctttacatatatccttttggcgcggcgctggaaaattatgaggaaaaacataaaatactgcgcgacagaaattttaatttattctttggcgttggcagcggatatggctacaggataggtcctaaatcagagtatatttttttaacccgcagaaatattgacggatgttacttcaggttattcagaaacagcgacaaaaaactgtttgatattgacaaagtgatggataaagaaagccgtggtatcaagtaa

SEQ ID NO: 47120 - protein, 229 aa, Unknown
  Obtained from environmental sample
  misc_feature (1)..(229): Xaa is any amino acid
MSYYEHCRENGVVHKLVLDQNGDIAAWTDTPSGGEISYDLDIVTITEDFIKKHPDFSIRGAKGIIALTGYEGILGYQTQAEKSNAPGYQKEIEDAIIIVNKLKKLGWRIASHSWGHLNMPKVPMSWFLYDNKLWDKEVKHILGETDLYIYPFGAALENYEEKHKILRDRNFNLFFGVGSGYGYRIGPKSEYIFLTRRNIDGCYFRLFRNSDKKLFDIDKVMDKESRGIK

SEQ ID NO: 47121 - DNA, 765 bp, Unknown
  Obtained from environmental sample
  misc_feature (1)..(765): n is a, c, g, or t
ttgggcgcagctgacgacggcagatggtcgcaaaaatacgggtgggattactcggaaatcatccctgccaccggtcccggcgtttccccggagaaatactattgggaaatgtccaagtacggttatttatacagaagcaagtttatctattacgccgtaacaaaagataccgacgaaattacggttcacagaccaagtccgttcgacgacgtggagctttatgactatttgacaagcggcgtggaatacatgttcaaaaaaggctttatgatcggcacaagtgacgcgcccatgctgttcagtccggatacagcgcttacacgcggcatggcggtatcgtcgttttaccgcatggcgggcagccctgacgctggcaggtatgccaacctgtttgacgacatggactccgctaacttgtattacgacgcggtgaaatgggcggcggcgaacagtatcgtattcgattatagcggcgacggcaaatttgcgcctgatcgaaaaatcacgcgtgaggaagcggccaccttgttctttaattatcaacgtttgtcgaggcttattcccccggacttcctcctggaaatggaacccacggatgcggacgagataagcgaatgggcaagagaagcggcgaaaaagctcatgatgcaaatgatattccgtggttcaggcggctctttcaactctttcattccgaaaggcgaaattacccgtattgaatttgcgggtatgctgcgcgattattgcgaatattctaagagataa

SEQ ID NO: 47122 - protein, 254 aa, Unknown
  Obtained from environmental sample
  DOMAIN (131)...(174): S-layer homology domain
  misc_feature (1)..(254): Xaa is any amino acid
MGAADDGRWSQKYGWDYSEIIPATGPGVSPEKYYWEMSKYGYLYRSKFIYYAVTKDTDEITVHRPSPFDDVELYDYLTSGVEYMFKKGFMIGTSDAPMLFSPDTALTRGMAVSSFYRMAGSPDAGRYANLFDDMDSANLYYDAVKWAAANSIVFDYSGDGKFAPDRKITREEAATLFFNYQRLSRLIPPDFLLEMEPTDADEISEWAREAAKKLMMQMIFRGSGGSFNSFIPKGEITRIEFAGMLRDYCEYSKR

SEQ ID NO: 47123 - DNA, 576 bp, Unknown
  Obtained from environmental sample
  misc_feature (1)..(576): n is a, c, g, or t
atgaaaaagatttttattattcagatgatgacggcaattacactttgcactgtatgcgctcaaggagctgtcacaggaaacaggcaaacgggaggaaacatgaaaatactggttgcatatttttcgcatactggtacaacggaaaaggttgcaaaacatatccagtctcttacaggtggaacactttttgaaattaagactgtcaatccttacccttctgattacaatgcctgtttgacccaggctaccgaagaattgcgtgctaattcacgaccaccactttctacacattttagcggcattgattcatacggtattattttcgttggctatccaatatggtggggcgattcgcctatggcaatacggacatttcttgaggaatacgacttttccaacaagacgataataccgttttgcacatcaggttcaagtggtataagtacaagtgcacagtcaataaagaaactctgtccaaactcaaaaatactggatggtatttgtataactaacgctaaccgcagtcgtacaaatgaattgattgaacaatggatagataagcttgatataaaataa

SEQ ID NO: 47124 - protein, 191 aa, Unknown
  Obtained from environmental sample
  SIGNAL (1)...(22)
  misc_feature (1)..(191): Xaa is any amino acid
MKKIFIIQMMTAITLCTVCAQGAVTGNRQTGGNMKILVAYFSHTGTTEKVAKHIQSLTGGTLFEIKTVNPYPSDYNACLTQATEELRANSRPPLSTHFSGIDSYGIIFVGYPIWWGDSPMAIRTFLEEYDFSNKTIIPFCTSGSSGISTSAQSIKKLCPNSKILDGICITNANRSRTNELIEQWIDKLDIK

SEQ ID NO: 47125 - DNA, 768 bp, Unknown
  Obtained from environmental sample
  misc_feature (1)..(768): n is a, c, g, or t
atgctacaagcaggcttttccccccataatgattacaaagcggcaagggcaatactgacagcgttacgcgataaatttgaaaaaatcctgcttgtcattgaaggcgtgtacagcatggacggcgatattgcgcctgtccccgaatttgtcaaacttaaaaaggaattcggattgtttcttatggtcgatgaggcgcattcaagctgcgttataggaaaaaacggcgagggcgttgacgagtactttaaccttaaacatgatgatattgacataaagatggggacgctttcaaaagggcttggaacgtgcggcggttatcttgcggggaaatatgaattaattgaataccttcgctatatgctgccgggttttattttttcagtcggcctaagccccgcgcttaccgccgccacgattgaatcgatacggattataaggaaggataattcgcttgtaaggcagttgcaggaaaacatcagctactttgtttccaggacaaaagaaaaaggctttaacctttgtaaagcaggagaaagcgcgattgcccctgttcttgtcggcaaggattctgacgcttttgatctttcgcaagccatgtttgaagagggcatttttgttcctcccgcggtttaccccgcggtccctgtaaacatggcgcgtctgcgtttctgtttgacaagctgccacaataaaaatcagatagaccatgccctggacattctgccggaactggcccgtaaaatgaatatcgttttgccaaatgtgtaa

SEQ ID NO: 47126 - protein, 255 aa, Unknown
  Obtained from environmental sample
  DOMAIN (1)...(241): Aminotransferase class I and II
  misc_feature (1)..(255): Xaa is any amino acid
MLQAGFSPHNDYKAARAILTALRDKFEKILLVIEGVYSMDGDIAPVPEFVKLKKEFGLFLMVDEAHSSCVIGKNGEGVDEYFNLKHDDIDIKMGTLSKGLGTCGGYLAGKYELIEYLRYMLPGFIFSVGLSPALTAATIESIRIIRKDNSLVRQLQENISYFVSRTKEKGFNLCKAGESAIAPVLVGKDSDAFDLSQAMFEEGIFVPPAVYPAVPVNMARLRFCLTSCHNKNQIDHALDILPELARKMNIVLPNV

SEQ ID NO: 47127 - DNA, 933 bp, Unknown
  Obtained from environmental sample
  misc_feature (1)..(933): n is a, c, g, or t
atgaaagtaaaacgtcaaaaactcaaggaaatgcttgaaaacaatacgttcccggcagcggaaattcaaatgatcgtaagttcgcagacgccttcaatggccgccccagcggttgaaaacgttaaaaccgccggtcatacagacgcggaattggacgatcagtttatacatataagagaacaggtaatgcagtgttttgttaaagtcctggatacgacatctgacaaaataggccttgatatgcgttttgccgaagacctcggaggagacagcctggacagccttgaattactgacaatggccgaagcgcggtttggcgtgatgattgaagaatcggattatttcagatgcagaacggttaacgatgtaagccgccttttatatgaaaaaattaccggcttgtcacccgggcagggatcacacgcccatgttagtccccgtcaggagaatgtaaaacccataacaagatttattgatacgcctgagtacaaatcttttgaagcgcgcattgaatcattgaaagaaacaaaaaacccgtattatattccccacgacagcgcccttcgcgacacatctgttgtaatgggcaaagaagtaattaatttcggttcatacaactatttggggcttagcggcgacccccgggtgtcccgggccgcgatagaagccattaacaaacttggcacttccgccagcggaagccgtctgcttactggtgaaaagacgctgcaccgggaactggaaaaagaaatatccgaatggaaacataccgaagcggctctggcgcttgtcggcggccattccacgaatgttacgtttgtcggtaatttttgcaatgaaaaagaccttattttatatgatgttttgtcacataactccattgcccaggnaattaagctgagcaatgctacaagcaggcttttccccccataa

SEQ ID NO: 47128 - protein, 310 aa, Unknown
  Obtained from environmental sample
  DOMAIN (60)...(127): Phosphopantetheine attachment site
  misc_feature (1)..(310): Xaa is any amino acid
MKVKRQKLKEMLENNTFPAAEIQMIVSSQTPSMAAPAVENVKTAGHTDAELDDQFIHIREQVMQCFVKVLDTTSDKIGLDMRFAEDLGGDSLDSLELLTMAEARFGVMIEESDYFRCRTVNDVSRLLYEKITGLSPGQGSHAHVSPRQENVKPITRFIDTPEYKSFEARIESLKETKNPYYIPHDSALRDTSVVMGKEVINFGSYNYLGLSGDPRVSRAAIEAINKLGTSASGSRLLTGEKTLHRELEKEISEWKHTEAALALVGGHSTNVTFVGNFCNEKDLILYDVLSHNSIAQXIKLSNATSRLFPP

SEQ ID NO: 47129 - DNA, 1314 bp, Unknown
  Obtained from environmental sample
  misc_feature (1)..(1314): n is a, c, g, or t
ttgaacgcgttgaaagtgaaaaccggcggcgaagggtttaaccgtgtcgtcactcttgaagtccttcaacatatcggcgacaaccgtgtgcgttgtgtcgcaatgtccgccgccgaaggactgtcccgtgcgcttgaagttgaggacacaggccgccccatcagcgtaccggtcggcaaagaagtgttggggcggatgtttagcgtaacgggcgaacccattgacaacaagggcacgtttactgcggcacagtacgaatctattcaccgtaacgcccctgattttagcgaactgcgtccggcgaccgcgctgcttgagacgggaataaaagtaattgatttaatcgcgccttatgcgaagggcggcaaaatcggcctgttcggcggcgcgggagtagggaaaacagtcgttattatggaactaattcgcaacatagcgacagaacactcaggctactcggtgtttgccggagttggcgagcgttcaagggaaggagccgacctttggaaggaaatgacggaaagcggcgttattgaaaagacagcgcttgttttcggtcagatgaacgagcctcccggagcaagaatgagagtcgcgcttgccggtcttaccatggcggaacatttccgcgataaggacaaacaggacgtgcttctctttgtcgataacattttccgcttcattcaggcaggcgcggaagtttccgccctccttggacgtatccccagcgcagtcggctatcagccgacactcgccaacgaaatgggcagtcttcagaaaagaattgcaagcacatcaaaaggatcaatcaccagtattcaagccgtttatgttcctgctgacgaccttaccgatcccgcgcctgctacaactttcgcccacctggacgcgaccactacgctgtcgcgcaaaattgtagagttgggaatttatccctctgtcgatccgcttgcttcaagctctcgtattcttgatgaagatatagtcggcgaagatcattacaacaccgcacgccgcgctcagcagattttacagcgttacaaagagttacaggatataatcgccattttgggaatggatgaactttccgaggaagacaagctcacagtcgccagggcaagaaagatacagcgctttttcagccagccgtttttcgtcggggaaaaatttacgggtattcccggacgttatgtgcctgtcaaggagacagtccgcggcttcaaaatgatactggacggtgaatgcgacacaatccccgagcagtctttttacatggctggcagtattgatgatgttttggaaaaggcaaaataa

SEQ ID NO: 47130 - protein, 437 aa, Unknown
  Obtained from environmental sample
  DOMAIN (334)...(435): ATP synthase alpha/beta chain, C terminal domain
  misc_feature (1)..(437): Xaa is any amino acid
MNALKVKTGGEGFNRVVTLEVLQHIGDNRVRCVAMSAAEGLSRALEVEDTGRPISVPVGKEVLGRMFSVTGEPIDNKGTFTAAQYESIHRNAPDFSELRPATALLETGIKVIDLIAPYAKGGKIGLFGGAGVGKTVVIMELIRNIATEHSGYSVFAGVGERSREGADLWKEMTESGVIEKTALVFGQMNEPPGARMRVALAGLTMAEHFRDKDKQDVLLFVDNIFRFIQAGAEVSALLGRIPSAVGYQPTLANEMGSLQKRIASTSKGSITSIQAVYVPADDLTDPAPATTFAHLDATTTLSRKIVELGIYPSVDPLASSSRILDEDIVGEDHYNTARRAQQILQRYKELQDIIAILGMDELSEEDKLTVARARKIQRFFSQPFFVGEKFTGIPGRYVPVKETVRGFKMILDGECDTIPEQSFYMAGSIDDVLEKAK

SEQ ID NO: 47131 - DNA, 876 bp, Unknown
  Obtained from environmental sample
  misc_feature (1)..(876): n is a, c, g, or t
gtgtactttaacttccgcggagaccgcgccctggaaataacagcagcttttgaagaggacaaattcgataaattcgaccgcaagcgccgtcccaaggtttgttattcgggaatgatggaatacgacggcgacctccacgttcccaaacgctaccttgtaagccccccctcaatcgaccgcaccatgggtgaatatcttgccgcttccggagtgaggacactagccatctcagagacccagaagtacggccatgtcacctatttcttcaacggcaaccgtaccggcaaattcgacgataagcttgaaaactatgttgagataaaaagcgacgtgattccctttgaacagcgcccctggatgaaatgcgccgacataaccgatcaggttattgaggccattggttcaggcaaatacgattttatcaggcttaactttcccaacggcgacatggtaggccacaccggcatataccaggcggttgtttgctcgatggaagccatggacatacagcttggcaggctagccaaagcggttgaggaagccggtgcggttatggtgattaccgccgaccatggcaacagcgacgacatgttcgagcatgacaagaaaaccggcaacgtgtcccgcaaagccgatggcacgccgaaggcaaaaaccagccacagccttaaccccgtgccctgcattgtgtacgaccccgaatacaagggcgagtataaaacgagccgaaagaaggctgcctcaatgaaggcctggggatcagctccattgccgcgacctgtatccatcttttgggttatgtgccgccgcaggattatgataaatcgatactggcaatgtaacgggncttttacaaaagttgtttatctggtatag

SEQ ID NO: 47132 - protein, 291 aa, Unknown
  Obtained from environmental sample
  DOMAIN (1)...(110): BPG-independent PGAM N-terminus (iPGM_N)
  misc_feature (1)..(291): Xaa is any amino acid
MYFNFRGDRALEITAAFEEDKFDKFDRKRRPKVCYSGMMEYDGDLHVPKRYLVSPPSIDRTMGEYLAASGVRTLAISETQKYGHVTYFFNGNRTGKFDDKLENYVEIKSDVIPFEQRPWMKCADITDQVIEAIGSGKYDFIRLNFPNGDMVGHTGIYQAVVCSMEAMDIQLGRLAKAVEEAGAVMVITADHGNSDDMFEHDKKTGNVSRKADGTPKAKTSHSLNPVPCIVYDPEYKGEYKTSRKKAASMKAWGSAPLPRPVSIFWVMCRRRIMINRYWQCNGXFTKVVYLV

SEQ ID NO: 47133 - DNA, 459 bp, Unknown
  Obtained from environmental sample
  misc_feature (1)..(459): n is a, c, g, or t
ttgtttatctggtatagtaataccatgaaaaaaatacttttcacggtcctgattgcggctttgtgccttacggcctgcgccacgggcggtttaaacataccggaggatctttcgtcatctgaattaatacagcgggcgcaggaggcctcggatcggaaccgttacaaccaggccctgcaatactacacggcccttctcgaaaggaatagaaccaacatagatctggtctgcaccgcggaatacgaaatcgcgtttatttattacaaacagaaaaaatacagccaggcaaaagagggatttaactccctgctggagcgttacgacgcccccggcggcgatatgcttccgcccaagttcaagcggctcgcgaccatagtccttgacagtatcagcgaaaaagaaacgcctttaaagaacaagaaaacaaagaaaccaaacggtgttattaatgtttcctga

SEQ ID NO: 47134 - protein, 152 aa, Unknown
  Obtained from environmental sample
  SIGNAL (1)...(27)
  misc_feature (1)..(152): Xaa is any amino acid
MFIWYSNTMKKILFTVLIAALCLTACATGGLNIPEDLSSSELIQRAQEASDRNRYNQALQYYTALLERNRTNIDLVCTAEYEIAFIYYKQKKYSQAKEGFNSLLERYDAPGGDMLPPKFKRLATIVLDSISEKETPLKNKKTKKPNGVINVS

SEQ ID NO: 47135 - DNA, 1566 bp, Unknown
  Obtained from environmental sample
  misc_feature (1)..(1566): n is a, c, g, or t
atgacagatcggccgagatttatgaaggactttcacgttgtgcccgtttatggcggacaagacatgggcattcagctccgtgcattaaaacgcaaggcgcaggttatagttgcaacgccaggccgtttaatagaccacttggagcgcaaaaccatagacctctccgggatacaagccataatactcgacgaagcagacgaaatgctggatatgggtttccaagaagatgtggaatacatattagaggcaacgccggaaggggcgcaaagagcgttgtttagcgcaaccatgcctgccgccgtgcagagaattgttgccacatacttaggcgattacgaaaccataaggataacgggcaaaacggcaaccgtagaaaaaattcgccaacgctatttgccggttcgccaagaacataaaatggaagccctgacaagggtattggaaaacgaagaatttgaaggaatgctgatttttgtgcgcaccaaacaggaaaccgcagagatagcggaacgcttggaagcaaggggctttgacgcagttcctctctctggggatttggcgcagagcttaagggagcgcaccctaaaccgcctcaaagagggcaagatagacattgtggttgcaacggatgtagccgctcgcggtttggatgtggatagaataacccacgtgctgaactacgatattccttatgataccgaatcttacgttcaccgcatagggcgcacggggcgtgctggcagggacggcaatgccatattgtttgtgaccccaagggaaacccgcttgctaaccatgatagaaaaggaaacccgccagaaaattgaaaagatgaacttgcctacaggtgagcaaatcagcaataaaagagtggcaaaattcaaggaagaaattgcaaaaacggttaatgaaaaaagcgatttaaaggatttcagggatttaatagaaaacctggctatggaacaagcaatggacatcgcggatattgccgccgcccttgcctatatgaatcaggaagagcagcctcttttcccaaagatggagcctttggaagcggatgccccgcgcaaaagggacagggagttttcagggcaaggagcaagggaaggcaggggggagagatccgagaggaggagccgaggttctgatagggggcatagggatggcagctttagcgatatggaatccccggaaagcggaatggagcgttattaccttggagtaggcagaatggacaatgtttccccaagggacatagttggagccattgcaaacgaagcgaatctggagtcaaaatacatagggcatataaagctatttgaaaaattcagcaccgtggatttaccggaagccatgccggaagatgttctgagcatccttcgcagaatgaccattaaaaaccgcccgtcaaaaataaggcttatgaccgataagcctcccgaacgcgaacgtagcgaatactttgacagaagcgacagagatagccacaaaaggagcagagacagaagaccctttaaaggcgatgaccagccacctagaaaaacaaggcgatttggcaggcattaa

SEQ ID NO: 47136 - protein, 521 aa, Unknown
  Obtained from environmental sample
  DOMAIN (4)...(104): DEAD/DEAH box helicase
  misc_feature (1)..(521): Xaa is any amino acid
MTDRPRFMKDFHVVPVYGGQDMGIQLRALKRKAQVIVATPGRLIDHLERKTIDLSGIQAIILDEADEMLDMGFQEDVEYILEATPEGAQRALFSATMPAAVQRIVATYLGDYETIRITGKTATVEKIRQRYLPVRQEHKMEALTRVLENEEFEGMLIFVRTKQETAEIAERLEARGFDAVPLSGDLAQSLRERTLNRLKEGKIDIVVATDVAARGLDVDRITHVLNYDIPYDTESYVHRIGRTGRAGRDGNAILFVTPRETRLLTMIEKETRQKIEKMNLPTGEQISNKRVAKFKEEIAKTVNEKSDLKDFRDLIENLAMEQAMDIADIAAALAYMNQEEQPLFPKMEPLEADAPRKRDREFSGQGAREGRGERSERRSRGSDRGHRDGSFSDMESPESGMERYYLGVGRMDNVSPRDIVGAIANEANLESKYIGHIKLFEKFSTVDLPEAMPEDVLSILRRMTIKNRPSKIRLMTDKPPERERSEYFDRSDRDSHKRSRDRRPFKGDDQPPRKTRRFGRH

SEQ ID NO: 47137 - DNA, 315 bp, Unknown
  Obtained from environmental sample
  misc_feature (1)..(315): n is a, c, g, or t
ttgcttttcgccaacgatatctttcggaacgctcacagttatagctgttctgggagctattatttcttcaggggctgncacaaagaagattatatgtccaggcttgggattgtcctgataatttccggtgcgcttgggaatttttgcgaccgccttcgcataggcaaggttgttgattttatagatgtggactttccagatatgttctatgagcgctggcccacattcaatttggcggactcctgggtcaccatagggatagcgttgcttttcatcagcagccttatacataaaaagccagatgaacagatttaa

SEQ ID NO: 47138 - protein, 104 aa, Unknown
  Obtained from environmental sample
  DOMAIN (1)...(103): Signal peptidase (SPase) II
  misc_feature (1)..(104): Xaa is any amino acid
MLFANDIFRNAHSYSCSGSYYFFRGXHKEDYMSRLGIVLIISGALGNFCDRLRIGKVVDFIDVDFPDMFYERWPTFNLADSWVTIGIALLFISSLIHKKPDEQI

SEQ ID NO: 47139 - DNA, 465 bp, Unknown
  Obtained from environmental sample
  misc_feature (1)..(465): n is a, c, g, or t
atgggcggcggcatggcaggaggcaagaagctaaaattttttcacctgggcggtcaaagcggccccataggaagcccggaacagctcgatacgatttacagttacaccgatttaaaaaaagcaggtcttgctgtcggctccggggccatagtgatcatggacgaaagcgtttcgattctgcattatttaaaagaggtaacagagtttttcattcacgagtcttgtggaaaatgcgttccatgcagagaaggcaacaggcagctgttaaaaatactacagaagctttcaacgcctcaggcggcggcaaccggcgaccttaacgccctgcgcagccttgtccgcactatgaccggcgcttcgttctgcggtctggggcaaaccgccgccactgctcttaacagcgcgtggaagctcttcaaaagcgaatttgaaaccaatgtaaggccagaggtaggagcgcaatga

SEQ ID NO: 47140 - protein, 154 aa, Unknown
  Obtained from environmental sample
  misc_feature (1)..(154): Xaa is any amino acid
MGGGMAGGKKLKFFHLGGQSGPIGSPEQLDTIYSYTDLKKAGLAVGSGAIVIMDESVSILHYLKEVTEFFIHESCGKCVPCREGNRQLLKILQKLSTPQAAATGDLNALRSLVRTMTGASFCGLGQTAATALNSAWKLFKSEFETNVRPEVGAQ

SEQ ID NO: 47141 - DNA, 417 bp, Unknown
  Obtained from environmental sample
  misc_feature (1)..(417): n is a, c, g, or t
gtgagaatacacgaatatatccagcaaacgcccttgattgaggcaattaaaagcagccctgaagcaagttatctcggccaaaacatcctgggaacaggctatgattttgacattaacgtcatttcaggcgcgggggcctacgtctgcggcgaatactcggcggggcttaactccacggaggggcaggtctgcaggtcacggatctggccgtcccatctggtacgaagtaggtctttttctctgactgaccctggtaaacaacgtggaggcttttgcgaacatcccggttatagtcgacataagctgagatgcgtctctggaagcgggcctgccggactcttgcggaaccaagctcgcctgcctttcaggtcattgcaggagatcggggagcttttgaaatcccccttggcaaagtga

SEQ ID NO: 47142 - protein, 138 aa, Unknown
  Obtained from environmental sample
  misc_feature (1)..(138): Xaa is any amino acid
MRIHEYIQQTPLIEAIKSSPEASYLGQNILGTGYDFDINVISGAGAYVCGEYSAGLNSTEGQVCRSRIWPSHLVRSRSFSLTDPGKQRGGFCEHPGYSRHKLRCVSGSGPAGLLRNQARLPFRSLQEIGELLKSPLAK

SEQ ID NO: 47143 - DNA, 552 bp, Unknown
  Obtained from environmental sample
  misc_feature (1)..(552): n is a, c, g, or t
gtgtacaaccttcagggcgtgtccatcaacgataaacacgtcggcgtgattatccgccagatgatgaggaaggtcgaaattctgcgtgtaggggacaccaggttcatctacggtcagcttgttgataaatacgcttttaaggaagaaaacaaccgtgtcattaacgagggcggtcagcccgccgttgctcggcctgttttccaggggatttccaaagcagccttaaatattgattctttcctttccgccgcaagtttccaggaaacaacaagggtgcttaccaatgcggccattgccggttccactgactacctccggggccttaaggagaatatcatcatcgggcatcccattccggctggtaccggtatgaagcgttacagggacgtaaagctctttgacgatgatcaacaggatctggacgaatacttaaacgagattctggaaaggcgcaagcttgaaaaagcgacggaactcaccagcgataacttcttggtagaggacaatgatcaggataatgaacctgatgcggaaagtgatagcgaggattga

SEQ ID NO: 47144 - protein, 183 aa, Unknown
  Obtained from environmental sample
  misc_feature (1)..(183): Xaa is any amino acid
MYNLQGVSINDKHVGVIIRQMMRKVEILRVGDTRFIYGQLVDKYAFKEENNRVINEGGQPAVARPVFQGISKAALNIDSFLSAASFQETTRVLTNAAIAGSTDYLRGLKENIIIGHPIPAGTGMKRYRDVKLFDDDQQDLDEYLNEILERRKLEKATELTSDNFLVEDNDQDNEPDAESDSED

SEQ ID NO: 47145 - DNA, 1542 bp, Unknown
  Obtained from environmental sample
  misc_feature (1)..(1542): n is a, c, g, or t
atggtcgatacctgcggcggcgaatttgaggcaaggacgccgtatttctactccgttaaaaacgggacggaaaacgaggccctgccgtttatcgggaaaagcggaaaacagaggattgtcgtactgggatcggggccgatacggattggccagggcattgagtttgactacgcttgtgtgcactgcgtatggacgctgaaaagcctaggatacgaagtcatcgtaattaacaacaaccccgaaacagtatccaccgacttcgacaccgccgacaggctgtactttgagccgctgtgtatcgacgacgtaatgagcgttatagaaatcgaaaagccggtcggggtgattgtcgcgtttggcgggggcacggcaataaagctgacaaaaaaactttacgagcgcggagtgaacatcatcggcacttcggcggacagcatagacatttgcgaagacagggaacggtttgacgcgctgttggagcaccttcaaataaaacgcccaaaaggattcggcgttatgaccgaggtggaagcattgtcggctgccgaaaggctcggctatccggtgcttatgcgcccgtcctatgtactcggcggtcagaacatgatcattgcgttctctcaggatgacatacgcgagtatatggaaatcatcctgcgctcaaaacaggaaaaccccgttcttattgacaagtaccttgaagggcttgaaatagaggttgacgcaatctgcgacggcgacccttctatgggcgggaatggagcagtgcttattccaggcataatggaacacgttgagcgcaccggcgttcattccggcgacagcattgccgtgtatcccgccctgaacattgacgacgctttggccgaaaagatttttgccgtaacagaaaaactatgcatggctttgaacgttaagggccttgttaatattcaatacgttctgtacgaaaacgagatttacgtcatagaagtcaatcctcgggcgtcccgcacagtgccatacatcagtaaggttacgggtattcccatgtgcgagcttgccacaaaagccagtatcgggaaaacgctttcctctttgggctacacatccggcatagcgaaaatcccgccgtataccgcagttaaggtacctgttttctcttttgaaaaactgaccggcgtggatacgcatcttgggcctgaaatgaaatccaccggagaagttctaggtatagggaaaaatcttgaggaggcgctttacaaggggcttgtagccgcggggtataaaatcaagaagcgcggcggcgttctgattaccgtcaaggacagcgataagcctgagattatcgatgtggcgggaaaatttgtgcgggcgggatttaccctgcacgcgacaaggggaactgcccgttacctccagcaaaaaggttttgaggttcaagcgacggataaaatcagcgataacaaagacaacaatacggcgacgctcctgaaagcagcaagatcagttatatcatctccacatcagagaaaggaagagaccccgcccttgatgacgtga

SEQ ID NO: 47146 - protein, 513 aa, Unknown
  Obtained from environmental sample
  DOMAIN (441)...(513): MGS-like domain
  misc_feature (1)..(513): Xaa is any amino acid
MVDTCGGEFEARTPYFYSVKNGTENEALPFIGKSGKQRIVVLGSGPIRIGQGIEFDYACVHCVWTLKSLGYEVIVINNNPETVSTDFDTADRLYFEPLCIDDVMSVIEIEKPVGVIVAFGGGTAIKLTKKLYERGVNIIGTSADSIDICEDRERFDALLEHLQIKRPKGFGVMTEVEALSAAERLGYPVLMRPSYVLGGQNMIIAFSQDDIREYMEIILRSKQENPVLIDKYLEGLEIEVDAICDGDPSMGGNGAVLIPGIMEHVERTGVHSGDSIAVYPALNIDDALAEKIFAVTEKLCMALNVKGLVNIQYVLYENEIYVIEVNPRASRTVPYISKVTGIPMCELATKASIGKTLSSLGYTSGIAKIPPYTAVKVPVFSFEKLTGVDTHLGPEMKSTGEVLGIGKNLEEALYKGLVAAGYKIKKRGGVLITVKDSDKPEIIDVAGKFVRAGFTLHATRGTARYLQQKGFEVQATDKISDNKDNNTATLLKAARSVISSPHQRKEETPPLMT

SEQ ID NO: 47147 - DNA, 1272 bp, Unknown
  Obtained from environmental sample
  misc_feature (1)..(1272): n is a, c, g, or t
atggaaaaccttatggtcaagcaggaaaacggagcgatagaagctggtaacgcggtaggggttattaagacaaatatcgacagccttaacaaaatgatagaacaacaggctgaaagcgtagatatgtcgtcttcagccattgaggaaatgacagctaacattcactcggtaacccaaacgctggcggaaaacagcaagaatgtcgctgttttggctgaagcgtcggagaacggcaaaacaggcctccaattagtcgctcaggagatacagggaatatcccatgattcagaggggcttttggaaataaactcggttatgaacaatatcgcaagccagacgaacctgctttccatgaacgccgcgattgaggcggctcacgccggagaagccggaaaaggctttgcggtagtcgccgatgaaatacgcaaactcgccgaatcgtcgagcgagcagtcaaaaaccaccgcgacgatgctcaaaaaaataaaagcgtccatagacaacattaccaaatcgtctaacgatgtgttagaccgtttcggggcaatagactcaagcgtaaaaacagtttccgaacatgagcaaaatattcttaaagcgatgcaagagcaggaaaccggagggaagaaaatactggaatccataagccgcctgagggacataacccattccgttaaaaaagggtctgaggatatggcaaaatcaggtgaaactctggtcaaggaaacagacgaattcataaaaaccagccagaaagcggcggaaggcatgaacgagatactgacaggcattaaccagataaaagtttcggtgaaccatgtgaatgaaatgagtcaggaaaacaacagtaactttgaatcgttaaaacaggaaacggataaatttaatgatactgtcggaaacgaaaaacaaaaagttcttatagtagatgacgacagtattcatcttgaaatggtagaaacggttttacaaaataattatgacgtatcaaccgcaaaatccggtaaagaagctttgggcttattctatcagggacttgttccccaattagtattattggatctaataatgccggatatggacggttgggatacatacaaaagaataaaagcgataagcggcttacacgacacccctatagcgttttttacaacttcaaatgatccaaaagacgtaaaacacgcgcatgaaataggggcggttgattatattaaaaagccttatgataaagacgatctgttacgcagggtggagagaatcctgaaaaaataa

SEQ ID NO: 47148 - protein, 423 aa, Unknown
  Obtained from environmental sample
  DOMAIN (34)...(252): Methyl-accepting chemotaxis protein (MCP) signaling domain
  misc_feature (1)..(423): Xaa is any amino acid
MENLMVKQENGAIEAGNAVGVIKTNIDSLNKMIEQQAESVDMSSSAIEEMTANIHSVTQTLAENSKNVAVLAEASENGKTGLQLVAQEIQGISHDSEGLLEINSVMNNIASQTNLLSMNAAIEAAHAGEAGKGFAVVADEIRKLAESSSEQSKTTATMLKKIKASIDNITKSSNDVLDRFGAIDSSVKTVSEHEQNILKAMQEQETGGKKILESISRLRDITHSVKKGSEDMAKSGETLVKETDEFIKTSQKAAEGMNEILTGINQIKVSVNHVNEMSQENNSNFESLKQETDKFNDTVGNEKQKVLIVDDDSIHLEMVETVLQNNYDVSTAKSGKEALGLFYQGLVPQLVLLDLIMPDMDGWDTYKRIKAISGLHDTPIAFFTTSNDPKDVKHAHEIGAVDYIKKPYDKDDLLRRVERILKK

SEQ ID NO: 47149 - DNA, 1044 bp, Unknown
  Obtained from environmental sample
  misc_feature (1)..(1044): n is a, c, g, or t
ttgtcgcatatttgtcgcgtcttgtttgttaggatacaaacaggagttataatgtccgctgaatttcaacccgttaccgtacacttgaaaaaagacgcgtatatcttcgttgaaggaaaacaaaacgccgacaaattttatattatcaagcacggcgacgtgcggataatccgtgaagcgttaaacgatggaataggaagcgtgataggtaccggagatatgtttggtttgatttccacaatggcggcgcacggctatattgaatcggcgatagccatgtcaaatgttactttgcttgcggtagaacggaaacaatacggaagcctaatccgtaaagtcaacagcatcgccgtaaacagtataacggcattctcccaaagacttcgggaattggatatcgctttctcacagcgggcgttaaaaaacacggcgcagtccgattattcacacatcgttcaaataggcgatttttaccaaaactcgggcaaactaaaatcggcgttatacgcataccgccgttatcttgagctctgccccggtgtgtataacgaagacgaaattaacgcgaaaatcgcctcaatagaagattatgttacggaaccaaggctggaatatgcgcctaacaaaatgatacaaacatatccgaaagaacatctgctttttaccgaaggcgaaaccggaaataccatgtatatcattcaggaaggttcggtaaaaataacaaagatcgttgacaataaagaagttatcctcgccgttctaaacaaaggcgacattttcggtgaaatggcgcttttggaagacaagccccgtgccgctaccgccgaagtttacgaagactgcaaattactggctgttaaccgtgataacttctcaaccctcataaaagatcagcccgatatggtagtccgcatggcaaccttaatgtccgaacgcatttggcttctttaccgccagcttgataacacactcatagaaaaccctttagggcgcgtttatgacgcactgcttatccagttagaaaaaaacncgtgtagacattaa

SEQ ID NO: 47150 - protein, 347 aa, Unknown
  Obtained from environmental sample
  DOMAIN (26)...(115): Cyclic nucleotide-binding domain
  misc_feature (1)..(347): Xaa is any amino acid
MSHICRVLFVRIQTGVIMSAEFQPVTVHLKKDAYIFVEGKQNADKFYIIKHGDVRIIREALNDGIGSVIGTGDMFGLISTMAAHGYIESAIAMSNVTLLAVERKQYGSLIRKVNSIAVNSITAFSQRLRELDIAFSQRALKNTAQSDYSHIVQIGDFYQNSGKLKSALYAYRRYLELCPGVYNEDEINAKIASIEDYVTEPRLEYAPNKMIQTYPKEHLLFTEGETGNTMYIIQEGSVKITKIVDNKEVILAVLNKGDIFGEMALLEDKPRAATAEVYEDCKLLAVNRDNFSTLIKDQPDMVVRMATLMSERIWLLYRQLDNTLIENPLGRVYDALLIQLEKNXCRH

SEQ ID NO: 47151 - DNA, 759 bp, Unknown
  Obtained from environmental sample
  misc_feature (1)..(759): n is a, c, g, or t
gtgttccatgatctgggaaatgtgaatttcagctttgtgtgtccgggacacagcggaggcgggctggattttgcgcgcttcaccgcgcctgttctggaagccctgcaagccatgggcgtggattgcggttttgacgggcgcaacgatctggtcgcgggcggcaggaaattttccggcaacgcccagcatattgagcatgaccgcgtgttgcatcacggcaccttgctttttgattcgcgtctggaggatctggcgggcgcgctccgtccggatccgttgaaattccgggataaagccgtcaagagtgtgcccgcgcgggtggggatgctcaaagagcatttgccgcatatggatgttgaggaatttatgcggcagttgttcgcgcatatgttgcggacgctgccggggacgcggcgtgatttgtccggtgaagaggaaaaggccatcgcggagttggcgcgtgagcgctatgagagttgggagtggaacttcggcgtatcgccggcctatggttttgcgcggcgcgcgcgtattgcggcgggcgcttttgatgtccgtctggatgtgcggcaggngatcatccgcgcggcctgtatccggngggattttttcgccctgcgcccggtggaggaactggaggcgctgctgtgcggccggccgcatgaacgcgaggctctggcgcgggtcttggaatccgccggcttgggcggctatatccaacagcttgacgcggatgattttctttcctgcctcgtctaa

SEQ ID NO: 47152 - protein, 252 aa, Unknown
  Obtained from environmental sample
  misc_feature (1)..(252): Xaa is any amino acid
MFHDLGNVNFSFVCPGHSGGGLDFARFTAPVLEALQAMGVDCGFDGRNDLVAGGRKFSGNAQHIEHDRVLHHGTLLFDSRLEDLAGALRPDPLKFRDKAVKSVPARVGMLKEHLPHMDVEEFMRQLFAHMLRTLPGTRRDLSGEEEKAIAELARERYESWEWNFGVSPAYGFARRARIAAGAFDVRLDVRQXIIRAACIRXDFFALRPVEELEALLCGRPHEREALARVLESAGLGGYIQQLDADDFLSCLV

SEQ ID NO: 47153 - DNA, 726 bp, Unknown
  Obtained from environmental sample
  misc_feature (1)..(726): n is a, c, g, or t
gtgaataaaggccacaacatggcaaaaagcctggtaaacagcgccattttatcggccctgatcgcgctggaaatgaagatgccgaatcacaaaattttacagatagtaaccggcgccctgctccacgatgtaggcatgctcagactgccaaaggaaattgtggagaaaaagggaggcctttctgacgcggaactccagcgcatccaggctcatacactttacacctataaaatcgtgaacaaagaactcctgtatccggaagaagtgggtcttatcgtcctgcagcaccacgagcgctgggacggcgagggctatccaaggcggctttccggaacagcaatcgatattggcgcgcggatcgtctctgtcgccgacgctttcgaggccatggtgagcaaaaagccctaccggaattccatgatgggctatcaggccatgaaaaaccttctttccgataacttaagacgctttgacccggatgtgatcaaggcctttatccagaccatggggatttacccgataggttcaatcatcctcctgaataacggcgctcttggaagggtagtagacgtacaggcaagcgccccactccgcccgacaatcagaatactcgccgatgaattcggcaatttctttaaaaacgactccggagatctgcttgatctgcttatcgaaaagagcctgttcattgccagggctgtggatccaaaggaaattgccgaataa

SEQ ID NO: 47154 - protein, 241 aa, Unknown
  Obtained from environmental sample
  DOMAIN (7)...(130): HD domain
  misc_feature (1)..(241): Xaa is any amino acid
MNKGHNMAKSLVNSAILSALIALEMKMPNHKILQIVTGALLHDVGMLRLPKEIVEKKGGLSDAELQRIQAHTLYTYKIVNKELLYPEEVGLIVLQHHERWDGEGYPRRLSGTAIDIGARIVSVADAFEAMVSKKPYRNSMMGYQAMKNLLSDNLRRFDPDVIKAFIQTMGIYPIGSIILLNNGALGRVVDVQASAPLRPTIRILADEFGNFFKNDSGDLLDLLIEKSLFIARAVDPKEIAE

SEQ ID NO: 47155 - DNA, 513 bp, Unknown
  Obtained from environmental sample
  misc_feature (1)..(513): n is a, c, g, or t
atgagcggcagcggaagggatggcgatagccggggaaaccgccggaaacccttcaatcgcagggataaccagtcacagaaccgggattctcccaaaaatggaaaaaaacccgctgatttctcaatagaaggctccggaaagtttgaaaaaagacggggaggcttcgttgaacgtccaaagtgggttccgccgaaagcgcccgcgtttacccctccttcggctgtctgcgcctggtgcggcaaaccaatcaaagaaatatctaccgctatttcagagcctgtcagcggaaagccggtgcatttcgactgcgcgataagcaagattgttgaagaagaagcccttgaaagaggcgatactgtaagctatatcggcggggggcgttttgggataatccattacaataatcccccggatatcagggatttcaggataaaaaaaatcctcgaatgggagaacagagaaaaccgttccgaatggcgagtggcaatcagcgaatattttacgcttacctga

SEQ ID NO: 47156 - protein, 170 aa, Unknown
  Obtained from environmental sample
  misc_feature (1)..(170): Xaa is any amino acid
MSGSGRDGDSRGNRRKPFNRRDNQSQNRDSPKNGKKPADFSIEGSGKFEKRRGGFVERPKWVPPKAPAFTPPSAVCAWCGKPIKEISTAISEPVSGKPVHFDCAISKIVEEEALERGDTVSYIGGGRFGIIHYNNPPDIRDFRIKKILEWENRENRSEWRVAISEYFTLT

SEQ ID NO: 47157 - DNA, 354 bp, Unknown
  Obtained from environmental sample
  misc_feature (1)..(354): n is a, c, g, or t
gtgagcagggcaatagaagattacacccgcgcaatcagcctaagaagctcttacgcggaagtttacaattaccggggttttctgtttgccaggcagggagagcctagaagggctgtcgaagactatacccaggccattcgctataagagcgattacgccgacgcctatttcaacagggcgcacgcgtacgggcagcttggaaactgggacttgtccatcgccgactacacccaggtaataaggcttgaacctaaaaacggatctgcgtacacccagcgcggtaacgcctggtacagcaagggcgatagagttaaagcggcggaagattacgcggctgctgagagattgaagtaa

SEQ ID NO: 47158 - protein, 117 aa, Unknown
  Obtained from environmental sample
  DOMAIN (19)...(52): Tetratricopeptide repeat
  misc_feature (1)..(117): Xaa is any amino acid
MSRAIEDYTRAISLRSSYAEVYNYRGFLFARQGEPRRAVEDYTQAIRYKSDYADAYFNRAHAYGQLGNWDLSIADYTQVIRLEPKNGSAYTQRGNAWYSKGDRVKAAEDYAAAERLK

SEQ ID NO: 47159 - DNA, 666 bp, Unknown
  Obtained from environmental sample
  misc_feature (1)..(666): n is a, c, g, or t
atggaccctnaaagcagctggcctccaggggaaacggaaaattacgggtatattgacaccatagaagaagccagaaaaattttagtggagcagttaagcggtacattgatcacaattgcccaggatgtaaaaatccaggttgaatttaaccctgaaactgtcggcgcttacaggctcataggctatgagaaccgccttcttaacaaggaagattttaacgacgataccatagacgctggcgacataggcgcggggcatactgtaaccgcattttatgaactcataccaaaaggggccgaggataacgccatgcccaaagtcgatcctctcaaatatgggacacccgtagcgtcaaacggtaatttagacgagcttctgaccgttaaactccggtacaaactgccgaaagaaaccgaaagctctctcttaagttttccggtttttgtgtcctcggttcgaaaagccggagaggaatcgggagattttagatttgcctcagcggtcgccggttttggaatgttgctgcgcgatagtccctataaaggaaatgcaggctttgatagcattcttaatatggcgcaaagatcaattgggaatgatttatcagaataccggcggggttttctggaattggtaagaagagcgcaagcaatcgggaataggtga

SEQ ID NO: 47160 - protein, 221 aa, Unknown
  Obtained from environmental sample
  misc_feature (1)..(221): Xaa is any amino acid
MDPXSSWPPGETENYGYIDTIEEARKILVEQLSGTLITIAQDVKIQVEFNPETVGAYRLIGYENRLLNKEDFNDDTIDAGDIGAGHTVTAFYELIPKGAEDNAMPKVDPLKYGTPVASNGNLDELLTVKLRYKLPKETESSLLSFPVFVSSVRKAGEESGDFRFASAVAGFGMLLRDSPYKGNAGFDSILNMAQRSIGNDLSEYRRGFLELVRRAQAIGNR

SEQ ID NO: 47161 - DNA, 1050 bp, Unknown
  Obtained from environmental sample
  misc_feature (1)..(1050): n is a, c, g, or t
gtgccgctgttttcaagcgaactgtctctttccggagtgtttgatcccgctatggccctgtcctcgttatcgcctaacgaggaagtttttcccgcgcaggcggagctggttattgcgctttccagtcaaaaaggaattaggaagatcggacgggcgctctggaataaccgcgagttgttttttcaaccgggaaaccagggtataaatattatccgcaggggaaatatcccggttgcgataagagaaaactcataccgggaaaaatatacttcttctgcttcggttggcagcggtattcacgcggctctccttgattttacccaatcgaatttcgatataatgatctccatacagggcggccaactggtacgctttatgccggtggggcaggatacccatgttgaaatttccgcagattgggcttcgccttcttttcagggcgctttccttcccggcagttcaaacattaccgactcaagttttgacgcggtttgggacataaactatctgagcagggatattcccctgttctggaaaatcgattacggtaatgaaaaccgtgattatgcggattcaatgttcggcgttaattttttccgggctattgatacctactcgcttaataccagggccgtaaaatacgcaatactttttttaattgttccgttcttaacgctgtttttgctggaggtgtttgtccgcacacggatacaccccgtaccgtacctgctttcgggaatcggaaatgttattttctatctgttgttgctctccctttcggagcagatgttgttctttctcgcctataccctggcggcgttaagcgtaacggcaatgatgacgctctactcgcgctcgctgctgtcttcatggaacaaaagctggtacatggggctggttatgttgatctcgtatatacttttgtacgcggtgctgaacgccgaatcttacgcgctgcttatcggttccatcggggcctttgtgatagtaggtctggtcatgttccttacccgcaagctgaactggtacggatcggatttgcagagttaa

SEQ ID NO: 47162 - protein, 349 aa, Unknown
  Obtained from environmental sample
  DOMAIN (1)...(349): Inner membrane protein CreD
  misc_feature (1)..(349): Xaa is any amino acid
MPLFSSELSLSGVFDPAMALSSLSPNEEVFPAQAELVIALSSQKGIRKIGRALWNNRELFFQPGNQGINIIRRGNIPVAIRENSYREKYTSSASVGSGIHAALLDFTQSNFDIMISIQGGQLVRFMPVGQDTHVEISADWASPSFQGAFLPGSSNITDSSFDAVWDINYLSRDIPLFWKIDYGNENRDYADSMFGVNFFRAIDTYSLNTRAVKYAILFLIVPFLTLFLLEVFVRTRIHPVPYLLSGIGNVIFYLLLLSLSEQMLFFLAYTLAALSVTAMMTLYSRSLLSSWNKSWYMGLVMLISYILLYAVLNAESYALLIGSIGAFVIVGLVMFLTRKLNWYGSDLQS

SEQ ID NO: 47163 - DNA, 516 bp, Unknown
  Obtained from environmental sample
  misc_feature (1)..(516): n is a, c, g, or t
gtggaagtcatgcacgattttttatggcgtatccatcaaaatgtcccgcggaaagggcatattggagtattcaaccgttcctattatgaagcagtacttattgaaaaagtaaaaaatctggcgcctaaggaaacaataaagcagcgttatcaccatataaatgcttntgagtcattgctaaatgataatggaacaagaatcataaaattctttttgcacatatcaaaggattaccagaaagaacagcttcaggaaagattggacactcctgaaaaattatggaaattcagtccgtcagatattccggaacggatgctttgggaagattaccaaaaggcgtatgaagctgcattggaaaagtgttcttctcaaatagctccgtggtatattgtaccggcggaaaaaaaatggtttcggaatttgcttgttacaaaggtattggtagaaactctggaatcaatggatctccattatcctgaagccaaatttgatccaaaaacagttgtaattccttaa

SEQ ID NO: 47164 - protein, 171 aa, Unknown
  Obtained from environmental sample
  DOMAIN (1)...(159): Polyphosphate kinase 2
  misc_feature (1)..(171): Xaa is any amino acid
MEVMHDFLWRIHQNVPRKGHIGVFNRSYYEAVLIEKVKNLAPKETIKQRYHHINAXESLLNDNGTRIIKFFLHISKDYQKEQLQERLDTPEKLWKFSPSDIPERMLWEDYQKAYEAALEKCSSQIAPWYIVPAEKKWFRNLLVTKVLVETLESMDLHYPEAKFDPKTVVIP

SEQ ID NO: 47165 - DNA, 483 bp, Unknown
  Obtained from environmental sample
  misc_feature (1)..(483): n is a, c, g, or t
ttgcgcctttcttttttcacgcagagcttttccagcgcggccttgtccacttccacgtcaaagtgccccgagttggcgagcagcacgttgttcttcatcacgttaaaatgttccgtcgtaataaccttgttgcagcttgtggcggtgacaaaaatgtcgcctaacttggcggcttccatcatgggcataacacagaagccttccatgagggcttccagcgccttgaagcggtcaacctccgtgacaataacgttcgcgcccagccccttggcccgcgcggcaattcccgatccgcaatggccgtatccggcgaccacgacggtgcggccggaaaccatgttgttggtggtgtacataatcgcttcccaggtagtctgcccggttccgtggtggttgtcaaaaaggtatttggatttggcgtcattaaccgcgaacatcgggaagttcagctttcccgcgtcgctgcgcacgcgcaggcggtga

SEQ ID NO: 47166 - protein, 160 aa, Unknown
  Obtained from environmental sample
  SIGNAL (1)...(21)
  misc_feature (1)..(160): Xaa is any amino acid
MRLSFFTQSFSSAALSTSTSKCPELASSTLFFITLKCSVVITLLQLVAVTKMSPNLAASIMGITQKPSMRASSALKRSTSVTITFAPSPLARAAIPDPQWPYPATTTVRPETMLLVVYIIASQVVCPVPWWLSKRYLDLASLTANIGKFSFPASLRTRRR

SEQ ID NO: 47167 - DNA, 840 bp, Unknown
  Obtained from environmental sample
  misc_feature (1)..(840): n is a, c, g, or t
atgtttcaatataaagactacgcggaaagcgcggattatatcaaaagcagattggggaatttttcccctgcttatttattggtcctgggatcgggactgggcgttatggcagaacagatacggtttcccgtttacattccctacggcgagatcccccatttcaagccgtcaaccgcgccgagccataccgggcgcttcgtatgcggcgagctggggggtaagccggtaatggtcatgcagggacggatgcacgtttacgagggctataccgccgaagaaacagcgtatcctgtcagggttgcgaagctgcttggggcgcatactataattgtaactaatgcggcaggcggcgtaaatttggagtataaacccggcgacttggtcgccctgaacgattttgtaaaaatcagcttccccaacccccttataggggaaaatatcccggaattcggcccccggtttccggacatgacatacgtgttcgacagggattatttaaaaatgataaaggaagtcgccgccgaacagggcattaccctgagagaaggcgtttacttttacgccaccggcccgcagtacgagactcccgcagaaatacgggcgttccgtctgctgggagccgatgtagtgggaatgtccaccgcgcctgaatgtatcagcgccgcccatgccggcatgagaatactcggcttgtcgctggtcaccaacatggccgcaggcgtgctgaacaagcctctgtctgaaaaagaagttattgaggcggctaatgcggcgcaagatcgattttctcgcctgatccttgcatttttacagagagtcccgcatatgtcccagggctag

SEQ ID NO: 47168 - protein, 279 aa, Unknown
  Obtained from environmental sample
  DOMAIN (22)...(275): Phosphorylase family 2
  misc_feature (1)..(279): Xaa is any amino acid
MFQYKDYAESADYIKSRLGNFSPAYLLVLGSGLGVMAEQIRFPVYIPYGEIPHFKPSTAPSHTGRFVCGELGGKPVMVMQGRMHVYEGYTAEETAYPVRVAKLLGAHTIIVTNAAGGVNLEYKPGDLVALNDFVKISFPNPLIGENIPEFGPRFPDMTYVFDRDYLKMIKEVAAEQGITLREGVYFYATGPQYETPAEIRAFRLLGADVVGMSTAPECISAAHAGMRILGLSLVTNMAAGVLNKPLSEKEVIEAANAAQDRFSRLILAFLQRVPHMSQG

SEQ ID NO: 47169 - DNA, 624 bp, Unknown
  Obtained from environmental sample
  misc_feature (1)..(624): n is a, c, g, or t
ttgcgacacgcatacgcaatgcatctggtttacagggatgtgccgttgttaaacccccttaccgcttgcaaagaaaccgggaatcccaatctcatttatttattcggctccacaaataaaattacctttccgggtgcgggggtcgcttttctcgcggccagcaaagaaaatatcgcttttatcgaaaagcagctttccatgcaggcaatcggctgggacaagctgaatatgctgcgccacgttcggtttttaaaaaacacaaacggcattaaagagcagatgcaaaagcacgcagaaatcctgcgcccaaaatttgacgctgttattaaaagactggaaactgagctttcagggcgaggggccggggaatggataaaacctgacggcggatattttattacctttatagcagagtcaggatgcgcaaaacggattatcgcgctgtgtaaagaagcgggggtaaccatgacaagcgcgggagcaacgcacccttacggccaagatcccgaagaccgctatatcagaattgcgccgtcttttccttcgctgccggagcttgaaaaagcgatggaagttttctgcaccgccgcaaagctggcaacggtggaacgtttagttagctaa

SEQ ID NO: 47170 - protein, 207 aa, Unknown
  Obtained from environmental sample
  misc_feature (1)..(207): Xaa is any amino acid
MRHAYAMHLVYRDVPLLNPLTACKETGNPNLIYLFGSTNKITFPGAGVAFLAASKENIAFIEKQLSMQAIGWDKLNMLRHVRFLKNTNGIKEQMQKHAEILRPKFDAVIKRLETELSGRGAGEWIKPDGGYFITFIAESGCAKRIIALCKEAGVTMTSAGATHPYGQDPEDRYIRIAPSFPSLPELEKAMEVFCTAAKLATVERLVS

SEQ ID NO: 47171 - DNA, 903 bp, Unknown
  Obtained from environmental sample
  misc_feature (1)..(903): n is a, c, g, or t
atggaagatcgcgctttaaatcttttggaaggcgatgaagtaacgttgaaatgccttgacataagcgaggccgaaagcaacgaggacttcgccatgacggcaagcacgtataacagggaggacgacaggcttgagcctggaatcgggaggcccggcttgcgggtcattaattttgccccaatactgaaatatgatctgtttccttttgccgaggttcttgaggctgttctgaacatagcttcaaaaagtatgggcctgcctgtcgagatagaatttgcggtcagcaggcacaaagaaaaactgattttttatctcttgcaggtgaagccgcttatccaaaacaccggaaggcaggagaccaacatagacttacaggatattgacaagtgctttgtcttttcaggcaggagcatgggaaacggcagggatacaacgatcagtgatattgtgtgggttgatccggaaacattttcccccacgcacacggccacgatcgcaaaggaaatcgaagcgctcaacgctatgctaaaagcgaagggcctgcgttacgttcttgttgggccgggccgctggggaaccagggattattctcttggcattcccgtaaactttccgcagatttcattttcccgcgttatcgtagaaaccaatctgtccaattttaacgttgaatcgtcccaggggagccatttttttcataatgttaccagcatgaatatcgggtatttgtcggtatcgccggggcacgacaaggatcatgttgattgggaatggctgaaatcgcttcattgcgaggaaaaaacgcagttttgcaggtggagtaagacagaggagcctcttgatatcgtcatggacgggcgtattgctaatacggtgatttacaagcgttgtttagctaactaa

SEQ ID NO: 47172 - protein, 300 aa, Unknown
  Obtained from environmental sample
  misc_feature (1)..(300): Xaa is any amino acid
MEDRALNLLEGDEVTLKCLDISEAESNEDFAMTASTYNREDDRLEPGIGRPGLRVINFAPILKYDLFPFAEVLEAVLNIASKSMGLPVEIEFAVSRHKEKLIFYLLQVKPLIQNTGRQETNIDLQDIDKCFVFSGRSMGNGRDTTISDIVWVDPETFSPTHTATIAKEIEALNAMLKAKGLRYVLVGPGRWGTRDYSLGIPVNFPQISFSRVIVETNLSNFNVESSQGSHFFHNVTSMNIGYLSVSPGHDKDHVDWEWLKSLHCEEKTQFCRWSKTEEPLDIVMDGRIANTVIYKRCLAN

SEQ ID NO: 47173 - DNA, 855 bp, Unknown
  Obtained from environmental sample
  misc_feature (1)..(855): n is a, c, g, or t
atgattacgaaaattgccaacgtggattacgaccctgatgccgactgcccgatgtggaagaagtttgtccgcgaaatcatggactataaagcggacattataaagtttgtccagactgctgcggggtggtctttgtccggcgacatatcggagcagacaatgtttattctgtacggaaccggagcgaacggcaaatcaacgtttttgaatacgataatgtacctgttaggcgactatgcaatcgccacgccgacagaaacttttatgaaaaaatcgggggacaattattcaaatgacgttgcgcgtctgcgaagcacgcggtttgtaacgactacggaagttgagcaggggcggcggctgtccgagccgcttataaaaaagataacaggcaacgacgaaatgacggcaaggtttttgtatggggagttttttaatttcaagcctactttcaagatattcatggcaaccaaccataagcctgttattaaagggactgatcatgggatatggcggaggataaggctaatcccttttgccgccaggataccagaagaaaagcaggacaaattccttgaaatgaagctgcgggaagaagcaagcggtatacttaactggctgttggaagggatggcgaactggaaacaggaaaggctgaaaacgccaaaggccgtattgtttgccacagacgaatacagggatgaaatggacgttatcggaaatttcataaaggaaaaatgcggacaaaaaaaggaaatgactattgcgattaaaaagctgtacaaggcgtatgcgggctggtgtgatgagaacaaggaacacgcggtgagcgaacgngttttttacgctgaggcttaa

SEQ ID NO: 47174 - protein, 284 aa, Unknown
  Obtained from environmental sample
  DOMAIN (1)...(284): Poxvirus D5 protein-like
  misc_feature (1)..(284): Xaa is any amino acid
MITKIANVDYDPDADCPMWKKFVREIMDYKADIIKFVQTAAGWSLSGDISEQTMFILYGTGANGKSTFLNTIMYLLGDYAIATPTETFMKKSGDNYSNDVARLRSTRFVTTTEVEQGRRLSEPLIKKITGNDEMTARFLYGEFFNFKPTFKIFMATNHKPVIKGTDHGIWRRIRLIPFAARIPEEKQDKFLEMKLREEASGILNWLLEGMANWKQERLKTPKAVLFATDEYRDEMDVIGNFIKEKCGQKKEMTIAIKKLYKAYAGWCDENKEHAVSERVFYAEA

SEQ ID NO: 47175 - DNA, 546 bp, Unknown
  Obtained from environmental sample
  misc_feature (1)..(546): n is a, c, g, or t
atgtggacacattatagactcggaccaaaggtccgcgactaccttgaaaatcgcattttcgcagcctttaggcgagaaaatgcaatgtctgtccacaaagtaaccgactttgtggacagacactacctaattcttaatatacctctgtggttgacctggcataagaaaaaccataggattctggttatggttgacaacgtaccggcggaaataatcctgaataccgaggcgctttgccccgtttgcaagcggcgcttgagcgcggcttatgtgagaggggaacaatcaatagatctttggcgtcattgcccggagcatggagatttttctatccctgtttggcgcaattatcttgacttcactgcatgggttaaaaacgcccctgttctgcgggaaggggaaaacccggcctgccctggtggctgcggcttatgcgccgaccataaacagggcacctgctgcgtattgctgcctgtcaccgcgcgctgtaatttgaactgccgctattgtttcgccgacctgacggcgcggcggacagccggttga

SEQ ID NO: 47176 - protein, 181 aa, Unknown
  Obtained from environmental sample
  misc_feature (1)..(181): Xaa is any amino acid
MWTHYRLGPKVRDYLENRIFAAFRRENAMSVHKVTDFVDRHYLILNIPLWLTWHKKNHRILVMVDNVPAEIILNTEALCPVCKRRLSAAYVRGEQSIDLWRHCPEHGDFSIPVWRNYLDFTAWVKNAPVLREGENPACPGGCGLCADHKQGTCCVLLPVTARCNLNCRYCFADLTARRTAG

SEQ ID NO: 47177 - DNA, 669 bp, Unknown
  Obtained from environmental sample
  misc_feature (1)..(669): n is a, c, g, or t
gtgcgaggccagcgagcgggattaaaaatagtcttttcttccagcgccgcagtttacggcagcccgcagtatctgcctattgatgaaaagcacccttgcctgccggaaaattactacggctttaccaaactggaaattgagcgttttttaggctggtacgaaaaacttaaaggcataaattacgcctgcctccgctattttaacgctgccggttacgatataaaagggcgcataaagggacttgaacaaaacccggcgaatttaattcccgttatcatggaaaccgcctgcggcacaagaaaagaaatgcaaatattcgggaacgattacgatactcccgacggaacctgcatacgcggttatgtgcatgtaagcgatctagccgcgggtcatgtccttgcgttaaactacatcagtaaaaacaataagagcctgactgtaaatcttggaagtgaaacaggcttctccgtaacggaagtaattgaagcggcgcgaaaagttacggacaaaactatacccgcgaaaatcacgggaagaagacagggcgaccccgcggccctttacgattcgtcttctctcgcgtttgaaatactcggctggaaagcgcgctgctccgatatggaaacaatacttaaaacaagctgggaagcgtacaaaaatgaaagataa

SEQ ID NO: 47178 - protein, 222 aa, Unknown
  Obtained from environmental sample
  SIGNAL (1)...(20)
  DOMAIN (2)...(150): NAD dependent epimerase/dehydratase family
  misc_feature (1)..(222): Xaa is any amino acid
MRGQRAGLKIVFSSSAAVYGSPQYLPIDEKHPCLPENYYGFTKLEIERFLGWYEKLKGINYACLRYFNAAGYDIKGRIKGLEQNPANLIPVIMETACGTRKEMQIFGNDYDTPDGTCIRGYVHVSDLAAGHVLALNYISKNNKSLTVNLGSETGFSVTEVIEAARKVTDKTIPAKITGRRQGDPAALYDSSSLAFEILGWKARCSDMETILKTSWEAYKNER

SEQ ID NO: 47179 - DNA, 828 bp, Unknown
  Obtained from environmental sample
  misc_feature (1)..(828): n is a, c, g, or t
gtgaactgttattcgacgaatggagggaggtatcttaatatgacaaataaaaacctgattatcggtgctatttccggagacatcatcggctctgtttttgaatggcataatgttaaatcattggattttaatttgttctgcccaaggagcagatttacagatgacagcgtcttaacattagccacaatgtatgcgttgttaaacgatgctgattacgcgcaggcttatcacacatttggcaggaaattcccaaacgcaggatatggtcatacttttcgtagatggatttcttctgacaaccccaaaccatacaacagttggggcaatggctctgctatgcgtgttagtccggttggatggttttttaataccattgatgaaacattacttgaagcaaaaaaaagcgctgaagttacgcataatcaccctgaaggaataaaaggagcgcaagctacggcggcggccatttttttagcaagaaccggaaaaaagcaagatgatataagggactttataaatgacacatttggatataatctagaccgaaagacagacgatatcaggcctggttataaatttgatgtcagttgccagggttctgtaccggaagcgattatagccttcctggaaagtaccgattttgaaaatgctataagattggcggtttccataggtggcgatagcgatactattgcctgcattacaggaggaatcgccgaggcattttatcgggatattccggaaaaaataactaaaagggtactaaatattttgcccgaagaattaatcaggataattgaagagttttcaaatcaactaaactcataa

SEQ ID NO: 47180 - protein, 275 aa, Unknown
  Obtained from environmental sample
  DOMAIN (16)...(268): ADP-ribosylglycohydrolase
  misc_feature (1)..(275): Xaa is any amino acid
MNCYSTNGGRYLNMTNKNLIIGAISGDIIGSVFEWHNVKSLDFNLFCPRSRFTDDSVLTLATMYALLNDADYAQAYHTFGRKFPNAGYGHTFRRWISSDNPKPYNSWGNGSAMRVSPVGWFFNTIDETLLEAKKSAEVTHNHPEGIKGAQATAAAIFLARTGKKQDDIRDFINDTFGYNLDRKTDDIRPGYKFDVSCQGSVPEAIIAFLESTDFENAIRLAVSIGGDSDTIACITGGIAEAFYRDIPEKITKRVLNILPEELIRIIEEFSNQLNS

SEQ ID NO: 47181 - DNA, 498 bp, Unknown
  Obtained from environmental sample
  misc_feature (1)..(498): n is a, c, g, or t
atggaaataaaggcattatcaacaaacctgattgatgactatctggagttttttgacaatattgcttttagcgatcataaggaatggtcatggtgttattgcgcttattatcattttgatgacgatgatataaagaaactacgggaagccggaaaggataacctacggagtgaggctattgatctcataaaggaaaaaaatatacaaggctatcttgcgtatgaagaaaataaggttgttggctggtgcaattgcggcaataaaaccaactacaaacgcctgcgtacgtgtaaagaattgtgggaaggggaagaagaaaatgtaaaaataaaatcggtcgtatgctttattgtcgctcctgaaaaacgtaataaaggaattgccacacaactcctggagcgtgtttgttcagacgcaaaatccgagggttattcgtatatagaggcatatccggttaaaaacggtaaaaattgttttgatcttttccatggggcctga

SEQ ID NO: 47182 - protein, 165 aa, Unknown
  Obtained from environmental sample
  misc_feature (1)..(165): Xaa is any amino acid
MEIKALSTNLIDDYLEFFDNIAFSDHKEWSWCYCAYYHFDDDDIKKLREAGKDNLRSEAIDLIKEKNIQGYLAYEENKVVGWCNCGNKTNYKRLRTCKELWEGEEENVKIKSVVCFIVAPEKRNKGIATQLLERVCSDAKSEGYSYIEAYPVKNGKNCFDLFHGA

SEQ ID NO: 47183 - DNA, 681 bp, Unknown
  Obtained from environmental sample
  misc_feature (1)..(681): n is a, c, g, or t
atgatttttactgttctttcccgtgacagttcatgttccgctcgaaccggggttcttggcttgccccacggaacggtttctactccggtgttcatgccggtggggacttgcggcactgtcaaggcggtaaccgttgaagaccttaaagaaataggctttgagataatactttccaatacctaccatatgtacctgcgtcccggcatggaggtattggccgccgccggcggtctgcaccgctttatggcctgggacaggaatctgttaaccgattccgggggctttcaggttttttcccttgctactctgcgtaaaatagttccggaaggggtatggttccagtcccatatagacggctcccggcagtttttaagcccggaaaaagccgtggagatacagtgtgttataggcagcgacatacagatgcagcttgacgtatgcaacgggtggggagcaagttacaaggattcggaaaaggccctggctataaccactgaatggcttggtagggcgaaaaaagcgtgggaagaaaagcggggccagggttatcagggcagtcttttcagcatagtccaggggaacttttttccggatttacggaagcgcagcgtcgaggcctgtatcgcggccgatacccccggcatagcgataggcgggctttcccgtcggggagcctcctga

SEQ ID NO: 47184 - protein, 226 aa, Unknown
  Obtained from environmental sample
  DOMAIN (127)...(224): Queuine tRNA-ribosyltransferase
  misc_feature (1)..(226): Xaa is any amino acid
MIFTVLSRDSSCSARTGVLGLPHGTVSTPVFMPVGTCGTVKAVTVEDLKEIGFEIILSNTYHMYLRPGMEVLAAAGGLHRFMAWDRNLLTDSGGFQVFSLATLRKIVPEGVWFQSHIDGSRQFLSPEKAVEIQCVIGSDIQMQLDVCNGWGASYKDSEKALAITTEWLGRAKKAWEEKRGQGYQGSLFSIVQGNFFPDLRKRSVEACIAADTPGIAIGGLSRRGAS

SEQ ID NO: 47185 - DNA, 1056 bp, Unknown
  Obtained from environmental sample
  misc_feature (1)..(1056): n is a, c, g, or t
gtgataacggaagttccacaggaagaagttgtggaagaagctccacaggaagctccgcaagaaaaagttgtggaagaagctccacaggaagctccgcaagaaaaagttgaggaagaagctcctcaggaagctctgcaagaaaaagttgcggaagaagttcctcagaaagctctgcaagaaaaagttgcggaagaagctcctcaggaagctccgcaagaaaaagttgcggaagaagctcctcaggaagctccgcaagaaaaagttgcggaagaagctcctcagaaagctccacaagaaattgtagaaaaaatctcaaaagaagatgaaaaatcaatatttggcgaaccggaaaaacaaaagaaaaagaaaggttgctttctttattttataataattatttttcttcttgcaattattgcatactttgctaaaccttattatatagatatttattatgattacataggtgagaaagccgaaaaagaaaacgacaatgctgttgttgaagcagatactttaaaacaaaatcccgagcaaaatttaggtgtttccgatagcatagaaaatccttcagacactattgtagcaaaggaagagcaagacgaatctaaaactaccaaaaaaactgaagccccaaaaaaaaccgaagctcctaaaaaacgaactgaagctgaaaagcaaacagatgatgatgtagcccaagcaatagcagccgtacttaaatcagaatcaaagtcagaacctgaaccggcggcccccaaaccagtttcagagccaaaatcaaaagccaaagttgaaacttccaataaaggaaatttttacaaaaccagctttaattgcgaaaaaaacaaccatgaaattgtattattaatttgcactaacgaagaattagcaaaattagatatgcaattgaataaattgtatcagcctctaaaacgtgattatgaagaagatcaaaaagagtggcgaaaacccctaggcaaatgcaaagttgatgttagttgcttagataaaatgtccagagatagaataaaagttttgaaagacgctcagtga

SEQ ID NO: 47186 - protein, 351 aa, Unknown
  Obtained from environmental sample
  misc_feature (1)..(351): Xaa is any amino acid
MITEVPQEEVVEEAPQEAPQEKVVEEAPQEAPQEKVEEEAPQEALQEKVAEEVPQKALQEKVAEEAPQEAPQEKVAEEAPQEAPQEKVAEEAPQKAPQEIVEKISKEDEKSIFGEPEKQKKKKGCFLYFIIIIFLLAIIAYFAKPYYIDIYYDYIGEKAEKENDNAVVEADTLKQNPEQNLGVSDSIENPSDTIVAKEEQDESKTTKKTEAPKKTEAPKKRTEAEKQTDDDVAQAIAAVLKSESKSEPEPAAPKPVSEPKSKAKVETSNKGNFYKTSFNCEKNNHEIVLLICTNEELAKLDMQLNKLYQPLKRDYEEDQKEWRKPLGKCKVDVSCLDKMSRDRIKVLKDAQ

SEQ ID NO: 47187 - DNA, 372 bp, Unknown
  Obtained from environmental sample
  misc_feature (1)..(372): n is a, c, g, or t
ttgatttttcatcttcttttgagattttttctacaatttcttgtggagctttctgaggagcttcttccgcaactttttcttgcggagcttcctgaggagcttcttccgcaactttttcttgcggagcttcctgaggagcttcttccgcaactttttcttgcagagctttctgaggaacttcttccgcaactttttcttgcagagcttcctgaggagcttcttcctcaactttttcttgcggagcttcctgtggagcttcttccacaactttttcttgcggagcttcctgtggagcttcttccacaacttcttcctgtggaacttccgttatcactctcagttttcccgttaacctttccttttcggctttaa

SEQ ID NO: 47188 - protein, 123 aa, Unknown
  Obtained from environmental sample
  misc_feature (1)..(123): Xaa is any amino acid
MIFHLLLRFFLQFLVELSEELLPQLFLAELPEELLPQLFLAELPEELLPQLFLAELSEELLPQLFLAELPEELLPQLFLAELPVELLPQLFLAELPVELLPQLLPVELPLSLSVFPLTFPFRL

SEQ ID NO: 47189 - DNA, 312 bp, Unknown
  Obtained from environmental sample
  misc_feature (1)..(312): n is a, c, g, or t
ttgtggagctttctgaggagcttcttccgcaactttttcttgcggagcttcctgaggagcttcttccgcaactttttcttgcggagcttcctgaggagcttcttccgcaactttttcttgcagagctttctgaggaacttcttccgcaactttttcttgcagagcttcctgaggagcttcttcctcaactttttcttgcggagcttcctgtggagcttcttccacaactttttcttgcggagcttcctgtggagcttcttccacaacttcttcctgtggaacttccgttatcactctcagttttcccgttaa

SEQ ID NO: 47190 - protein, 103 aa, Unknown
  Obtained from environmental sample
  misc_feature (1)..(103): Xaa is any amino acid
MWSFLRSFFRNFFLRSFLRSFFRNFFLRSFLRSFFRNFFLQSFLRNFFRNFFLQSFLRSFFLNFFLRSFLWSFFHNFFLRSFLWSFFHNFFLWNFRYHSQFSR

SEQ ID NO: 47191 - DNA, 1152 bp, Unknown
  Obtained from environmental sample
  misc_feature (1)..(1152): n is a, c, g, or t
atgatactgacggccaataaccgggatgttgaaaacgcgcgcgccaacagcatgaaggaaagccttgtcaacaggctgctgctaaccgagcaggggattgaggacattgttgaaggtatcgaaattgttatgaaacaggatgaccctgtcggtaaacttagggcgggctggacattgtcaaacggtctttttgtggagcagatttccgtaccgatgggagtggcggcgattatttacgaatcgcgtccgaatgttacggtagactgcgccgcccttgcgtacaaggcaggttgttccattttgctgcgcggatcgtcatcagcgctggagtcaaaccgggcgcttgtggctgcgattaaactggggctggaggcgggcggcggcattcctgacgcggttgagctttccgaccaggcgccgcccggcagttatgaagatgtagacgaaattcttgccgccaggggctggattgacgtggtgctgccccggggcggcagggagttgatccggcgggttgttcagaactcgcgcattccggttatcgaaaccggcgagggtaattgccatatctatgtggaacccagcgccaatctggataatgccgtggaaattatagccaacgccaaactgcaaaagcccggcgcctgcaattctgtggaaaccctgctggtgcatcgagagacgcttggcccgttgatggtacggcttgtagcccggcttgccggagcggttgaattccgctgtgacgccgaatccagggcagcaatcagggatgacgttttggctgatctgaaacttaaagacgcaaccgaggaggattggggtactgaattccttgacactactcttgcgattaaaaccgtcggttcctgccaggaggcgattgaacatatcaaccgatatggaacaaaacattcggaagcaatattgactaatgacctgcattccgcccggcagttccgaaacggagttgacgcggcctgtgtttacgtcaatgcgtcaacccgttttaccgacggcggcgtattcggttttggcgcggaactggggataagcacgcaaaagtttcacacgcggggcccaatggggttggaagccctgacctcgtacaaatatctggtaagcggcacgggacagataagagtacattaa

SEQ ID NO: 47192 - protein, 383 aa, Unknown
  Obtained from environmental sample
  DOMAIN (2)...(373): Aldehyde dehydrogenase family
  misc_feature (1)..(383): Xaa is any amino acid
MILTANNRDVENARANSMKESLVNRLLLTEQGIEDIVEGIEIVMKQDDPVGKLRAGWTLSNGLFVEQISVPMGVAAIIYESRPNVTVDCAALAYKAGCSILLRGSSSALESNRALVAAIKLGLEAGGGIPDAVELSDQAPPGSYEDVDEILAARGWIDVVLPRGGRELIRRVVQNSRIPVIETGEGNCHIYVEPSANLDNAVEIIANAKLQKPGACNSVETLLVHRETLGPLMVRLVARLAGAVEFRCDAESRAAIRDDVLADLKLKDATEEDWGTEFLDTTLAIKTVGSCQEAIEHINRYGTKHSEAILTNDLHSARQFRNGVDAACVYVNASTRFTDGGVFGFGAELGISTQKFHTRGPMGLEALTSYKYLVSGTGQIRVH

SEQ ID NO: 47193 - DNA, 642 bp, Unknown
  Obtained from environmental sample
  misc_feature (1)..(642): n is a, c, g, or t
atgcttgaaagtaagttacgattgcgttttaacaagaaaaacggtacaatgaagccggctggaggaatcatgggagcgttagcgataccaaaagaaaaacgtcattttacctacgcggattacaaagaatgggaacttgccgaaggtgagcgttatgaggttatctacggcgaagcatacgccatggccgcgccgaatacacggcatcaggaaattctgggggccttatttacccagtttcataactatttacagggaaaacccctgcaggtgtttcccgcggcctttgatgtgcgtcttttctataaggaagatgaaagcgatgatacggtagttcagccggacataacagttatttgtgatgagaaaaaaatcgggaaggaaagctgccggggcgcgcccgatttagttgtggaaatcctttccccttcaaataccgccattgaaatgcagcggaaattcgacctgtaccgcgacgcgggtgtgcgtgaatattgggtactgaacaacgaacacaaaacacttacggtctatctttttgacggtgaaaaaaatattagccgcacatacggcgaaaaagacacagcgcctgtcagcgtactcaacggactttcaatagagcttgcgcctgtgtttgcctaa

SEQ ID NO: 47194 - protein, 213 aa, Unknown
  Obtained from environmental sample
  DOMAIN (69)...(179): Protein of unknown function (DUF820)
  misc_feature (1)..(213): Xaa is any amino acid
MLESKLRLRFNKKNGTMKPAGGIMGALAIPKEKRHFTYADYKEWELAEGERYEVIYGEAYAMAAPNTRHQEILGALFTQFHNYLQGKPLQVFPAAFDVRLFYKEDESDDTVVQPDITVICDEKKIGKESCRGAPDLVVEILSPSNTAIEMQRKFDLYRDAGVREYWVLNNEHKTLTVYLFDGEKNISRTYGEKDTAPVSVLNGLSIELAPVFA

SEQ ID NO: 47195 - DNA, 1338 bp, Unknown
  Obtained from environmental sample
  misc_feature (1)..(1338): n is a, c, g, or t
atgatagacggagtacgcgcccaccgcagcacggggagcattatgaagccgtttttgtatgcgctcgcaatggaacgcggaccttacacgccagagagtttaattgaagatgtcccaacttggtttagaggtttttctccccaaaactcagacaaaagtttcagcggagtagtgccctttaaagaggcccttgttcgctcgctcaatgttcctgcggttaaaattttgtcggattacggagttgaggattttcatttttggctgaaaaacgcaggacttaacggcttatcccgcccatcggagagctatgggctttccttgattttgggtggtggagaggcatctttgcaggaactcgttccgctttattcaatgcttatgaacgaaggcaaaagaacggatttgaaatggctggaagatagcactgccgaaaaaaacgagcagttattgcagagcatcaccgcttatcacatcaaggaaattttgacatctgttaagagaccagattttgagcaatatcatttgcaattcaacaaccacattcctgttgcttggaaaacaggcaccagctatggttcaagagatgcttgggcaataggggtcaatgagcaatggactataggcgtttgggtggggaattttgcgggcggttcggtagcgaatttgagcggcagtgctacggcggctccgttgttgttttctctgttcaacaatttgagcgataataaaaaaagaatgtggagcgaatttccacgagatgcagattttgaagaaattgaaatttgcactcttagcggctacaaagcaaaagatttttgccctcataaaaaatatatactgcttcctataaatagaatgcaaaacaaaatttgctcatttcacaaagagataataatttcaaaaagcacgggttttgaagtttgcagtttgtgctggaatgtagaagatactctgcacgtaattgaagagcattactcgccctctgtccgcaatgagcttagaaaaactggcagggaaccaaaagcggaaactctgcataatccgcgttgcctcgctaaaaaagaggcgattcaattttcctttgtttatccagaaaacggtgcaaggctttttttgcccagcagtgatgctttgagcgagatgggttttatagcaattgccgcgcataagcaacgtgatgctgaattgcaatggtttttagacggaaactttttgggtacaaccaaatctgagcataaaatggcggtgacggttggtagcggcgttcatcgcattggggttcaggatacgcttggaaattacttggaaacacggtttagagtgcgggcaaaaaattaa

SEQ ID NO: 47196 - protein, 445 aa, Unknown
  Obtained from environmental sample
  DOMAIN (1)...(229): Penicillin binding protein transpeptidase domain
  misc_feature (1)..(445): Xaa is any amino acid
MIDGVRAHRSTGSIMKPFLYALAMERGPYTPESLIEDVPTWFRGFSPQNSDKSFSGVVPFKEALVRSLNVPAVKILSDYGVEDFHFWLKNAGLNGLSRPSESYGLSLILGGGEASLQELVPLYSMLMNEGKRTDLKWLEDSTAEKNEQLLQSITAYHIKEILTSVKRPDFEQYHLQFNNHIPVAWKTGTSYGSRDAWAIGVNEQWTIGVWVGNFAGGSVANLSGSATAAPLLFSLFNNLSDNKKRMWSEFPRDADFEEIEICTLSGYKAKDFCPHKKYILLPINRMQNKICSFHKEIIISKSTGFEVCSLCWNVEDTLHVIEEHYSPSVRNELRKTGREPKAETLHNPRCLAKKEAIQFSFVYPENGARLFLPSSDALSEMGFIAIAAHKQRDAELQWFLDGNFLGTTKSEHKMAVTVGSGVHRIGVQDTLGNYLETRFRVRAKN

SEQ ID NO: 47197 - DNA, 438 bp, Unknown
  Obtained from environmental sample
  misc_feature (1)..(438): n is a, c, g, or t
gtggcttccgaacatactgtcccttgccatagggctggtactggcggtaataaggatacgaaaatgattctggataaatatttactgcgtcaattccttcctatttttatcatcgcggtttccatgtttgtttttctccttctgttaatcgatcttttttcaaacttggtgcgttatctgaacaatgaagtgccttttacgatgataatgaaaataagtttgtattttatcccgaaaagtttttcttacgcgatgccgatctcccttctttttgccgccgcctatacgcttggggatcttttcgcgagaaacgagcttacaaccatattttcttcgggtgttcccttctggcgtttcagtatttcgcttataatagtgggtcttgcagcttccgttttttccttcttccttgacgatactatcgtaatccccacttaa

SEQ ID NO: 47198 - protein, 145 aa, Unknown
  Obtained from environmental sample
  misc_feature (1)..(145): Xaa is any amino acid
MASEHTVPCHRAGTGGNKDTKMILDKYLLRQFLPIFIIAVSMFVFLLLLIDLFSNLVRYLNNEVPFTMIMKISLYFIPKSFSYAMPISLLFAAAYTLGDLFARNELTTIFSSGVPFWRFSISLIIVGLAASVFSFFLDDTIVIPT

SEQ ID NO: 47199 - DNA, 1278 bp, Unknown
  Obtained from environmental sample
  misc_feature (1)..(1278): n is a, c, g, or t
atggcattggaaagcaagcggggtcttttccgcaacccttttttaagtatatattatcagaggcgcttttttcgtttttattgggttttcttttttttcttctttattttttttgtaaaccagatacttcttatggcaaaagaagttcttaccaagcatgtgcctttcggacaggtcgcccttttaatacttttttccctgcccacagttatcgccatgtccgccccgttcgcgtcgcttgtcgggacattaatgaccgtaggacggcttacctctgataacgaaattcttgttatgctttcgtcaggcctttcttataaaaatatttttcttcccgccataactgtaggaattattatttcgatactgtcgtttattacaaatgatattctgcttccggcgggcaccgtccagtttaataaattatggcggcgtattcttttctccactcccgcgctggaactggaagctaattctgtaaaaaggttcagggatacggtaattgtaacgggcgacgttaccgacaatacaattaaaaacgtaatgattcttgacaagacttccgacggcgagcgaagggtaataatggcaagccaggctgaattaaaggacagcggcaacgaaggcttaagtctggaactggaaaacgcctttgtccagtcgtcaaaagaaattgccagagaagattatgactacgcctccgcgagttctttgcagtactggatatcgaacgaggatattattcaggctgttatgagcgtaagccccagggagatgagttcaagagatgtccgtaaggcggtaatacaaaaaacttttgatgttataaaaaaagcgaatgacagaaaggggaaagttcttatacagacggctaatcttgaaaatactttaagaagagggccttcgggagaattatggagcagaaaacagacaagtatcgtaaattttcagcgtgaaacacagactcttgccggaatctacaaagaccgctcgcttaccatacatataatagaatattataaaaagttttccgtccccttcggcgcgttcttttttgtgtttttagcagtgtctttgggacttatggcaaaaaaaagcgggcagacagtcgggtttattttcggcaatataatcgcggtcatttactggtccatgctttttatagggcagacaatgggcttgcgcgtagggactcctcctttctggtcaatgtggcttccgaacatactgtcccttgccatagggctggtactggcggtaataaggatacgaaaatga

SEQ ID NO: 47200 - protein, 425 aa, Unknown
  Obtained from environmental sample
  DOMAIN (21)...(421): Predicted permease YjgP/YjgQ family
  misc_feature (1)..(425): Xaa is any amino acid
MALESKRGLFRNPFLSIYYQRRFFRFYWVFFFFFFIFFVNQILLMAKEVLTKHVPFGQVALLILFSLPTVIAMSAPFASLVGTLMTVGRLTSDNEILVMLSSGLSYKNIFLPAITVGIIISILSFITNDILLPAGTVQFNKLWRRILFSTPALELEANSVKRFRDTVIVTGDVTDNTIKNVMILDKTSDGERRVIMASQAELKDSGNEGLSLELENAFVQSSKEIAREDYDYASASSLQYWISNEDIIQAVMSVSPREMSSRDVRKAVIQKTFDVIKKANDRKGKVLIQTANLENTLRRGPSGELWSRKQTSIVNFQRETQTLAGIYKDRSLTIHIIEYYKKFSVPFGAFFFVFLAVSLGLMAKKSGQTVGFIFGNIIAVIYWSMLFIGQTMGLRVGTPPFWSMWLPNILSLAIGLVLAVIRIRK

SEQ ID NO: 47201 - DNA, 972 bp, Unknown
  Obtained from environmental sample
  misc_feature (1)..(972): n is a, c, g, or t
gtggcccagcgagagaaaaatcaacgtgaaattttttacaacgagctagggccactacgcatcgcatggattttagcaattttagcagttgctcttttagtagccgccatcgccagcaagcgcaggtggttgaacgcaacggcgctttttgcgattacttgcagcttttgcatgatgacgctgtgcatcgccctgcgctgggtggcgggcgacagggtacccgccgcaaacatgtatgagtccatgctgtttttgtcctgggggctggggctggccgcagttgtttcatgctgcttttgcaaaacaagagccctcgcgcttaatgcggctggcatggccgcgctggcaatgatgctggcggacctgctgccgctggacagctttatacgcccagtcgcccctgtattggcaggaacaccgtggctggccatacacgtgccaatcatcatggccggatacgcgctattggccatgggaatggcagcggcccacttgcatcttggcgcgcacgtcttttgcactcgagggagcgatggcagtgccttggcggataaattttatgacatgctacattggtacaatattatcgggtcatttttattgctggcggggataattactggctcgatgtgggcatcatcgtcttggggaaggtgctggggctgggaccccaaagaagtgtggtcgctggtggccctcttggcttacattgcgatagcccatgctcgcgccgctgggctgattggaaaacttggcgccgcgatttgcagcgtcctagcctttcagacgatcctgatggcctacttgggcgtcaactatgtcttggcgtcgggcctgcactcctacggcatgggcaactcgccgatagcgatttggctgctgattgtcggtgtggtagagttggcgtttgttggcgcagcttcaagggggcatggaatagggctggactgtcgagcgctcggccgattctga

SEQ ID NO: 47202 - protein, 323 aa, Unknown
  Obtained from environmental sample
  DOMAIN (75)...(280): Cytochrome C assembly protein
  misc_feature (1)..(323): Xaa is any amino acid
MAQREKNQREIFYNELGPLRIAWILAILAVALLVAAIASKRRWLNATALFAITCSFCMMTLCIALRWVAGDRVPAANMYESMLFLSWGLGLAAVVSCCFCKTRALALNAAGMAALAMMLADLLPLDSFIRPVAPVLAGTPWLAIHVPIIMAGYALLAMGMAAAHLHLGAHVFCTRGSDGSALADKFYDMLHWYNIIGSFLLLAGIITGSMWASSSWGRCWGWDPKEVWSLVALLAYIAIAHARAAGLIGKLGAAICSVLAFQTILMAYLGVNYVLASGLHSYGMGNSPIAIWLLIVGVVELAFVGAASRGHGIGLDCRALGRF

SEQ ID NO: 47203 - DNA, 441 bp, Unknown
  Obtained from environmental sample
  misc_feature (1)..(441): n is a, c, g, or t
ttgacgcgggggttggaaaaagcgcaagctattgccgccgatccgcaattgggcgctgaggaaaaattgttatcagtgattatggcgcaaaaactgaaaaaaccggcaaagaaaaatattttaccgattattcataaacctgccaatgcgttacttcaccagaaaattctttccgaatatgtccttaggcttagtcccattctaactgatattgttcaagaggggatcgccaaaaaagattttaatactccatatcccaaagaaattaccgagatacttttgactgccggtttggttattttcgataccgcctacttccgctggacacaggaagaacagatgcggcgtatttccgcctttatttatactatggaacggctaacgggagcaaaaccgggaagtatggcgcaattatccggtatgtttataataaaccactaa

SEQ ID NO: 47204 - protein, 146 aa, Unknown
  Obtained from environmental sample
  misc_feature (1)..(146): Xaa is any amino acid
MTRGLEKAQAIAADPQLGAEEKLLSVIMAQKLKKPAKKNILPIIHKPANALLHQKILSEYVLRLSPILTDIVQEGIAKKDFNTPYPKEITEILLTAGLVIFDTAYFRWTQEEQMRRISAFIYTMERLTGAKPGSMAQLSGMFIINH

SEQ ID NO: 47205 - DNA, 1434 bp, Unknown
  Obtained from environmental sample
  misc_feature (1)..(1434): n is a, c, g, or t
atgcaaaacgggattttaaccgctaaagaacgattagctattcctccgcaaaaaatgccggaacaggacccgcagatacgagcaaaaaacctctgcgaggttgccgtcggttattccaaagagcaggcggtcacagaggcaaaaagatgcctgaactgcaaaaaaacgggctgcatggatggatgccctgttcgcataaacattcctgtattcatcaaatacatggccgatggcgattttcaaagtgctatagacacaataaaagaaacctcgcttttacccgctgtttgcggcagggtttgcccacaggaaaagcaatgccaaaaaaagtgcgtagttggggtttctttaaaagatgttgaaaaatctgtggcaataggcaggctggagagatttgctgctgattgggaaagggaaaacggagagattaaaatccccgtagtgaaagccgaaacaggaaagaaagttgcagttatagggtctggccctgcgggtttggttgttgcagcggatgtacgcagggaagggcattcggtgaccatttttgaggcatttcataagctgggcggggttatgcgctacggcattcctgaattccgtttgccaaaccatatagtggataaggaaattgagaccctgaaaaaaatgggcattgagtttaaaacgaattttgtagttggcagaacccgcaaattagcggacttgctcaaaaaagatggctatgatgctgtgttcataggcacaggtgctggcttgccgctttttatgggaatacccggagaagatttaaacggggtgttttccgcanatgaatttttgaccagggcaaatttgatgcgcgcttacgaaagcgatgcagacacccctatttgggaaggaaagcaggtagcggttttgggtggcggcaatgtagcgatggatgctgccagaatatctgtgcgcttgggtgcaaaggttcgcataatttaccgcagaacagccgcagaaatgcccgcaagggcagaggaaattcaccacgctatggaagagggagttgagttttgctatttgcaaaacccaagcgaaattttaggcgatgaaaagggttttgttcgcgctttgaaaatagaacgctacaaactcggcgaaccagacgaaaaaggcagaccacgccccgtgaaaattgaaggagaatcttttgaacttcctgttgatacggttttggtcgccataggaaattcctccaatccgctaataagccaaggaactcccgatttgaaagtgaataaaagaggcaatattgagcttttgaacccagagacaaatgccacatatatggataaggttttcgcaggtggcgacattgtgcttggagcggcaacggtgatactcgctatgggcgagggcaggcgggctgctagggggattgtggagatgcttgggaagttactttaa

SEQ ID NO: 47206 - protein, 477 aa, Unknown
  Obtained from environmental sample
  DOMAIN (155)...(249): Pyridine nucleotide-disulphide oxidoreductase
  misc_feature (1)..(477): Xaa is any amino acid
MQNGILTAKERLAIPPQKMPEQDPQIRAKNLCEVAVGYSKEQAVTEAKRCLNCKKTGCMDGCPVRINIPVFIKYMADGDFQSAIDTIKETSLLPAVCGRVCPQEKQCQKKCVVGVSLKDVEKSVAIGRLERFAADWERENGEIKIPVVKAETGKKVAVIGSGPAGLVVAADVRREGHSVTIFEAFHKLGGVMRYGIPEFRLPNHIVDKEIETLKKMGIEFKTNFVVGRTRKLADLLKKDGYDAVFIGTGAGLPLFMGIPGEDLNGVFSAXEFLTRANLMRAYESDADTPIWEGKQVAVLGGGNVAMDAARISVRLGAKVRIIYRRTAAEMPARAEEIHHAMEEGVEFCYLQNPSEILGDEKGFVRALKIERYKLGEPDEKGRPRPVKIEGESFELPVDTVLVAIGNSSNPLISQGTPDLKVNKRGNIELLNPETNATYMDKVFAGGDIVLGAATVILAMGEGRRAARGIVEMLGKLL

SEQ ID NO: 47207 - DNA, 318 bp, Unknown
  Obtained from environmental sample
  misc_feature (1)..(318): n is a, c, g, or t
gtggtttatttggaattgctacgcaggggctaccgtgtttctgttggaaatgttaaatcaaaggtagtccaaacaaacggcaaatacgaaaggaaaacgatagaggttgattttgtagcccaaaaacctggtggtgaagtagaatattatcaggtggcattgtacgctttggcttcggaagaaactttaaggcgagaattggcaccactagaagagatagacgataactatccaaaattccttttaactatggatccaggcaatggcacgaatagggggattaaacgcttgaatgttttggaatggcttttaaagtaa

SEQ ID NO: 47208 - protein, 105 aa, Unknown
  Obtained from environmental sample
  misc_feature (1)..(105): Xaa is any amino acid
MVYLELLRRGYRVSVGNVKSKVVQTNGKYERKTIEVDFVAQKPGGEVEYYQVALYALASEETLRRELAPLEEIDDNYPKFLLTMDPGNGTNRGIKRLNVLEWLLK

SEQ ID NO: 47209 - DNA, 1584 bp, Unknown
  Obtained from environmental sample
  misc_feature (1)..(1584): n is a, c, g, or t
atggccgagcggccgagcctggacggttatgaattcctacatttgttgaacggcgtttatgcctcagaaaattacaagctccttacaaccatattgcgggaggaatggggttttaagggcatagtagtaaccgattggggtgctgttaatgatcgggttgaaggtttaaaagctgggcaggatctggaaatgcccggtctcggcgatttaaacgacaagaaaattgtggcggcggtaaaaagcggcgttgttggtgaggatgttttaaataagaccgcgcttcgtctggttgacttgatccttaaggctcaggaaaaccggcgggaaaattatcaatacgataaggcggcgcatcatgcgtttgcgtttaaggttgcgcttgaatctgcggtgctgcttaaaaacgatggcgatgtattgccggtaaaacaggggcagagcctcgcggtaattggcgcttttgccaaaacgccgcgttatcagggagcagggagcagcaagattgtccccaataaaatcgataacgcctatgacgtactcaaagccaccggtgtgtcatttgattatgcgcagggctatgcaggtacaaatcccgatgccgcacttatagaagaagcggttcgcgttgccaaaggcaaagacaaggtggtaattttcgcggggcttcccgatgaatacgaaagcgaaggctttgaccgcgcttcttttgatatgcccccaagccataataagctgatagaagcggttgccgaagtaaacccgaatgtcgctgttgttttacagctcggcgctccggctgcgctgccctgggcaggcaaggtaaaaggtattctgtcggcgtatctttgcggacaggctggaagcggcgctattgttgatttgcttttgggcaaaagctccccaagcggcaaacttgcggaaacatggcccttctccattgaagacactccctgttaccattattatccaggaggtttccgaagcgcggattacagggaaagtatttttgtgggctaccgctactatgatcatggcgaaaaaccggttgcctttccctttggccacggcctttcttataccacctttgcgtacagcaatttgaaattgagcagtgcttcttttttttctggcgacaggttggaggtcagctttgatgttaaaaacacagggaatagctccggggccgaaatcgcccagttatacgttgcgccgaaaaaaacggtgattatgcgggccttaaaagagctcaagggttttgaaaaagtttttctgcaaaagggtgaatgccgcacggtaaaaatttcgctggatgcccgttccttcgcttactacaacgttccgaaaggaacctgggccattgaaggcggcgcttacgaaatcctcgtgggcgcttcaagccgcaacatttccctgcggggcgaagtccaggtaaccggtgatggatatgaaacactgctgaaagatcaacgcaaaagctcgccggaatattttaacatgggcgcaaaaggtttaaaatcagcgatggatcttttgaggccctgtacgggcaaaaactgccgccaaacaaacgggaagcggggctga

SEQ ID NO: 47210 - protein, 527 aa, Unknown
  Obtained from environmental sample
  DOMAIN (130)...(361): Glycosyl hydrolase family 3 C terminal domain
  misc_feature (1)..(527): Xaa is any amino acid
MAERPSLDGYEFLHLLNGVYASENYKLLTTILREEWGFKGIVVTDWGAVNDRVEGLKAGQDLEMPGLGDLNDKKIVAAVKSGVVGEDVLNKTALRLVDLILKAQENRRENYQYDKAAHHAFAFKVALESAVLLKNDGDVLPVKQGQSLAVIGAFAKTPRYQGAGSSKIVPNKIDNAYDVLKATGVSFDYAQGYAGTNPDAALIEEAVRVAKGKDKVVIFAGLPDEYESEGFDRASFDMPPSHNKLIEAVAEVNPNVAVVLQLGAPAALPWAGKVKGILSAYLCGQAGSGAIVDLLLGKSSPSGKLAETWPFSIEDTPCYHYYPGGFRSADYRESIFVGYRYYDHGEKPVAFPFGHGLSYTTFAYSNLKLSSASFFSGDRLEVSFDVKNTGNSSGAEIAQLYVAPKKTVIMRALKELKGFEKVFLQKGECRTVKISLDARSFAYYNVPKGTWAIEGGAYEILVGASSRNISLRGEVQVTGDGYETLLKDQRKSSPEYFNMGAKGLKSAMDLLRPCTGKNCRQTNGKRG

SEQ ID NO: 47211 - DNA, 663 bp, Unknown
  Obtained from environmental sample
  misc_feature (1)..(663): n is a, c, g, or t
ttggatccccgaacaaaactggtattgacggcactctttactgtttctgtttttgtcattgatacattgattattgccgcgctgcagatggcgctttttcttggcttatgcctcgcggcaaaagtacccctcaaaaaaatattcccccgccccttgtttctggctgtccttataacattggtcacggcgctgcaattattctttgggcagggcctgttcaccggtttgatgataggctgccgcattattacgctggtcgtccttatgccgatactggtcatgaccaccgactctcagcttcttgccctgggcattacccggctgggattacattaccgcgcggcttttattattacttccacgcttaatttgattccgtcatttgaagaagaagcccggctgattatggatgcccgcagactgcggggcatacgttccgcacgtctgcgggaatatccggcgatcgcccttcccctggtgatcaaagcgatgcggcagtctcaaatgaccgcgctggcgatggactcaagggcattcggcgcataccggaccagaacatggatgagggaactaaaattatccgcccttgactatggagcctttgccgcgggcatagcctggtgtcttaccgcggcggcggcaaactacttccttaaaaggtaa

SEQ ID NO: 47212 - protein, 220 aa, Unknown
  Obtained from environmental sample
  SIGNAL (1)...(19)
  DOMAIN (1)...(188): Cobalt transport protein
  misc_feature (1)..(220): Xaa is any amino acid
MDPRTKLVLTALFTVSVFVIDTLIIAALQMALFLGLCLAAKVPLKKIFPRPLFLAVLITLVTALQLFFGQGLFTGLMIGCRIITLVVLMPILVMTTDSQLLALGITRLGLHYRAAFIITSTLNLIPSFEEEARLIMDARRLRGIRSARLREYPAIALPLVIKAMRQSQMTALAMDSRAFGAYRTRTWMRELKLSALDYGAFAAGIAWCLTAAAANYFLKR

SEQ ID NO: 47213 - DNA, 690 bp, Unknown
  Obtained from environmental sample
  misc_feature (1)..(690): n is a, c, g, or t
atgtctgctggaaagaccatgagcccgaaatggggacttatcttttccgcgcttgaaaaatggcggacgcaactatcaaaatcaaatgaagccgatccttctgtaaataccgtagcggaacattaccgccgtgatccatgggcggtactggtttctactatcataagccttcggacaaaggatgaagttactctttccgcatcagaacggctgcttgaaaaagcaggtaaccctgaggaattaagccggatgaaagaagaaaagattgaaaaattgatataccctgccggattttaccggaataaagctgcttctctaaaaaaaattgcaaatattttacttgaacaatataacggaaaagtaccggcttcaatggatgaattgcttgctcttcccggcgtaggaagaaagacagccaatcttgtgttaaacgaagcctttgaccttgacgctatttgcgttgatattcatgttcacagaatatccaaccgctgcggttggcttttaagcaaaacacctgaagaaacagaaatgattttacgcgatattctgccgaaaaaatactggaaaaggatcaattaccttcttgtcctctacggacaaagactctgccgtcccgttagccctttttgttcatgctgtgtaattgaaaaatactgcctgcgaaatggtgtagagcgttcaaggtga

SEQ ID NO: 47214 - protein, 229 aa, Unknown
  Obtained from environmental sample
  DOMAIN (116)...(145): Helix-hairpin-helix motif
  misc_feature (1)..(229): Xaa is any amino acid
MSAGKTMSPKWGLIFSALEKWRTQLSKSNEADPSVNTVAEHYRRDPWAVLVSTIISLRTKDEVTLSASERLLEKAGNPEELSRMKEEKIEKLIYPAGFYRNKAASLKKIANILLEQYNGKVPASMDELLALPGVGRKTANLVLNEAFDLDAICVDIHVHRISNRCGWLLSKTPEETEMILRDILPKKYWKRINYLLVLYGQRLCRPVSPFCSCCVIEKYCLRNGVERSR

SEQ ID NO: 47215 - DNA, 882 bp, Unknown
  Obtained from environmental sample
  misc_feature (1)..(882): n is a, c, g, or t
atgaaaaaaaaccagcgtttttcaagtttgcacaaccacacgatattctgcgacggcaaagacgatatagaaaccatgtgccgcgccgcgtttgaaaaaaaactttgcgcgttggggttcagcgcccacgcgccgattacaaaaaaaacaggcatagaaagccactggaatttaaaagacgataaatttgaagaatatgttgaacaggtgcttgcggcaaaaaaacgctggcgagggaaactggaagttttgcttggttttgaagttgattatatcaaaggattgcgttcggctttggataaggacatcactgaagtaaaccccgattatttaataggaagcgttcattatttgattccggcaaacggcgcgaaaccgtttactgtagacggcccgcaggaagaattaactcagggaattaacgaaggttttaacggggacgcgcaggcgtttatgaacagttattacgacgcgcagctagagatgattgcgctcggcggttttgatatattagggcacgcggatcttatcaaaaaaaattgttttgggaagaatttatggccgggggaaattgagatttgccgccagaaagaaatcgcgcgcgctgccgccgaagcggaaataacgtnagaagttaataccggaggtattaacaggagaaaaatcaacgatgtttacccgtcaaaacaatttttgtgtnttctgcgtgaaaataatgttcctgtaataataacagcggacgctcattgtgcaaatgatattaacggaaattatgataaagctgtacaggcgctgatttgcgccgatattaaggaacatgtgatttttttgggaaaaagcaataaaaaagccgcatggaaaaaagaaaaaatatcgtattaa

SEQ ID NO: 47216 - protein, 293 aa, Unknown
  Obtained from environmental sample
  DOMAIN (8)...(252): PHP domain
  misc_feature (1)..(293): Xaa is any amino acid
MKKNQRFSSLHNHTIFCDGKDDIETMCRAAFEKKLCALGFSAHAPITKKTGIESHWNLKDDKFEEYVEQVLAAKKRWRGKLEVLLGFEVDYIKGLRSALDKDITEVNPDYLIGSVHYLIPANGAKPFTVDGPQEELTQGINEGFNGDAQAFMNSYYDAQLEMIALGGFDILGHADLIKKNCFGKNLWPGEIEICRQKEIARAAAEAEITXEVNTGGINRRKINDVYPSKQFLCXLRENNVPVIITADAHCANDINGNYDKAVQALICADIKEHVIFLGKSNKKAAWKKEKISY

SEQ ID NO: 47217 - DNA, 426 bp, Unknown
  Obtained from environmental sample
  misc_feature (1)..(426): n is a, c, g, or t
ttgacgcgcagggcaagggcgctttctatcgaggagaagcctgcaaaaccaaaatcccattacgcggttccaggtctttatttttacgataacgaagttgtacaaatagcgaagaatattaaaccaagcgcccgcggcgagatagaaattaccgaagtaaacaacgcctatcttaaaaaaggcggactttctgttgaagttcttggccggggcatggcgtggctggacacgggaacctacgacgggcttttagaagcggcgaattttattgaaacaatacaaaaacgccagggaatgtatgtttcctgcatagaagaaattgcgtataacaacggctggctttcgaaggaagacttgttaaagctggcgggcgaatataaaaccgaatacggtaattacctaaaatatatagcggaggataaataa

SEQ ID NO: 47218 - protein, 141 aa, Unknown
  Obtained from environmental sample
  misc_feature (1)..(141): Xaa is any amino acid
MTRRARALSIEEKPAKPKSHYAVPGLYFYDNEVVQIAKNIKPSARGEIEITEVNNAYLKKGGLSVEVLGRGMAWLDTGTYDGLLEAANFIETIQKRQGMYVSCIEEIAYNNGWLSKEDLLKLAGEYKTEYGNYLKYIAEDK

SEQ ID NO: 47219 - DNA, 417 bp, Unknown
  Obtained from environmental sample
  misc_feature (1)..(417): n is a, c, g, or t
atgaaagtatattttgatactaatatagtggttgatattctgctgaaaagagagccattttttggcacttcgtttgaggtgcttacaaaggtggcggaaggcgatgccgaaggttttattggagcaaatgcgatagttgatatattttatattgttaataaaaatttaaagaatcataatgaaaccataaattctatatttgacgtactggaaatactctcacttgcagatacaaccgcacaagatattttcaatgcaaaacgtttgaatatgcctgattacgaagatgctgttatagctaccatagcgtttagagagaacgcttcttatattgtgactcgaaataatgcagactatgcgaattctccagttcctgtaattacaccaacagattttattgcaagtttgtcgccataa

SEQ ID NO: 47220 - protein, 138 aa, Unknown
  Obtained from environmental sample
  DOMAIN (3)...(124): PIN domain
  misc_feature (1)..(138): Xaa is any amino acid
MKVYFDTNIVVDILLKREPFFGTSFEVLTKVAEGDAEGFIGANAIVDIFYIVNKNLKNHNETINSIFDVLEILSLADTTAQDIFNAKRLNMPDYEDAVIATIAFRENASYIVTRNNADYANSPVPVITPTDFIASLSP

SEQ ID NO: 47221 - DNA, 648 bp, Unknown
  Obtained from environmental sample
  misc_feature (1)..(648): n is a, c, g, or t
atgccagatattttgccaaaaaatctaaacctttttcaagccgagcaagcattaagcgaacatttcaaagactgcattttaataggtgtagatgaggcaggtcgcggtccattggctggtcccgtggtcgcaggtgctgctgttttggcggctggaaccacaatacccactttaaacgattccaaaaaattaaccgaaaaacaacgcgaacaaattttcgcggaattgccgggtcattgcaaataccattccatcggcgaagcctcagcgcaagaaatagacgacattggaattttaaacgcaacattcttggctatgaggcgtgcacttgccccaataatttcacagctcaacgaaaaaaaattaccctataaaattttggtggatggaaatttgcacataagggaaatagacaaagatttgcaaatgcccatagtcaaaggagatggcagggtggcttgcattgctgctgcctctatttttgcaaaggtgcatagggataggttaatggtgaaatttgcagagcaattcccaaattatggttttgaaaagcacaaaggctatggcacaaaagcacacttgcttgctatacaaaaatttgggcaatgcgaaattcataggaagagttttagggttgtggttaactga

SEQ ID NO: 47222 - protein, 215 aa, Unknown
  Obtained from environmental sample
  DOMAIN (28)...(213): Ribonuclease HII
  misc_feature (1)..(215): Xaa is any amino acid
MPDILPKNLNLFQAEQALSEHFKDCILIGVDEAGRGPLAGPVVAGAAVLAAGTTIPTLNDSKKLTEKQREQIFAELPGHCKYHSIGEASAQEIDDIGILNATFLAMRRALAPIISQLNEKKLPYKILVDGNLHIREIDKDLQMPIVKGDGRVACIAAASIFAKVHRDRLMVKFAEQFPNYGFEKHKGYGTKAHLLAIQKFGQCEIHRKSFRVVVN

SEQ ID NO: 47223 - DNA, 651 bp, Unknown
  Obtained from environmental sample
  misc_feature (1)..(651): n is a, c, g, or t
atgaatagaatagcggaagtttccagaaagacaaaagagactgatatttccatcaagttgaacattgacgggaccggcattgcgaaactggattatccaatcggctttatggggcatatgcttaatacattcgcgcgacacgggctgtttgatctggaaattaccgcaaagggcgatcttgaggttgaccagcaccacctggtggaggatacgggaatcgttttgggccagtgcttcgccaaagcgttaggtgaaaaaagggggatacggcgcaacgggagctgcctttttcccatggacgaaacccttgcccgcgcctcggttgatatttcaggccgtagttttttgttttttgacggccagcttggagacgcgccattaatcgccgctgcctcagatacggacaagcctttccagttccagaccgataccattgaagatttttggcagggctttacgggcgcggccggctgcaatctgcatttggaagtcatccggggcagaagcgaccaccacaaaatagaggccctgtttaaggcggccgcccgttcccttaggatggcctgtgaaattgacgagcgcgcgcgtgatgcgatcccctcaactaaaggctctctgccggggtttgagtcaccgggggtgttggtttaa

SEQ ID NO: 47224 - protein, 216 aa, Unknown
  Obtained from environmental sample
  DOMAIN (34)...(186): Imidazoleglycerol-phosphate dehydratase
  misc_feature (1)..(216): Xaa is any amino acid
MNRIAEVSRKTKETDISIKLNIDGTGIAKLDYPIGFMGHMLNTFARHGLFDLEITAKGDLEVDQHHLVEDTGIVLGQCFAKALGEKRGIRRNGSCLFPMDETLARASVDISGRSFLFFDGQLGDAPLIAAASDTDKPFQFQTDTIEDFWQGFTGAAGCNLHLEVIRGRSDHHKIEALFKAAARSLRMACEIDERARDAIPSTKGSLPGFESPGVLV

SEQ ID NO: 47225 - DNA, 948 bp, Unknown
  Obtained from environmental sample
  misc_feature (1)..(948): n is a, c, g, or t
ttggggctcccgcacagccgcatattctataaacacggcttaacgccgtgcccacttggcgtccatgtcaaattccgttacagttcattcatggctgataaattgcgattgcttgttcccaaagggaggatttttgaaaaaattgcgggccttctgaccgaggccggttttcccatagcactgacggagcgtacctacaggccgtctctgggcgccgactggattgacgctaaaattatgaaaccgcagaacgtaggcgaacttctggaactgggcagccacgacgcgggttttaccggcatagactggatcagggaaagcggcgccgatgtcgccgaagtcatggatttgggctttgacaaggtgaaaatcgtggcggctgttcctcaaggatccggtgaagattaccttaaatccaaaaaactggttgtcgccacggaatacgtgaatctcgcgaaatcatggcttgagaaatcgggttaccaataccggattctccgcacctacggggccaccgaggttttcccgccggatgatgccgatatgatcattgacaatacatcctctggccagacgcttagggataacggtctgaggattataggcgtgatccttgagtcctccacgcgctttgtcgcttcgcatacggcgcttgccgatcccgaaaaacggaaccgcattgaggagcttgccatgctgttccacgcggttcttgacggccgcgaacgggttatgctggagatgaacattccaaaggatcgctttgaggcggtggcaaacagcctgcctgcaatgcgcagcccgaccgtcgcccccttgtttggcgacagcggttatgcggtaaaaatcgcggtaaagaggagcgaggttcccgatattattccgcgcctgaaaaaacttggcgccgtggacattgtggaatatgatctgcggaaagtggttccttaa

SEQ ID NO: 47226 - protein, 315 aa, Unknown
  Obtained from environmental sample
  DOMAIN (239)...(313): HisG, C-terminal domain
  misc_feature (1)..(315): Xaa is any amino acid
MGLPHSRIFYKHGLTPCPLGVHVKFRYSSFMADKLRLLVPKGRIFEKIAGLLTEAGFPIALTERTYRPSLGADWIDAKIMKPQNVGELLELGSHDAGFTGIDWIRESGADVAEVMDLGFDKVKIVAAVPQGSGEDYLKSKKLVVATEYVNLAKSWLEKSGYQYRILRTYGATEVFPPDDADMIIDNTSSGQTLRDNGLRIIGVILESSTRFVASHTALADPEKRNRIEELAMLFHAVLDGRERVMLEMNIPKDRFEAVANSLPAMRSPTVAPLFGDSGYAVKIAVKRSEVPDIIPRLKKLGAVDIVEYDLRKVVP

SEQ ID NO: 47227 - DNA, 741 bp, Unknown
  Obtained from environmental sample
  misc_feature (1)..(741): n is a, c, g, or t
atgataatcctagggatcgacacctcgtcaaccgacctatccgtaagcttatgcgtcaacggcgttcctctgtcgtccgtggacaggtacgtcaaaaacgcgcacgccgagcatatcgctcaaactgtgaccaccgcgctcgatttgggcggcgtggtggccggcgacgttaaacatatagccgtatcaatcggccccggatcgtttacaggcctgcggatagggctctctttcgtcaagggtttttgcgtggcggcggagcgtacggttcttccgctgtcgtcgcttttagtactagcccacgccgcggccggcagcggcggcggcccatcccaaaggatattcgccgcattggacgcgcgtcagggacgggtgcattggggcggctttgtctgcgaacgaggcgacgataagaccggcatacgcagactgactgaagaccgcctgtctccccctgaggaactgctcggcgagctatcgcaaaacgacatcctggttaccgacacaatggggtatcagcgcagcgccgtattcggcgcgttcgcgggcgcggcgcaaatcatcgaagcgcataagtcgtccctgcgacgcgggttgtcgtgcgcttccatcgcctttgaccgtaccgtcaataaagataattacgataacaataagctccaatggctgccggccgcgccggtagttcccaactacctgcaagcgtcggcggcggaagaaaagagggctttatgcacttaa

SEQ ID NO: 47228 - protein, 246 aa, Unknown
  Obtained from environmental sample
  DOMAIN (21)...(242): Glycoprotease family
  misc_feature (1)..(246): Xaa is any amino acid
MIILGIDTSSTDLSVSLCVNGVPLSSVDRYVKNAHAEHIAQTVTTALDLGGVVAGDVKHIAVSIGPGSFTGLRIGLSFVKGFCVAAERTVLPLSSLLVLAHAAAGSGGGPSQRIFAALDARQGRVHWGGFVCERGDDKTGIRRLTEDRLSPPEELLGELSQNDILVTDTMGYQRSAVFGAFAGAAQIIEAHKSSLRRGLSCASIAFDRTVNKDNYDNNKLQWLPAAPVVPNYLQASAAEEKRALCT

SEQ ID NO: 47229 - DNA, 2361 bp, Unknown
  Obtained from environmental sample
  misc_feature (1)..(2361): n is a, c, g, or t
atggaaaaaattactatagacgcggcgcggataagcgcgggtgatctggatcatgttttggaagtcaaaacaggcgacgaacttgagatattggtggccgccctcaattccatgatcaccggtataaaaacaattacagccgaaaaagagcgccttgaaatcgccagcgcggaaaaaacacgcgaaaccgagcttatccaggaagcgaatcaaaacctgcaaacaatattaaatatgcttccggtcggcgttggcgtcatgagtacggaggatcacactttcctttttaccaacaaggcgtttctggaagtttttaattgtacaaccatagatcagatattgggacacagcgcgtttgaatttatgcctgtaatacagccggacggcaaaaaaaccaaggtaaaactctctgagattttccagcaagaatcagctaatacggaaatacaatgcgttaaatccggcggcaatccgttcatcgcgcgtgttcacaccattgccactaattttaaaggcgtgaccgcttctcttggcgttgttgaggacacgacggcggaaaaagaatatcatgaaaaacttcaaaacatcgccctgcaggagcaggaagccaatcagcttaagagccgcttccttgcgacgatgagccatgagatccggactccgttgaatgtaatattgggcataatggaaattcaactgcaaaaagacgacaaccctcctgatacgcaggaagcgctggaacaaatatacgaatcggggagcctgcttcttaacatcatcaacgacatacttgatttttccaagattgcggagggcaaaatggagatagtgcctttccggtacgatattccgagtctgataaacgatacctcgcagatgaattatatgcgctgtgacagcaaactgattgagtttatcgtttcggtcgaccctaatacccccctggagctgataggcgacgggcttcgcgtcaaacagattttaaacaacctgctttccaacgcgttcaaatacaccaaagaaggcgaggttgagttgtcggttttttccgaatcccccagtgccgataaagattcgagcgaagacgtaattctcgttttcaagatacgcgacaccgggcagggcttatcagaggaacaaatcggcaggctgtttgaggattatatgcgcttcaaccgtgatttaaaccgttccgttacgggaaccggtttggggcttagcattaccaaacgcctcctcaatttgatgaaaggtgaaattaccgtcgagagcaaactgggcaaaggctcggtgtttacagtacgcctcccgcagaggcgctacagcgacgccgtgtgcggaacggataatgttgagcggctgaaggatttcaggttcaacagtagcgcaattacgaaaaggacgcagatggtgcgcgaatatatgccttacggcagcgtcctgattgttgacgatgttaaatcaaatctgtttgtcgccagaggtttgctgacgccttacggtttgcaaatcgacgccattgacaacggggttgaggccgttgaaaaaatcaagaacggcaatgtatacgacattattttcatggatcacatgatgccattaatggacggcattgaagcgacaaaaataatccgcgagctgggatacacaaagcccattgtcgcattaacggcaaatgcgcttacaggacaggcggaaatgtttattaaaaacgggtttgatgaatttatatcaaagccgattgatatccgccagctgaatatggtgctgaataaactaatacgagataaatatcctcaggaggttgtcgatgccgcgcgcaagcagaaagatttagccgccggaagaaaaaaaacgcaagaaattgattcacagctgctggcgttctttatcagcgacgcaaaaaaggcaatcggcgtattggaagcgatttatttgaataaatgcagaagatcggacgatgtttccatgtttataatcaatgttcacgctatgaaaagcgctctggctaatgtgggagaaaaagagctgtcaaatgaagcgcttgtattggaacagatgggacgcgataatgatataaaacttcttttagaaaaactaccgttctttttggaatcgctgtataaagttatcgcaaatttcgaggaaaaagaacataaaattaaaaaagaaggtttcggcgattattcccaattaaaagaaaagttaaacgaaatacgcatagcatgcggcgagtataataaaaaagccgctaaagacttgcttgccgaattaaaaacaaaagaatggtcggatactgtaaatgaacatcttgatgttttagccgagtttttactgcacagcgaattgacgaagctgtaa

SEQ ID NO: 47230 - protein, 786 aa, Unknown
  Obtained from environmental sample
  DOMAIN (206)...(272): His Kinase A (phosphoacceptor) domain
  misc_feature (1)..(786): Xaa is any amino acid
MEKITIDAARISAGDLDHVLEVKTGDELEILVAALNSMITGIKTITAEKERLEIASAEKTRETELIQEANQNLQTILNMLPVGVGVMSTEDHTFLFTNKAFLEVFNCTTIDQILGHSAFEFMPVIQPDGKKTKVKLSEIFQQESANTEIQCVKSGGNPFIARVHTIATNFKGVTASLGVVEDTTAEKEYHEKLQNIALQEQEANQLKSRFLATMSHEIRTPLNVILGIMEIQLQKDDNPPDTQEALEQIYESGSLLLNIINDILDFSKIAEGKMEIVPFRYDIPSLINDTSQMNYMRCDSKLIEFIVSVDPNTPLELIGDGLRVKQILNNLLSNAFKYTKEGEVELSVFSESPSADKDSSEDVILVFKIRDTGQGLSEEQIGRLFEDYMRFNRDLNRSVTGTGLGLSITKRLLNLMKGEITVESKLGKGSVFTVRLPQRRYSDAVCGTDNVERLKDFRFNSSAITKRTQMVREYMPYGSVLIVDDVKSNLFVARGLLTPYGLQIDAIDNGVEAVEKIKNGNVYDIIFMDHMMPLMDGIEATKIIRELGYTKPIVALTANALTGQAEMFIKNGFDEFISKPIDIRQLNMVLNKLIRDKYPQEVVDAARKQKDLAAGRKKTQEIDSQLLAFFISDAKKAIGVLEAIYLNKCRRSDDVSMFIINVHAMKSALANVGEKELSNEALVLEQMGRDNDIKLLLEKLPFFLESLYKVIANFEEKEHKIKKEGFGDYSQLKEKLNEIRIACGEYNKKAAKDLLAELKTKEWSDTVNEHLDVLAEFLLHSELTKL

SEQ ID NO: 47231 - DNA, 1590 bp, Unknown
  Obtained from environmental sample
  misc_feature (1)..(1590): n is a, c, g, or t
atggaaaaaactcaatctgataattctcctcagacagcggcttcgcttgtgcgtcatgggtcggcgctttctttgcttacgctgatttcccgtatcctcggacttcttagggaaatgacaaaggcgaggttcctcggcactaccgccctgtccgacgctttttccgtggcgtttttactgcctaaccttttccgccgtctattcgccgaaggttcaatctccgtcgcttttattccaacgtttaaggagtatatgcttgaaggcgacaaggaaaaaacacgggagttttattcgtgcgtgtttacgtttcttacatttatagtaacgctgatggtaatggctggaatacttgccgctcccctgcttgtccgtattttcggaatagaagaatttgacgagaccgttttgcttacaagagtgatgtttccgtttctcggtttcatttcgcttgccgctctgtttcagggagtgttgaacagccttcacatttttacgccgtccgggcttgcgccgattttattaaacattgttacaattctttgcacttacgcattgagtccttttacaaaaaatcccgcccgcgcaatggcagtcggtattctcatcggcggatttcttgaggcggcgattcagtttccgtttgtcgtaaaaaagggatataaattttttattactggaattaaaagagccattgataatccgggtacacggaaagtgctgaagttgatcagccccacggttatcggaatggcggcgtatcaaattaacgatttggtttccactgcgctgggaggacgagcgggggaaggagttgtatcaagcctgcaatattctttgcgtctgcaggaattatttttaggagtgttcgccgtgtcgattgggactgtgcttctcccaaaccttacggagtacgcaaaaacttctcaatgggatatttacaacaaacgattgacttcttccattaatataatcgctttaatagcgatacctgtaactctgttttcgcttgtagaaggacagaatttaatccgccttcttttccagagccacagttttgatgaaatgtctgtcgctcttactcttgcggcatttaccttccacatgcccggacttttattcatcgctcttaaccgaatcatcgctcccgctttttacgcgcagagcaataccgtatcgcctaccatcgccggaattatatcaatggttgtaaacattgtccttgccgcagttttggcaatgcaatttaagggagcgggcattgcgttcgccctgtctttcgcaagcgcaatcaacacaattttacttgtgatttttctcgggaaaaaccccaacatcaaattgggtgctgttatcggctctgctctgctctacattttaaaaatgctgatcctttccgctgtcgccgccgttccgatttatttcctctcccctgtgttacgcgatattttcgccggacacgggcgtattatcagttacggcatacctttgatattaaacgcaatgatttatatgcttttgggcgtttttctgcttgcgcttgtaaaagacgaaaatctatccggcttacttaaaatgattaggaagaaataa

SEQ ID NO: 47232 - protein, 529 aa, Unknown
  Obtained from environmental sample
  DOMAIN (245)...(410): MatE
  misc_feature (1)..(529): Xaa is any amino acid
MEKTQSDNSPQTAASLVRHGSALSLLTLISRILGLLREMTKARFLGTTALSDAFSVAFLLPNLFRRLFAEGSISVAFIPTFKEYMLEGDKEKTREFYSCVFTFLTFIVTLMVMAGILAAPLLVRIFGIEEFDETVLLTRVMFPFLGFISLAALFQGVLNSLHIFTPSGLAPILLNIVTILCTYALSPFTKNPARAMAVGILIGGFLEAAIQFPFVVKKGYKFFITGIKRAIDNPGTRKVLKLISPTVIGMAAYQINDLVSTALGGRAGEGVVSSLQYSLRLQELFLGVFAVSIGTVLLPNLTEYAKTSQWDIYNKRLTSSINIIALIAIPVTLFSLVEGQNLIRLLFQSHSFDEMSVALTLAAFTFHMPGLLFIALNRIIAPAFYAQSNTVSPTIAGIISMVVNIVLAAVLAMQFKGAGIAFALSFASAINTILLVIFLGKNPNIKLGAVIGSALLYILKMLILSAVAAVPIYFLSPVLRDIFAGHGRIISYGIPLILNAMIYMLLGVFLLALVKDENLSGLLKMIRKK

SEQ ID NO: 47233 - DNA, 837 bp, Unknown
  Obtained from environmental sample
  misc_feature (1)..(837): n is a, c, g, or t
gtgggcttgtttgttgagaaagacggaaagctgtataacactaatatcactattacggtaactattcaagagccggttgaaaatgcttatgggagaataagtatcagttttgaaggagaggacacggcgccgcggacagtgttgcctttaactgtttttgataaatatgcgtatacctttaccaaagcaggcgaaaaaaacggcgtggttaaaacccccgacaatgacggtttttttaccctggaagtcggtaattatacggtgagtgtgctagcctacgtcggcgttgcggaaccttatgccctggcggcaagcggggtatccccgcagttcagcattagatccggaagcaatgttccggtaagagtccccctttccggggttgataccgcagcgcaagggaaatttacatatacaattacttatccggcgggctctgcggtggaaattaccctgcaaagatggccggaactggctaataacactttaaatcctgtaaacataacccaagggaacgggaaaacccaaacgctggaattgggaacgggcgcttatttactgacggtccttattaacaaaaatgagctttatgcgggaacaagcgaggcggtgcatatatatccattacttacaaccgtatacgcaaaaaattttgttgataatgattttctctctcttcccataattcccgcggcatatccgccggcaggatcctatgcgaccgcgcagaatgtcacgctttctaccgcaaccccaggggcggtaatccgctacactctgaacggcgatactcctacagcaagcagcgctcaatacaccggcctccattaccgttag

SEQ ID NO: 47234 - protein, 278 aa, Unknown
  Obtained from environmental sample
  misc_feature (1)..(278): Xaa is any amino acid
MGLFVEKDGKLYNTNITITVTIQEPVENAYGRISISFEGEDTAPRTVLPLTVFDKYAYTFTKAGEKNGVVKTPDNDGFFTLEVGNYTVSVLAYVGVAEPYALAASGVSPQFSIRSGSNVPVRVPLSGVDTAAQGKFTYTITYPAGSAVEITLQRWPELANNTLNPVNITQGNGKTQTLELGTGAYLLTVLINKNELYAGTSEAVHIYPLLTTVYAKNFVDNDFLSLPIIPAAYPPAGSYATAQNVTLSTATPGAVIRYTLNGDTPTASSAQYTGLHYR

SEQ ID NO: 47235 - DNA, 1008 bp, Unknown
  Obtained from environmental sample
  misc_feature (1)..(1008): n is a, c, g, or t
atgagtgattctgtcatcaccgtacaaaacctgaccaagcgttacaagggcgcgcagaaaccagccgttgacgacataagtttttctgtcggaaagggcgagttctttgcgttcctcggcgcgaacggcgcggggaagacgacaaccatttccattctgacgacgacgctttccaaaacatcggggcatgttaaaattgccggtttcgatgttgaaaaagaggcgcggatggtgcgcgaaaagatcgggattatttttcaacagccgagccttgacccgcagttgacagctgagcagaatatccgctttcacgcatgcctgtacggaatgtgcggataccgccttcttttcaaacttatgccgtcggcataccgcaaacgtgtaatggagcttgccgaaattgtcgggatacaggacgctctttttaagccgattaaaaaactttcaggcggtatgcagagaaaactggaaattatccgcagtcttatccatacgcccgacgttcttttccttgacgaacctactcaagggttggacgctgtaagcaggcgggggttgtgggaatacattaacgaaacacgcagccgttatgggacaactatttttctgacgacgcattacattgatgaagcggaaaatgttgatacggtatgccttatcaataacggcaaaatagcgtcttgctgttcgccgcaggaattaaaacggaatttaatgaagcaggaacttattttggacgccgacaacagaaccgcgctgacaaatgaactgtcgtctcttggattgccttttaagctgaacggacgtgttgttgttccctacaaggattcggcgcaggaaattatttcacggataaaaacaaaattgacggtgttaaaaataaacgagccgtcgctggaagacgcttacgttgagtttttgaacaagaccggcaaagcaagcgacatctactgcgccgataatccgcgcccagcctttggcggcgggcacggcagacacacattctaa

SEQ ID NO: 47236 - protein, 335 aa, Unknown
  Obtained from environmental sample
  DOMAIN (33)...(223): ABC transporter
  misc_feature (1)..(335): Xaa is any amino acid
MSDSVITVQNLTKRYKGAQKPAVDDISFSVGKGEFFAFLGANGAGKTTTISILTTTLSKTSGHVKIAGFDVEKEARMVREKIGIIFQQPSLDPQLTAEQNIRFHACLYGMCGYRLLFKLMPSAYRKRVMELAEIVGIQDALFKPIKKLSGGMQRKLEIIRSLIHTPDVLFLDEPTQGLDAVSRRGLWEYINETRSRYGTTIFLTTHYIDEAENVDTVCLINNGKIASCCSPQELKRNLMKQELILDADNRTALTNELSSLGLPFKLNGRVVVPYKDSAQEIISRIKTKLTVLKINEPSLEDAYVEFLNKTGKASDIYCADNPRPAFGGGHGRHTF

SEQ ID NO: 47237 - DNA, 366 bp, Unknown
  Obtained from environmental sample
  misc_feature (1)..(366): n is a, c, g, or t
atgaaggaaccaataaaatccagagttaccggcattcttatcatgctggccgccgccgcagtattcggcgcggctgtaatgctgctgtggaacgctctttgnccgcaaatattcgctcttccgcaaattaattacctgcaggcagtaggtctgctcgttttgacgcggctgttattcggcggcataggcggctgggggcatggcggacgcagagcgcatatgtttaatcacgggaacaagcttcgcgagaaatggatgaacatgagcgaggaagagcgaaaagaatttatcgaaaaggaaaaagactttttcaagaaccgcgcttctcatcttaaggattttttcggagacagggaaaggccgtaa

SEQ ID NO: 47238 - protein, 121 aa, Unknown
  Obtained from environmental sample
  SIGNAL (1)...(23)
  misc_feature (1)..(121): Xaa is any amino acid
MKEPIKSRVTGILIMLAAAAVFGAAVMLLWNALXPQIFALPQINYLQAVGLLVLTRLLFGGIGGWGHGGRRAHMFNHGNKLREKWMNMSEEERKEFIEKEKDFFKNRASHLKDFFGDRERP

SEQ ID NO: 47239 - DNA, 537 bp, Unknown
  Obtained from environmental sample
  misc_feature (1)..(537): n is a, c, g, or t
ttgaaagtacatttcttttcccaccgcttaaaagattcgattcactggtatcagggcgccaacggtgtctggcggcctgaaaatgtcggagacgcgatgtttttcggtctggacaacaaattgcgttttgaaatcccggttaatcttggaaaaataaaaaaaattatcccctcggtttcgtatcagtaccttttaagttatctgttaagtttcggttatgactttgcggacaataaaagaatcccttacagtcccgtgcacactctgggcggttctcttgagattccctgggatacaggttccgtaataatcagcggtcattatgaaagcgaacgttataacgacagggcaaacataacaaaattgaaaccgtattttttattaaacgccaatattaatcaaaagacaggaaaaaatctaaccgcctttgccgtactgcggaatatcttaaacgaatcgtacgagtcttttatcgattaccccatgcccggatttacggtgactgtaggattacgcgcaaatttggaggtaaaatga

SEQ ID NO: 47240 - protein, 178 aa, Unknown
  Obtained from environmental sample
  misc_feature (1)..(178): Xaa is any amino acid
MKVHFFSHRLKDSIHWYQGANGVWRPENVGDAMFFGLDNKLRFEIPVNLGKIKKIIPSVSYQYLLSYLLSFGYDFADNKRIPYSPVHTLGGSLEIPWDTGSVIISGHYESERYNDRANITKLKPYFLLNANINQKTGKNLTAFAVLRNILNESYESFIDYPMPGFTVTVGLRANLEVK

SEQ ID NO: 47241 - DNA, 1005 bp, Unknown
  Obtained from environmental sample
  misc_feature (1)..(1005): n is a, c, g, or t
atgaatacaaagaatagaagaaatttttaccacgaaacacacgaaacacacaaaaagaagaaaagatttcgaaataaaatttcgtgcttttcgtgtgtttcgtggttaatattcttaatcctaatctatgggtgtaccgctaacaacggaaaagaagtaatcgaccgttccggtaagacagtcactattaaaagccaaataaaccgcgttatctccaccgcgccgtcgaatacggaaataattaccgatttgggtcaggcgcataaacttgtcgctatcgacaggcattctgcgaatgtagcggggattcccgaaggattgccgcagttggattttttctaccccgatgccgaggtgattatcaaccttgagcctgatataattatcgcaagcggacataatcccaccggcacaggcgaggatccgttcaaacttttgcgcgagacgggaatttccgtggtgtatatcaccatgagcgcgtctattgatgaaatttataatgatattgcgtttatagcggatatcctgcaggcgcagaaagacggagaaaggctgataaatacgatgaaggcgcaaatcaatgagatagcgcaaattgcggcgcaaacagcggcgcaaatgacaactaacacgaaaaataaaccaaccgtttattttgaaatttccgccgcgcccgatatgatgactttcggaaaaggcagttacattaacgatatgatttccgtaatcggggcgaaaaatatttttggagacgaaaattggcttgtaactcctggcgcggaagcgattataagccgcaatcccgatgtaatttttaccaacgtaaattatattgacgatccaatcgatgaaataaagtgccgccccggttttaatcatatcaacgccgtaaaaaataaccgcatttatcaaattgataccgattcctcggtgcgcccttcaactcgcattattttggctttacggcaaatgtcccgtgccgtctacccggagttgtatgagtaa

SEQ ID NO: 47242 - protein, 334 aa, Unknown
  Obtained from environmental sample
  DOMAIN (67)...(309): Periplasmic binding protein
  misc_feature (1)..(334): Xaa is any amino acid
MNTKNRRNFYHETHETHKKKKRFRNKISCFSCVSWLIFLILIYGCTANNGKEVIDRSGKTVTIKSQINRVISTAPSNTEIITDLGQAHKLVAIDRHSANVAGIPEGLPQLDFFYPDAEVIINLEPDIIIASGHNPTGTGEDPFKLLRETGISVVYITMSASIDEIYNDIAFIADILQAQKDGERLINTMKAQINEIAQIAAQTAAQMTTNTKNKPTVYFEISAAPDMMTFGKGSYINDMISVIGAKNIFGDENWLVTPGAEAIISRNPDVIFTNVNYIDDPIDEIKCRPGFNHINAVKNNRIYQIDTDSSVRPSTRIILALRQMSRAVYPELYE

SEQ ID NO: 47243 - DNA, 1113 bp, Unknown
  Obtained from environmental sample
  misc_feature (1)..(1113): n is a, c, g, or t
ttgataccgattcctcggtgcgcccttcaactcgcattattttggctttacggcaaatgtcccgtgccgtctacccggagttgtatgagtaacagaacacgcatcataatcggcgcaattgtctcgctattaataattattgccgccgcctctttgggcagttcaggaatcagtttgtgcgataccgtattgatcattttccacaaaatctttcatctgcggcttcctcatgacatagacgcgaaaaatgtttcgatagtttggctgttacggctcccccgcgtcttactggcatttcttgtcggcggcggacttgcggtaagcggcgcggtctgtcagtccattttgcgcaatccgcttgcgtctccctacattttgggcgtatcatcgggcgcgtcacttggtgcgggaataatcatcataagcggaatagcaatcccgcttttgggtagtttcactttaccgctgacgggttttgtatttgggctggcggcagttttttgcgtcgccgctttttcttcgcgcatagacaaatcaatgtcgaataacacaataattctgtgcggaatggttttttcgcttttcttaagcgccatgcttaccatgctgagcgctatattttccgacgatctaaggcgtattgctctatggcaaatgggcagttttgccatgaggggctggtcatcggtattactttttcttccgtttcttatcgtcggaatagcgggaattttccttttcataaaagaaatggacattttaagctttggagacgaacaggcaaaatcttcgggagtggagacgggcgcggtgcggaaaaaactgcttgctctctgcgccgttttaacaggcgccgctgtcgctctcagcggcgttatcggttttgttgatttaattgcacctcacgcggcgcgccgaatatgcggttcaagccacaggcgtttaattcccatgtcgtttattctcggcggctctttgcttgtattaaccgatctgctggcaagaacagccgtctcgccgtcggaacttccagtgggcgcgattaccgcgttaatcggcgcgccgttttttgcgtggatttatttcaggcggaggcgcaggacgcgggcgtaa

SEQ ID NO: 47244 - protein, 370 aa, Unknown
  Obtained from environmental sample
  DOMAIN (115)...(364): ABC 3 transport family
  misc_feature (1)..(370): Xaa is any amino acid
MIPIPRCALQLALFWLYGKCPVPSTRSCMSNRTRIIIGAIVSLLIIIAAASLGSSGISLCDTVLIIFHKIFHLRLPHDIDAKNVSIVWLLRLPRVLLAFLVGGGLAVSGAVCQSILRNPLASPYILGVSSGASLGAGIIIISGIAIPLLGSFTLPLTGFVFGLAAVFCVAAFSSRIDKSMSNNTIILCGMVFSLFLSAMLTMLSAIFSDDLRRIALWQMGSFAMRGWSSVLLFLPFLIVGIAGIFLFIKEMDILSFGDEQAKSSGVETGAVRKKLLALCAVLTGAAVALSGVIGFVDLIAPHAARRICGSSHRRLIPMSFILGGSLLVLTDLLARTAVSPSELPVGAITALIGAPFFAWIYFRRRRRTRA

SEQ ID NO: 47245 - DNA, 831 bp, Unknown
  Obtained from environmental sample
  misc_feature (1)..(831): n is a, c, g, or t
atggactctgccggcgagtttcacatgcctgtgcccgttgacgaggagtgctttctcagcaccaccacgtcgctgtgccaccccgacgccatcaacaagttccgccattacttcaccaaagaaaagccagtggtagtgataatcgcatcggacggcgtcgacgacagctatggcttcaatgacccagaggccagccccaaaaagctgtacggcttctaccggaaggtaatgcgggacttcaaagagaaacacgaagccggtgccatagaaagcgccatagcggaactgaaggattacctgcccatcatgtccgaaaagaaaagcggcgacgacatatccattggcgtcatcgcagacttggatctcctgccagtgctggcggcggagccagtcgtagtgcctgtggtagagccagaagcaccgcccgttgttgcgtcagttgcagagcctgtcgttgcgccagttgcagtgccagaaactggaggcaacgccgaaagtgcttttgagaatgggcagaaatgctatagggagtcgaattatgcggaggcagcaaggttgtaccgcctagctgccgaccaaggccatgccgaagcacagtgcaatcttggaatgatgtatcaatggggggagggtgtcggtctggactattcagaagccatgaagtggtaccgcatggcggcgcaacagggcaattcagaggcgcagtatagcctcggtctgctgtatagatctggtatgggcgtagcacacaatgacaatgaggcagagaaatggttgcgccttgcggcggatcatggtcacaagggggcacagaattcctgcgctccctaa

SEQ ID NO: 47246 - protein, 276 aa, Unknown
  Obtained from environmental sample
  DOMAIN (232)...(267): Sel1 repeat
  misc_feature (1)..(276): Xaa is any amino acid
MDSAGEFHMPVPVDEECFLSTTTSLCHPDAINKFRHYFTKEKPVVVIIASDGVDDSYGFNDPEASPKKLYGFYRKVMRDFKEKHEAGAIESAIAELKDYLPIMSEKKSGDDISIGVIADLDLLPVLAAEPVVVPVVEPEAPPVVASVAEPVVAPVAVPETGGNAESAFENGQKCYRESNYAEAARLYRLAADQGHAEAQCNLGMMYQWGEGVGLDYSEAMKWYRMAAQQGNSEAQYSLGLLYRSGMGVAHNDNEAEKWLRLAADHGHKGAQNSCAP

SEQ ID NO: 47247 - DNA, 1047 bp, Unknown
  Obtained from environmental sample
  misc_feature (1)..(1047): n is a, c, g, or t
atggacaaaaaagaagttaaattcaatctgaatgattataaccacatcacgacggcctttgcgctgtccctgcataaatcgcaaggtatgaccgttgataaagttatttggcacgccgatacatctaaagaggtatcgacaaacagtttttacgtcgctattactcgctgtaagcgcgatatagcggtctataccgacgatattgagcgtttgcaaataaaggcggccaaaggacaggacaaatacagcactattgattttgatgaagtctacgataaagcgtatcaaaaacacatcaaaacgatacaaagacgtgaccaaaaagacattacgccggagacgacggtcaggccagaatccgcccatccgatccaagaggccgcaccgccgcctccgaccaaacccgaaaccgccccgccgacccaagagaccgcgccaacgactgcggcaacgctcgaagacttattacgaccgcgcctttgggatacggagatggaagaaatcgcccggcaggtacgaaacgacactgttaccaagaacataaacaaagatttagcggacgcgaaactatcgcaaaaccaagccccgaactggcgcgaatccaaaccgatgtcggatataatgacgaagatacaaaacttgcaaccccgcagatgggacgcaaacaaaaaaaacataaaagagatttacgcaagagattattattacgaaatctttaacccgccccaacaagataaaaaagggcgactatatcgtcgcaagactgcacaccgcctaaacaagcattatgattctattatcgcgcacccgcagagcgacggcctcgccatgaaagcggtgtattttgtcgataacggtaaaaacagaacaaaatcgtttgacagcatatcccgtgcaaaagaggtaatcgagaaacttgcttgttaccgcaacgcaaagatatatgaaaaaatagtagcgcgaatggctgaacaggtgaagaacaacgcgccggagaagccgaagccggagaaaacagcgtcaagcgggtggagtttaacagattaa

SEQ ID NO: 47248 - protein, 348 aa, Unknown
  Obtained from environmental sample
  misc_feature (1)..(348): Xaa is any amino acid
MDKKEVKFNLNDYNHITTAFALSLHKSQGMTVDKVIWHADTSKEVSTNSFYVAITRCKRDIAVYTDDIERLQIKAAKGQDKYSTIDFDEVYDKAYQKHIKTIQRRDQKDITPETTVRPESAHPIQEAAPPPPTKPETAPPTQETAPTTAATLEDLLRPRLWDTEMEEIARQVRNDTVTKNINKDLADAKLSQNQAPNWRESKPMSDIMTKIQNLQPRRWDANKKNIKEIYARDYYYEIFNPPQQDKKGRLYRRKTAHRLNKHYDSIIAHPQSDGLAMKAVYFVDNGKNRTKSFDSISRAKEVIEKLACYRNAKIYEKIVARMAEQVKNNAPEKPKPEKTASSGWSLTD

SEQ ID NO: 47249 - DNA, 819 bp, Unknown
  Obtained from environmental sample
  misc_feature (1)..(819): n is a, c, g, or t
ttgatggactgcgacactaccggcgttgagcctgattacgcccttgtaaaattcaagaagctcgccggcggcgggtacttcaaaattatcaaccagtcggtgcctcccgcgctggaagccctgggttattcgccccaattgatagaagaaattatcgcgtatgccaccggctataaaacgcttaacggcgctccctatataaatcccgatacgcttaaagcgaagggttttcccccggaggcgattgccgccgccgagaacgcggttaaaacagccctgaacctggaaggggtttttagcccctggactcttggcagggattttgttgaaaagatccttcgcattccggaatccacatggtcgctgccgggctttagcctgcttaagcacatcggctttagcgcggaggatattcaggacgcggaactgtatgcctgcggaaccatggggcttgaaaacgcccccggcctgaaacaagagcattacgcggtttttgacactgcgacgccgtccggcaaaaacggcaagcgctcgatttcatggacagcccatatcggaatgatggcggcggtgcagccgtttatttccggggctatctcaaagaccatcaatatgcccaactcggcaaactacgaagacgtgaaaggcgcgtatatgctttcatggaaaaacggccttaaagcggtggcgctgtaccgcgacggggcanaactttcacagccgctttcctcggttgcccccggaaccgaccccttagccgacaccatactcaaggttgaacgtggtcttgatatgcctgtgccgccgcaggttgtttga

SEQ ID NO: 47250 - protein, 272 aa, Unknown
  Obtained from environmental sample
  misc_feature (1)..(272): Xaa is any amino acid
MMDCDTTGVEPDYALVKFKKLAGGGYFKIINQSVPPALEALGYSPQLIEEIIAYATGYKTLNGAPYINPDTLKAKGFPPEAIAAAENAVKTALNLEGVFSPWTLGRDFVEKILRIPESTWSLPGFSLLKHIGFSAEDIQDAELYACGTMGLENAPGLKQEHYAVFDTATPSGKNGKRSISWTAHIGMMAAVQPFISGAISKTINMPNSANYEDVKGAYMLSWKNGLKAVALYRDGAXLSQPLSSVAPGTDPLADTILKVERGLDMPVPPQVV

SEQ ID NO: 47251 - DNA, 819 bp, Unknown
  Obtained from environmental sample
  misc_feature (1)..(819): n is a, c, g, or t
atgggttacacacagaaagcgaaaataagcactcacacaatttacatccgcaccggcgagtacgaagacggcagtcttggcgagatttttcttgacatgcaccgcgagggcgcggctttccgcagcctcctgaacagtttcgccattaccgtctcgcttggattgcagtacggcgtgccgctggaagaatacgttgacgctttaactttcagtcgctttgagccgaacggtatagtgcaaggccacgattatgtgaagatgtcaacaagcgtaattgattacattttccgcgacctggcgataagctatctgaaacgctacgatcttggccaggtgaagcctgaagacctcatccccaccgccaccaagagcgatgtagcggactcaggcgaatcaaaacagcgcatcagcgacaaacaaagcgccgggttcaaaccatatactgcgactggagctttacccatcggatccggaggatccggtctgctgccggagcaaaaaacgccccctgcctcccccggtctttccggccgggctgaaggcctcaaggaaacaacaaaaggattggcaggaagcgccgagacatatcgtcagaccgcaaggccggcggagggggcaatttccacgcagaccgcccagccgcctgttcaggtgcttggccaggtccacccggagcagagcgaattggccagaatcgcccaggcccggattaaaggttacgaaggagacccgtgcccctcctgcggttctttcactctgatacgaaacggaacctgcatgaaatgccatacctgcggcggcacgaccgggtgttcgtaa

SEQ ID NO: 47252 - protein, 272 aa, Unknown
  Obtained from environmental sample
  misc_feature (1)..(272): Xaa is any amino acid
MGYTQKAKISTHTIYIRTGEYEDGSLGEIFLDMHREGAAFRSLLNSFAITVSLGLQYGVPLEEYVDALTFSRFEPNGIVQGHDYVKMSTSVIDYIFRDLAISYLKRYDLGQVKPEDLIPTATKSDVADSGESKQRISDKQSAGFKPYTATGALPIGSGGSGLLPEQKTPPASPGLSGRAEGLKETTKGLAGSAETYRQTARPAEGAISTQTAQPPVQVLGQVHPEQSELARIAQARIKGYEGDPCPSCGSFTLIRNGTCMKCHTCGGTTGCS

SEQ ID NO: 47253 - DNA, 540 bp, Unknown
  Obtained from environmental sample
  misc_feature (1)..(540): n is a, c, g, or t
atgaacgataacggtttccccgataaaaatattccctcaaggcgaagaatacccttctcatggatatggttcggatcaacattactgctttgcgcggtgtttgcgtttgcctcggtgccaagcgtgctggcgcagatacgggaaggcggaacccagaccgcgggacaggttgactctgtcttaagaaaccgcagatatacagagaccatacaacaggtattcaacttcatacagcgtcattatgtggaagaggtagattccaaggtcatctttgaaggagccatgaccggaattttcaacgccctcggagacccctattcgacgttcctgcccgagtcggagatgaaggactttaatgacaccacatcgggccagtttggcggggttgggctttatataaccaaacctacagggaacaggccggacggcaaacctcagtatatagaagtcgcgtcgcctattgaggatactcccggctggcgggcgggcataaaccccggcgatctcattatttcgataaacnggcgaattaaccgataa

SEQ ID NO: 47254 - protein, 179 aa, Unknown
  Obtained from environmental sample
  misc_feature (1)..(179): Xaa is any amino acid
MNDNGFPDKNIPSRRRIPFSWIWFGSTLLLCAVFAFASVPSVLAQIREGGTQTAGQVDSVLRNRRYTETIQQVFNFIQRHYVEEVDSKVIFEGAMTGIFNALGDPYSTFLPESEMKDFNDTTSGQFGGVGLYITKPTGNRPDGKPQYIEVASPIEDTPGWRAGINPGDLIISINXRINR

SEQ ID NO: 47255 - DNA, 393 bp, Unknown
  Obtained from environmental sample
  misc_feature (1)..(393): n is a, c, g, or t
ttgtctgaatcgaagctaaccggcggcgcaggctcgcctaccggtactttcacgtggactacccccactacagttcccacggtcagcaaccccgggtacagcgtaacgttcacgccgaccgacacggcaaattataataacgcgaccggaaccgtcagcattaccgttgccaaagccaattcctcgatctctacattgccgacagcgaccggcataacctatactcagaaattgtctgattccaaattatccggaggatcaggtacgcctgccggcggtacttttacgtggactacccccgctgaaatccccgcttccggaacatcctcccaaagcgtcacctatacgccaaccgacancgcaaaatataacaccgtgaccggatcccggtag

SEQ ID NO: 47256 - protein, 130 aa, Unknown
  Obtained from environmental sample
  misc_feature (1)..(130): Xaa is any amino acid
MSESKLTGGAGSPTGTFTWTTPTTVPTVSNPGYSVTFTPTDTANYNNATGTVSITVAKANSSISTLPTATGITYTQKLSDSKLSGGSGTPAGGTFTWTTPAEIPASGTSSQSVTYTPTDXAKYNTVTGSR

SEQ ID NO: 47257 - DNA, 1047 bp, Unknown
  Obtained from environmental sample
  misc_feature (1)..(1047): n is a, c, g, or t
ttgggagcgcgcgaccacgacgatgcgataagcgtggaagaaacgacaaacggctatattttgggtgtgcatatagcagatgtaagccattttgtaaaatctggctctgccctagacacagaagccagaaaacgcggatacactcaatacctgccctggacagccgttccaatgctcccagatattctctccggagatttatgctcgttgcaagaaaacgaaaacagattttcctttagttgcataatcaccttagacaaaaaaggcagaatgcaaaaataccgttttgcaaaaggaataataaaagttagccgttccataacttatgagcaggcaaaagaacttcacgataaaagagacaaggaaatttgcctgttggcacgtgttgccgctaatatgaaaaaactgcgttccgaaaacggaatgctagaaatggatagtgctgaatttaaatgccagttcagcaaaaaaggcttgccgcagtgcatagttcccagacaaaccgtaataagcaattcttgggtggaagagtgtatgctagccgcaaacaaatgttgcgcattggaactccaaaaaagaaaactgagtgggatttaccgcgttcacgaagcccccgaccccgaagatttggcggaattgatgcaaaccgagcctaccttgttttttgactcccctattgacccgcacaaacttttaaaaaactacacgggtaaaaacagccaagagaggcaaatctttgatttatattcccatttggttaaaaaagcaaaaaaagacccttccataacaaacagaattctgcgcagtatgcaaaaagccatttattcggataaatgcacaggtcattttgccctgcattggaaagactacgcccatttcacctcgcccattcgccgttatgcggatttgtggtgccacagagaattggctggcaaaaggggcaaaataaacgacctttgcacggttatcaacgaagccgaaataaaaaatcaaaaaacagagcgaaaggcgctcaaatttgcctcggccgatctgatgcgtgtttaa

SEQ ID NO: 47258 - protein, 348 aa, Unknown
  Obtained from environmental sample
  DOMAIN (2)...(202): RNB-like protein
  misc_feature (1)..(348): Xaa is any amino acid
MGARDHDDAISVEETTNGYILGVHIADVSHFVKSGSALDTEARKRGYTQYLPWTAVPMLPDILSGDLCSLQENENRFSFSCIITLDKKGRMQKYRFAKGIIKVSRSITYEQAKELHDKRDKEICLLARVAANMKKLRSENGMLEMDSAEFKCQFSKKGLPQCIVPRQTVISNSWVEECMLAANKCCALELQKRKLSGIYRVHEAPDPEDLAELMQTEPTLFFDSPIDPHKLLKNYTGKNSQERQIFDLYSHLVKKAKKDPSITNRILRSMQKAIYSDKCTGHFALHWKDYAHFTSPIRRYADLWCHRELAGKRGKINDLCTVINEAEIKNQKTERKALKFASADLMRV

SEQ ID NO: 47259 - DNA, 876 bp, Unknown
  Obtained from environmental sample
  misc_feature (1)..(876): n is a, c, g, or t
atgcgaaaaattcggaagcttagagcacatacagatatattacctgccctcgctctgctttttgaagtgaacggaattgaaaagctggaaattaatggtgaattcgattgtaataaactgaaaaccttccctgaaagtatcggcaatcttaagaatcttacagcactcaatattaactatacggcaatagataaattaccagacagcataggcaatataatttctttaagggagttgagactttcccataataaacaattaacatccctgccggacagtataggtaacctgaaaaaccttgttacgctaaacctttgcggttcgtccattgagaagctgcctgatacattggcaaattgcacctccctggaatgtgttgatatacgctgtacaagtataagcccattgcctgattttctctcttctgtcaagaaattattacaatcaatagaattaataccggaaaagcgcagcatttcttaccttactttttgcaattgttattacactcttgccgatactataatccggcttgcaaccaaggcaagtctcgatggccttttggcgatcgaagatgatatagacaatttttcagatagtttcttcaaagcaggaatcaggcttgtagttgatggaactgacgagggaattcttagggaattgcttacgattaaagttggacgtgaacaaaattattacaggaagaaacttatggaaatagcaatggaaggcattttacacatccagagtattaatagcataccgaaaatcggtataaggcttgcaatgatggttgacataaaaaacaaccctcttgatgccgcctgcatgaaatacttttccggcgatcacaaagcgttgacagcattgatttaa

SEQ ID NO: 47260 - protein, 291 aa, Unknown
  Obtained from environmental sample
  misc_feature (1)..(291): Xaa is any amino acid
MRKIRKLRAHTDILPALALLFEVNGIEKLEINGEFDCNKLKTFPESIGNLKNLTALNINYTAIDKLPDSIGNIISLRELRLSHNKQLTSLPDSIGNLKNLVTLNLCGSSIEKLPDTLANCTSLECVDIRCTSISPLPDFLSSVKKLLQSIELIPEKRSISYLTFCNCYYTLADTIIRLATKASLDGLLAIEDDIDNFSDSFFKAGIRLVVDGTDEGILRELLTIKVGREQNYYRKKLMEIAMEGILHIQSINSIPKIGIRLAMMVDIKNNPLDAACMKYFSGDHKALTALI

SEQ ID NO: 47261 - DNA, 1275 bp, Unknown
  Obtained from environmental sample
  misc_feature (1)..(1275): n is a, c, g, or t
atgaaacgtgttgtatgtatggtaacagcagcgattatggttgccgccgttttcacggcgtgcaaaggcaagtcaagtgccgcgggaagcagtaaaaaagagataactctcgtgagcaaacagattgaaattgacgaagctctgaaagcctatgccgccgtatatcagaagcaaagcggcgtaaaggtcaatataaagagctttggcggtgaaaccccttatgctcccaatcttgcggcaatgttcaattccggtacagaaccggagatatttgttattgaaggcaaagccggatacgaagacgcaaaacggtcgggcagaatcagcgatctttcaggcgaaccctgggtcaaagacacaggcgtcgcctacattgatcccgcggacggtaaagtaatcggctttccggtcgccgttgaaggctgggggcttggctacaacaaagcgcttcttgccaaagccggaatagaccccaaaaccctgataaacgtcggggccattaaagccgcgtttgagaaaattgagtcacagaaaagccagcttggcattgacgctgtcgtttcaatggtggccggtcccggtatgacctgggtaacagggcttcacggctttaacgcgtacctcgccctggggcttccgtacaatgattccaccaagtacatcgacatgcttcttaaaggacaggttgatactccgcgtcttaccaaatacgccgaatactacaatttattgtttaaatactctattaaaaacacccttctcaccggcggctacgaccagcagctcggcgattacgctgttggcaaaacagtgtttattcatcaggggaactggacagatcccacctttaaagatttagggatcacttttgaaatgggctatgtcccgcacgctttccttgatgaggacaccgacggcatttttgtcggcgctccttcatggtaccttgtgaaccccaaatcaaagaatgtggctgacgctaaaaaattccttattgctatgtcaagtacgccggaaggccatgactacatggtcaacaaggccggaatggttcccgcgtttaagtcctgtaaactcagccccgaggggcagctttccaaggctgttcaggaatggtcaaacttgggcaagatttacgcctggcagcagaatgaaatgcccgacggctttggcatgaatactctgggcccgattttccaccagatggcgtcgggacaaattgaccctcagggttttgtaaaattaacaacagaggccgtcagcacaatcaagtaa

SEQ ID NO: 47262 - protein, 424 aa, Unknown
  Obtained from environmental sample
  SIGNAL (1)...(27)
  DOMAIN (5)...(341): Bacterial extracellular solute-binding protein
  misc_feature (1)..(424): Xaa is any amino acid
MKRVVCMVTAAIMVAAVFTACKGKSSAAGSSKKEITLVSKQIEIDEALKAYAAVYQKQSGVKVNIKSFGGETPYAPNLAAMFNSGTEPEIFVIEGKAGYEDAKRSGRISDLSGEPWVKDTGVAYIDPADGKVIGFPVAVEGWGLGYNKALLAKAGIDPKTLINVGAIKAAFEKIESQKSQLGIDAVVSMVAGPGMTWVTGLHGFNAYLALGLPYNDSTKYIDMLLKGQVDTPRLTKYAEYYNLLFKYSIKNTLLTGGYDQQLGDYAVGKTVFIHQGNWTDPTFKDLGITFEMGYVPHAFLDEDTDGIFVGAPSWYLVNPKSKNVADAKKFLIAMSSTPEGHDYMVNKAGMVPAFKSCKLSPEGQLSKAVQEWSNLGKIYAWQQNEMPDGFGMNTLGPIFHQMASGQIDPQGFVKLTTEAVSTIK

SEQ ID NO: 47263 - DNA, 912 bp, Unknown
  Obtained from environmental sample
  misc_feature (1)..(912): n is a, c, g, or t
gtgacgaaattcagattatatcttattcttggtgcgctttttctggttttgggctgcagcgctaaatacgggtcatctaactatgcgtcggcgccacaagccgcatccatggcagggatgtattccagggatgacggcctgcagaacgcatactatcaaacagaacaattcgctgaaaactccgccgctgaacaggaaatttcagagaatgaccttgagcgaaagatagtaatgacggcccatgtcagggtgagggtagaaaatcttgatgaggcggattcccttataaaagacctgatgaaaaaatttaacgcgtacgcaagctccacagacattgatgataattctcgccgttattcaattcgcgttccttcgtccgcatacaaggccgctattgatgaaataaacggcctgggaaggttactgggccgctcggaaagcgccgaggacgtaaccctccgttactatgatcttgaggggcgtcttgcaaccaaaaaagaactgctaaaaacatttcaatcatatctgggaaaagccaaaaccatcgaagagattttatccgtggaaaaaagaatcgccgagttacaatacgaaattgaaggaaccggcaaggaactgcgtaaccttgcaaacagggtggattacgctacaatcgaactttccgttcttgggccagtagcttcatcgccgtatcggggtccgactctggtcgaaaggctaaaggagctttttggcagttttggcaatttcctttctgtactggtaacaataattatcggcattgtgatttttggcattccgattttgctcctgctggttttctttttctggcttttattcggaaagattggcctgttgaaaaaactttggcgtagggcggcgggcaaaaatcagataacagaaaataaataa

SEQ ID NO: 47264 - protein, 303 aa, Unknown
  Obtained from environmental sample
  SIGNAL (1)...(30)
  misc_feature (1)..(303): Xaa is any amino acid
MTKFRLYLILGALFLVLGCSAKYGSSNYASAPQAASMAGMYSRDDGLQNAYYQTEQFAENSAAEQEISENDLERKIVMTAHVRVRVENLDEADSLIKDLMKKFNAYASSTDIDDNSRRYSIRVPSSAYKAAIDEINGLGRLLGRSESAEDVTLRYYDLEGRLATKKELLKTFQSYLGKAKTIEEILSVEKRIAELQYEIEGTGKELRNLANRVDYATIELSVLGPVASSPYRGPTLVERLKELFGSFGNFLSVLVTIIIGIVIFGIPILLLLVFFFWLLFGKIGLLKKLWRRAAGKNQITENK

SEQ ID NO: 47265 - DNA, 1413 bp, Unknown
  Obtained from environmental sample
  misc_feature (1)..(1413): n is a, c, g, or t
atgaatgtgcaattttatcccctnggcgccgcggaggaagtaacgggctccaaacacgtaatcgaagttgacggggaaagctatcttatcgactgcgggtctttcnagggttcgcgcgcggaagccgacaggaaaaaccgggatttcggcattgaggccgaccgtatcaacagcgtaatcctgacgcacggacaccttgaccattgcgggctgctgccgctgctggtcaaaagaggctacaagggcaacatttacgcaacccccgcaagcagtgacatcgcaagcctaataatgctggattcggcgcatatacaggccaatgacgcggagtatctgcgtaaagaggctcataaaaaaggtgaaaaatttgactgggctcccctttatacggaatcggacgcgattgccgcgtcatcccagacagtcggagtaccgtataataggcctatgctcatcggcgacggtataacgctggaatttttcgacgcggggcacatactcggctcggcgatggcgtatataactattaggcggagcggcaaggaactgcgtattctagccacaggcgatcttggccgcaagggcaagcctattatccgcaatccttcgattcccagccccgcgccggactacattatcgtagaaagcacctacggcgaccgccgccatgacaaaaccagcgacgctatggaaaaacttgcggagctggccaaacgcgccgtggagactaaaggaaggatcatcatcccctcgtttgccatagagcgcacgcaggagctggtgtattatttccacctgcttgttgacgacgggataataccggaaatcccgatctatgtggattccccaatggcgactaacgcgacaacgattttccaggtacaccctgaatgttacgacgaagaaataatgaaagcctttatcaagcaccacaaaaacccctttggttttaacaacctccactttactaccagcgtccaggaatccaaggccctaaacgacgaaaaaggccctcttatcatcatctccgcggacgggatgtgcgaggccggacgtatccagcaccacctgatccacagcatacaggaccccaacacaaccattcttctcgtggggtacatggcggaaaacaccctgggccgccgcatacgcaaccgcgagggcgaggtaaaaatccacgggatgtggctcaaactaaaagcccatgtcgagcagataaacgcgttcagcgcccacgcggattatgaggaaacggtagaatggctcaacgagctggacaggtcgcgcctgaaaggcctttttatggttcacggcgaaaagaaggcgcaggcggcgtttaaaaaataccttgccgaacaagggtatgccaacacggagatagtcaagtacggcaaaacttatgagatggaataa

SEQ ID NO: 47266 - protein, 470 aa, Unknown
  Obtained from environmental sample
  DOMAIN (397)...(441): RNA-metabolising metallo-beta-lactamase
  misc_feature (1)..(470): Xaa is any amino acid
MNVQFYPLGAAEEVTGSKHVIEVDGESYLIDCGSFXGSRAEADRKNRDFGIEADRINSVILTHGHLDHCGLLPLLVKRGYKGNIYATPASSDIASLIMLDSAHIQANDAEYLRKEAHKKGEKFDWAPLYTESDAIAASSQTVGVPYNRPMLIGDGITLEFFDAGHILGSAMAYITIRRSGKELRILATGDLGRKGKPIIRNPSIPSPAPDYIIVESTYGDRRHDKTSDAMEKLAELAKRAVETKGRIIIPSFAIERTQELVYYFHLLVDDGIIPEIPIYVDSPMATNATTIFQVHPECYDEEIMKAFIKHHKNPFGFNNLHFTTSVQESKALNDEKGPLIIISADGMCEAGRIQHHLIHSIQDPNTTILLVGYMAENTLGRRIRNREGEVKIHGMWLKLKAHVEQINAFSAHADYEETVEWLNELDRSRLKGLFMVHGEKKAQAAFKKYLAEQGYANTEIVKYGKTYEME

SEQ ID NO: 47267 - DNA, 1236 bp, Unknown
  Obtained from environmental sample
  misc_feature (1)..(1236): n is a, c, g, or t
ttgaagggggattatatggacacactggatcagattaaaaaagcgataaagcacgcaatgaacagcgagttttacaaaaaatattacgcgggaattaacgtaaatgatataaaatccatggatgattttaagaagctgccatttacggacaaggaagatttaagggaagcgtatccgctcgggcttctggcggttcccgatgaaaaaatagtccgtattcactcgtcgtcgggcacaacgggcgctcccgtaattatcccgtatacgcaaaaagacgtgcatgactgggcggttatgttcaaacgctgttatgaaaccgcgggtatcaccaacaaggatcgtattcacataacgccgggatacgggctttggacggcgggtataggctttcaggcgggcgccgaactgcttggcgccctcgcgattcctatgggaccgggcaacacggacaaacagattaaaatgatgattgatatgcagtcgacggttatttgcgccacgtcttcctacgcgctgctgttggctgaagagattgaaaaacgcggtgtcaaaagcaaaattcacttaagaaagggcgttatcggctcagagcgctggggcgaaaaaatgcgcaagcgcatcgccagcgaactcggggttgagttatacgacatttacggtttgacggaaatttacggccccggcatcggtattaactgccaaaaacaggacgccatgcacatgtggacggactttttttattacgagattatcgatccaaaaacaggcgaggttttacccgaaggcaaaacgggcgagattgtcataacaacgctgtgcaaggaaggcgcccccctcatccgctacaggacgcatgacctcacaaaagcgattcccggcaagtgcgaatgcgggcttgagtacccgagaatcggtacgatcatcgggcgaagcgatgacatggtcaaggttcgcggcgccattatttacccaagcagagtggatgagcttcttgccaccgttgatggcgtaagcagcgaatatcaaatcatgatcgatcacctgaacggaaaagacatacttacccttttctttgaaacacgcgaaacaggcgacgccgtccacaatctggaaaaaaccgttgagcatgaattcaaggaaagaattggccttacgccaaaagcaaaagccgtcggcatgggcgaacttcccagaagcgaaaagaaatcaacgcgggtttttgataacaggtattag

SEQ ID NO: 47268 - protein, 411 aa, Unknown
  Obtained from environmental sample
  DOMAIN (4)...(342): AMP-binding enzyme
  misc_feature (1)..(411): Xaa is any amino acid
MKGDYMDTLDQIKKAIKHAMNSEFYKKYYAGINVNDIKSMDDFKKLPFTDKEDLREAYPLGLLAVPDEKIVRIHSSSGTTGAPVIIPYTQKDVHDWAVMFKRCYETAGITNKDRIHITPGYGLWTAGIGFQAGAELLGALAIPMGPGNTDKQIKMMIDMQSTVICATSSYALLLAEEIEKRGVKSKIHLRKGVIGSERWGEKMRKRIASELGVELYDIYGLTEIYGPGIGINCQKQDAMHMWTDFFYYEIIDPKTGEVLPEGKTGEIVITTLCKEGAPLIRYRTHDLTKAIPGKCECGLEYPRIGTIIGRSDDMVKVRGAIIYPSRVDELLATVDGVSSEYQIMIDHLNGKDILTLFFETRETGDAVHNLEKTVEHEFKERIGLTPKAKAVGMGELPRSEKKSTRVFDNRY

SEQ ID NO: 47269 - DNA, 546 bp, Unknown
  Obtained from environmental sample
  misc_feature (1)..(546): n is a, c, g, or t
atgacgtttaactgtatgatagccggtgtcgggggacagggcactgtgcttgcttccaaattaatcgccgccgccgccataaaaaaaggctatgatgtccgtaccacagagacaatcggcatggctcagaggggcggcagtgtgttcggtcatgttcgtattggtgaaaatatattttctccgattattccccttggcagggccgacgctcttatcggcttcgagcccgcggaaacggtgcgccaactcccctttctccgcaaagaaggctctgtaattgtttataacagcgggaacagggacatgctccaatatttaaaagaaaatgtacaaaaacttactgtgatagaagcgcagcgcatgacggcccatagcgtaaaaacattgaatgtgtttcttttgggagctgcggttcaaagcggcttattaccgtttgacgcggaaacattaaaagaagttttaagggaaatgcttccggagcgttttcttgaaatgaacttaaaagcgtttgaagggggattatatggacacactggatcagattaa

SEQ ID NO: 47270 - protein, 181 aa, Unknown
  Obtained from environmental sample
  SIGNAL (1)...(18)
  DOMAIN (11)...(175): Pyruvate ferredoxin/flavodoxin oxidoreductase
  misc_feature (1)..(181): Xaa is any amino acid
MTFNCMIAGVGGQGTVLASKLIAAAAIKKGYDVRTTETIGMAQRGGSVFGHVRIGENIFSPIIPLGRADALIGFEPAETVRQLPFLRKEGSVIVYNSGNRDMLQYLKENVQKLTVIEAQRMTAHSVKTLNVFLLGAAVQSGLLPFDAETLKEVLREMLPERFLEMNLKAFEGGLYGHTGSD

SEQ ID NO: 47271 - DNA, 1227 bp, Unknown
  Obtained from environmental sample
  misc_feature (1)..(1227): n is a, c, g, or t
atgtcggcggacgccctgaaggtattgggcgaggcgacagagcctccgatgaaaataataagcatcggcgcgggcgcctgcgagcataaactcggcggcgaaacagtgctgtacaggcatgaaaaatcttttgtttcaaagcccctgtactgcgtgaacgttaacgcagaaaatattgacgcaaaacttgagggcatcaaaaaaatcgattatgagcgcataagcgagcgaatgtatatagaagcgatcaatgtcgagtatacgggaaacgcggacgcctacagtggcgcggtgcgcaaagccctcgcgacagggcggactctgatacttgatgtaaaggacgcggccgctgcgcaagctgctctggaaatagccaaagatacaaagccccttctgaatggggccaacgaatcgaattataaggaaatgggcgatattgccgtaaaatacggcgttacgttaggcgtaagcggcggtactttggaaagcctgcacgataccattgcagccctggaggcgggcaacaaaaaccttgttattgacatcggcaccagaggtgccgccggnnncnnnnnnnccngnnnntctctttcnntnnnggncgcctttgcccncgcggtgccgatcggcggggcgcgctgtnngtcggggagcggtcgttcggatgcccgtccctggttnntctggcgntcgttgcgccttcgttcgcggggtgcggacgccctcgcgtccctgttcnncggtttntncggatcgctgtcgttctggacgaatcnnttcgcgcaagccctaccccttttcgggctaaggcagaatatctataccgatccgcaaagacccatgaggatagagcctggcgtttaccccctgaacaaagccgatgaaaactccgtttgcgcgaccacggttgattttgcccttacgtattttatcgtttcaggcgagctggaacgctccggcgtgccggttaacctcctgataagcgacgcgtgcggctattcggtgctgaccgcgtgggccgcgggtaaattctcgtcttcttccatcgcgaggttcataaaagaaaacagcattgagggaaaaatcaaaaaccgcaatttgcttattcccggaaaagtcgccgtgctcaaaggcgagctggaagagaatctccccggctggaaaattatagtcgctcccaacgacgcggtgtccctggtaaagtttatgaaagagctgagggtttaa

SEQ ID NO: 47272 - protein, 408 aa, Unknown
  Obtained from environmental sample
  DOMAIN (19)...(403): CO dehydrogenase/acetyl-CoA synthase delta subunit
  misc_feature (1)..(408): Xaa is any amino acid
MSADALKVLGEATEPPMKIISIGAGACEHKLGGETVLYRHEKSFVSKPLYCVNVNAENIDAKLEGIKKIDYERISERMYIEAINVEYTGNADAYSGAVRKALATGRTLILDVKDAAAAQAALEIAKDTKPLLNGANESNYKEMGDIAVKYGVTLGVSGGTLESLHDTIAALEAGNKNLVIDIGTRGAAGXXXXXXSLSXXXAFAXAVPIGGARCXSGSGRSDARPWXXWRSLRLRSRGADALASLFXGXXGSLSFWTNXFAQALPLFGLRQNIYTDPQRPMRIEPGVYPLNKADENSVCATTVDFALTYFIVSGELERSGVPVNLLISDACGYSVLTAWAAGKFSSSSIARFIKENSIEGKIKNRNLLIPGKVAVLKGELEENLPGWKIIVAPNDAVSLVKFMKELRV

SEQ ID NO: 47273 - DNA, 1128 bp, Unknown
  Obtained from environmental sample
  misc_feature (1)..(1128): n is a, c, g, or t
ttgctcattgcccagtccctagtccctagtccccattttcgctatactatccttaaaaaggacgaaatgcgtaaattatatacttacccctggctggttgtggcgatcattgccattatcaccgtatttttcggcttccagcttccccacgcgcagttggataacaacaacctccgctttgtccccacgaatgatcccgcgcttgaaacatcacgctggatagatgaaatgttcggcagttcattttttattcttatcgggctgcagcggccttatggcactgtctttgaccgggaattcctcgaccgcatacaggcttactctgccattgtcgagaacatgccctatgtcaaggaagttacttcgcttgtcaacgcggattatatttgttcccgggaggacgccattgtagtggaaaaactcgtgggtgacggtttttcaggcacagacgaagagatcgcggagctaaaacgccgcctgctttcatgggatatgtacgaaagggcgctgttctccgatgattttacggcaacgcaaattttaattccgctttcaataaaatccgacgaggcaggattatcggaagtaacagaaacttttatgcggatacgggatattgcaagagaaacatttgccggttacgcaaccgtctatgtaacgggaatgccggttatctccgcgaccattaacgaggctatgaacgccgaccttaaactgctgctgccccttgtcattctggttgtccttgtggtcctgtttttctcgttcagggggcttaccccggtaatgcttccccttttgactgtggtaatcgccgttatctggtcggtaggcgctatgcccattttcggcgtaaaactttcggtgatctccacggtgctgcccgtgatcctcgtggctgtgggaagcgcctacggcatccatatcgtcacccattatcttcatgatcgcggctcaaagcctatgagcaaccgggaacaccgcgaacttgttattgaaagcgcgatgaagatacgcaaaccggtgtttcttgccgcactgaccacttttgccggttttagttcgttaatttttacgtcggtggcgccgattcgggaattcggctatttttccagtttggcgtcgtga

SEQ ID NO: 47274 - protein, 375 aa, Unknown
  Obtained from environmental sample
  DOMAIN (170)...(283): MMPL family
  misc_feature (1)..(375): Xaa is any amino acid
MLIAQSLVPSPHFRYTILKKDEMRKLYTYPWLVVAIIAIITVFFGFQLPHAQLDNNNLRFVPTNDPALETSRWIDEMFGSSFFILIGLQRPYGTVFDREFLDRIQAYSAIVENMPYVKEVTSLVNADYICSREDAIVVEKLVGDGFSGTDEEIAELKRRLLSWDMYERALFSDDFTATQILIPLSIKSDEAGLSEVTETFMRIRDIARETFAGYATVYVTGMPVISATINEAMNADLKLLLPLVILVVLVVLFFSFRGLTPVMLPLLTVVIAVIWSVGAMPIFGVKLSVISTVLPVILVAVGSAYGIHIVTHYLHDRGSKPMSNREHRELVIESAMKIRKPVFLAALTTFAGFSSLIFTSVAPIREFGYFSSLAS

SEQ ID NO: 47275 - DNA, 1545 bp, Unknown
  Obtained from environmental sample
  misc_feature (1)..(1545): n is a, c, g, or t
atggtcagatcggccgagccctattccctactccctataaaatgctatagttgccttatggcggaaaccaattttatacgtaatttttgcataatcgcgcatattgaccacggtaaatcaacactggcggataggcttatccagaaggcaaaactggtggatgaccgcaatttccagaaccagatactcgacaatatggatatcgagagggaacgcggcatcaccatcaagagccaagcggtaagaataccctatacggcgcaggacgggcatgactacgagcttaatctcgttgatacccccggccatgttgactttacttacgaggtgagccgggcgattaattcctgcgagggtgccctgctcctggttgacgccacccagggggtgcaggcgcagaccctttcaaatatgtacctcgccctggagcataaccttgaaatagtgccggttatcaacaagattgacatgcaggccgccgacatagaaggcacgaaaaaacaaatcgacaaggatttggggttggacgcggaaagcgccctgctggtttcggcgcgtaacggcacgggcgttgacgagcttttcgaagccattgtcaagcgcgtcccgccgcccaagggtgacaaaaacgccccgctgagggcgctcattttcgactgccactatgattcctaccggggcgtcgtggtgcatctgcgcgtttatgacgggacaatcaaaaaagggatgaaaatatcctttatgtcaaacggctcatcctacgaggttgagaccgtcggcgttttcaagctcgcgttagttgaagcaggcgaactttccgccggggatgtcggttatgtgattgccggcattaagaccgtcagcgacgtgcgggtcggtgacacggtgacaaacgcggataacccctgcgccgcccccctaagcggtttccgcgaggtaaaacccgtggttttctcttctatatatccggtagattccaatgattacgaagaactgcgatcaagcatggaaaaactcaagctaaacgacgcctcgcttgtgtacgaaaaagattcatcggcggcgcttggtttcggtttccgctgcggctttcttgggcttctgcaccttgaggttatacaggagcgccttgaacgggaatttgaccagtcggtgatctttaccgcgccttcggtaaagtataaactgcggctgaaaaattcaaaagatgaaattatgatcgacaacccaatggaataccctgacgaaggtctgattgaaagcgcggaggaaccctatatccgcgcgtctatcattaccccgtcaggcttcctcggcaatataatgacattatgccttgaaaaacgcggggtgcagaccaacatgacctaccttgacgaaaagcgcgtggagcttgtgtacgacatgcccctttccgaggtgctttttgatttttacgaccgcctgaaaagcaccagccgcggttatgcgtcatttgactacgacattaccgactacaggccaacggaactcgccaaaatggacatccttcctcggccgatctga

SEQ ID NO: 47276 - protein, 514 aa, Unknown
  Obtained from environmental sample
  DOMAIN (38)...(204): Ras family
  misc_feature (1)..(514): Xaa is any amino acid
MVRSAEPYSLLPIKCYSCLMAETNFIRNFCIIAHIDHGKSTLADRLIQKAKLVDDRNFQNQILDNMDIERERGITIKSQAVRIPYTAQDGHDYELNLVDTPGHVDFTYEVSRAINSCEGALLLVDATQGVQAQTLSNMYLALEHNLEIVPVINKIDMQAADIEGTKKQIDKDLGLDAESALLVSARNGTGVDELFEAIVKRVPPPKGDKNAPLRALIFDCHYDSYRGVVVHLRVYDGTIKKGMKISFMSNGSSYEVETVGVFKLALVEAGELSAGDVGYVIAGIKTVSDVRVGDTVTNADNPCAAPLSGFREVKPVVFSSIYPVDSNDYEELRSSMEKLKLNDASLVYEKDSSAALGFGFRCGFLGLLHLEVIQERLEREFDQSVIFTAPSVKYKLRLKNSKDEIMIDNPMEYPDEGLIESAEEPYIRASIITPSGFLGNIMTLCLEKRGVQTNMTYLDEKRVELVYDMPLSEVLFDFYDRLKSTSRGYASFDYDITDYRPTELAKMDILPRPI

SEQ ID NO: 47277 - DNA, 804 bp, Unknown
  Obtained from environmental sample
  misc_feature (1)..(804): n is a, c, g, or t
atgttggacagattattaattgatattcgcgccgaaggtttttatgttcagataatgaattttgacgataatatcgcccttgcccgaaaagatgatatttccctttcgataagctgcgaaggaagcgccgttaccgtagagacttcaaaatcggatttaccatttgtaaaaaacgtcgtttatgaagatataattaatctttcagaatccatgcagaagttaaaagactcaatgaacactacggcgatgaagaaagaactgtttgaccgcaggggaagaaccaataacacccttctttcattaatagaacccggttccattattcttgatcttaaaggaaattcaaaagaagaaataatccgcgaactggttgatatgctttttacgcagaagaaactgttggatcgcgaacttgttttgaccgacgtgtttgaacgggaaaatatcatgagtaccagcatgggatacggaatagttattccccacgcgaaaaccgacggtgttaaagatacggtcgtggcggtgggcattaaaaaagagggaattattcttgatccgtcggataatcagccgtcccgtctttttatactggaagtttcccccagaaaagacggtcctcatttgcaattcctttcagcgttaggcgccattttaagggacgagaatattcgtcaggctctgattaacgccaaatccgtggaagaagcggctaatttattgcataatataaaagaaataatttattcgcaaatttcttacaaagttttgaggtggcaggagtcgaaaactatacccgcaacgtaa

SEQ ID NO: 47278 - protein, 267 aa, Unknown
  Obtained from environmental sample
  DOMAIN (100)...(243): Phosphoenolpyruvate-dependent sugar phosphotransferase system, EIIA 2
  misc_feature (1)..(267): Xaa is any amino acid
MLDRLLIDIRAEGFYVQIMNFDDNIALARKDDISLSISCEGSAVTVETSKSDLPFVKNVVYEDIINLSESMQKLKDSMNTTAMKKELFDRRGRTNNTLLSLIEPGSIILDLKGNSKEEIIRELVDMLFTQKKLLDRELVLTDVFERENIMSTSMGYGIVIPHAKTDGVKDTVVAVGIKKEGIILDPSDNQPSRLFILEVSPRKDGPHLQFLSALGAILRDENIRQALINAKSVEEAANLLHNIKEIIYSQISYKVLRWQESKTIPAT

SEQ ID NO: 47279 - DNA, 333 bp, Unknown
  Obtained from environmental sample
  misc_feature (1)..(333): n is a, c, g, or t
atgtcagatgataaatattttgagaacgaacatcattcccgccacgacagggacagagacaggggaatggacatggatgaccgtgacggcgacgatcgcggacgcggcggaaaaggcggtaaagttttcttcaagaaaaaagtatgcaaattctgcgcacagaaaatgaagatagattacaaggatgctgatactttacgcagatttattacggaaagaggaaaaattcttccccgcagaattacaggtacttgcgccaaacaccagcgtgcgctggctctggcgattaagcaggcaagaagcatagcgcttcttccctatgtagccgaatag

SEQ ID NO: 47280 - protein, 110 aa, Unknown
  Obtained from environmental sample
  DOMAIN (52)...(105): Ribosomal protein S18
  misc_feature (1)..(110): Xaa is any amino acid
MSDDKYFENEHHSRHDRDRDRGMDMDDRDGDDRGRGGKGGKVFFKKKVCKFCAQKMKIDYKDADTLRRFITERGKILPRRITGTCAKHQRALALAIKQARSIALLPYVAE

SEQ ID NO: 47281 - DNA, 675 bp, Unknown
  Obtained from environmental sample
  misc_feature (1)..(675): n is a, c, g, or t
atgaaggttattttgaacaaggatctgtccactctcggtgaagagggggatgtcaaagacgttgcgcggggctatgcccggaattatctttttccacgggggattgcccttccctatacgcccaaaacggtcaaactgtttgaggcgcgcaaagaagaaattgaagcgaagaaagcccagaaacggcaggatgccatgggccttaaagaacggctggaaaatcttgaattatcgctcaccatgccggcaggtcccaacggaaaactctacggcgcggtaaccagccagaccgtagcggatgaattggtcaagcagggctttcaggttgaccgcaaacggattgaccttgcgggggcgggcatcaagaatgtcggcaagtacaaggccgtcatcaaactgtacgagaattcccatgcggaaattcaaattgtcataatcgggcaggagataaaaaccgagactcaccatgcgccaacccgtccggtccgccgccgcagagacggcgcccttggcggcgcccctagcggcgaacatggcagccctgcacccgccgaaggcgcggcccccgccgcggaacaacccgcttccccgccggaagccgccgcgccgccaggggcgccgccgcctgaagcgccagcgcctgctgaaccggccgtttcggagagcgcgacttaa

SEQ ID NO: 47282 - protein, 224 aa, Unknown
  Obtained from environmental sample
  DOMAIN (62)...(148): Ribosomal protein L9, C-terminal domain
  misc_feature (1)..(224): Xaa is any amino acid
MKVILNKDLSTLGEEGDVKDVARGYARNYLFPRGIALPYTPKTVKLFEARKEEIEAKKAQKRQDAMGLKERLENLELSLTMPAGPNGKLYGAVTSQTVADELVKQGFQVDRKRIDLAGAGIKNVGKYKAVIKLYENSHAEIQIVIIGQEIKTETHHAPTRPVRRRRDGALGGAPSGEHGSPAPAEGAAPAAEQPASPPEAAAPPGAPPPEAPAPAEPAVSESAT

SEQ ID NO: 47283 - DNA, 393 bp, Unknown
  Obtained from environmental sample
  misc_feature (1)..(393): n is a, c, g, or t
gtggtcgccgcggaaggagcgctgtccaataaagaagcggagatggataaaaaggacagaaaaaaattgcgcgcggaaagcgggccgtccgtggcataccgcgtcgctcataaaataactgaagagacaggcatggaaacgcgcgccactgttttaggatatgtacagcgcggaggaatccccagcgccgccgaccgcgttctcgccacaagccttggaaccgccgcggcggatcttctcgcaaacggcaaatacggccgcatggtcgcgctgcagggagacagcataggctccgtagacctcagcattcccgaaggaaaagtgaaaaatgttccgacggatcactatatgatcgacaccgccagagccgtcggcacttgcatgggtatctag

SEQ ID NO: 47284 - protein, 130 aa, Unknown
  Obtained from environmental sample
  misc_feature (1)..(130): Xaa is any amino acid
MVAAEGALSNKEAEMDKKDRKKLRAESGPSVAYRVAHKITEETGMETRATVLGYVQRGGIPSAADRVLATSLGTAAADLLANGKYGRMVALQGDSIGSVDLSIPEGKVKNVPTDHYMIDTARAVGTCMGI

SEQ ID NO: 47285 - DNA, 1215 bp, Unknown
  Obtained from environmental sample
  misc_feature (1)..(1215): n is a, c, g, or t
ttgttaaacagaataagaaacatctgcaacgatttacttccgcctgactttcagccaagcggcattgactatatccgcctacccgacgctctgcggactctttgcgccgcgtttgaaaagcgcacaggcattgaatgtaacataacgatacatgacgatgcggatttcagctttcttgacgttgatacgcagttacactgtttccgcattgttcaggaatgtcttgctaatattgaaaaacacgcggaagcaagcaatgtatctgtgcttatccgcagtaataccgagggggaactgttgttttttgttacagataacggcaaaggttttgaaaaaacggacaaggattttttccgcgttatgagggcgaaagggcatttcggcctgtggaatatgcaggagagggccgcttccatgaacggagttttcagcatagacagcgaagcgggggaaggcgcttcaatcaagttaatcataccccccccccccccccattttttccggacagggggagtgaaatatgaacctcaaccaagaccaaaggtcgtcgaatcatcgtaccgaaggtgcgcggttcgcggttcccctcttgacctcaatagtccttatagacgatcaccctatgcttaccaatgctatcagcgtatggctggaaactgcagggcggtttacaatcgcaggcactgcggcgagccttgccgaagcccgcacactaatgaaagaactgaaactttgcctcaaattgtcattcttgatatatcgttgggcggcgggaacaaggattcggttcaggaggacggtcttacttttattcccgaattggaaaaaatttgtaaagaaagaaacgcgcccatgccggatgtgctggtttgctcaatgtacgaagatccgtttttagtgcagagggcgatggatttgggagcaaaagggtatgtggcgaaatcggcggtagcgggagaaataatcgccgctatagacgccatccttgccggggaaacttatacaagcgtaaaaattaaaaagaaggatcagaagaaatcatttcatgccctgacgcggcgggagagcgaaattgtcgcgcttgtaaaacaatccttgtccaatcagcaaatagccaaaatgcttgggcttggcgatcggactgtggataaccatctcagcaatatttacgaaaaaattggcgttacatcgcggaaagagttgtttgatctgtaa

SEQ ID NO: 47286 - protein, 404 aa, Unknown
  Obtained from environmental sample
  DOMAIN (214)...(326): Response regulator receiver domain
  misc_feature (1)..(404): Xaa is any amino acid
MLNRIRNICNDLLPPDFQPSGIDYIRLPDALRTLCAAFEKRTGIECNITIHDDADFSFLDVDTQLHCFRIVQECLANIEKHAEASNVSVLIRSNTEGELLFFVTDNGKGFEKTDKDFFRVMRAKGHFGLWNMQERAASMNGVFSIDSEAGEGASIKLIIPPPPPHFFRTGGVKYEPQPRPKVVESSYRRCAVRGSPLDLNSPYRRSPYAYQCYQRMAGNCRAVYNRRHCGEPCRSPHTNERTETLPQIVILDISLGGGNKDSVQEDGLTFIPELEKICKERNAPMPDVLVCSMYEDPFLVQRAMDLGAKGYVAKSAVAGEIIAAIDAILAGETYTSVKIKKKDQKKSFHALTRRESEIVALVKQSLSNQQIAKMLGLGDRTVDNHLSNIYEKIGVTSRKELFDL

SEQ ID NO: 47287 - DNA, 783 bp, Unknown
  Obtained from environmental sample
  misc_feature (1)..(783): n is a, c, g, or t
atggataaaaaatctgaattaccatcttccccggctgtttattttaaccgcgacctgtcttgggtcgattttaacgagcgggtgctggaagaagggctgtgcaaaaacttgcccctgtttgagcgttttcgctttttatcaattgtttcatcaaattttgacgaatttttcatggtaagggtggcggcaatcaaacgggcgcagagggccggaatctcaggcgatccctccggcctgagcccggcggaacagttgaaaagaatttccgaaaaagttcactcaataaaccgccgtctgtccgcctgctttatgggcgaaatatttcccggccttgccgccgagggccttgaactggtgcgtcccgattcatacaccgtccctcaaatggactacctggaatccttttttatcagtcaaatttatccggttctaacgcccctgcgtatcgaagaagacaaacccctgccgctttttgaaagccgctgtataaacgccgcttttctgctggtatccgaagaaacagcccccatcgggacgccagccgggactcccatcgggggggcctccatcggaactcctatcgggacacctgcttcggaagatgccgcggaacatatcgttatggtacagcttcccctcacccttgaccggattatctggctgccgccggaagaaaataaactgcgctggacgctgttagacgacattatgcttgtgtgggggaagttatctttttcccggttaccatgttcgcgagagcatgctgtttcaggtaaaccgtga

SEQ ID NO: 47288 - protein, 260 aa, Unknown
  Obtained from environmental sample
  DOMAIN (11)...(259): Polyphosphate kinase
  misc_feature (1)..(260): Xaa is any amino acid
MDKKSELPSSPAVYFNRDLSWVDFNERVLEEGLCKNLPLFERFRFLSIVSSNFDEFFMVRVAAIKRAQRAGISGDPSGLSPAEQLKRISEKVHSINRRLSACFMGEIFPGLAAEGLELVRPDSYTVPQMDYLESFFISQIYPVLTPLRIEEDKPLPLFESRCINAAFLLVSEETAPIGTPAGTPIGGASIGTPIGTPASEDAAEHIVMVQLPLTLDRIIWLPPEENKLRWTLLDDIMLVWGKLSFSRLPCSREHAVSGKP

SEQ ID NO: 47289 - DNA, 660 bp, Unknown
  Obtained from environmental sample
  misc_feature (1)..(660): n is a, c, g, or t
gtgggaggaaagatgagcagaacggcggaaatcggaagaaaaacgaatgaaactgaggtgtttataaaattgaacattgacggcaaaggagacgctaaactggagtatcctgtcggttttatgtcacacatgctgaacacgtttgcgcgtcacggcttgtttgacattgaggtgtgcgcgagaggagaccttgaagttgatcaacaccacattgttgaggataccggaatcgttcttggacaatgcttcgcaaaagcgttaggtgaaaaaagaggcataaggcgcagcggaagctgtcttttcccgatggacgaagcgcttgcccgcgccgccgtggatatttcaggccgctcttttttgtactatgacggacagcttcccggttcccatttaatttctatgagtgaagacggaactgaatataagtttcaaacggatgtcgtcgaagatttttggcagggcttcgtatccgctgtcggctgtaatctgcacttggaaattctgcgcggcagaagcgatcatcacaagattgaggctatgttcaaagccgccgcccgcgcccttcgcgccgcctgtgaaattgatgagcgagctaaagattcaatcccctcaaccaaaggctctttgccggggtttgacacacccggagtgcttgtgtga

SEQ ID NO: 47290 - protein, 219 aa, Unknown
  Obtained from environmental sample
  DOMAIN (38)...(189): Imidazoleglycerol-phosphate dehydratase
  misc_feature (1)..(219): Xaa is any amino acid
MGGKMSRTAEIGRKTNETEVFIKLNIDGKGDAKLEYPVGFMSHMLNTFARHGLFDIEVCARGDLEVDQHHIVEDTGIVLGQCFAKALGEKRGIRRSGSCLFPMDEALARAAVDISGRSFLYYDGQLPGSHLISMSEDGTEYKFQTDVVEDFWQGFVSAVGCNLHLEILRGRSDHHKIEAMFKAAARALRAACEIDERAKDSIPSTKGSLPGFDTPGVLV

SEQ ID NO: 47291 - DNA, 441 bp, Unknown
  Obtained from environmental sample
  misc_feature (1)..(441): n is a, c, g, or t
atggcgtcgattaacaaatcaggttacacgcaggcgattaaggaatggataaaagcggacaaaccttttttgggaatttgtataggcttacagttgttgtttgaaacttccgaggaggcgccgaatacgcaggggctttctgttattcccggaacagtgcgccgttttcccggccgcaaggttccgcagattggctggaatcaaacaaacgcgcgaaaagaatcaaaaatcttccgtggtttaaaagatgacagttttttctattatatacattcatactacgccgatcccgcggacgattcggtaagcgccgcgcagaccgagtactatgtccgctactgctgcgccgttgaacgcggcgcgttagccgcagtgcagtttcacccggaaaaatccggcgcggcgggtattgccctcttaaaaaattgggcggagggttaa

SEQ ID NO: 47292 - protein, 146 aa, Unknown
  Obtained from environmental sample
  DOMAIN (1)...(146): Glutamine amidotransferase class-I
  misc_feature (1)..(146): Xaa is any amino acid
MASINKSGYTQAIKEWIKADKPFLGICIGLQLLFETSEEAPNTQGLSVIPGTVRRFPGRKVPQIGWNQTNARKESKIFRGLKDDSFFYYIHSYYADPADDSVSAAQTEYYVRYCCAVERGALAAVQFHPEKSGAAGIALLKNWAEG

SEQ ID NO: 47293 - DNA, 813 bp, Unknown
  Obtained from environmental sample
  misc_feature (1)..(813): n is a, c, g, or t
atgcaggcgaaacgaatcattccatgccttgatgttgacgacggaagggtagtgaagggcataaaattcaagggcatacaggacgcaggagacccaagggaacttgcccgccgctacaacgacgacggcgccgacgaactcactttccttgacataggcgcgtcctacaaaagccgcgcgacactgcttgacgtggtgaaaacagttgccgccgaagtttttatcccattatgcgtaggcggcggcatacgcgtaatcgacgacatgcgcgacgcgatgaacgcgggagcggacaaggtttccgtctgcacatcagccctcagccgcccggaactgttacgcgaaatggcgaacgcctacggcagtcagtgtgtagtgctctcgatagacgcaaaacgcgtcgagggcggcggagacttgcactggcatgccttttcccacggcggcagaaccgacacgggcattgacgccattgaatgggcaatccgcgccgtagaactcggcgcaggcgagatacttctcaactcaatcgatgcggacggcacaggcggcggctacgatttggaactgaaccgccgaatactgaacgccgttcccgtccctgtaatcgcctcaggcggcgcgggaacgttggatcaaatagcggaagttttgctcagtaccgcgtcggaggaaatgccgcaaggactagcgccggaagaagcgccgggagcggatgccgcgctgatagcgtcgcttttgcactttgggaaaacgacgattcaggagattaagaaatacgctgaggcgaagggcgtttgcgtcaggtggtga

SEQ ID NO: 47294 - protein, 270 aa, Unknown
  Obtained from environmental sample
  DOMAIN (5)...(253): Histidine biosynthesis protein
  misc_feature (1)..(270): Xaa is any amino acid
MQAKRIIPCLDVDDGRVVKGIKFKGIQDAGDPRELARRYNDDGADELTFLDIGASYKSRATLLDVVKTVAAEVFIPLCVGGGIRVIDDMRDAMNAGADKVSVCTSALSRPELLREMANAYGSQCVVLSIDAKRVEGGGDLHWHAFSHGGRTDTGIDAIEWAIRAVELGAGEILLNSIDADGTGGGYDLELNRRILNAVPVPVIASGGAGTLDQIAEVLLSTASEEMPQGLAPEEAPGADAALIASLLHFGKTTIQEIKKYAEAKGVCVRW

SEQ ID NO: 47295 - DNA, 858 bp, Unknown
  Obtained from environmental sample
  misc_feature (1)..(858): n is a, c, g, or t
ttgaatggcaagcatgtgacggcggtggttgaacttaaagcgcggtttgacgaggagcggaatatctcctgggcgaacagattggaaaaagcgggcgttatcgtcgtgtacgggctttcacgcttaaaaatccattctaagatttcgatggttctgcgcagggaaaacgaccgtgtcaagcgttatgtgcatctttctaccggaaactacaatgacagaacggcaaaatattacgaagacatctgcctctttacctgccgtgaggatattgcctacgacgcggggcttatttttaatatgctcacgggttactcaaccgttcagacaatgacgaagctaataatcgcgcctaccgccttaaagcgccgtcttcttgaacttattgacagggaggcaaacagggcaaagcaaaaatatcccgcccgaataatggcaaaaatgaattctcttaccgatgttgacattataaaggccctttacaaagcgtctgaggcgggtgtaaaaatatccttgtgcgtccggggcatatgcactttaattcccggcataaaaggagtgtctgaaaacatccgcgtaatcagcgtcattgaccattatcttgaacattcaagaatttattactttaccaacgggggcgcggacgaactttactgcgccagcgccgatttgatgacgcgaaaccttgaccaccgcgtagaaattttattcccaatacaggatgaaaaactccgcgcggtattgtatgatattcttagcgattatttccgtgataactgtcagacttccgtattggacagcgatggcaaatggaaacaattggctcctcctgtggagaaaaactttccgttccgcccataa

SEQ ID NO: 47296 - protein, 285 aa, Unknown
  Obtained from environmental sample
  DOMAIN (1)...(280): Polyphosphate kinase
  misc_feature (1)..(285): Xaa is any amino acid
MNGKHVTAVVELKARFDEERNISWANRLEKAGVIVVYGLSRLKIHSKISMVLRRENDRVKRYVHLSTGNYNDRTAKYYEDICLFTCREDIAYDAGLIFNMLTGYSTVQTMTKLIIAPTALKRRLLELIDREANRAKQKYPARIMAKMNSLTDVDIIKALYKASEAGVKISLCVRGICTLIPGIKGVSENIRVISVIDHYLEHSRIYYFTNGGADELYCASADLMTRNLDHRVEILFPIQDEKLRAVLYDILSDYFRDNCQTSVLDSDGKWKQLAPPVEKNFPFRP

SEQ ID NO: 47297 - DNA, 1278 bp, Unknown
  Obtained from environmental sample
  misc_feature (1)..(1278): n is a, c, g, or t
atggacaaaactgaaacaaacaaaccagatttcccctacatcagccgcgatctttcctgggtggattttaacgaacgcgtaatgaacgaaggccttcgcaaagaaacgccccttcttgaaagattacggttcctttctatcgtatccaccaattttgacgaattttttatggtcagagttgcggcgttaaaacgtctgcaaaaagcggaagcgggcaggacggtcgatccttcagggttaacggctgatcagcagctaaaggctatttccaaaaaagtacattccattatgaataggcagtatgaatgtttacgtaacgaaatatttccggggcttgcaaaaaacggcttgtcccttctgcgtcccgattcatggtctgtcccgcagcttgattttttaaacgcgtattttttaaatcaaatatatcccgtattaacccccctgcgtttggaagatgacaaacccatgccatttattgaaagtcgctcaataaatgtcgtcttccacattgagcctgaaaatcctccgcctcagggtatggaaggcgtggcaagtgatgcgccgaaagagttaaaagtgattattcccattcccggtgttttaaacaggcttatctggctgccggaatttgaagcggcgagtaatggcggcggaaatgaaaagtttcaacttgctttactggatgatgtgattattacatggggcggttaccttttcccgggttttcgcgtcaaggaaagcatgttgtttaaagttaacagggacgcggatttctcggttgacgaacagagagacgaagattttgttgaagcgatggtagaagttctggagggcaggggaagatcggagtgtatcaggatggtttattctccgggaagcgcaatgttaaaggaagaccttgcacggcgttttttactggaaagcgattatttgtatgaaattgacgggccgattaatcctgttgattttatggaattgtccaatgtggcaagccttgaagatttggcggaaaagccatggaagattcataaatctgtagattttaacgaagagactcccatctgggacagaatcagtcagggcgatgtgatgctgcatttgccgtatcagtcttttgatcccgtggttaggttttttcaggaagcggcgacagaccctcaggtaatttcaatcaggactgcgctttacaggacgggcggcgctattccgggaatcggaattcattcgcattcatcggctttttccccggttgtacgcgccctggagcaggcggcttga

SEQ ID NO: 47298 - protein, 425 aa, Unknown
  Obtained from environmental sample
  DOMAIN (9)...(425): Polyphosphate kinase
  misc_feature (1)..(425): Xaa is any amino acid
MDKTETNKPDFPYISRDLSWVDFNERVMNEGLRKETPLLERLRFLSIVSTNFDEFFMVRVAALKRLQKAEAGRTVDPSGLTADQQLKAISKKVHSIMNRQYECLRNEIFPGLAKNGLSLLRPDSWSVPQLDFLNAYFLNQIYPVLTPLRLEDDKPMPFIESRSINVVFHIEPENPPPQGMEGVASDAPKELKVIIPIPGVLNRLIWLPEFEAASNGGGNEKFQLALLDDVIITWGGYLFPGFRVKESMLFKVNRDADFSVDEQRDEDFVEAMVEVLEGRGRSECIRMVYSPGSAMLKEDLARRFLLESDYLYEIDGPINPVDFMELSNVASLEDLAEKPWKIHKSVDFNEETPIWDRISQGDVMLHLPYQSFDPVVRFFQEAATDPQVISIRTALYRTGGAIPGIGIHSHSSAFSPVVRALEQAA

SEQ ID NO: 47299 - DNA, 597 bp, Unknown
  Obtained from environmental sample
  misc_feature (1)..(597): n is a, c, g, or t
atgcatctggaaacaatttactatagtttttttaacttaatttgcgttcttgtgttgtcgttaatcgtaatcgctcttttgataattttatttttaagacgcgccaatgaaaagaaaaaacttgaaaaattagtgcattttcaaaccagagaattagaaaaacgtttacaggaaacgacaactgaacttgaatttactaaatcagaaagcagatctaaatcggctttttatataaatataagcaatgaaataatgacgatactgaacagtatcgtaggttttttggtgacggcgttagatggcaatacttctcagaagaccagtgattctttgtctaacattcgcataaacactgaaagacttatgcagattgttaatgacatcatggatatttccaaaattgaatccggtgaaatgtccctgaaaaaaaatccctttgatatgcacgagctttttgccggctgcagaacattggtaatgcctaaagcggtggaaaaaggtctgttacttcacttttacgcagagcctagcgtaggaaaaaaacccggtcggcgatatcgcgaggcttcgtcaggtgtttgtaaatctgctttttaa

SEQ ID NO: 47300 - protein, 198 aa, Unknown
  Obtained from environmental sample
  DOMAIN (72)...(137): His Kinase A (phosphoacceptor) domain
  misc_feature (1)..(198): Xaa is any amino acid
MHLETIYYSFFNLICVLVLSLIVIALLIILFLRRANEKKKLEKLVHFQTRELEKRLQETTTELEFTKSESRSKSAFYINISNEIMTILNSIVGFLVTALDGNTSQKTSDSLSNIRINTERLMQIVNDIMDISKIESGEMSLKKNPFDMHELFAGCRTLVMPKAVEKGLLLHFYAEPSVGKKPGRRYREASSGVCKSAF

SEQ ID NO: 47301 - DNA, 999 bp, Unknown
  Obtained from environmental sample
  misc_feature (1)..(999): n is a, c, g, or t
atgaagaaatatttaaaacaagctgtaattttgttcattttattgtttatttgcatttcctgttccggtaaaaaatcgaaaacagccgtctatgaatttacggagatcaggcgcggaaatctggaacgtaccgtttcatccagcgggacaattaaccccgtcgccacggtaaaaattcttccgcgcatgagcggcaaagtggaagcggtcaatgttgattataacgacactgttaaaaaaggggatgttctcgcccggcttaataccgatatgctccgtcttcaaagggaccaacagcaggcatccgtacaaaaagcgcgcgccaattatgaattacagttgatcaattaccgtaatcaggaagccttggcaaaaagggagctgatttccgaatatgagttaaaaacgtcaaagacttcacttgataatcaaagggcagaccttgccgtcgcagaggcgaatttaagagttatagaaacggagataaatcaatacgcttttattacgtcccccattgacggcatcgtgcttgataaaaatattaacgtgggtgatacggtagtcgattcggcgaacaacaattcaggcagtatttttaccattgccgaaaatctgcgcgagatgcagatagaggcgatgataggtgagcttgacatagcctcgatattcaagggacaggaagttcgctttacgcttgagagtcttccaagcagaagattttcaggcattgtggaaacgctgaggatggttcccgtcgtgtctaacggcgtggtttcgtatacggttattatcaatgtggaaaatcggggcggctccctcctgccgggaatgacatgcgccgtggactttattgtggaacgaagcgaanacgcactccttgttcccaatgccgccctgcgttatcaaccaacaagccttagcgctgaacaaatttccgatttggtatttaacgcaagtcttgaaaatatgacggaagaacaaaaacaaaccgcactttga

SEQ ID NO: 47302 - protein, 332 aa, Unknown
  Obtained from environmental sample
  SIGNAL (1)...(23)
  DOMAIN (55)...(284): HlyD family secretion protein
  misc_feature (1)..(332): Xaa is any amino acid
MKKYLKQAVILFILLFICISCSGKKSKTAVYEFTEIRRGNLERTVSSSGTINPVATVKILPRMSGKVEAVNVDYNDTVKKGDVLARLNTDMLRLQRDQQQASVQKARANYELQLINYRNQEALAKRELISEYELKTSKTSLDNQRADLAVAEANLRVIETEINQYAFITSPIDGIVLDKNINVGDTVVDSANNNSGSIFTIAENLREMQIEAMIGELDIASIFKGQEVRFTLESLPSRRFSGIVETLRMVPVVSNGVVSYTVIINVENRGGSLLPGMTCAVDFIVERSEXALLVPNAALRYQPTSLSAEQISDLVFNASLENMTEEQKQTAL

SEQ ID NO: 47303 - DNA, 1137 bp, Unknown
  Obtained from environmental sample
  misc_feature (1)..(1137): n is a, c, g, or t
atgggaggtaatatgagagaacaaataataattagaaaagcggctttttttcttatagtcttgttcctgctttcaacgggactttatgccgagcccgaccgttcaccgtttggagccgacgcggttccggatctttatagcgcggctctttccgccgacggttttaccactactcagggcggggcgcccgtaagcgccattaatcccgcgcagggcggagatgccgacagaatggtatttgacgcaagctatcttgcaattacgaaaatgctgccaggcaatgaagatttagaaaatgatggatacatgcaatctatttccgtaggcgcgttattcccgacaaaagccggggttttcggcggctccataagatacataggcggtttcgcggaagatcaatttgtgtctttccccataaatccgacttttggaggcaacctgtttgccacaaaagaattgtatccgggaatgtcgcttgggcttggcataaacttcggctttggcgaatataagacattagacaaagactcaaatgaagaagtaaccaaaagcgcaaatacaatttcaggagatctcggtttcagatacaacatcggaaatcttgggtttttgcaaaattttacattcggcgtagtcctgcgcgggctgggtttaagttatttccccacatggcttacccctatgggaggtgtttcatttgagcttgtccatatacgaaaagaaaatcaaaacgatccttttgttttaggcgttgcgggcgatatcagctttccttctcttttctatcctatagagaactatataaacgtaatagttaaagccggagtaaaaatgacgatggcggaaataattaccctcaatgtgtcatggcccggaggcagtgggttaaacctttgggagataagcaggaatgaagatgaaaaagtcgctttccccgtctttccggcgattgggcttggcgtaaaaataatgcttccttccacgggagagcgtattatcggagggcatcttccttcggacggagacctgctaataagtacggccttaaaaccgttatacgaaggcgttaccgcggttggcggcggggtaagctgggtcgcccgaaatcccgataaaaaacctcccgtaataacataa

SEQ ID NO: 47304 - protein, 378 aa, Unknown
  Obtained from environmental sample
  misc_feature (1)..(378): Xaa is any amino acid
MGGNMREQIIIRKAAFFLIVLFLLSTGLYAEPDRSPFGADAVPDLYSAALSADGFTTTQGGAPVSAINPAQGGDADRMVFDASYLAITKMLPGNEDLENDGYMQSISVGALFPTKAGVFGGSIRYIGGFAEDQFVSFPINPTFGGNLFATKELYPGMSLGLGINFGFGEYKTLDKDSNEEVTKSANTISGDLGFRYNIGNLGFLQNFTFGVVLRGLGLSYFPTWLTPMGGVSFELVHIRKENQNDPFVLGVAGDISFPSLFYPIENYINVIVKAGVKMTMAEIITLNVSWPGGSGLNLWEISRNEDEKVAFPVFPAIGLGVKIMLPSTGERIIGGHLPSDGDLLISTALKPLYEGVTAVGGGVSWVARNPDKKPPVIT

SEQ ID NO: 47305 - DNA, 951 bp, Unknown
  Obtained from environmental sample
  misc_feature (1)..(951): n is a, c, g, or t
gtggattcatcattaggtgaaataaacagaaggtttgagaatctgtactatgaagctgaggatattgcgggtgaattccgctcttacagggataatttggcttttgatccgcagaggcttgaagaagtaaatgaacggctggcgctgttaggcaaactaaagaaaaagtacgccaaaaatgctgaaatacagggcagtgaagaagaggcaattctttcttacagaactcaggcggaagctgaaatggaagctctttccggcgcggaagaaaacagggaaaaactaaaaacgcagatcacggtaattgaaaaaaacattgtcgcaaaagccttagttttgcgtcaaaagaggacagatgcagcgttaatactgggtaaattaattacaggcatactcagaaaccttggaatgcagaatgcgaattttgaggtaagtattacgccaaaacaacaggacggacaggtgtcattcggcccttggggaacggaaaatgtggattttctcatttccgccaataaaggcgaaccgctcaaagaccttgcaaaaattgcttcaggcggcgagctttccagggttatgctggctataaaaacagcgcttttatccgagtcgcatggggaaactccgggtgttgaaacgcttgtttttgacgagatagatacgggtatcggaggcgaagttgccgtcaaagttggtgaatatttggcgcanattggtaaaattttacaaattttttgcgttacccatcttgcgagcatcgcggtgcgcgccggcaatcattttaaggtggaaaaacggacggaagatggcaggacttttacgggagtcggtccgttgagcgcggatggcagaagaaaagagattgccaggatgttgtcgggggacgggagcaaggcggctcttgcccatgccgatgatttaattgccaaatacggcaggaagggaggataa

SEQ ID NO: 47306 - protein, 316 aa, Unknown
  Obtained from environmental sample
  misc_feature (1)..(316): Xaa is any amino acid
MDSSLGEINRRFENLYYEAEDIAGEFRSYRDNLAFDPQRLEEVNERLALLGKLKKKYAKNAEIQGSEEEAILSYRTQAEAEMEALSGAEENREKLKTQITVIEKNIVAKALVLRQKRTDAALILGKLITGILRNLGMQNANFEVSITPKQQDGQVSFGPWGTENVDFLISANKGEPLKDLAKIASGGELSRVMLAIKTALLSESHGETPGVETLVFDEIDTGIGGEVAVKVGEYLAXIGKILQIFCVTHLASIAVRAGNHFKVEKRTEDGRTFTGVGPLSADGRRKEIARMLSGDGSKAALAHADDLIAKYGRKGG

SEQ ID NO: 47307 - DNA, 435 bp, Unknown
  Obtained from environmental sample
  misc_feature (1)..(435): n is a, c, g, or t
ttgccggcgcgcaccgcgatgctcgcaagatgggtaacgcaaaaaatttgtaaaattttaccaatntgcgccaaatattcaccaactttgacggcaacttcgcctccgatacccgtatctatctcgtcaaaaacaagcgtttcaacacccggagtttccccatgcgactcggataaaagcgctgtttttatagccagcataaccctggaaagctcgccgcctgaagcaatttttgcaaggtctttgagcggttcgcctttattggcggaaatgagaaaatccacattttccgttccccaagggccgaatgacacctgtccgtcctgttgttttggcgtaatacttacctcaaaattcgcattctgcattccaaggtttctgagtatgcctgtaattaatttacccagtattaacgctgcatctgtcctcttttga

SEQ ID NO: 47308 - protein, 144 aa, Unknown
  Obtained from environmental sample
  misc_feature (1)..(144): Xaa is any amino acid
MPARTAMLARWVTQKICKILPXCAKYSPTLTATSPPIPVSISSKTSVSTPGVSPCDSDKSAVFIASITLESSPPEAIFARSLSGSPLLAEMRKSTFSVPQGPNDTCPSCCFGVILTSKFAFCIPRFLSMPVINLPSINAASVLF

SEQ ID NO: 47309 - DNA, 1551 bp, Unknown
  Obtained from environmental sample
  misc_feature (1)..(1551): n is a, c, g, or t
atgccgccgaacttaacgaaaaaaaagattcaccgggttgtatttcgcagaaaggtatttgtaatttttacccttctcgtgcagatcctgtttattgttcttctgattgcgggaaccagcatatatatacgctacgcgaactgggttcttcacattatcagcatcattgtctgtatttatattattaacagacacgccaaggctgcgtataagatcacatggatttttctgattatgcttttccccatnttcggcggaatcctgtatgtccttttcttttacgcgtcaaaccccagaaaactcaagcgtttaatcagacgtaataccagagagagtcggagcgccttttatttgggcggggatagcctgccggatctcgacagggcatatccggaattcaagccccaggcgcattatttgcaggagtacgcgggcttccctgtgtatgccaataccaaaacgctgtactttgattcaggcgaggggttttacaagcgcgtgcttgaagaactggaaaaggcgaagcggtacatttttctggaattttttattctgaaagaaggaaaaatgcttaactccataatttcgatactggcgcgtaaagtgaaagagggtcttgacgtgcggcttatgtacgatgacctcggctgtttcatgtcccttcctgaaaacttcaggcagatactggaggaaagaggcataaagtgttatgtgttcaaccctttcaggccgattctttcctcgctgcaaaataaccgcgaccaccgcaagataatctctattgacggtaaagtggcgtttaccggcggccttaacctcgccgatgaatatataaacaccgttcatcgttttggccactggaaggacgcagccatcatgctggaaggcgagggcgcgtggtcgctgacgctgatctttttgcagatgtggaacattcagccggacatcaatgacagttatgagtcattctacccgtggaaggaaatcccctgcgatataaagtctgacgggtttgtacagccctacgcggacagccccattgacaaagaaaatgtcggcgaacacgtatatatccagatcattaacaaggcgaaaagatatgtgtatatcaacaccccctacctggtgctggacgacggcctgctttccgccctgacgcttgcggcaaaaagcggcgttgacgtgaggatcatcaccccgcaccgctgggacaaatggtttgtggcgatagtttcgcgttcctatttccaccagcttatttccgccggcgtaaagatctatgaatacagttccggatttaaccacggaaagacctttgtctgcgatgacgccattgccacggttggcaccacaaaccttgactttcgcagcctgtacctgcacttcgagaccggcgtccttatttaccgcggcgaaagcgtccagtcggtaaaaaaagattttctgcgcaccctcccctcctcacaggagataacgctgcgggaatgtacccataacgctttccaactggtcgccgctgatgttctaaggattttcgcgccattgatgtaa

SEQ ID NO: 47310 - protein, 516 aa, Unknown
  Obtained from environmental sample
  DOMAIN (430)...(457): Phospholipase D Active site motif
  misc_feature (1)..(516): Xaa is any amino acid
MPPNLTKKKIHRVVFRRKVFVIFTLLVQILFIVLLIAGTSIYIRYANWVLHIISIIVCIYIINRHAKAAYKITWIFLIMLFPXFGGILYVLFFYASNPRKLKRLIRRNTRESRSAFYLGGDSLPDLDRAYPEFKPQAHYLQEYAGFPVYANTKTLYFDSGEGFYKRVLEELEKAKRYIFLEFFILKEGKMLNSIISILARKVKEGLDVRLMYDDLGCFMSLPENFRQILEERGIKCYVFNPFRPILSSLQNNRDHRKIISIDGKVAFTGGLNLADEYINTVHRFGHWKDAAIMLEGEGAWSLTLIFLQMWNIQPDINDSYESFYPWKEIPCDIKSDGFVQPYADSPIDKENVGEHVYIQIINKAKRYVYINTPYLVLDDGLLSALTLAAKSGVDVRIITPHRWDKWFVAIVSRSYFHQLISAGVKIYEYSSGFNHGKTFVCDDAIATVGTTNLDFRSLYLHFETGVLIYRGESVQSVKKDFLRTLPSSQEITLRECTHNAFQLVAADVLRIFAPLM

SEQ ID NO: 47311 - DNA, 639 bp, Unknown
  Obtained from environmental sample
  misc_feature (1)..(639): n is a, c, g, or t
atgccgaaaaaaantatgatctgggtgcgctttacaccacggggcaagcagacccacgcttcgacccccgatcagggcgcaaacgcctttcttgccggctctgacctcgcgctgcggcttcattacgggctttccgaaaaattcaacgccagggacagcctttntgagccggaatactccactttccagccgaccaaaaaagaggccaatgtccccaatgtaaacaccattcccggcggtgatgttttctatgttgatatgcgcgtgcttccccgttattcgataaatgaagtggtagacgaaattgaagtcatcaaggaagaggttgcggcgaagcacaaggtttccattgattacagcattgtgcagtcaaacgaatcccctcccacttcggcggaagccccgttcatcaaatccctctcgcttgcgataaacgaagtctacggggagacagcccgtcccgtcggcataggcggcggcactgtggcgtcgttccttcgcaagataggaattgacagcgcggtttgggcgcggcttagcggtaccgcccatcagcccaacgaatatgcccttgtcaaagacatactgggcgatgcgaaggttatggcgctgttgatgtggggaacatccgacaaatag

SEQ ID NO: 47312 - protein, 212 aa, Unknown
  Obtained from environmental sample
  DOMAIN (4)...(114): Peptidase dimerisation domain
  misc_feature (1)..(212): Xaa is any amino acid
MPKKXMIWVRFTPRGKQTHASTPDQGANAFLAGSDLALRLHYGLSEKFNARDSLXEPEYSTFQPTKKEANVPNVNTIPGGDVFYVDMRVLPRYSINEVVDEIEVIKEEVAAKHKVSIDYSIVQSNESPPTSAEAPFIKSLSLAINEVYGETARPVGIGGGTVASFLRKIGIDSAVWARLSGTAHQPNEYALVKDILGDAKVMALLMWGTSDK

SEQ ID NO: 47313 - DNA, 336 bp, Unknown
  Obtained from environmental sample
  misc_feature (1)..(336): n is a, c, g, or t
atggagtacgccgacgacaggctgaatttacgggtacttactttggaacctaagctggaaaaaaagattgcggatcactcgcaggacagccctcttttggaagactgtacggaagcgattttaagcgcggtgtgcgggatgaaggaaaaaggtttcccgcctgtgatcctctgctcgcccaaagccaggtttcccgtaaaggaagcgaccagaaggcaattgccggaattggcggtgctttcttatcttgaaataccctcggatataagcgtggagccggtaggtgaaatacgcctcgaagaaagaggggaattgggaatggaaaagaggaggtaa

SEQ ID NO: 47314 - protein, 111 aa, Unknown
  Obtained from environmental sample
  misc_feature (1)..(111): Xaa is any amino acid
MEYADDRLNLRVLTLEPKLEKKIADHSQDSPLLEDCTEAILSAVCGMKEKGFPPVILCSPKARFPVKEATRRQLPELAVLSYLEIPSDISVEPVGEIRLEERGELGMEKRR

SEQ ID NO: 47315 - DNA, 585 bp, Unknown
  Obtained from environmental sample
  misc_feature (1)..(585): n is a, c, g, or t
gtgaaatacgcctcgaagaaagaggggaattgggaatggaaaagaggaggtaatatgtccgatccgacacgtgttccggaatatgacgagaatagccgctatacctatgccgactatctgggctgggaaggtctggagaggtatcagctcataaacggaaaagtttttcagatagctaccccgtcgatagtccatcaggctttgctgatggagttgtcaacgcagttcgccaactggcttaaaggcaaagcatgccgggtgttttccgccccgttggacgtgcgcctattcccaaaagaagataattctgacgacacgattgtacagcccgatttgcttgttgtatgcgataaagaaaagctcggtaaaggctttgtaaacggcccgccggatcttgtggccgagattgtttcgcctttaagtacatattgtgagtttttcctgaaatttcacgattatcttgaagccggagtaaaggaatactgggtgattgacccggacgaaaaaaggatactggttcatatttatgaaaacggccattttatcagctccgtccataaagggcatggcagtatatccggttaa

SEQ ID NO: 47316 - protein, 194 aa, Unknown
  Obtained from environmental sample
  DOMAIN (65)...(175): Protein of unknown function (DUF820)
  misc_feature (1)..(194): Xaa is any amino acid
MKYASKKEGNWEWKRGGNMSDPTRVPEYDENSRYTYADYLGWEGLERYQLINGKVFQIATPSIVHQALLMELSTQFANWLKGKACRVFSAPLDVRLFPKEDNSDDTIVQPDLLVVCDKEKLGKGFVNGPPDLVAEIVSPLSTYCEFFLKFHDYLEAGVKEYWVIDPDEKRILVHIYENGHFISSVHKGHGSISG

SEQ ID NO: 47317 - DNA, 753 bp, Unknown
  Obtained from environmental sample
  misc_feature (1)..(753): n is a, c, g, or t
gtggcaagcggcacccacctgatggaaaacatccgtaacttttgcataattgcccacatcgatcacggaaagtcaacgcttgccgacaggcttattcagaaaggccgccttgtagatgacagggattttcagaaccagattttagataacatggacattgaaagggagcgcggcatcaccattaaaagccaggcggtttgcattccctataccgcgcttgacggcattgaatacaagctcaacctggtggatactcccggccatgtggactttagctacgaggtttcaagagcgataaattcctgcgagggggctctactccttgttgacgcaacccagggcgtccaggcccagaccctttccaatatgtacctggccctggaacacaatctggaaatcattccggtaataaacaagattgatatgcaggcggctgacattcccgaagcaaaagcccagatagacaaggatctggggctggattcatccggggccgtccttgtttccgcaaaaacgggcgctggggtggacgagctatttgaggctattgtaaagcgcctaccctccccttctggcagagttgcttcaccgctcagggcgctaatttttgactgccactacgatccctataggggtgttgtaattcacctgcgcctgtttgacggggcgattaaaaaagggatgatgatccgttttatgtccaatggcgcggaatacgaagtagaaactgtcgtgttcaagtgctcgcgataa

SEQ ID NO: 47318 - protein, 250 aa, Unknown
  Obtained from environmental sample
  DOMAIN (23)...(189): Ras family
  misc_feature (1)..(250): Xaa is any amino acid
MASGTHLMENIRNFCIIAHIDHGKSTLADRLIQKGRLVDDRDFQNQILDNMDIERERGITIKSQAVCIPYTALDGIEYKLNLVDTPGHVDFSYEVSRAINSCEGALLLVDATQGVQAQTLSNMYLALEHNLEIIPVINKIDMQAADIPEAKAQIDKDLGLDSSGAVLVSAKTGAGVDELFEAIVKRLPSPSGRVASPLRALIFDCHYDPYRGVVIHLRLFDGAIKKGMMIRFMSNGAEYEVETVVFKCSR

SEQ ID NO: 47319 - DNA, 393 bp, Unknown
  Obtained from environmental sample
  misc_feature (1)..(393): n is a, c, g, or t
ttgcagagccgaaagttctacaaatattgtttgtccgccccaatcttcgggcataagtccaagctcagaaagctggctttttaccctgtcgggattcgcctcaggtttgtcaattttatttacggcgacaataatcggcactttcgcgtctttcgcgtgattgatagcctcgattgtttgcggcataacgccgtcgtcggcggctacaacaaggactacaatgtccgttatctgcgcgcctctcgccctcatgcgcgtaaacgcttcgtgaccgggtgtgtcaaggaaggtaagagcgccgtgcggagtttcaaccatgtacgcgccgatatgctgagtaatgccgccgaattcgcccgacactacgtccgatttacggatagcgtccaataa

SEQ ID NO: 47320 - protein, 130 aa, Unknown
  Obtained from environmental sample
  misc_feature (1)..(130): Xaa is any amino acid
MQSRKFYKYCLSAPIFGHKSKLRKLAFYPVGIRLRFVNFIYGDNNRHFRVFRVIDSLDCLRHNAVVGGYNKDYNVRYLRASRPHARKRFVTGCVKEGKSAVRSFNHVRADMLSNAAEFARHYVRFTDSVQ

SEQ ID NO: 47321 - DNA, 1695 bp, Unknown
  Obtained from environmental sample
  misc_feature (1)..(1695): n is a, c, g, or t
atgagatttaacgaatttaaccttcatcccgatttgcaaaaagggattgacgaagccggatatgttaactgcatgcccgttcaggaacaggtgctgacccacgcctttggcggtcaggatctgtatgtgcagtcccagacaggaacgggcaagaccgccgctttcctggttgtgattttccagcgaatcttgaccgaagaagctctaggggggaaaaaagccctgatcatggcccccaccagggagcttgccgtccagattgaagaagagtcaaacatgctgggcaaatatctccctataaaaaccggcagtttctacggcggggtagggtatacccagcaggaaaagctgttacgcgataaggtgcagattatggtcgggacgccgggccgcgttcttgacctgaacaaatcgggcaggatgaatctgatggagatcgcttttctggtgctggacgaggcggacaggatgttcgacatgggcttctacccggacttgcgcaaactgatcaaagtggtaccgccggcagaccgcagacagacaatgctgttcagcgcgacgctcaattcgtgggtgaagaacctcgcctgggaatacacgaagtcgccgtttgaaattgaaatcaagccggaaatagtcacggttgaggaagtcgaccagatactctaccatgttccctccgaagaaaagatgaagctgctcttgggaatcctcaagcgggaacagcccgaaagcgcgatcattttctgcaatacaaaacgctacacagagattatcgccaagcggctacgaatgaacggctacacctgtgagttcatcgtgggagatctgccccagtcacggcggctcaaagtgatcgacgatgttaaggccggcaaaataaaattcctggttgcgaccgatgtggccgcgcgcggtctggacatagaaggccttgcgatggtgattaactacgatctgccgaacgaggcggagaactacgtgcaccgcataggacgcaccgcgcgggcgggcaaaacaggcagggcgatcactttagccagcgagcaggacgtatacgaactgcccgcgatagaacggtatatcggcaagaagctcccctcggagatcgcctcggctgatctccacgccgaagactcgagcgcggggcagcagatacggactgagctttacgaagaccgccgcgaggagcgccacgtacacggcaagggaatgcgcccccatgtccaaaaaggccgtggcggccacgatgactccagagggaagaagccaagtcgggagtcgggagtcgggagtcgggagtcgggagtcggcaaaggtggtcgccatgaaggaaaagcccatgacgactccagaggcaggaagcagggaaaaatcccggcaggggaaaagcagaccagacaaaacgcggcgcaggacttatcccacttgagctttgaagaacggatggctttatataaacagaaataccataaaagcgataaacccgcccccccaaagcacccgcggcagataccgtcgaagaagccgcacagccaaaagctgcctaagcacgcaaagcaagagccgatacaggcccatgtggagcagaagcctcagcagatgccgcggcagataccggaacaaaagcccgagcagaaacctgtaaagaagggcatacttgcgaggctgctggaaaaattaagaaagaaatag

SEQ ID NO: 47322 - protein, 564 aa, Unknown
  Obtained from environmental sample
  DOMAIN (262)...(338): Helicase conserved C-terminal domain
  misc_feature (1)..(564): Xaa is any amino acid
MRFNEFNLHPDLQKGIDEAGYVNCMPVQEQVLTHAFGGQDLYVQSQTGTGKTAAFLVVIFQRILTEEALGGKKALIMAPTRELAVQIEEESNMLGKYLPIKTGSFYGGVGYTQQEKLLRDKVQIMVGTPGRVLDLNKSGRMNLMEIAFLVLDEADRMFDMGFYPDLRKLIKVVPPADRRQTMLFSATLNSWVKNLAWEYTKSPFEIEIKPEIVTVEEVDQILYHVPSEEKMKLLLGILKREQPESAIIFCNTKRYTEIIAKRLRMNGYTCEFIVGDLPQSRRLKVIDDVKAGKIKFLVATDVAARGLDIEGLAMVINYDLPNEAENYVHRIGRTARAGKTGRAITLASEQDVYELPAIERYIGKKLPSEIASADLHAEDSSAGQQIRTELYEDRREERHVHGKGMRPHVQKGRGGHDDSRGKKPSRESGVGSRESGVGKGGRHEGKAHDDSRGRKQGKIPAGEKQTRQNAAQDLSHLSFEERMALYKQKYHKSDKPAPPKHPRQIPSKKPHSQKLPKHAKQEPIQAHVEQKPQQMPRQIPEQKPEQKPVKKGILARLLEKLRKK

SEQ ID NO: 47323 - DNA, 366 bp, Unknown
  Obtained from environmental sample
  misc_feature (1)..(366): n is a, c, g, or t
atgcactttgagtttctgatagaagatcaatcgggagcaaaagcaatggaaatactccttccgaaactgcttggaaacaaagcctcatatagaattgcggtacgaaaagcgtatcccaaagctaaagacgctgttttgaatggatacaaaaatgatgagatttgcggtacatgggaacttcttgctgatgctgtttgtaaaggcgggaacaaggcattgaaaaaagagggatggcaagctatcggaaaacaaaagtctgtctgggcaaaagaaattactccaaatatgaatgttgactgtaacctttccccaagtttcaataatatgcgtttacaattacaaagtgttactggaaaagcgggataa

SEQ ID NO: 47324 - protein, 121 aa, Unknown
  Obtained from environmental sample
  misc_feature (1)..(121): Xaa is any amino acid
MHFEFLIEDQSGAKAMEILLPKLLGNKASYRIAVRKAYPKAKDAVLNGYKNDEICGTWELLADAVCKGGNKALKKEGWQAIGKQKSVWAKEITPNMNVDCNLSPSFNNMRLQLQSVTGKAG

SEQ ID NO: 47325 - DNA, 375 bp, Unknown
  Obtained from environmental sample
  misc_feature (1)..(375): n is a, c, g, or t
atgtctgatggaacattgaaagtgtttgcgtatttattgttgctttcagatccaacacttccgccgtttatatgtattgaagaacctgaaaatggtttataccataaactgctcgaaactcttgctcaacaaattcgggatcatgtcacaaacgagaaaaataaatcccaaattttcattactacgcatcagccgtattttgttgatgcgttggaacctaaagaagtttggatattggaaaaaaatgataacggattttcaaatattcgccgtacaagtgatgatccaatcattcaggaattggttaatgagggactgcccctggggggattatggtacagtgactatttcgaaggggtaaaaaatgcactttga

SEQ ID NO: 47326 - protein, 124 aa, Unknown
  Obtained from environmental sample
  misc_feature (1)..(124): Xaa is any amino acid
MSDGTLKVFAYLLLLSDPTLPPFICIEEPENGLYHKLLETLAQQIRDHVTNEKNKSQIFITTHQPYFVDALEPKEVWILEKNDNGFSNIRRTSDDPIIQELVNEGLPLGGLWYSDYFEGVKNAL

SEQ ID NO: 47327 - DNA, 888 bp, Unknown
  Obtained from environmental sample
  misc_feature (1)..(888): n is a, c, g, or t
atgctcactgcaatagcaagcgttggggcaatggcaaggcatttggaaatttctgctatgcagggcgcgggcagaagcccttttagaattctgctgcccattcttgtggcaggggcaattataaccgttcttctttttgcggttggagaaatcattttgcccgatgcaaaccatcgccgcttggaaattgcagaaacaagaattgaacagagaaaaaatccgagaataaaggaaaagagccaatttgtgttcataggttcagaccattcggactggtatttcaggcgttacagcggcataaccaaaaaaggcgaaaatgtttctttggttttgcaaaacaacggcaaacccgttgcccgttatgatgcaaaaaatatagaatggaacgattctaccgcttcttggattttgtttgacggctggtcaaggtatttttcgccagaaggaaatttgagtgcctataaattcaaagttatggacatagggaagcaaaccagcgttttgcctgaagacataataaacgaaaggcagagccacgaggaaatgaattcaaagcaaataagccgtagaattgaaattttgaggcgaagcggcgaagacacgaataaaatggaaactcagtggcactttaaattttctggtccaataacagcaatggtaactctgataattgccctttcgcttgctcatagatacagtcgtagcggtgctttgagccagcagtttggcataggcattattatgacttttagctattacattgttgtacgcgttggtttgcaaatgggtgagaatggaattttggaaccttggctaggcgcatggatagggcacataatttacggtgcggcagcactcgcgatgttgtttaagtcgtttaggttgtga

SEQ ID NO: 47328 - protein, 295 aa, Unknown
  Obtained from environmental sample
  DOMAIN (1)...(291): Predicted permease YjgP/YjgQ family
  misc_feature (1)..(295): Xaa is any amino acid
MLTAIASVGAMARHLEISAMQGAGRSPFRILLPILVAGAIITVLLFAVGEIILPDANHRRLEIAETRIEQRKNPRIKEKSQFVFIGSDHSDWYFRRYSGITKKGENVSLVLQNNGKPVARYDAKNIEWNDSTASWILFDGWSRYFSPEGNLSAYKFKVMDIGKQTSVLPEDIINERQSHEEMNSKQISRRIEILRRSGEDTNKMETQWHFKFSGPITAMVTLIIALSLAHRYSRSGALSQQFGIGIIMTFSYYIVVRVGLQMGENGILEPWLGAWIGHIIYGAAALAMLFKSFRL

SEQ ID NO: 47329 - DNA, 1173 bp, Unknown
  Obtained from environmental sample
  misc_feature (1)..(1173): n is a, c, g, or t
gtgaaaaaccaggagcttgtcattgacgtgctgatagcgaaaggcgatcctcctgtcgatgaactgccggaatatttacagctcaatccctatctcgaagtaaaaaatgtccaggatggggatgaaactattgattacaaggcaagatcggcgtttgtgatcgtaaaaaaaggccaggccctggcaaaacaaaaacacgccagagaagggaaagacggcaaaagcgtacgcggcgaagccattccctataaaaccgccaaagtagagattttaacaggcggcgaaaatacccaaatggaaggcagattccttgtttcctgcatcaacggccagtttataaaagccgggggggtgttaagcgtcagggattctttggtcataaaagggccggttggctacgccaccggaaacattattttcccgggcgatgtggtaattgaggggccggtttcggacggctttaagatttactcaggcggttccgtaaccatcaagcagacctttgacgttacagacgcggttacaaaaaatgatcttaatgtagcggggggaatcatcggcagaggccgggcaatagtcaaggtcggaggcagcctaaaaacaaagtttatagaaaactgccatatagccgcaagaaaaaaaataatcgttgactcggagatcataagctccagcgtatttacccttgaaaccctggaaatgggagacaagggaaaaattgtcggcggggaaattcacgccttaaaaggcattcgcgccggatcaatcggaaaggaaagcggcaaagccgccaggattcattgcggcatagactttatcctggaacaggaaagagaaaaaaataacagcatcttgaaaactctggcaatcaaagcacagcgtttaaaagtgatgatggatgatgtttatacagacgaaaggaaaaaagcaaaaattagaacctttctggagaaactcgccgaagagcaggagaaaacccaaaacaaggtatcggaacttcttggaaaacttaacacctacgaggacgccacggtggaagtaaaaggggaaatagagcccggcgtccttatcgaaatatgtcatgccgcgttgtttgtaacagaatcgctcaagaaagttaagatacggctggacaaggaaaccagaaaattgattatcgagaagacaagctag

SEQ ID NO: 47330 - protein, 390 aa, Unknown
  Obtained from environmental sample
  DOMAIN (1)...(387): Protein of unknown function (DUF342)
  misc_feature (1)..(390): Xaa is any amino acid
MKNQELVIDVLIAKGDPPVDELPEYLQLNPYLEVKNVQDGDETIDYKARSAFVIVKKGQALAKQKHAREGKDGKSVRGEAIPYKTAKVEILTGGENTQMEGRFLVSCINGQFIKAGGVLSVRDSLVIKGPVGYATGNIIFPGDVVIEGPVSDGFKIYSGGSVTIKQTFDVTDAVTKNDLNVAGGIIGRGRAIVKVGGSLKTKFIENCHIAARKKIIVDSEIISSSVFTLETLEMGDKGKIVGGEIHALKGIRAGSIGKESGKAARIHCGIDFILEQEREKNNSILKTLAIKAQRLKVMMDDVYTDERKKAKIRTFLEKLAEEQEKTQNKVSELLGKLNTYEDATVEVKGEIEPGVLIEICHAALFVTESLKKVKIRLDKETRKLIIEKTS

SEQ ID NO: 47331 - DNA, 519 bp, Unknown
  Obtained from environmental sample
  misc_feature (1)..(519): n is a, c, g, or t
atgtacagtgtaggtattgcctatcttttatggctaatctcgggctttggagcccttgggtttcaccgcttttatttggggaagattccgaccgggcttctctggatgatgaccggcggcctgggcatggttggctcaatttatgattttctcaccctacccggccaggttcgtgaggctaatatcagaaacgccctttatgaccgccatacccggcaaccgacagggcagcaggaaagctggcgttacgcaaacgacgcccaatttaaggtagtaaacggaaaacaggaaaaggaaagcccggaacgcgttatcctgaaactggcaaaagaaaacagcggcatcctaacggtaagtgaagtagccctgggcgcgaatatcacaatagacgaagcaaaaaaaatccttgatacccttgtagcaaagggctttgcagagctccgtgtccgcaaaagcggctctctggtttatgttatcccggatatggcggataaagatgagcccctggaagatttttaa

SEQ ID NO: 47332 - protein, 172 aa, Unknown
  Obtained from environmental sample
  DOMAIN (1)...(51): TM2 domain
  misc_feature (1)..(172): Xaa is any amino acid
MYSVGIAYLLWLISGFGALGFHRFYLGKIPTGLLWMMTGGLGMVGSIYDFLTLPGQVREANIRNALYDRHTRQPTGQQESWRYANDAQFKVVNGKQEKESPERVILKLAKENSGILTVSEVALGANITIDEAKKILDTLVAKGFAELRVRKSGSLVYVIPDMADKDEPLEDF

SEQ ID NO: 47333 - DNA, 459 bp, Unknown
  Obtained from environmental sample
  misc_feature (1)..(459): n is a, c, g, or t
atgaaagtcctggcaggcgaagcccgccgccgcggaaggatagtccggctggataaaaaaggctcaggcgaagaagcctcttcgtggatagtgnaaatcggttccctaaaaatgagcttttcggaaaatgaccttgttcccgtttccacagatgaccatggcgctatcaagcggaaaagcgcttcctgggcggtggatctcgcgcctacgaccccggtgcaggccgagctgcgtctgcggggcatgaggttcagcgacgcgatggaagcgcttggcaggcagcttgacgcggccattctgagcgggctgcaccaattcgcggtgattcacggtaagggcgaaggcatactccaaaaaggggttcacgacttcctaaaaaaagatcccagggtagcggatttctttttttcccgtccggaggtgggtgggttcggaaggacggaagtgatattaaaatga

SEQ ID NO: 47334 - protein, 152 aa, Unknown
  Obtained from environmental sample
  DOMAIN (77)...(152): Smr domain
  misc_feature (1)..(152): Xaa is any amino acid
MKVLAGEARRRGRIVRLDKKGSGEEASSWIVXIGSLKMSFSENDLVPVSTDDHGAIKRKSASWAVDLAPTTPVQAELRLRGMRFSDAMEALGRQLDAAILSGLHQFAVIHGKGEGILQKGVHDFLKKDPRVADFFFSRPEVGGFGRTEVILK

SEQ ID NO: 47335 - DNA, 1347 bp, Unknown
  Obtained from environmental sample
  misc_feature (1)..(1347): n is a, c, g, or t
gtggaagccgccgcgaagtttgcccagcgctatataaccggcaggcaaatgcccgacaaagccattgacgttatggatgaagcgggggccatgcgaaaacttgcgcctccttttgttccccccgaaattgcaggcatcgaagaagagatacggcagcttgcggaagaaaaaaacgcaatggtgtccttgcaggactatgagcgcgccgcggaggtgcgggacaaggtcagggagcttaggggacgccttgacgccatgctctccgcctgggaggagaattcccttggcgaaaggcttcgggtagacgaaagccatgtgcgccgtgttgtagccgagatcacaggcattcccctgacgcaccttgaagaaaaagaatccaaacgccttttgaatatcgaggaggagcttcaccgcggagtggtaggccaggatgacgcggtaagaagagtagcttccgcgatacgccgttcgcgcgtcggggtgtcttcgcccaagcgtccccttggttctttcatcttcctcggccctaccggcgtangcaaaaccctgcttgcgaagcggctttcggaatacctttttgaaactcccgattcacttgtgcgaattgacatgtccgactacatggaaaagcacaacgcctcaaggcttgtaggcgcaccgccaggttatattggttacgatgaaggcggctttcttaccgagcgcatcagacgtaacccctacagggtcattctttttgacgaaatggaaaaagcccacctggacgtgtttaaccttcttttgcaagtattggaggaaggggaactgaaagacagtctgggccatacggtaagtttcagaaatacagtcataataatgaccagcaacgcaggcgttcgggaaatttccagggattcacgtctgggtttcggaagcggctccgggatgatgagttttgaagaaatcgaatcttcggccatgtccgaattaaaaaggctctttaatccggaattcataaacagggttgacgatgttgtggtttttcatcctctggatatcaagcagattgaggccattttggatctgcaaattaaagagctttccgcacgtctctccgagcagggttattcgattctggtaatgcaggcggcaaggaagatcctgatagaaaaaggctgggatccgaaatacggcggcaggcctttgcgccgcgctcttcaaaaggagctggaagatcccctgtcgttaaaaattttggaaggcgattatcctccaggtacgatttttacggcttcgggaaaaagcggaaaaatcaccctcaaaacggaagcaggggtaatagccaatccaaaagcagttcttaaataa

SEQ ID NO: 47336 - protein, 448 aa, Unknown
  Obtained from environmental sample
  DOMAIN (170)...(335): ATPase family associated with various cellular activities (AAA)
  misc_feature (1)..(448): Xaa is any amino acid
MEAAAKFAQRYITGRQMPDKAIDVMDEAGAMRKLAPPFVPPEIAGIEEEIRQLAEEKNAMVSLQDYERAAEVRDKVRELRGRLDAMLSAWEENSLGERLRVDESHVRRVVAEITGIPLTHLEEKESKRLLNIEEELHRGVVGQDDAVRRVASAIRRSRVGVSSPKRPLGSFIFLGPTGVXKTLLAKRLSEYLFETPDSLVRIDMSDYMEKHNASRLVGAPPGYIGYDEGGFLTERIRRNPYRVILFDEMEKAHLDVFNLLLQVLEEGELKDSLGHTVSFRNTVIIMTSNAGVREISRDSRLGFGSGSGMMSFEEIESSAMSELKRLFNPEFINRVDDVVVFHPLDIKQIEAILDLQIKELSARLSEQGYSILVMQAARKILIEKGWDPKYGGRPLRRALQKELEDPLSLKILEGDYPPGTIFTASGKSGKITLKTEAGVIANPKAVLK
